United States Patent Application Publication US 2008/0168583 A1 - sequence listing, part 5

SEQ ID NO: 27177 - DNA, 364 bp, Gossypium hirsutum
  unsure (1)..(364): unsure at all n locations; Clone ID: LIB3147-059-Q1-K1-E4
cctgttggaataaaattgcagaagacgattaaatgatgttccaatatacaatgcaccttcaagatgttcaaaagctgttatctgtcgtttggttttgcgatggtattctctgtttctttatggtactttagactgatacacaggtatgggaatttttttggttaacttaaactgcatcgccaaataaataaatcttttccattcattnnnaaaaaaaaaaaaaaaaaaaaaaaaaaaaaaaaaaaaaaaaaaaaaaaaaaaaaaaaaaaaaaaaaaaaaaaaaaaaaaaaaaaaaaaaaaaaaaaaaaaaaaaaaaaaaaannaaaaaaggggggcccttttaaaagaaccaaattttttttcc

SEQ ID NO: 27178 - DNA, 346 bp, Gossypium hirsutum
  Clone ID: LIB3147-059-Q1-K1-E5
ctgtgccaacaggaacaagataaccattactgcagctctaggatttgatagtttcttggttgtgcgccatgggcctggtccttttaactccatccctaacttgaaagctgaaatggaagactctttagctgctggcatggacaaccttgtcctaacaaatacagatggacaacatagactgggttgttacttctgtaatgatgtgggtgccccaacagattcaacttcaaaccgcatgttggatcaccagtgcactgttacacgtccaggacttgcacctattgcttctgcactggcagtggagcttttaatgggcattttgcatcaccctaatgggatatttctg

SEQ ID NO: 27179 - DNA, 411 bp, Gossypium hirsutum
  Clone ID: LIB3147-059-Q1-K1-E6
cccgatgcaacaattgaggatgatgatgattatgtagaagaaaccgagacagaatcggacgcaaaagagagtgcagtcaaagatgagttgtaaattgcctgaaacctcggggacatgccttttgagttagttttaccctctgatgacaagccgaaggaactgtaacatgcattttcaagtctgaaacttggataaagggaaacattacaaacattacttagtagaatatatgtaaaccgtagtcgactgtgaaattaatctgtctgcaatttttgctcttttaatgcatcgcagtggttttaagattttcgcgtattaatatatggttgtttcgatcttattatctgtcaacatgttcaacttccattgcttaagattatatcttgtattggtatgcaatttcagtggatg

SEQ ID NO: 27180 - DNA, 66 bp, Gossypium hirsutum
  Clone ID: LIB3147-059-Q1-K1-E7
cccacgcgtccggaaaatagatgtaaattccctgtttctgataataaaattttcctctttgttagt

SEQ ID NO: 27181 - DNA, 374 bp, Gossypium hirsutum
  Clone ID: LIB3147-059-Q1-K1-E9
cccacgcgtccggattgtccaaggagtatagtcgggttttgatgaggaagcatagggcaaggcaggctgctgagactaatttgttgagaatgaaaaaggaggcaattgatgcgttgccggagaaacttaaggaggcggctatgataccagatttgaccccatttccggcaaatcgattgatggcgtctttgactccacctattgaagggtatattgagaaggttaaggaagcggctaagaaaagttccaccaagcagaagcttaggtgaaggcgaggtggaagtaggcaagggacaaacttcactcgtgaaactgatgatcaattacagctgcaatgtagtgtgattttctctgaatgcaatgagtcttaaaac

SEQ ID NO: 27182 - DNA, 62 bp, Gossypium hirsutum
  Clone ID: LIB3147-059-Q1-K1-F1
cgaatattttagtaacatcctaatcaggaaaaaggacaccttggattttggattaagttggc

SEQ ID NO: 27183 - DNA, 354 bp, Gossypium hirsutum
  Clone ID: LIB3147-059-Q1-K1-F11
cccacgcgtccgatggaatttcactcctcacgcgacacattgaagatgcatatgctactcgacaagaaaggctaagatgaatccttaatcatgcatttactcaagattctactttcatcagttctgaaatagcaatatgatgcctatgtgtatagaacttttggatgaatctgctttttcctttttaattaatttctttttgatttttacatttgtgttcttctaaaattaatatataatataggaatattcatacattgatgtatttctgaggaatttactagaagtttttgctaatcatatttaaaggtaagatcacaacttactcaccactgaatggtaattggatgtgtt

SEQ ID NO: 27184 - DNA, 165 bp, Gossypium hirsutum
  Clone ID: LIB3147-059-Q1-K1-F12
tcgcggacacctgtgcgcgacactcgtgtccagactcgtgcgcggacgcgtggccggacccgtgggcggacgcgtggggttcctttctttttgatactaataataatatattcccctcactttttcaacaataataataccattgattttgaaccaaataaaaat

SEQ ID NO: 27185 - DNA, 359 bp, Gossypium hirsutum
  unsure (1)..(359): unsure at all n locations; Clone ID: LIB3147-059-Q1-K1-F5
aaaaacataaagcttcacacgcaagagtacatcacacaatctgatgacgaaattattggaagatgtggggctaagccactggtactttggtttcncttttaattagttattgtaagcggagacatttggctctggatcgaaatctttagtgaatgattctttctgtcctttaagaccagcatcatcgcccccgtaagccgaaacgttaggtctcggttcaaaatcttcagcaaaagatgatgatttatctccttttagattagcgtcatcaccataagctgaaacgtttggccttgtttcgaactccttattaacaataatcttctctttttttaacatcattctttgcctgaggcact

SEQ ID NO: 27186 - DNA, 457 bp, Gossypium hirsutum
  Clone ID: LIB3147-059-Q1-K1-F6
cccacgcgtccgcccacgcgtccgggtttttggaatcggcaacaacataccatcaacaggttcaagccgctgtgcaagaaaatttgaagaagcatgagctgacaagacctcttgcaaccaaagagcttgagtggtttgcggcatctgctctattggctctacctattattattttgttcagaatattttcagcaattttctgcaaaaagacaaagaagcgtgttcgacatactaacgcaacccaccatggtcgtcgtaagggcaaaagggggcacacagacaagtagactgcgtgtatttaggttttggtctcttaatgttgggaaatattagaagggctctaagtgatcatgttgggtatggagcttgggtgtcgcaattggaagtatttaatcttctcttacctctcaagggtccttggtttaatattattaatattttttgggacggtgtggaa

SEQ ID NO: 27187 - DNA, 391 bp, Gossypium hirsutum
  Clone ID: LIB3147-059-Q1-K1-F7
cccacgcgtccggtgttctgtccactcattcccttcttgagcacacagatgtggccgtgctgttggacaatgaagcaatttacgacatatgccggagatccctcgatatcgagaggccaacttacaccaatttgaaccggctgatttctcaaaccatatcgtccttgacgacttctttaaggtttgatggagccattaatgtagacattacagagttccaaaccaatcttgtgccatatcctcggatccatttcatgctctcttcttatgcgcctgttatctcagctgagaaagcataccatgaacagatatcagttcctgagatcacaaacgctgtgtttgagccctcaagcatgatggccaagtgcgatccaaggcatggcaagtacat

SEQ ID NO: 27188 - DNA, 337 bp, Gossypium hirsutum
  unsure (1)..(337): unsure at all n locations; Clone ID: LIB3147-059-Q1-K1-F8
cccacgcgtccggcaaaagggagtgctgnaggaggcctaataggagtgatgcacatttatcagtggaagaagaggccaaattggaggagcagaccagggattactttgaccacacagcacctaaacgtcacactaagcctcaacgaagcgactattcttctaactacgtcgacgctcttgccgccgctgattccggtatccctgaatacctcgagtttcaacgtctagagaatgatccccagaaaatagtttacaatggaagtgaagtgagagaagaatttatggagactgaatattataaggatctcaattgcgtcgacaaacaccaccacacgac

SEQ ID NO: 27189 - DNA, 462 bp, Gossypium hirsutum
  Clone ID: LIB3147-059-Q1-K1-G11
gttttatctctgctctgcaaaattatcaaaatacaaaatgatcagtttttcgagtttcaagtttaccttgcttctgcctcttatggttggctgtcttatggcagcagcagcgagcaacttcaacaatgattttgacatcacatggggagacgggcgtggtaagattggcaacaatggagaggtcctcactctctccctcgataaatcttctggttctggtttccagtctaagaatgagtatctcttcggcaagattgatatgcagctcaagcttgtccctggaaactctgctggcactgtcactgcctactatctttcttcgaaaggatcaacatgggatgaaattgatttcgagttccttggaaatctaagtggtgatccttacattcttcacacaaatgtgttcagtcaaggcaagggtaacagagagcaacaattctatctctggtttgacccaactgc

SEQ ID NO: 27190 - DNA, 455 bp, Gossypium hirsutum
  unsure (1)..(455): unsure at all n locations; Clone ID: LIB3147-059-Q1-K1-G12
cccacgcgtccgggcagacacctcaaaggtttctggcaatgcccgttctatttttgtggcgccaactcccggtatgcctttaagtcagatttgggttcagaaatcttctcttgctgctgaacatgctgcagctggcaattttgatacagcaatgcgtttgctgagcagacaacttggcataagaaacttttctcctttgaaatccttgtttcttgatcttcacactggcagccatagctatcttcgtgcattttcatccgctccagttgtgtcgttggcagttgagaggggatggagtgagtctgctagtcctaatgttaggtgtccgccggccctggtattcaatttctctcagttggatgaaaagctgaaagctggttacaaggccacaacagctggaaaatntactgaggcactccggctcttcctcagcattcttcatactatttccgtga

SEQ ID NO: 27191 - DNA, 344 bp, Gossypium hirsutum
  unsure (1)..(344): unsure at all n locations; Clone ID: LIB3147-059-Q1-K1-G3
cggggccgacccacccgtccgcggacccgtgggaaaaaaaggccaaaggaagttgaagaggtggttcgatccatggcctgggttctacaggagagagttcaatcgcacttggcctttccttgttggcttcgccgtcaccggaaccatcatcaccaagttctcccttggtctaaccgaggaagatgctaagaactctccctttgctcagaagcacaagaggtgatccaactgatttcaaaagcctatatggttgcagtcccttggtatgagaggctcagctgttttcctttttcctttttccaatgaacaatgaanataacagaagacattagttctgagtacac

SEQ ID NO: 27192 - DNA, 467 bp, Gossypium hirsutum
  Clone ID: LIB3147-059-Q1-K1-G4
gattctttgatgtgtggcaccgatgctccaataagtgcttctcggatgttaggcgaaacttgtcaaacctggagggacctatatgctgataactcatagtgagccttcagcacggatgcctcatatgaacccggcaccgcgtgtgtgggatatatatttgtgcacactacacacacccggttttaagaggacggcaggttgttgatcatcaacagacgtacttctagccgcttccaatcaccgcaaagggattacttcctgctgactttgttttggaagaccccgattctcacttcatatatgtttgcaaaaagatggatgacacacagctaaggaacatacccacctatccattaacatctgagattttatagtgaaaagagtaaaatgaatgaagtgctgaggtagcattttatactgctttcagaagcttcaacatcacatttggattcataagcatttgtata

SEQ ID NO: 27193 - DNA, 120 bp, Gossypium hirsutum
  unsure (1)..(120): unsure at all n locations; Clone ID: LIB3147-059-Q1-K1-G5
cccacgcgnccgcccacgcgnccgnacnngaaagagancananaagnncnnnagcnggagcagngaaagagcaggaggcaagcanccngcgccnncccggagccggaggggcaagggcag

SEQ ID NO: 27194 - DNA, 356 bp, Gossypium hirsutum
  Clone ID: LIB3147-059-Q1-K1-G6
aaaaaaaaaaatttaattttaaaaaaatatttattaaatttattaaaaaaaaaaaaaaaaagaggaatttgggtacttttaaaagggcttaaaaaataaataaaattggggccgtcttttttaaagaatcaaacttaactaccccttcattccaactaaaaattttttttatagtgccactaaatttaaattaattgcccgttttttaaaaacgttttaattgaaaaaaccttgctttaaccaaattaaatctttttgaaaaaaatccccttttcccaatttgttttaaaacaaaaaagcccccaacaattcgcctttccaaaaattttcccacctttaatggtaaatggaacccc

SEQ ID NO: 27195 - DNA, 221 bp, Gossypium hirsutum
  unsure (1)..(221): unsure at all n locations; Clone ID: LIB3147-059-Q1-K1-G8
nntattnngnatncaatnaattatgatactaaggtaaataataagagatttgatcactgtctgtgcccccctagtgatcgtggaactgtaaattcctgtaagttggagatatgttttagtgtttctccataatagcagtggcattagttgttttttttaactactaaacatgtgttaacggtcaatgttgcaaaaagaaatgataagaaatagatttgttt

SEQ ID NO: 27196 - DNA, 462 bp, Gossypium hirsutum
  Clone ID: LIB3147-059-Q1-K1-H1
gggccgaccaacccgtccgggaatggccttcccgcccttttaataaaaaggggaaaaccagcaggaaagtccactttgtgaggagcctaattcgggaggttgctggtttcgctccatatgagaagaggataactgaacttctcaaagttgggaaagataagcgtgctttgaaggtggcaaagagaaagctaggcactcacaagcgggccaagaagaagcgtgaggagatgtctagcgttctccgcaagatgaagtcagctggaggtggggagaaaaagaagtgagttgccctgcggttgtgcttcaaagcaagtattgagtttttagatttgttaaattttctcttcagttttgttttgagagtttggagtactgattccgatagcattcttttacttgtgttggatatttaaaaaaaacatgaaatttgcatcacttaattgcaatctagattcgattatg

SEQ ID NO: 27197 - DNA, 411 bp, Gossypium hirsutum
  Clone ID: LIB3147-059-Q1-K1-H10
ggaaaatcatttgacaactatatttccggaggttcgactgaagaggtacttggagatgaggggagctgatggagggccttggaggaggttatgtgctctgcccgcattttgggtaggtttgttatatgacgaggtctcgctccagagtattctagacatgacagtggattggacatctgaagaaagagaaatgttgagaaacaaggttccaaagactggtcttaagacaccatttcgagatgggttgttgtggcacattgcggaagatgttctaaagttggccaaagatggtttggaaagaaagggcttcaaagaattcgggttcttgaatgaggtggcagaagtggttcgtacaggtgtaacaccaactgaaaagcttttggaattgtataatgggaagtggggacaatc

SEQ ID NO: 27198 - DNA, 304 bp, Gossypium hirsutum
  unsure (1)..(304): unsure at all n locations; Clone ID: LIB3147-059-Q1-K1-H11
tcacaagcaaanaaaccaaggcaatcgctttttttgcattcttagctcatgttcaaccaacgaccatcaggggccttggtggcagctctctcaatggaaccaagctcttggtgaagtcaactcgccagagtttcaaacccaaaaactacagggctggtgctgtggtagcaaagtatggtgataagagtatatactttgatttggaggatattggcaacacaactgggcaatgggacttgtatggatccgatgcaccttcaccgtacaacccactccaaagcaagttctttgagacatttgcagc

SEQ ID NO: 27199 - DNA, 251 bp, Gossypium hirsutum
  Clone ID: LIB3147-059-Q1-K1-H12
cccacacatacgcccacgcgtttgggtgctttgattcaggtcccattgcgggcgatgaagtgaatatagtgtgtccggtccgtgcgaacactgcttgacagtgacagcaaccaaatcattttgattaagctctacaactgtatatgtgtctatgtgatccgcagctaattttgaaggctcatgtcccataatcatatgataattgtgaagtacagtacacatatgtgaaattgagtgcattcactactgtt

SEQ ID NO: 27200 - DNA, 442 bp, Gossypium hirsutum
  unsure (1)..(442): unsure at all n locations; Clone ID: LIB3147-059-Q1-K1-H3
gtccgatttaataatcaggcttggggattgggttttgaacctttgggccttaagtttttaatatataccaaagtacctgccatacttaacgtgcacatgtgctgacttggacataagtgccaatggaacaggtttttgccgagtacagtcggcttctggctactgagttggagaaacanagacaaaactatgaatctttacttgctgaagccaaaggcaaaagagatagtaccattgctgaagcagtggagaaggctgtgacatccgagatgcaagacatccaaagcaaactggataagtgtacagaggaaaaaaatgctcttgctgagatcaaccgtaaactcataaaagaccaacaagtttggcacgtaaaggtcaaggaaatcgaagagagggaagcctctgaatcgaggttaatggatgagaagatacttgatctgga

SEQ ID NO: 27201 - DNA, 350 bp, Gossypium hirsutum
  Clone ID: LIB3147-059-Q1-K1-H4
cccacgcgtccggcctccgtagaagaacactacacgagtggttttgaactgcaaaaggagatcgatttcgaagccttttcaccatgagagctaagtggaagaagaagcgtatgaggaggttgaagaggaagagaagaaagatgaggcaaagatctaagtagtctaattttatcttaaagctagcaattcggtctatgtttctttagattttctgttgtttgatggatactttactttaaaaggatttaagttatctttatcgaaaccttttgaatattctggaaacatgttattgtgttttctattaaaagcttatggctttggatgttaattttctgatattttttggc

SEQ ID NO: 27202 - DNA, 471 bp, Gossypium hirsutum
  Clone ID: LIB3147-059-Q1-K1-H5
taaaaagcataaaaaaaaaaaaaaacacatcttaaccaaacttcaaacaaaagggaattttcttgtcataattttctgaggaattcatcgatggcaaccaaagtgtatattgtatactattccatgtatggacatgtggaaaaactagcagaggagataaagaaaggggcggcatctgttgaaggtgttgaagcgaaactatggcaggtccctgagactctgtcagatgagattcttggaaagatgagtgcaccaccaaaaagtgatgtaccgatcattacaccacatgaccttcctgaggctgatgggtttatttttggcttcccaacaagatttggcatgatgtctgcccaattcaaagcatttatggatgcaactggtggtctatggagaactcagcaacttgctggaaaacctgctgggatattctatagcactggatctcaaggtggcggacaagaaactacaccg

SEQ ID NO: 27203 - DNA, 112 bp, Gossypium hirsutum
  Clone ID: LIB3147-059-Q1-K1-H6
cagaaaccaaggcaatggcttttcttgcaatcttagctggtgttcaaccaacgaccatcagggaccttggtggcagctctctcaaaggaaccaatctcttaatgaatgcaac

SEQ ID NO: 27204 - DNA, 347 bp, Gossypium hirsutum
  Clone ID: LIB3147-059-Q1-K1-H7
cttcatttcaaactacctgcttttagctcttcttttgaatcaatctccatttttggttttgcgtaaagtgaaaggatgttaggcattttcaagaaagaattaatgaatcctccaaaggagctgcatagcccagcttcactcacttcatcaaacaagcccaagcttcccaatcaaatcatcaaccatttcctttcttcaaatcccaacaatgctttctcaatggggttcggatcctcagcttgctttgcttatgctcccacagagaatcgtttccccagtcatcaaaggttgttttgtggagtggatgaaatatactgcatattcttgggggatttgaataatttgag

SEQ ID NO: 27205 - DNA, 466 bp, Gossypium hirsutum
  Clone ID: LIB3147-059-Q1-K1-H8
cggcaagtgattaatccaccttcgaacacttgggaacatttctggtgtttagggtttggttacagggagagatgggaggaggccatggagagagtacaacttacaaaggtctaactttgcatcatccaaagcgatggcatgttgtcaccggcaaaggcttgtgtgccgttatgtggttttgggtcttgtacagggctaagcaagatggtcctgttgtattgggttggcgacacccttgggagggccatgatgatcattctcacggtcatggagataagcattaggcacaggaagattatctgattacaggcttgctgttgcagatgttgttccaaatgtcttttgttaatttcttcggtttcaataaagtgattgtgaaggaagattgtaagcataatgggatgaaatatgaaactccatttcaacattatgaaacttcatttcaacatgaatggttttgcttgtt

SEQ ID NO: 27206 - DNA, 336 bp, Gossypium hirsutum
  Clone ID: LIB3147-059-Q1-K1-H9
cccacgcgtccgtcggctggtcggcagcatcgtgcggcatggagaggatgcgttgcgcaagtccaaaccgaaatagacacttcgcctctctgggagggagtgctgtcgctagaataatcatcctgtttaagcagggagggcaaccaaataaggcattaggtagcttaattgccactgatcattaaataattgcccttcccaccgatctgttgtcaatcatcctgtgttctgtttttgttttgtaatgttcacaatctttatggcttgcttcctgtgggtggtctattatgtgtcttttcattaataaatgcaaaatattataaaatcttttgtggt

SEQ ID NO: 27207 - DNA, 451 bp, Gossypium hirsutum
  Clone ID: LIB3147-060-Q1-K1-A1
gttgacacaattcttagaagatgtgatttatcaacgaagatgcatcacttccataattggtttaacaaggatacaacagctgggacgccattggctgagttagaagacacaactccagcttctctttcagagtgtttgaaggcctttttcggatttattttgggaagtgacagttcgctgcctgagtttgaacaaatgcaagttccaaagttgcgttctgatgcgtgtatacaggtagctaagtcattagcagacacttatgagcttatttacaatgcaatcatggatcccaaaaacaaatacccagatcccaaatcactggcaaggcatcctccagatcaaataagaaccattttgggaatatgaagctgtaaaccatatttgcttttaaaatggttgtaaagaaacagagtcatgctttggagtaatggaaacttttggtggcttttta

SEQ ID NO: 27208 - DNA, 276 bp, Gossypium hirsutum
  Clone ID: LIB3147-060-Q1-K1-A10
cccacgcatactactgtttaatataaagctttatatgtgagaaactgaccttctactgttgcggcttctgaaattgagccggagttctcgaattttggaacaatgattcctgactgcgtgtttatccctaaccgcaaagatatcgtccttgtttgacatacttttgttagaacccgaaaacattcttacttttcacaatacaatcttgcatgtcctatacaatatgctgtaacgcaagtttacatatataaacgcagaccaaatatcactgttact

SEQ ID NO: 27209 - DNA, 112 bp, Gossypium hirsutum
  Clone ID: LIB3147-060-Q1-K1-A11
cccacgcgtcctaaaaaaaaaaaaaaaatatataaccaccacaaaccaacaaccaaaaccagcaacataaaaaaacaaaaaaagcccaaacaaaccccaacaccaaaccaaa

SEQ ID NO: 27210 - DNA, 470 bp, Gossypium hirsutum
  Clone ID: LIB3147-060-Q1-K1-A12
aataaccgggccgacgcgacgcgtccgcccacgcgtccggctcgatggcttcgatgttcttggaaacatcaaagttctgatggcaacgaacatgccagacacactagacgctgcattattacgtcccggacgattagatcgtaaggttgagtttggtcttcctgatttagagtctcggacacagatattcaaaatccatacaagaacaatgaattgtgaacgcgatattagatcagagcttttagcccgactttgcccaaattccacgggagctgatataagaagtgtgtgtactgaggctggaatgtacgctattcgggctcgaaaaaaaacagtgacggaaaaagacttccttgatgcagtgaacaaagtcataaagggatatcaaaagttcagtgcaacacctaaatacatggtttacaatttaacccaaaaactggtgagaccattttgatttgcagttcctgaac

SEQ ID NO: 27211 - DNA, 190 bp, Gossypium hirsutum
  Clone ID: LIB3147-060-Q1-K1-A2
cccacgcgtccgctggtttaagagaaatgtttacgtctatggatactgataacagtggtgcagtcacatttgatgaactcaaagctggtttgcgaagatacggctctaccttgaaagatacagagataagggaccttatggatgcagctgatgtcgataatagtgggaccattgattatggagaattcat

SEQ ID NO: 27212 - DNA, 430 bp, Gossypium hirsutum
  Clone ID: LIB3147-060-Q1-K1-A3
cgaaaatgtcagaaagctcatcaaaaattcctaatgttaccaccaaggatcccccatgcatgagcacaatcaaagcccatgataaagaagagcaacaaattgaagctcagcaaacgagccacaaagagattacacgctacttcgaggaagaagaacctgaccagattgaagctcgaagcgttgatattgttacgacccgacctgacctgtcagatcgtgtcacaatgaacacgatgatcagccctctgaagggagagaatatttcttatggaagtcttccgaggcaaccggtttgcaaggccgataaatacggcgactgtataaagccagtcggtgaagacaaccgcccttgcacggtctataaccgatgcaagcgcgacaatcattgaaccatttggcttttcttggattaaatgggcgggattttact

SEQ ID NO: 27213 - DNA, 369 bp, Gossypium hirsutum
  Clone ID: LIB3147-060-Q1-K1-A5
caacaggagagcaccttgaattcgagctgttttgatgaaaagatctacttgaagcgaaagggccctaatgtatcaaccgtccgcatgagacctttaatcagcccggtgttgtaaattaaatatgtagctcatagtgtaaatttgatttgagaatattttgtaaagctgatatcagattttgtcacatcagacaccgtaatcttttctttattattgtaaggctgagtttctagctttggttgtgaacaaatcaaatgagtcacgtgctcagaatttcatttgggacaggagatgcgtatacttcattattacaaacaacaacaattgaatttttaaaaaaaaaaaaaaagggcgggcgttcgcgcccac

SEQ ID NO: 27214 - DNA, 215 bp, Gossypium hirsutum
  unsure (1)..(215): unsure at all n locations; Clone ID: LIB3147-060-Q1-K1-A6
ggtagatgtgctgacgaatgatcctcatgttattgggttaacctgctggagttcccttctggatgcaaatgggcagtctccatatgcctatgctatgatgagaaacaaccattcttacaacaaattggtggctggtaaatatgctgacagaaagaatggtcaattttctttgactattggtgttgaggatcagcactcangagtgtctgcagtgc

SEQ ID NO: 27215 - DNA, 275 bp, Gossypium hirsutum
  Clone ID: LIB3147-060-Q1-K1-A8
cccacgcgtccgcccactcgtccgattttttctaataaccaggcaaacgccgatacttagagtaataccaaggatgctaatgatcctgatcaaacagaccaagtggctttgatacgctattcgcaacaatcggattttctgcgcgacataataaagggttccatgcgtgcccaaaggcgtaaaacaattacttgggagctgtttcaaacaaatgtacattccccccttttttttgacagagtttacaaaccactctttttttcttttaaatttct

SEQ ID NO: 27216 - DNA, 235 bp, Gossypium hirsutum
  Clone ID: LIB3147-060-Q1-K1-A9
cccacgcgtccgtctccccccccccttttttttggcttgtatttttgttctaggaggcaggcatatggtggtataagagcgcagccttgatgtcaaacactggaaattgttgagttagcatgcagcactatatttaattggaaaaaaaaaaaaaaaaaaaaaaaaaaaaaaaaaaaaaaaaaaaaaaaaaataaaaaaaaaaaaaaaaaaatggctacatattataaaagtacaa

SEQ ID NO: 27217 - DNA, 282 bp, Gossypium hirsutum
  Clone ID: LIB3147-060-Q1-K1-B1
cccacgcgtccggttcaatggttttgttgacctagatacataaatattccatttctctaatgtaaacttcaacctcatcttttaaaaaaaaaaaaaaaaaaaaaaaaaaaaaaaaaaaaaaaaaaaaaaaaaaaaaaaaaaaaaaaaaaaaaaaagggcggccataaaaaaaaaaacaaacttaaagacgcaagcatacaaaataatacctcttttatagtgccacctaaaaaaaatccactggccgtattaaaacaacgtaattaataaaaaaacccgggg

SEQ ID NO: 27218 - DNA, 235 bp, Gossypium hirsutum
  Clone ID: LIB3147-060-Q1-K1-B10
accacgcgtccggaagtggcctactttcatttagcaccctcaaatgatagcgtccgctctggcactattaatacacaataccacttgagatctttgcaagaacgtatatggagaatgcatctacccagacgatgatatgacaaatatatactattgaggaacaaaaattgcacgttcaaaaaaccggtttacaaatgggatacaagaccattgtaccattctttcaaacaaacat

SEQ ID NO: 27219 - DNA, 447 bp, Gossypium hirsutum
  Clone ID: LIB3147-060-Q1-K1-B11
aaccatgttacttaccttatcgagcagatctaggctcaattggttgttattgctcatgagggggatcccatagagttggtagtgtggcttccggctttgtgcaggaaaatggaggtcccatattgcattgttaagggaaaatcacgtttgggatcgattgtccacaagaaaactgcttccgtcttgtgtttgaccacggttaagaaccggataagctggaattcagcaaagtactcgaggcaatcaaggcaaacttcaatgacaagtacgacgagtacaggaagaagtggggtggcggcatcatgggctccaagtcacaagcccgaaccaaagcgaaggagaagcttcttgcaaaggaagctgcacagaggatgacataaaagaattaatagaccttttgccgcaattcgtgtttttgataaatagtcttttgtagtaaggtacgat

SEQ ID NO: 27220 - DNA, 443 bp, Gossypium hirsutum
  Clone ID: LIB3147-060-Q1-K1-B12
gtcctcgataatgaagccttgtatgatatttttttcaggacacttaagcttaccactcccgactttgttgatctgaatcacctgatatctgcaacaatgtctggggttacatgctgcttacgattccctggtcagctcaactctgatctaaggaaacttgctgtgaatctcatcccatttcctcggcttcatttcttcatggtgcttttgctccactcacttcaagaggctcccaacagtacagagccctgacagttcctgagctaactcagcaaatgtgggatgcaaagaacatgatgtgtgcagctgatccacgacacggcagatacttgactgcatcagctatgttccgtggcaaaatgagcacttacgaagtggatgagcaaatgttgaatgttcagaacacaaactcttcctacttttgtgagtggattcctaacaat

SEQ ID NO: 27221 - DNA, 342 bp, Gossypium hirsutum
  Clone ID: LIB3147-060-Q1-K1-B2
ctggaaaacagtttgagatagttctaaattttcttgggctggttgagaagttcttctatctgtcaggcaaatatgacatggagctcactgttggtgatgccgctatggagaactctctgttagtagctatcggacatattgagttagatctaccagaagcacccgagaaggcacccctgccttcttctagcccgtagatccatactcaagatatggacccaaagcagagataacacacatcttcagggctcctgaaaagcgtccacctcaggagctttcccttgctttcctggggcttactatcttgccattgcttggatttttgattgggctattacgtct

SEQ ID NO: 27222 - DNA, 446 bp, Gossypium hirsutum
  Clone ID: LIB3147-060-Q1-K1-B3
cccacgcgtccgttcaacttgctgctcgtgttattgttgccatcgagaaccctcaggacatcattgtccaatctgcaaggccatatggtcagagagctgtactgaagtttgcacaatacactggttgtcatgcaattgctggaaggcacactcctggtaccttcactaaccagctccagacatcgttcagtgagcctcgtcttcttatcctcacagatcccaggactgaccaccagcccatcaaggaagcagctctcggaaacattccaaccattgctttttgtgatactgactcaccaatgcgatatgttgacattggtatccctgccaataacaaaggaaagcacagcattggttgccttttctggctgttagctatgatggttcttcagatgcctggaacaattgctcccggacagaaatgggatgtcatgggtgatctattc

SEQ ID NO: 27223 - DNA, 360 bp, Gossypium hirsutum
  Clone ID: LIB3147-060-Q1-K1-B4
cccacgcgtccgcttatttaagatcattatgccttaatttattgatttgaactgagatgtgtcaggtagtcaaaagcatgaggactcaaatgctacatctataagaaattgaaaagggaatgtttgtctataggtgtgtgtgatactgatgtattttgccattttccccctccttttcggatgacaacaaatgtttacacaaaaaaactgaacatacatacggagaatttcaagactgccggcttcacatgtttcggattctttttttccttttaacagaagtcttgaattggagttgtttttctattacatgatgatattttagttagagctggtaaataccaaagcatcatacccctg

SEQ ID NO: 27224 - DNA, 280 bp, Gossypium hirsutum
  Clone ID: LIB3147-060-Q1-K1-B5
cttgtttcttattttatctcattgtccttcgttagatatttttctcgactcatatttggtgttgaatgtttggtattggaatcatgtacactccctgtagagaaaatagaaagatctcgctttcggttataggttgagtttatagatttgattctctctgtttttttcagacctgtggaaatttttattgtaataaataatataatgtacatgtcggaaaaaaaaaaaaaaaaaaaaaaaaaaaaaaaaaaaaaaaaaaaataaaaaaaaaataaacaaa

SEQ ID NO: 27225 - DNA, 208 bp, Gossypium hirsutum
  Clone ID: LIB3147-060-Q1-K1-B6
ctcctatggcgcctgatgaatcaaaccattttcagtcttttgcctgagtttgccactaaggagttttttgcagctttaggttttgctgtactatgactcgaattacactacatgttacataaactcttccggaaatagtgcaatgcttgttgccaagattcctaaaacaatcccaagcgcctccatggttccctgatatctttctatt

SEQ ID NO: 27226 - DNA, 437 bp, Gossypium hirsutum
  Clone ID: LIB3147-060-Q1-K1-B7
ctctgcgaaaatttcttaatttcctcgctatctcaaacagattttacctcttatctccgggggatctcatctatggctcgtaccaagcaaacagctaggaaatcaaccggaggaaaagctccgaggaagcagctagctacaaaggccgcgcgtaagtccgctccggcgaccggtggagtgaagaagcctcaccgtttcaggccaggaactgttgctttgagagagatccgtaagtatcagaagagcactgaactgttgatcaggaagcttcctttccagaggttggtgagggaaatcgcgcaagatttcaagaccgatctgaggttccaaagcagcgccgtcgctgctcttcaagaagcggcggaggcttatcttgtcggactgtttgaagacactaatttgtgtgcaattcatgctaagagagtaacaatcatgcc

SEQ ID NO: 27227 - DNA, 105 bp, Gossypium hirsutum
  Clone ID: LIB3147-060-Q1-K1-B8
cccacgcgtccgtaaaataaaaaaaaaatttattaaacaaaaaaaaaacaaaacccaaggcgaacgttttaaaaaagccaaggtaacatacaccttcctcgcggc

SEQ ID NO: 27228 - DNA, 444 bp, Gossypium hirsutum
  Clone ID: LIB3147-060-Q1-K1-B9
cttggcaccgctgcctattgggtttgctgttttcctggtccacttggcaacaattcccgggctggaacaggcattaatccagctaggatcctcggcgccgctcttatttacaacaaggaccaagcatgggatgaccattggatattctgggtaggacctttcattggagcagccttagcagctttgtaccaccaaatagtgataagtccatccctttcaagtccaagtaagggagtgagggaggaaacaggtgcttgataagtgccagtctatgatgaagtgttctccattatcattttctcttccaaggagtgagtttgatgtttatttttcatctatgtaattaatggtcggttaaggaacgaagcatgggcacctatattgtactagtggtggttccatatcaatggttttctctaatatgaattgaaatgatgcacgaca

SEQ ID NO: 27229 - DNA, 424 bp, Gossypium hirsutum
  Clone ID: LIB3147-060-Q1-K1-C10
gaaagattattcaaataatctgatcgactacctctcgatcactgaccttctatcaatactcgcacatctttatttccaagggaagatcccagttactttaacatatgttcaggcctctattctactctgcatgggcttgcagaaccgggatgtctcttatgttgaggaacaattgaagaaagcactagagaggcagcagatactacatattttaagaaggttatgataaagctgtacaagtatttgtatggggttgcatcaaaggagattgaatctgctttacctcgactaaaagaaagagtgttggaacctcatagtatctctgtggatgaggatctcaatgatgctgcaaagaaagttgaggaggaaatgaaaggcaagtcggatggtgtgttaaatctgcagttactccaacaatttgcga

SEQ ID NO: 27230 - DNA, 450 bp, Gossypium hirsutum
  Clone ID: LIB3147-060-Q1-K1-C11
cccacgcgtccggttgtatgcaactcgtttttaagcccgagcaatttgatgtcatggtgggccctaatctttatggaaatctggttgcaaatacagcagccggtattgctggaggcaccggtgtcatgccaggaggcaatgtgggagctgaatatgccgtgttcgagcaaggtgcttcagccggaaatgttggaaaagaaaagatatatgagcaaaagacggcaaatcccgtggcattgcttctctcctctgccatgatgttgagacatctccagtttccttcatttgccgatcgactcgaaagtgcagtgaaacgtgtaatctcagagggccagtatcgaactaaagatctcggtgggcaaagcagtacacaggaagttgttgatgccgttattgctaaactagattgattactcgtcttcttcttcactatgggttttccacagtaag

SEQ ID NO: 27231 - DNA, 362 bp, Gossypium hirsutum
  Clone ID: LIB3147-060-Q1-K1-C2
gttgaaggaaaagattgatgctcgcaacagcctgtagacttatgtttacaacatgaaaaacgagattagcgacaaggacaagcttgctgacaagcttgaatccgacgagaaggagaaagttgaaacggccgtgaaagaagcgctcgagtggctagatgacaaccagaatgccgaaaaggaagattttgaggagaagctcaaggaagttgaagctgtttgcaaccctatcatcacagctgtatatcaaagatccggcggaggtcctggcggtgctgcgtcaaatgaagaagaggatgattcacatgatgaactctaaaacaaaaaacttggctactgccgctgaaaagtgattgagtttatta

SEQ ID NO: 27232 - DNA, 437 bp, Gossypium hirsutum
  Clone ID: LIB3147-060-Q1-K1-C3
cactctttttctcatcttcagatctcatctccttccctaaggttaaccaatggcaacagtgcgaaatctgaaaatcaagacatccacttgcaaacgaattcttaaagagcttcactcatatgagaaggaagttgaaagagaagctgctaaaacagctgacatgaaagagaaaggagctgacccttatgacctaaagcaacaaaaatgtgctggctgaatcaaggatgatggtccctgattgtcacaagcggctagaggcttcattagctgaccttaaagcaactttggctgaattggaggaagcgaatgagaaggaaggccctgaattcgaagatgctcgcagcaccatcatcgaagttgaaaaagttgttcaaacaacagatgcttagtgacagcttcttttaagtggctgtagttaccataaaaaaaattgacat

SEQ ID NO: 27233 - DNA, 452 bp, Gossypium hirsutum
  unsure (1)..(452): unsure at all n locations; Clone ID: LIB3147-060-Q1-K1-C4
cccacgcgtccggggggtttgtaatggtaatatctacggtaattgcattgtacctatcggtccatcatatcgtccttgtactgtgtatacacgatgcaagcgaggagttcgataatcattttttcaagattgtcaaatttatttttagcttatttcatctatgttttgagtgagcaatttcatatgttgcttttcttagtcttgttattataattctcataataatctatacacttacccnnnanaaaaaaaaaaaaaaaaaaaaaaaaaaaaaaaaaaaaaaaaaaaaaaaaaaaaaaaaaaaaaaaannaaaaaaaaaaaaaaaaaaaaaaaaaaaaaaaaaaaaaaaaaaaaaaaaaaaaaaaaaaannnaaaagggggggcctttttaaaaaacccaaatttacgccccggggggtggaaagaatttttttttttttgggcccccaaa

SEQ ID NO: 27234 - DNA, 281 bp, Gossypium hirsutum
  Clone ID: LIB3147-060-Q1-K1-C5
gtgtggtttggaggataaaaattatgactctatatcaactaaactcaatgatgggaggcagaaggttttcattatttccggcccataggtagttgcattgcatgttactattctgaattatgatcaccattgtttcttcatttttctcctttttgattcggtggtcttgtcttgtgctttgaagatggaacagttaatgtggattgtgtgtgggtaataacttaactgcgtcatgaacagtaattattacctaaaattcaacaagccgtcttacttcattt

SEQ ID NO: 27235 - DNA, 200 bp, Gossypium hirsutum
  Clone ID: LIB3147-060-Q1-K1-C6
ccctgagctcctttcgattaaagagtcttctattaagcatgtatccgaacccaataagaagactgttttatctggatcagggactttccccgttaaaaagtttgacttcaaaagtaaactatgcgagactagcagagctttagaaactaagttatgaattcattgattatccccactttttttatcatcttttttataaa

SEQ ID NO: 27236 - DNA, 444 bp, Gossypium hirsutum
  Clone ID: LIB3147-060-Q1-K1-C7
aaaagattgaagagaagttagaaggagattttaaagaagaggacacctcagttccagtggggaagtgcgatgagccagtagtccagccagagacgccagagaagaaaggtttcctcgagaagatcaaggagaaactccctggacaacacaagaaagctgaagaggccagtagcccagctccagccccagcagctgagccccatcacgaaggggagtcaaaggaaaagaagggaattctggagaagatcaaggagaagcttcctggtaaacactccaaatcagatgaagaaaaagaaaaggcttgagattcaagttcacataaaaatactgatgggattgtgtgtttcttcaattgttaaaaaaatatctgtttttgttttgaggttgtatttgttgtatatttcatattaagtttcttcttttcccaacatttttagtacaaat

SEQ ID NO: 27237 - DNA, 123 bp, Gossypium hirsutum
  Clone ID: LIB3147-060-Q1-K1-C8
attcgacgccctgtggagttctcttgtgtaatttttggatatcacacgtcatgctagaaaatgtctctgtttattgtactggacacctccagattcaaccatctaacattgtgtatgaactat

SEQ ID NO: 27238 - DNA, 450 bp, Gossypium hirsutum
  Clone ID: LIB3147-060-Q1-K1-C9
gagaaagagcctgaaaacaaggagatgactctggaagaatatgagaagattgttgaggagaagaggaaagctttgcttgcccttaagactgaagaaaggaaagttgataccaaagagtttgagtccatgcaacaactttcaagtaagaagagcaacgatgacatttttatcaaactgggttctgaaaaggacaagcgcaaggatgctttaaagaagaaagagtaaaaaagtctgttagcatcaatgagtttctgaagccagctgaaggggagaggtactacggacctgggcgtggtcgaggccgtggccgtggtcctagaggtggatatggaggcaatacagctagcagtgtgttagctccctcaatcgaagatcctgggcacttcccttcattgggtggcaagtgagaccccaccgctgcaatctgcacaatggttttcattttcatgg

SEQ ID NO: 27239 - DNA, 290 bp, Gossypium hirsutum
  Clone ID: LIB3147-060-Q1-K1-D1
gacacacacccggatggctgctagcgatgctttcatgtaaacgatgatctttcaccttgcgggacctagctcgggtcagaactataacaaggagaacgacaacgaagcaaccacccatgatatctatgccaacgctattataaactatgattctgagggttctgttattctctacgttggaaacaacatttcaggttgtcacatggacacattcttcaccttcggtgctgtctttggtggcaacatcactactttactcaacgttacgaacatgatcgcccaacttctac

SEQ ID NO: 27240 - DNA, 444 bp, Gossypium hirsutum
  unsure (1)..(444): unsure at all n locations; Clone ID: LIB3147-060-Q1-K1-D10
ctccaaacacaattcactaaagcaaaaacttctagaagaagaaggaatggccgcctcggagaaagttcaagaactgcatgtatatgagatgaatgaaagagatcgtggtagtccagcttaccttcgtttaagtcagaaacctgttaactcacttggtgatattgtcccttttagcaacaaaatatataggggagatatggagaaacgataggaataactgcagggatgtgtatattgatagagcataaacccgaactgaaaggtgaccgctacgaagccatcttcagcttttacttcggagactacggtcacatagcggtgcagggaccttacttgacttaccaggactcgtatctcgctattactggtggatctgngcattttgaaggtgtctctggtcaggtcaagctccaccaaatcgtcttcccctttaagcttttctac

SEQ ID NO: 27241 - DNA, 212 bp, Gossypium hirsutum
  Clone ID: LIB3147-060-Q1-K1-D11
tcttactcttcctcccactcttcctaaaatatataaaaaaaaaaaaaaaaaaaaaaaaaacagaaatttttaaaaaaaaaaaaaaccacacaacataaaataacaaccattttcaaaaaaaaaaaaaatacaaacatcaacaaacaaaataaataattttttaatttccccccccttttaaattcccttacctaacctcccccttcataaaa

SEQ ID NO: 27242 - DNA, 437 bp, Gossypium hirsutum
  Clone ID: LIB3147-060-Q1-K1-D2
accagtttctcatgttgttgctcgtccatccccaaatgacattcttgagtggcattatgtgctggaagggagtgaaggaacgccttttgcaggtgggtattattatggaaagatcaagttccctccagagtatccctacaaacctcctggaatcacgatgatcacccccaatggacggtttatgacacagaagaaaatatgcttgtccatgagtgattttcatccagaaagttggaaccctatgtggtctgtatctagcatacttaccgggcttctctctttcatgatggataacagtcctaccacttgcagtgtgaacactactgttactgagaagctacgcttggcaaagacatcccttgcatttaatttgtaaaaccccacattcagaaaactgtttccggagtatgtggataagcacaacaaacagcagcagc

SEQ ID NO: 27243 - DNA, 450 bp, Gossypium hirsutum
  Clone ID: LIB3147-060-Q1-K1-D5
ggatctaatggacctttgtgaacaagctggttctcccataaacaaaatgctagccgagttgaaatgtattagtagtagggtttgtgatgcacgtttccggagatttttccatagagcgcaagctgtggtgggtgttaagtccagttggggaaaaagtaggaaatggcattagccacatatgaataaatgcgttcatgtcatgtgaaagatgcattgtaaaacttttgcattaatatgctatgaattaaaatcctatcagatatatttgcaagatgtcaaaaggaaatggcaacgacgtgtaatgttcaagtgcccaacaactgaaggctttgatgtctatttttgtgcttataatatgaaccttctgctgtctttttcaattaaaaaaaaaaatttctaaattttgtttactattcttttttttttctcaaaatttttaatctataattt

SEQ ID NO: 27244 - DNA, 131 bp, Gossypium hirsutum
  Clone ID: LIB3147-060-Q1-K1-D6
ggaagccattagcggtttctatggagttttcatactgcttcacctgtgactgatgatcgtggaagttgtattttttttactttctcaaacttttttatgtcctgtttgtttgtagagaaagtatggtgatg

SEQ ID NO: 27245 - DNA, 443 bp, Gossypium hirsutum
  Clone ID: LIB3147-060-Q1-K1-D7
cccacgcgtccgcctacatgtgatgtcggttggtactgctgtaacagcattgtctaggacgcttgcctggtttcgccagcaaatgctattttctggtatcagtcccagcaggattgatatagtgactggatggggcaggcggagcagggttaccggatcatcacttgtgagacaagctgttcaggatcttctcagtatttttagctttccatttttcaccgagaatggcaattccgggtgtttcatagggtgtggagagcctcttaacagatggttacttcaatcatacgtggagcggatgcatttactttagcttgccgtcctcgtagcacaacagaattttgttggaggatgtagtacaagaagaggttttgtatatttatttaaattattcgcaacctttcaaaagtttagaagttaaataaggagctgatggcagcttc

SEQ ID NO: 27246 - DNA, 367 bp, Gossypium hirsutum
  unsure (1)..(367): unsure at all n locations; Clone ID: LIB3147-060-Q1-K1-D8
cccacgcgtccgcccactcgtccgcccacttcttccggcaaagatcttgagcttgccaggctgaagaaggtggccaaagagcagcaacagttgaaggagaaggaggctgagaatgagaagcccaagcttgaagccaagccattggaggaaatccttgcataaaacttttaccagcactgtttcgtcttccactatgttgtgttaattttattgcatttctactttttttgtggtggtgatacccgtttctatttcttttctagcgagtaatgtatgtcatgttttccacatttgatgcttgtggtctattatatactcgggtatcggtnatagatgaaaataaaatttcccacttcactttcttcct

SEQ ID NO: 27247 - DNA, 401 bp, Gossypium hirsutum
  unsure (1)..(401): unsure at all n locations; Clone ID: LIB3147-060-Q1-K1-D9
cccacgcgtgcaagaaatgttgcgatcaatgatggcggatgatgttgcctattagctagaggatatgaactcatggaaatgcctgaattactataatgtcccgacaggagcatgccgatgattacacccaaagaagacttgagaacactagggcgtgccctataactaaatgtcgaactaccgacgctctaaccttttgacacgcgatcatacttgtattgatggtgcttaccagatgccgaagaaacatagatctgaaacacaatgtggttgtggtcttgtttataagcgctaagagtcgcagcttctgatatcatctgatcaacatattctggaatcgaacattttactttgatgaactaaaaatcaaatntattacatagctatgagaaaaggctgct

SEQ ID NO: 27248 - DNA, 408 bp, Gossypium hirsutum
  Clone ID: LIB3147-060-Q1-K1-E1
gtgaaatttgggcatggtgagggttcagcttatttgtttgacccggatatttatacggatgggaggatatcggttcagggaatcgatggggttttgttcccggaagaagagacccaaactgttaagaaaccggctgctgttaaggttgcctccaagcccaggagaggtaagttgttggaagtgggatgttggatgcttggcagtcttggagggggctcaagattccgatggtgtcaatgaatataaaaagaaattggtagtgtggaggtgaacaatactttttccgggtaaaaacatgcattctcatctcatctgcggttttagggttaagattgtgtcataatacagtggaagggaagggcctaacctggtgaatgctcgtttcatatcctcaaaaaagcagacgag

SEQ ID NO: 27249 - DNA, 326 bp, Gossypium hirsutum
  Clone ID: LIB3147-060-Q1-K1-E10
tttccgggtcgagccgcgccttccggttattgaatctcagccatctcaagggatttatcctaatgactcttttgattttgtcctggcagaacttcacaaagagggaacaattctaacagaggcaattgctctggatttgatgttcgttctactatgtgctagctttgaaacaactttcctggctctaaccttaaaaactaaaaggcctccagacgacccatgtgtgaccacggatctcgatgctgaacctgatgacactcttcgagatactgcttacactcactctgatcctacatgaaatgagtatgaactctagacagagagct

SEQ ID NO: 27250 - DNA, 443 bp, Gossypium hirsutum
  Clone ID: LIB3147-060-Q1-K1-E11
tcacgcgtccgaccaaatatgccgttcatttgatacgtctagatcgggagagttgctctgagtaactactgcaaagactacggcaagttggtcgtcatcgttgatgtcgtcgaccagaacagggcacttgttgatgccccggatatggtaagaggccaaatgaacttcatgaggcttacattgacagatatcacaattgacattcccgtgttcccaagaagaagacattgatcgaagctatggagaaagctgatgttaaaaacaaatgggaaagtatctcgtggggtagaaagttgattgtccagaaaagaaaaacatctctcaacgactttgataggttcaagcttatgttggcttaaatcaaaaggttcggagtcatcaagcaagaacttgctaagctgaataaagagaatgcatcttgaatttgatattgaatcatggat

SEQ ID NO: 27251 - DNA, 442 bp, Gossypium hirsutum
  Clone ID: LIB3147-060-Q1-K1-E12
gctcgacatatccttgggagtggccatatggtcatcaactcagatttctatgtttgggatgcctttttgtgtggttattgggtggatgatggggcaagaaatggacttaaacttccaacttttcgagacagcaactctgttcattaccgttatagtcgtagccttttttctgcaggaagggacgtctaactacttcaaaggactctgcttatactttgctatctgatagttgctgcgagtttcttcgtacatgaagatcctcccacagatgatcaaagtaagcaaccgggaacctgatgaatgacacagttgaatcgagatatggaaattcggagcccttgaaagatgcaagaggcaagaagcaagaacccatggagatttgaaacatgtttgtcccacatggtgtaaatagtactgttgacaggcagatattccatttttt

SEQ ID NO: 27252 - DNA, 248 bp, Gossypium hirsutum
  Clone ID: LIB3147-060-Q1-K1-E2
gctgcacatgcgaaccatctgtcggacacgtgttgcgccggaaatgatccccaattgtggcagcgctgctccaccttacatgtgaccggatggcttcggcccatctctgaaccacaatggtgaggggggctaaactgacacaatgtaccctccatccgaatgtgttaaaaccttcacataggtgcccacatccgaaactgttataatcatctctatgtgcatagtttattattgatagggtaggaaat

SEQ ID NO: 27253 - DNA, 419 bp, Gossypium hirsutum
  unsure (1)..(419): unsure at all n locations; Clone ID: LIB3147-060-Q1-K1-E3
gtttgtgttttacagaagtcaggaagctctccacaaagcttctaccgaaaatgccgaagcggattcatgagatcaaggacttccttctcactgccagaaggaaagatgcacgctctgtaaaaatcaagaagagcaaagactttgtcaagttcaaagttcgctgctcaaagtacttgtatacacactgtgtgtccgatgctgagaaggctgataagttgaagcagtctcttcctccaggtttgagtgtccaggacctgtgaaaatagggccgcttcgagtttatcatccaattactaggtgaaagctagattttgactttgcttttatcatatttcatgcctttcaaactcaaaatttactgtaatggatttgtattctggttatttttatggatatgagtaaggtcgagttactttntt

SEQ ID NO: 27254 - DNA, 446 bp, Gossypium hirsutum
  unsure (1)..(446): unsure at all n locations; Clone ID: LIB3147-060-Q1-K1-E5
gaaagatggtaagaggaaaagcactaagctgtttatagggctcttctaagagccacccgcgggtcattttccggcgacaccttgatgttgaacgcctctgccgttgaggttcgtcagaaatttgaagccaatcgtcatgtcacctcggagcctgagatccagaaactcctctaggaagcacgggaggcctcccatttcgtttccaccatgattgttcaagccaagctcaacgaacgcggcggctacgaggtgaagccgagtaaggagcatgcaggagctactttggagattccttccgaagagatcatcagaaaatctgcatcacagtctaaacaatgaacttgggctnttatcagatgcatactgctctatttgtttgctatttttgctgtctgctagtggatacatttgacccttgagcttacttctgttntgcaaaacttggt

SEQ ID NO: 27255 - DNA, 357 bp, Gossypium hirsutum
  Clone ID: LIB3147-060-Q1-K1-E6
gaattcgtacactcggtagcgcatgttccttcatgcttggttttgggaagtgaaggacgtgggctttccgagaaatctcagctcaaatgtgagctcgtgagcattcccatgacaggaaaatttgagtctctcaacgtttcggtagctggcgggattttcttgtacatgttacagcctaagaactaaagattaaaagtctagttctctttaatttcattaatgcatcacacagttctgaatgtctgattctcttgatttttctcatttctttcttgcaatttgtcttccttttgttttcccccggagaaaaggggggattttaattgatttcattaagtttgggatacctttttagat

SEQ ID NO: 27256 - DNA, 397 bp, Gossypium hirsutum
  Clone ID: LIB3147-060-Q1-K1-E7
gacaggtttcgagctctccttcccgctttttctaaagtaaagtgcatttcagatgctggggtgtttctccatgcgcaagatgtctcgggagggaagcacatagaagaattctatggcaaagtggctagactacacggatccgttaagaatttgccagcgtcttgcacttcaagaatgggagccagaccagagttgtgtttcttcccacagtacgtggtgcagactatgcaaacaccaatcttcttcgtaaattcagcttatgactcctggcagattaagaacattttggctcccagtgctgctgacaaaagtaaggagtggaaaagctgcaagcttgacttgaagaagtgtacagaaacgcagctcaaaatcatccaagatttcatgacgcaattct

SEQ ID NO: 27257 - DNA, 432 bp, Gossypium hirsutum
  Clone ID: LIB3147-060-Q1-K1-E8
caaagaggaagactacccgtaccttattgtcatggtacctgtgaagaaaagaaggagggaagggttgtggtgacgattagtggttacaaagatgtgccggaaaatgatgagaaaagtctattgaaagcattggctcatcaacccctaagtgtagccattgaggcttctggcagagatttccaattctatagtgggggagtattcaacgggccatgtggaactgatctagaccatggagtagcagcagttgggtatggaacatggaaaggttcatattacatcattgtaaagaattcgtggggaccaaaatggggagaaaaagggtacataatgatgaataggaacactggaaaacctgagggtctcttgggtataaataaaataagctttttaccctaccaaaaacaagtgaagagctctaacctcaacata

SEQ ID NO: 27258 - DNA, 415 bp, Gossypium hirsutum
  Clone ID: LIB3147-060-Q1-K1-E9
agttgagcttcctctgactcaccctgaattatatgaggacattggtatcaaacctccaagaggagttatcttgtatggagagcctgggacaggcaagactttgcttgctaaggcagtggctaattctacatctgcaaccttcttgcgtgttgttggaagtgaattaattcagaagtacttgggagatggccccaaattagttagggatctcttcagagttgctgatgatctttccccttcaattgtcttcattgatgaaattgatgcagttggtactaagaggtatgatgcccattctggtggtgaacgtgaaattcagaggaccatgttggagttactgaaccagttagacggctttgattcaagaggagatgtcaaagtaattcttgcgacaaataagattgaaagtcttgat

SEQ ID NO: 27259 - DNA, 284 bp, Gossypium hirsutum
  Clone ID: LIB3147-060-Q1-K1-F1
cccacgcgttcgcccactcgtccgcccactctttcgcccacgcgtccgcccacgcgtccgggtatttaatttgagttccacaaaaggatttcataatttttcccttcaatctgctgtttacctttatggattttgccattctcatggaacttttaatcatggaatcgtggtgattctagatgatatattaggaaatatacttatgaggttagtttgggttcatttgttagtgaaattattcaatttgtttatgaattggatagggatatggcattcatttcttt

SEQ ID NO: 27260 - DNA, 432 bp, Gossypium hirsutum
  unsure (1)..(432): unsure at all n locations; Clone ID: LIB3147-060-Q1-K1-F11
anaacaatgcctttgctttctacatcggtctcttttacaatgaaattgacatgcttggtcgcgagaattatactggggtcaagcgcattaccatcaagcctcaaaccgataggtagggtcttccctgaaaccaacacccacatcattagattggctgaacgacgtctcatgaactaatgttgagctactggccaccctaactctgtctaagatgctctttcactaaccaagtgatcgcccatctggagctgtggaaggagaaggcaacaggcaagtacgagaagaaggtgtacgtnttgcctaaacaccttgatgaaaaaagtggctgctcttcaccttggaaagcttgtggctaaccttaccaagctcaccaaggatcaatctgactacattagcgtccccattgaaggttcttacaaaccccctcactac

SEQ ID NO: 27261 - DNA, 276 bp, Gossypium hirsutum
  unsure (1)..(276): unsure at all n locations; Clone ID: LIB3147-060-Q1-K1-F12
gaccgacgcgtacgcccaggcnttcttaaaatttgttatcaattttttaaaatgagtgatgtactaatacataagccaacttaatattctaggaaagccccaccttatctaatgaatttccaacttatagctctccttgatttacaactaatggcgtaatcaagtgcacaccccataaccataaaatttcttatccacattgataatataaaactttggatactatacaaacatttttagtgcttaaattaaaaaaaaaataatatattattaaaa

SEQ ID NO: 27262 - DNA, 189 bp, Gossypium hirsutum
  unsure (1)..(189): unsure at all n locations; Clone ID: LIB3147-060-Q1-K1-F2
tcccactcttccgcccacgctttctcccacgcttncgcccactcttccaagtattttttttaagagccacagaacccacctcataatctcccccttcaatcctctatctacctttatcaatcctcccattctcaaccaacttttaatcatacaatctctctcatcctagataacatattacgaaatata

SEQ ID NO: 27263 - DNA, 455 bp, Gossypium hirsutum
  Clone ID: LIB3147-060-Q1-K1-F4
cccacgcgtccgggaaaatccaggattgatctacggatgtaatggtgtggaggaaatcggagttcccgaaatcgatgctgatcttctaatgtcgttattagaggaatcgcagtgtgaggagtactgcaatgaggagcaagtaaatagtctgatagaatctctagaagctgagattagaatggtgaatgctggttcatgcagtattgaaggagacattggaagcaacgattgctttgaatggagtgaaatggaaatggtgccttcctctccaagcgatgacatgaattggtatgtggaggatcatgtccaagagatgtcgatggacggctacttggttcaatttggaaatgattttcctttgaatttctacgatattcagacagaaaatggttttacttctttgtggcaagaaacctatgatacagctatatacaattagattacatacatttttt

SEQ ID NO: 27264 - DNA, 376 bp, Gossypium hirsutum
  Clone ID: LIB3147-060-Q1-K1-F5
cccacgcgtccgcccacgcgtccggctatatccaaatgtccaagacttggtgaaaataacgcttcttgaggctacagatcatattttgaacatgtttgacaaaagaatcacaaatttcgcggaacagaaatttggaagagatggcattgatgtgaaattggggtcaatggtcaccggcataaatgaaaatgaaatatctacaaaagttagaggtaatggcgaaaaaacttcaacgccatatggaatggctctctggtcaactggcattggacctcgtcctctcataaaggagttcatgaagcaaattggtcagggtaataggcgtgcttttagcaacggatgaatggctgcgagttgaagggatttggtacattta

SEQ ID NO: 27265 - DNA, 450 bp, Gossypium hirsutum
  Clone ID: LIB3147-060-Q1-K1-F6
tgcgagttgaggaaatggcttcatgagatttttggcggtgacattgctgcatcaactagagttatatatggaggttccgtaaatggagcaaactgcaaggaattggccgcacaacccgatgttgatggctttttggttggtggagcttctctaaagcccgagtttgttgatatcatcaaggctgcgacggtgaaaaagaattagaagttgaaaagcaggaattaaaggtgaaacagaaacaaccttctgggaaactttaatttttgtagttgagatctttccttggaacctaatgtctgttgaaaatttcccgatgtaataagccaaatttaacaatgtgtttttttttgtggtggttgaggcattgatcctcatttcggactttccctgaatttaccttacaaattgctattgctctaatctttgatctttgcagttgaattgcctatt

SEQ ID NO: 27266 - DNA, 383 bp, Gossypium hirsutum
  Clone ID: LIB3147-060-Q1-K1-F7
cacagctcctgggattcttgaggttatgtttttcaccacttgcaggaactgatttaagaagttatgttatgtctggtggtggacttacactgaagaatttcaaaccaaaatttatgagaaagcgatgttttcttatcttccccgtccaaggttctgagagaaagggtcttgtgagtgttgaagtcaagaagaaaaagggagagtatgatatgaagctattagcagtagacattccaatggcatcaggacctgatcagcggctattcctgattggtgatgaagaagagtacaaggttggtggtggattgatctccatgctgagagatccagtagtgaaagcaatggctgcaaccaacgaatttgatgatcttgaccaaattgat

SEQ ID NO: 27267 - DNA, 453 bp, Gossypium hirsutum
  Clone ID: LIB3147-060-Q1-K1-F8
gccagagtattttcttctagttttcgccttcttctagttttcgcctttcactgtttccggggattgaggttagattcaatgggattgccaagtaatgaagttgagaatgtcatggaagatgatagcaatgttatggatgatgttagtgaggaagagtttgaatctgagtcggactcagaagaggaagatgtgaagttggccgagccttcgaagaactctatatacaatagagatgggctcattgagaagcttgaagatatcagctggccggaaaatgttgaatggatgcacaagctttcttttgatattgatcaagagaaagaggtggatgtgaacgatgacctgtctagagagctcgctgtctacacgcaggcattggaggggacaaggttggcatttgagaagtttgagtcgatgaagctacctttccttaggcctgcggattattatgcg

SEQ ID NO: 27268 - DNA, 120 bp, Gossypium hirsutum
  Clone ID: LIB3147-060-Q1-K1-F9
ctgataacccaccaaataattcttctttccaaacctgaaaaacttcaagctcaatcctcttcaaagggaatttgaaaaatattccgaacaatatcctcttaaacgtattattaacccgaa

SEQ ID NO: 27269 - DNA, 116 bp, Gossypium hirsutum
  unsure (1)..(116): unsure at all n locations; Clone ID: LIB3147-060-Q1-K1-G1
gtttgcggctcanaagccttaaagcaagattctggttcagataatttcagatatatatattgtcaatgcacctccgatcatgatccgtaatgattagttgcataacattattgatt

SEQ ID NO: 27270 - DNA, 395 bp, Gossypium hirsutum
  Clone ID: LIB3147-060-Q1-K1-G10
gctttttaacaacatagctctagtgaagattccgcccatggaccgtttgatcgccgattttgacgagcgtactgtcaaggcgcttgatgtttgcaatgcgattcgcgacgggattgaacagatcaggcaatggcagaagcttctagaaatcgttctttgcgctttgggtgatagtaatgttggttatcagagaagtctaggagaagggcattccgtcgcgcgaggaaggcgttgatagatttagcaattgggatgctggttaaaaaaaattaaggcaaggccttggctaataggaaccgttcctttggaagacacaacactagcggcagtcactccaaggatcatcaccatcgatctttgggtcatttcaggtccttgtcttggagcgtttcaag

SEQ ID NO: 27271 - DNA, 464 bp, Gossypium hirsutum
  unsure (1)..(464): unsure at all n locations; Clone ID: LIB3147-060-Q1-K1-G11
ccgggcgcgacgcgcacgcgtacggtttgttacctatatattatgtgtgtacccttatatttttctaaatagaaagagactgacatatatcaggatattttttatattgcaacgtggaatctacctaagacattgaccatataactttgtttttgtactttgtttactgatgctgtgctaagcaacgatactcgtatccctgccataaccatacctgaaatgtggctcaagcggngatattgttactaaaattttggttcctcatcttccctcttcttatcatgtaatttgacaaaaaacaaaggctttgacaacttttcatcgcacttattaagatgtttaaagtttttatatataaataaaaaaaaaaaaaaaggcctttccttctatatgattcaagccttacttacgctatcattacaaagttataacctcttttaataatgtcacctaaatataaaatt

SEQ ID NO: 27272 - DNA, 434 bp, Gossypium hirsutum
  Clone ID: LIB3147-060-Q1-K1-G2
cccacgcgtccgctgttatcacgaggttggtttcccttggaggatttgggattcaggttgggtgtgtttatcggattcgaagaagccgaccaaggaagaatgtcacagcacttttgaaattccatcccagtggcatgggcatgacagctacgtttataaagaagggttttgatgtacatggctctcaaatggacaatgggagtatgaacaaagttttggaagccaaatctactcctgagcaagctccagaacagtttgtagctgaatcgaagaaagagacgacaccaactgatatggggcagaatatgggattaaaatatgtagatccatctggagatacttcagatgataatgttgttacagtgccaacagcaaaaggtggaattagaaggaaacatcatcgagcttggactctctctgaggttatgaagcta

SEQ ID NO: 27273 - DNA, 263 bp, Gossypium hirsutum
  Clone ID: LIB3147-060-Q1-K1-G3
attagtttaagccttaaggcatggttgttgtctttgtttgatcaaatttgcatgcatgcatgcgatcgttaaccatctgttttctaagcttcgtggtgttagcaaggttccattgtagctcaaaatctcgtttctctgttaataaaattctcattgtgttaaaacaataaaatttgagttttgaaattcaatttcatcatttagatgaagcacaaaccaaggtttttttggattaaataataatgaagatattttaattgctg

SEQ ID NO: 27274 - DNA, 203 bp, Gossypium hirsutum
  Clone ID: LIB3147-060-Q1-K1-G7
cggacgcgtgggctgcgaccaacctcgacttctcgcggtggagcaatgaccaacagatggtgtgctatcaatgtgactcctgcaaggccggtgtgctttgcaacctcaaaaaaagctggaggaaaatctctgttatcaacattgttgtgcttatcctcctcgtcatcttctatgttataagctgtgccgcttttcccaacaat

SEQ ID NO: 27275 - DNA, 446 bp, Gossypium hirsutum
  Clone ID: LIB3147-060-Q1-K1-G9
gtgaaggaggctgaattgcatgctcagaattatgaggagagaagaactttgattgacttgagaaatagtgctgacacaagcatatacaatattgagaagagcttgaatgagtacagagacaagattccgaatgagattgcttcagagatagagtccgccgtggcagatttgaggaatgcaatggctggggacaatgtaggtgaaataaggctaaaatggatgctgccaataaggctgtttcaaagattggagagcacatgagtaagggttctggttctgatggtggttcctctggctctggagggtccacgggcgaggatcagacccccgaggcagaatatcaggaggccaggaagtaaaagctgaataagaacacatgatactcgacatgtttcttccaattactaattcgatcatatttcaaggttgatttatagacgttacat

SEQ ID NO: 27276 - DNA, 179 bp, Gossypium hirsutum
  Clone ID: LIB3147-060-Q1-K1-H1
cccactcgtccgcccactcgtccgaaaacgttgaaaatattctgtagcatcaaagacttggagtgagaataatggagtagaggcaatttgcttggagatatatcatcctatcaaaatcaggtcacacaattatttctgttgcttaaaatttgtttgccttcctgattattatatgtatg

SEQ ID NO: 27277 - DNA, 429 bp, Gossypium hirsutum
  Clone ID: LIB3147-060-Q1-K1-H10
cccacgcgtccgcaaatatacggtactatatgttatagacatgtcaaagctcttgttgggcgtgtgtagagcagagcaaaaggaagaaccctatgccattattccttatggatatgaaaatatagtccttttaatgtagaaaagaaaagtttaaaatttgagagtatttgcatcctatattcaatcaacattgtgtaagttcatgctggtttgttttgcaattgcattttttttgctagcagcaaaacaatgtctgtaattgttactataattttcatggttgtattttgtgttaaaaaaaaaaaaaaaaaaaaatgaacaataatttaaaattatattaattttatatatttaattaccgtgctatataattttgtaatgtacgattctttgaaaccatttgcttttgactggtatcatgcatgatag

SEQ ID NO: 27278 - DNA, 409 bp, Gossypium hirsutum
  Clone ID: LIB3147-060-Q1-K1-H11
aaacaatattcatctccggaagaaatgaagtatgttgctctagaaagatacaacaaaatagaaggttttgccccagagagattggtatcaagatctgatgactttaccatgttcctatgggaacctgctgtcagcaaacaccacaaagttcggatgactggtcatcaacagcttgtaaaccatgtttatttctcacctgatgggcatgggtggctagtgcgtcatttgataaatcagtcaagctatggaatggtactactggagaatttgttgctgcattccgaagtcatgttgggcctgtttatcaaatcagctggtctgcagatagcatgcttcttttaaatggaagccaaaaatccaccttgaaggtttgggatattcgaacaaaaaaattgaaacaagacctttc

SEQ ID NO: 27279 - DNA, 286 bp, Gossypium hirsutum
  Clone ID: LIB3147-060-Q1-K1-H12
ccgacgcacgcgttctttcacattatacacaactttaaataggatttttaatatgcaactagcagcttttgtctgcgacatttttgattactgaaccccgcccttcatctccaacaatgacaactttaatctcggactatcatcttatacacaaccattagatcctcatccagctatggacaattccctcaaagaggcttactctctatttatgacaaaacttttcctacacttcatgcacagatctgaaaaacatagaagagtgagaccacttgaccctttttaa

SEQ ID NO: 27280 - DNA, 423 bp, Gossypium hirsutum
  Clone ID: LIB3147-060-Q1-K1-H2
atgggtgttttcaggaatagaggcaagtttttttatctctaatcccctctagttcagctagataacttctgattttctcaactagatcccatactgaaatggatttcctttcatgaacaaactggttcattgagttccatatgagccacaatgcgcaacaaaagatcctacactgttcattggtacctcttacaaaaaaccaggacactgtctaaagacatgatcactatcctcttctccaactccacagcaagggcagatgatgttgttagccactctcttgtaacttagattgatcaatgtagagatgtaattccagtagatcctccatattgtaattgtaattttttatggtagctgtatgtcccatagttttctaaagaaatctttagattcggtctgtaataaataactattaggatc

SEQ ID NO: 27281 - DNA, 454 bp, Gossypium hirsutum
  Clone ID: LIB3147-060-Q1-K1-H4
agaaactacaagagaaagttaaggaacaactttaaaaagtgggagaaaagatacaaattggggctatgcaccgtaatgagtgggtggaaaatgctgaccgatgggtcgctggattccttgagatgtttgaagaaggttgccacaaaatgggcactgcaatcagagatcgaatccaagagcggttaagggggcagctgctgcaaaacggcaagggtgatgacgatgatgatgaagaatattattacgatgatgattattatgatgatgaagacgacgacgacgaattctactatgatgacaacgaatataatgatgagaaagatcagaaaaatgagaaagaacagaaataaaattgtttctgcttccagtttttactaatattatggggtaccttaaaagttctaaatagtagtgttgtgggatgtgtgatatgttgatgttgtagctaaatcga

SEQ ID NO: 27282 - DNA, 104 bp, Gossypium hirsutum
  Clone ID: LIB3147-060-Q1-K1-H5
cccactcttcctcccactctttcggcaatttattttctcaacaccaattaaatatcataagaaaattttatttcataaagtttccatttaatcttaaaataaaa

SEQ ID NO: 27283 - DNA, 221 bp, Gossypium hirsutum
  Clone ID: LIB3147-060-Q1-K1-H6
aaaccttacggttcgcatttaatgccctggccactttattgtatagtgctgagagacaacttaacgacgtagtgtttccaaggagccattggaggccacaaaaacagataactggctcttcaaaatgaatgctgaagttgttgaatagacgctctaccgcatacattgtagatcatgtcttctacacttgctccaatatttttgtatatcagcacacgctc

SEQ ID NO: 27284 - DNA, 66 bp, Gossypium hirsutum
  Clone ID: LIB3147-060-Q1-K1-H7
cgcgtgcgcccacgcgttctccctaatatccaaagccattttgcaaccccaaccccaaccccaccc

SEQ ID NO: 27285 - DNA, 455 bp, Gossypium hirsutum
  Clone ID: LIB3147-060-Q1-K1-H8
ttcactgcatcctctatattaataataatgtttttgtagaagggaagagagaataaaaggggggaaataaagaaactaagccaaaaagaagaagaaggaaggactgagttgaataatattgaaaggttagtgagttgaaaaataacataaaaatggcaacatttgcagggactcaacaaaaatgcatggcctgtgacaagactgtttacttggttgataagctcactgctgataatagggtctttcacaaagcctgtttcagatgccaccattgtaagggtactctcaagcttagcaattacaattcttttgaaggggtgctttattgcaggcctcactatgatcagctcttcaaaagaactggcagtctagacaagagttttgaatgaacaaccaaagattgtcaaaccttgaaaacacatttaaaatgagattgcacagaaagtggtgaattt

SEQ ID NO: 27286 - DNA, 442 bp, Gossypium hirsutum
  Clone ID: LIB3147-060-Q1-K1-H9
gccgagaagtacaagtccgaggatgaggagttcaagaagaaggttgaagccaagaattcaggggagaactatgcctacaacatgaggaatactatcaaggatgagaagattggttcaaagcttgacccggctgacaagaagaagattgaagatgccattgatggagcaatccaatggttggatggcaaccagctagccgaggctgataattcgaggataagatgaaggagctcgagagcatctgcaatcctatcattgccaagatgtaccaaggtgcaggggctgacatgggtggtggcatggacgaggatgccccacctaccggtggcagcggtgctggacctaagatagaagaagtcgactaaatcaaatattaagattagtatttgccgatgtttaacagcttctgctggtgctatattttatgttttcagccacctat

SEQ ID NO: 27287 - DNA, 515 bp, Gossypium hirsutum
  Clone ID: LIB3147-034-C8-F4B
agaaatgacctccttagtgtttgtgatgatgatcaaacctctgctgatacatctgccctatcaaggattacatctaccggtgctatgacattctgcttaatccaagccatcgaaagggggcatgcagctacatatgggagcattctcactgcaatgcgcaatgcgattcgaagtgtggggagtggtggaggtggcggtgactttggtggtggtgctgttacatccctcatcagcatgcttttgacaggtggtagcactgttggacttggtgggttgaggcaggagccgcagttgacagcatgcaaaccgttcgatgtttatatgaaacctttctccctttgataaatttttaaaatacgaatttgttatatgctatttgtaaattgaatttatttatatttctggataaggggttgaatttcttttgtgttcccaaagtacattggttgaacaagaattttctgggttcctctcattatatttaacaaatctggattacatcacctgcgattaat

SEQ ID NO: 27288 - DNA, 543 bp, Gossypium hirsutum
  Clone ID: LIB3147-034-C8-F3B
actgatccctacaggcttccaacgaagcataatataaggatggcattattttggttagtacaaggttgtcaacctggtgattctctgttatttcactattccggtcatggttcacggcaacgaaattacactggtgatgaagttgacggctacgatgagactctttgccctttggattttgaaactcaagggatgattgttgatgacgagatcaatgcaactattgttcgacctctacctcatggtgttaggcttcatgcgattattgatgcttgccatagtggaactgtattggatttaccattcctttgtagaatgaatagggctggacagtatgtatgggaggaccatcgtcctgcatcaggtttgtggaagggaacaagtggtggagaagtgatctcctttagtggttgtgatgatgatcaaacctctgctgattacatttgccctatcaaggattacatctaccggtgccatgacatttctgcttaatccaagccatcgaaagggggcatgcagctacatatggtagcattctcactg

SEQ ID NO: 27289 - DNA, 668 bp, Gossypium hirsutum
  Clone ID: LIB3147-034-C8-R3b
ctgatgagggatgtaacagcaccaccaccaaagtcaccgccacctccaccactccccacacttcgaatcgcattgcgcattgcagtgagaatgctcccatatgtagctgcatgccccctttcgatggcttggattaagcagaatgtcatggcaccggtagatgtaatccttgatagggcagatgtatcagcagaggtttgatcatcatcacaaccactaaaggagatcacttctccaccacttgttcccttccacaaacctgatgcaggacgatggtcctcccatacatactgtccagccctattcattctacaaaggaatggtaaatccaatacagttccactatggcaagcatcaataatcgcatgaagcctaacaccatgaggtagaggtcgaacaatagttgcattgatctcgtcatcaacaatcatcccttgagtttcaaaatccaaagggcaaagagtctcatcgtagccgtcaacttcatcaccagtgtaatttcgttgccgtgaaccatgaccggaatagtgaaataacagagaatcaccaggttgacaaccttgtactaaccaaaataatgccatccttatattatgcttcgttggaagcctgtagggatcagtttcttcttctgtgagcataagaatggaatcctcgggaaacttaaa

SEQ ID NO: 27290 - DNA, 280 bp, Gossypium hirsutum
  Clone ID: LIB3147-034-C8-F4A
gctgatacatctgccctatcaaggataacatctaccggggccgtgacattctgcttaatccaagccatcgaaggggggcatgcagctacatatgggagcattctcactgcaatgcgcaatgcgattcgaagcgaggggagtggtggacgcggcggagactatgcggtgtgctgaacatacctcatcagcatgctatagacaggtggaccaatgttggactagaagggtagaggcaggagccggggttgacatcatgctaaccgggcgatgatgatatgaa

SEQ ID NO: 27291 - DNA, 310 bp, Gossypium hirsutum
  Clone ID: LIB3147-034-C8-R4A
gcgcaccaccgcccattttcgaccgcgggcgtggggaggcgccccgggaggagcatgattgtgaggggagggagaaggaagcgcgtgggtggaaggagcaggtgattgggacgcgggagggagggatcgagggtcagcgatgttggtaacggctttacagatggcacaacggatggatcgggcaccttgcggaagctgcaaaggggtgtggcagccggagcagttgaccagcataggcggcgggtaattgtagtacatgcctcctggccctggcggcggatacattattcaaaatctccggacgcgtggg

SEQ ID NO: 27292 - DNA, 303 bp, Gossypium hirsutum
  Clone ID: LIB3148-001-P1-K1-A10
gaagcatttgggtcgtttcgaagtaatggaaacttcatgaaaagtaaagaagggagccggaggaaggaaaggtggtggcccgaagaagaagcccgtttcaaggtctgtcaaagctggtctccagttccctgttggtaggatcggtcgctatttgaagaaaggaaggtattcgcagcgggtcggaaccggagccccggtttacttggctgctgttcttgagtacttggccgctgacgctcttgaatcggctggtaacgctgcacgtgacatctagatactctggttcatcccaaggcacgttct

SEQ ID NO: 27293 - DNA, 253 bp, Gossypium hirsutum
  Clone ID: LIB3148-001-P1-K1-A11
actagttctagatcgcgagggccgccctttttttttttttttctttccctcttctaattctggagctgcttctacctcatccttcttcttcttttctttcttcttctccttcgcctctttgtctttcttcttttctttctttccctcttctaattcttcagcttcctgatgaagcagaaattactttcttgctaagcttttcagaagttttgctctgagaatttttccccacgcgtccggttctagatcgcga

SEQ ID NO: 27294 - DNA, 352 bp, Gossypium hirsutum
  Clone ID: LIB3148-001-P1-K1-A12
gctattacctgaacaaaatattcatgtaaagttttcaagaattgcttgtgattttaggtgaggcaagcattgagacgcaggtcaatttggtttcttggaacatgatacagttgtgtaatcgcacccaagaattgtaaataacattctcttgcatttatgaaatgaaatttagggattttgacatgataattgttaaatattgtcacctaatttgatttgactatccgtccatttacgtcgtcttctctatcagaaccctctcatttaccaactcaatcgtcttgttacacatgcatttttcgccatatatcttatttacctagacgtccattcactatcgtcttcctagcaa

SEQ ID NO: 27295 - DNA, 162 bp, Gossypium hirsutum
  Clone ID: LIB3148-001-P1-K1-A4
ggggaatacgatggtatgtacacaagtggttaaaaagactttaatctctctgttccctgaggaaacttctgtgatgacactgaatatttcttcaccttgagttacaactcttaaaatgttatgttaaaagattggaatatatgggtaaaaaaagttaaatct

SEQ ID NO: 27296 - DNA, 241 bp, Gossypium hirsutum
  Clone ID: LIB3148-001-P1-K1-A5
tccacgcgtccgacagcactaactgcaaaagtgtcaagagaagtatgccatggaagctcgtgagcaaatgggaaaggaaagaatgatatatagctacataataaaaatggatggcagcgctctttatctgtgtcggaggtgtccctagaaatataataaaacctcaagctattgcatgagatttgagttaattgaatgacaacgtataacgaagaactaaagtattggcaaaaaaagaaaa

SEQ ID NO: 27297 - DNA, 153 bp, Gossypium hirsutum
  Clone ID: LIB3148-001-P1-K1-A9
gctgacatttgtaagttaagaaatataggtagaatgctcctatagcattagagacaagatcaacagttacatgatgcatgtctaacacatccactattacacccccaatcatacacacacatagaccttctatctggttaactaaattcaatt

SEQ ID NO: 27298 - DNA, 451 bp, Gossypium hirsutum
  Clone ID: LIB3148-001-P1-K1-B10
attcaatcaaaacagtatctgaagttgaacctcggagatctaatcggaagattcaaccaacgtcaagactcttggaaggcctacaaagctcattgatcatctcaaaaattccttctgtttcgcacgacagaagtcacaaaagtcaaaataggagtagtagaggtgaaccttaaatttcgtggtattcgtgaagtaatgttgctgtttttctttcccttgttggttgccgaaccgaacatgttgctgactgcatttatgactagcctaagcttatgactggacattggtgtggtttaagccgctttacatattgtaattccttcgagaaaaagggaatcttgtagcttaaattatcatctttgcttcaattttaagaattatgtaaatgtatttaactaggttgataaaaagtgaattctcatgatttccaatttaaaaccaatttattatt

SEQ ID NO: 27299 - DNA, 351 bp, Gossypium hirsutum
  Clone ID: LIB3148-001-P1-K1-B11
aaaaaataaaaatccaaatttaaggaatgtatccaaactattattacacacaataaaaatagggcaagtaaaaaaaaaaaacgagaaaaacaaactaacaaaataacattataaaaatcaacaatatctgcctacactaaaaaaacctaccattcgggaatcacatgccatccctcaggcatttatccatatctatatctgacgaagcccgaatctcagaactatatgttcagccttaactactgaccacccggacgcaaacatctattgcaaaaccccatatttcgcaatcgatataatcaccggcaagttacatacagtcattcctgcctaattatacaacgcaacatg

SEQ ID NO: 27300 - DNA, 213 bp, Gossypium hirsutum
  unsure (1)..(213): unsure at all n locations; Clone ID: LIB3148-001-P1-K1-B4
gttgaagatgctgttaaacaagcattgggatgacacagacgcctgagtttgcttcgtcagtgtgtctcagattccaaatctcctggtgatccgaagttgatagatgcatttgaactaagtgaagaggagggagaagatgttcttttcaaagaggcttggttaacatattngtggagaagagccaaagtacattggatagaggaggatattgca

SEQ ID NO: 27301 - DNA, 251 bp, Gossypium hirsutum
  unsure (1)..(251): unsure at all n locations; Clone ID: LIB3148-001-P1-K1-B6
cccacgcgtccgagcggagctcgaccggnattagtgccaatgctcaaaggaaggttgctagagagatcaagactgctcgagcgtttggtttaatgccatttataactatggggacaaagtcattcgttttctgaagatcaatggaagttgttaataaagattatgaatatgatgctttcgatgacatgacttccgctatggactaataagatgcttgagccgatatttgtgccttgcatagtttcattttt

SEQ ID NO: 27302 - DNA, 452 bp, Gossypium hirsutum
  Clone ID: LIB3148-001-P1-K1-B9
actttcgcataaaggcgacgagctctcaggctggacattaaatcatggcatccgctacattcgagcctggggaccgtgtaaatgctgcatgcgatgcgtaacacgcattccataggattaggacacatatatctggctacactgcgaaaccttgcattcgggaatggcttccaccaacatggcatctatcgcgattatagctgacgagacatgaagctaggaactataactacagccttgaaatcggagcacacggacggaaacttatatgggaaagcgccccacgtagcatccgtgatagtcaccgcaaagtcacggacagccatgatggtctaattatccaacgaaacatggcacttttcttctccagtggcgatagaaaggagctgaaactgagggttactggacgaatatggaaggaacaacaaaatgcagatgccaacatgtgcata

SEQ ID NO: 27303 - DNA, 165 bp, Gossypium hirsutum
  Clone ID: LIB3148-001-P1-K1-C1
ggcacgtgcggtgcaacttgtcgcggaggtacaggtttggcaggcgaaaggcaaggtacaggaggtgacggcggcttcgttacaagcgcagctacaacaggccataatgaacggaggagctgatttgacgcagagtgatagcatgagaggtggtgaagaatggcg

SEQ ID NO: 27304 - DNA, 335 bp, Gossypium hirsutum
  Clone ID: LIB3148-001-P1-K1-C10
gtttttgcacacaaagatgacaccagcaaatagttgctggaatggggatccagagtttcctgtgcaaacagccggcctccaaatcctcagtagagctgttgattctgaaatgtttagggaaagacaaactggaagcaccataagctggaaataagatagatggggcagattagcttggcttggatgagatttctgttaatcttgttactgcattaaactttgtaatcatagcaacttgattaaatgtcgaggcttttctctttgatgcaaaaaaaatagagcatataaaaaaattaaagattaaaaaaaaaatgttactctgaacttctattaga

SEQ ID NO: 27305 - DNA, 456 bp, Gossypium hirsutum
  Clone ID: LIB3148-001-P1-K1-C11
aatcttccattaaaattctcaaacaccaattcaaccgatttagggatgctgtggtgctttgagtcctacacccatgggaaagagatgctcgcttgattgaaaaagcaataagaaagggcccaaaacactataacgtgatagtggaggtggcatgtacaagatcatcagatcaattattgggtgctaggaaggcttaccattccctctttcatcactccattgaggaacatcttacccacattaaaggtcgtgagcgtaagctgttggtggcacttgttagtgcttacagatatgaagggacaggtgtaaatgaagatgttgcaaaatcagaagctcaaatcctctacgaagcaatcaacaatggcgataaaaacaaacttctcgaccacgaagatgccatcatgatcctggctaccaggagcaagcaacatcttcaagcactgtatcgacactaca

SEQ ID NO: 27306 - DNA, 422 bp, Gossypium hirsutum
  Clone ID: LIB3148-001-P1-K1-C12
gaaatgacggtacatggatggttctttggctgtccggtccccaattaggttacgatagatggtttgtagactcatccacaagttgacttttgagtgaaccatttggacgttttgaatttttctttcaagttggtgacttcagctgtaaagatctttttttgttcctacaagtttgtatgtcttagcaattatatcttagtaaacactgtatcctggctgtagcgtttacaaatctgagagcaatgtacatacatttatattccgaataaaattagttttagttctgcgtaaaataaggccattacatatgctataacatatttaattgctcctgaatgatattatgatcaagagaggtactacttatgacctctgagctgaggctattatacttaatgctttgaatatcgttaaaaaataaa

SEQ ID NO: 27307 - DNA, 351 bp, Gossypium hirsutum
  Clone ID: LIB3148-001-P1-K1-C2
cggacgcgtgggcgaatggctttaagaaatttgttttgcacaatgttggagggcttgaactgttgatgatgcacaacaggacatagtctgctgagattgcccatgacgtttccacaaagaagagaaaagagatcgtggaacgagcagcacagcttgatattgttgtcactaacaaacttgcttggttgcgaagccagtatgatgaatgaaagcttaaacattaatatgcatttgccgggagtatacatcacctttactttgtagaaatgatccttgatattccatattcttcatgcaattgcatgagaattcgttcacataattgttggtatatcgaggaaaaaagatgcc

SEQ ID NO: 27308 - DNA, 250 bp, Gossypium hirsutum
  unsure (1)..(250): unsure at all n locations; Clone ID: LIB3148-001-P1-K1-C7
gaggactcgagcatcaagtagngagaggcgtggnagaaagtctcaagattattactcgttgggcatgctgaagggtggctgaatatgctggtcattatgctaagacccatggaagagagagagtttctgtaattgatatggccgatattatgcataaaacagatggacttgttcttaagtgctgtcgtgaagttgcagatgaaaattctgagattacttacgaggaattagtcattgacaatttctgtat

SEQ ID NO: 27309 - DNA, 230 bp, Gossypium hirsutum
  Clone ID: LIB3148-001-P1-K1-C8
taaacggccaattgggattttagattcatggcatttgtttacattccataagtgttgatgggcacatctgcagtactttcagagctgagtctgattgttagacaaaataatgacggtccacgtgaaacatacaagtaagaaatggtttttggaggagttataaattgtgaagtttgatttaattataaaaaataatgtatgatttgattgtttaaataaagggcgtgtct

SEQ ID NO: 27310 - DNA, 318 bp, Gossypium hirsutum
  Clone ID: LIB3148-001-P1-K1-C9
gacgccacgcgtccgcccacgcgtccgcaatgctgctgggttttgcctcaggatatggcttgcatgcgatatttgcagatgaggcatcctcggaaatcagaatttaagatagtttggcatacaatccggcatatatggtaaagcttaaataaagttggcttttttttttttttttggtttgatacccttcaacccagttcataaactacacgaatgcattctatccgaatgcatatgtaaatggtttgatctttttgatgtctgtggaacttaaatttattggaataaagctttggtattatttggaggttgaccttt

SEQ ID NO: 27311 - DNA, 452 bp, Gossypium hirsutum
  Clone ID: LIB3148-001-P1-K1-D10
ggcgtgtgctacacgcatcggaagaatgtgtagcagttaatgacggagctgtacttgtacgtgctgagacttgtccagacttgaaaattggaaatgatagaacagaaatcatagatggtggcatggggggacttgatgggaaaactgcaaagcttgcttctcctccatgtaaagaattagtgaagactggaagcagtattcctggacctgacacggacaaaaaacaaaaaagatgccatatggagccagttgtgaacagtatctcaatgtctacgagagaaggtcttaccgattcagggctgagtccaccttcgacaaaggctggtggagcaactgttcagattctgaagagacctaactgtggctttggggcatttctggggaattctgccacgaagaaaaaatctgatataggtaaaaagaacgaagagaacaagttggagcagatcaga

SEQ ID NO: 27312 - DNA, 415 bp, Gossypium hirsutum
  Clone ID: LIB3148-001-P1-K1-D12
gccggcttgaagaagctcgatgagtatctcctcactctcagatacatctctggataccaaggttcagaggatgatatcaccgggtacacagctctatctggggccccatcgtctagctatctgaatgtttctcgatggcacaaacacatcgatgcccttttgagcatctcaggtgcttctgaagaaggctctggtgcgaccgttgatggatctgctcccgctgaggctgtggccactcctgcaactgcacattcactggctgcagctgctgaagatgacatcaatgttcacgtaaacttgcctggtgaaaagactgatgaggaaaagaaggcaactgaagaacgtgcaactgcacttacggcctcttacaagatgaaagaatcctgaaagtccttgaggttactgcttattaagc

SEQ ID NO: 27313 - DNA, 176 bp, Gossypium hirsutum
  Clone ID: LIB3148-001-P1-K1-D2
gctgggttagggtttagttttaggcctattgggtttgggcttgtaaaattatttgctggggtattatattttatttgtttatgggcccgggcaacattgggcttgtacaataccctcatcgagtctattgaactgcttgacctgaaatatttcatttgggcaaataataataatat

SEQ ID NO: 27314 - DNA, 126 bp, Gossypium hirsutum
  unsure (1)..(126): unsure at all n locations; Clone ID: LIB3148-001-P1-K1-D8
ccggggagagaggaggaagagcaagaagaagtagaagaanaagaggaagaggagagngaagacagcgaaggtgtagaggaagaaaaagaaacgaagaggaaaggaggcgcgcccgctgctggtgct

SEQ ID NO: 27315 - DNA, 452 bp, Gossypium hirsutum
  Clone ID: LIB3148-001-P1-K1-D9
ggcgactgtgctactgttaaccagcggaaagtcatggaagatatatcagaaatatttagagaggcagacaaggacaactcgggaacacttacagtgaaagaatttcaagagatcattgatgatatctgtgaaagataccctcaagtggagctttatctgaagaacaagcaggtgcgtaacatggttgatcttttgaaggaagccaaaggggacgctgcaaaggaatccatggagctgaatattgaagaatttaaatcagctctttctgaggtcgattctcagatgaagaatcttccagcaacagcacaggttgcaaatcagcaaggcgcctatcttgcgaagtgcttcaaccgtatggaggagtgtgaaaagaaccctgaacgtcctcctaggttcaggggaacaggtcgtcatcgattccatccctttaggtacagacacttgggacaatt

SEQ ID NO: 27316 - DNA, 254 bp, Gossypium hirsutum
  Clone ID: LIB3148-001-P1-K1-E10
gccacaaccggcttctggattatcgtcggctttactagctaaatatccagacatgcatcaggtatcgcagaacgcctcaatcacatatataccgtccatgtatattcacaaggatcaacacgcacttgatgtcacgaaatcgactatagactcatattcagcatcacttgatttgccaacgacccccaaagtcatggtcttgtaacacacttacacgagacaaacctattcattaaaatccactatcattgaac

SEQ ID NO: 27317 - DNA, 153 bp, Gossypium hirsutum
  Clone ID: LIB3148-001-P1-K1-E11
cccacgcgtccgtccacgcgtccgtccacgctttcgttttaaggatttctgttgatgttcagttttgtagtcacaaaaatgggatcattgtagccctaataatctttataatggtcaaaatacaaaacttaagaaatattagaccataataac

SEQ ID NO: 27318 - DNA, 234 bp, Gossypium hirsutum
  Clone ID: LIB3148-001-P1-K1-E12
gcgactttggtctttaaattaattgcgagatttgccttctctatacatactggacctagaggttcttaaaaacacaactttcgttgttagctgcttgcatgaaaattatgtttcacaaaaatcaaaatctaaacaaacaacaaaactccattacaattgataaacaaaactcagactcactaaagaatccaaacttacaaattctacctctctaggacaaagctagcttatatc

SEQ ID NO: 27319 - DNA, 160 bp, Gossypium hirsutum
  Clone ID: LIB3148-001-P1-K1-E2
acgacaggacgtgactgggagcctgaaagctgttgttatccatgtcccgtaccgattgtggagggcttttcgcaaggttcatgttaagcttgtgaggtagcttgaaaagaagttcagtggaaaggatttgattgtgattgctgcccggaggatattgagg

SEQ ID NO: 27320 - DNA, 124 bp, Gossypium hirsutum
  unsure (1)..(124): unsure at all n locations; Clone ID: LIB3148-001-P1-K1-E3
ccgggccgacccacgcgaccganggaagaagagaggaaaacgaagacggagatgaggaagaaacaagagagacgganccaggganggaggaaggagangagtgaccaacaggaccaacacacta

SEQ ID NO: 27321 - DNA, 260 bp, Gossypium hirsutum
  Clone ID: LIB3148-001-P1-K1-E9
tgcagaaggggctagttgtgagtgagtcacctatgtatcttgatatagcgcccaagatcgtgaatgtgaaaacgagtccgaggtatattcaccaaccaaggttcatcgattgctgcacatttgaaatgtgaggacttcttaaagccgaataccgtcagctttaggttttatatgttgctacctgtaccttgcttttcattttcttgctttttgggaattggaataattttcggggccttagatgaagttcatcattccga

SEQ ID NO: 27322 - DNA, 113 bp, Gossypium hirsutum
  unsure (1)..(113): unsure at all n locations; Clone ID: LIB3148-001-P1-K1-F1
aanggggangcctctaaacatgcgaaggcttgtgctacaaatggagaggaaacgttttagggaagagtagactatgagactgtgattgccgcattctgacctcgggctaccat

SEQ ID NO: 27323 - DNA, 121 bp, Gossypium hirsutum
  unsure (1)..(121): unsure at all n locations; Clone ID: LIB3148-001-P1-K1-F11
cccacgcgttcgcccacgcgtncgcccacgcttccgaagacccccatgaattttatcatcaagttcctcagtaaatgtagatatacaagcagatctggctgttctttcaagtacatctcat

SEQ ID NO: 27324 - DNA, 438 bp, Gossypium hirsutum
  Clone ID: LIB3148-001-P1-K1-F12
actgttcccagactttatccgaggaatttcttttgtcatttcgttgataatccgaacttcagttctttaaaaaggctttggattcttggataaggcctctttgataaacaaagtttcatgtctgatctcgacgtccaggttcctactgcctttgatccctttgctgatgcaaatgctgaggactcgggtgctggtgcaaaggagtatgttcatatccgtgttcaacaaaggaacggtaggaaaagcctgacgactgtccaagggttgaagaaagaattcagttacaacaagatacttaaagacctcaagaaggagttttgctgcaatggcactgtggttcaggacccagaattagggcaggttattcaacttcaaggtgaccagcgtaagaatggctccaccttccttgttcatgctggcattgggaagaaggaaaac

SEQ ID NO: 27325 - DNA, 158 bp, Gossypium hirsutum
  Clone ID: LIB3148-001-P1-K1-F2
acgttttatgtttggctcggctcgttcgggtattgccggtgaaacttgtgcgatttgcctagaggattataatgacggggagcttcttaaagtgacttcttgtcaacatgattttcattcaagctgggtggagtcatggatgactaatggggggacgt

SEQ ID NO: 27326 - DNA, 440 bp, Gossypium hirsutum
  Clone ID: LIB3148-001-P1-K1-F9
gcacctcggtctcaaacgcaaacaccccttttcatggcttccttacaaggtgccctaccaagtgtgccgccttcttctggcctattacgcacttcaagcctcggtacaccatcatcagcatggatgccacctcaatctttaccttacgcgtctggaattccatcgcagtcactgccctatgcttcagcattgccacaaaggccatacttgggagctcaattacccggtaacttgctgtcgtcgagccatcaagctggaggcattggcagtgaatcatcctacggtttcataaacactgaccaacacgtggcccgtagattcttagcaccggttaccccacagtctttctcttctgatcgtaggggcaacccatttggctgaacatgaaataacaaaggttccccaaaggtcatttttcgttaagcatcgtaccgttgcta

SEQ ID NO: 27327 - DNA, 394 bp, Gossypium hirsutum
  Clone ID: LIB3148-001-P1-K1-G10
tcgaccgacccgtccgactttactaagagcataatcctaatctcattatcaatgtctactacgccgaacaaaatcacgtcaaccgacggttgcgataggcgccaggctactcgacttcaacgtcgtgctcctgcttgcttacacatcagttcggctgctagctggaacattgcaatacctctctcgtctccgctcgcctgttcgcctccttcgattgatcggaggaccaccgatagaacagaagagccaccgcctcgtcaagaacaacagcagaggcaaatccagaaaacggagccggaaaagcttgtgttcaagatgtggcagcattcagcggcaccgctttgttatgaaccggcatcgatagtaccgtcgattgtgccggattatatgtata

SEQ ID NO: 27328 - DNA, 260 bp, Gossypium hirsutum
  Clone ID: LIB3148-001-P1-K1-G11
gtcggcccacgcctcccgattaaacccgggcttccttatgatcccattttcagtctatgcccgaggaacccacagtttgaatttggttttatttcccccccccttttgcaagtttcatttattcattcattcctcattgctctagggttccctgtgcttcttcctccctttcaccctttccttaatttctctccccctctcttttccattttcaaaagtaggccagcctggttcttgtatcactacttccattcagtggg

SEQ ID NO: 27329 - DNA, 398 bp, Gossypium hirsutum
  Clone ID: LIB3148-001-P1-K1-G12
cggtagttctgatgcataaaagaaagtgacagtttacctcaagaatacaacctattgtcgttgcgggacgaattgtggtcaatacgagattctggtgagttttcgatacttcattttgaactaacaacagacattatagagtattcgaggaaccattgtatactttcttaaaagaatgcgtggaaaggctgtaataattcaaacctaattatgtagattcaacttacactgttctttgcatcatttttactgaagattctgcttcattcctgttaaaaaaatacaagattacaaacgcgggcaatcaacgatatgaagacattttctacgtcaactaaaatcagtctacttccattaaacgcctacattcataactgaaaaaaaaggtgggtcttttt

SEQ ID NO: 27330 - DNA, 418 bp, Gossypium hirsutum
  Clone ID: LIB3148-001-P1-K1-G9
atcgtgataatggtgtaattgctaggtgtatctctagtaatgaggatttggctatgctgaggacttgtggtaatctgaactgtcgtgttagacccgctcattctaatgtgtgtgtgtgtgtatatggatttttggaggaatcaatgtgggctcgaagctttgatatcgaataatacaaattgttggtgaatgcgacttaaatagactttgatcgtgatggagctagacttggtatcgttcgcactgtcattataaagctatcaatgagtcactaggaacttctatgcaggagacatactgcaggtatggaatgaggaattgtagcctgataactccttgatggatttactgaattcttctaatgctgaacccatgaatatttaatcaaatcaaaggctaaagggaaattttatattat

SEQ ID NO: 27331 - DNA, 452 bp, Gossypium hirsutum
  Clone ID: LIB3148-001-P1-K1-H10
gcgcccacgctatctcccactcgtccttcctcattctaaggctagtcaaccctaaccagctcaaagggatcaagtatgagcctttgaacgtcacggcttatgattttccaaacaaaagtaatgtcataggtaacattttgatgccagcgttttaccagtgttacagacagaaggctacaaagcctggtcaaggcaccgctaacaccactgtggctttacgagcgtcgtctgagaacggaacaggagttttacggattgatatggcgacggcggtgaagcttaagaccttgtatggatattcgaagaggcataagattaggattggagcatatgtggtggtcaacgctagtggtgttaatgtccatcgtaaagggatcaggcttagatctatggcacccaagatgggaaattcttgtgtggtgctgcttggagctttgttcaatatcttgctc

SEQ ID NO: 27332 - DNA, 229 bp, Gossypium hirsutum
  Clone ID: LIB3148-001-P1-K1-H11
aaccgatgcagcctttacttgtgctgcttgttgctgccataggaatttccatagaagggtggaaaggggaccttgttggccactgttcttcggctccatcttctaatggagcataaaaataatatatttatatttcaaaccatatgcaataaaataaacaaataaatactaaaaaaaaacatcttgaaaaaaaacaatataaatgactaatttacaactttataagaac

SEQ ID NO: 27333 - DNA, 365 bp, Gossypium hirsutum
  Clone ID: LIB3148-001-P1-K1-H12
acaatgatgttgtcattaacgggtcaacaacactctgagaaagtatcagagaattgcggtgctgtgtggaaatctctgggaatctacactgatgcagatacgaaagcccttgaacaattcattgatgtcttcaaggatgaaaacttgcgacctggatctttcattctttgaagtatctcaggccaaggatcgttgactatagaccactgcaaagatagctgagtaccagaaggtcggaacgcaatgattgagaatagactacttgacaactcagagctggaatacatcatatggaagaacggagatgcttctgcagcagatgaaagcttgtcatgaagattatgatcattgtgcaatgactgatc

SEQ ID NO: 27334 - DNA, 126 bp, Gossypium hirsutum
  Clone ID: LIB3148-001-P1-K1-H2
attcaggcttgatttaagcatatctaatatttggataccctcaaaagtagaaagaatatatgatgcagagagttgtgttcccatgtaaactgttgttggttgttcattagacaaaaaaataaaatg

SEQ ID NO: 27335 - DNA, 206 bp, Gossypium hirsutum
  Clone ID: LIB3148-002-P1-K1-A1
cccacgcgtccgcccacgcgtccgcccacgcgtccggctgtatttacactacttgattattggctgtaaataatatggcatcctttggtgatgaacaatatggtatttccttttaaaatatactgcattataggactccatttatgataacatttttcccccccccttttttttttcatgaatacaaaaattgtttagcattggtc

SEQ ID NO: 27336 - DNA, 294 bp, Gossypium hirsutum
  Clone ID: LIB3148-002-P1-K1-A10
gcatgggaaaggcggcacatagagtcaaaccaaccgcttagttctcaagaggtaccacgggccaatcaagcaccggtaacggcaccgttacaaacacaaacggatacgaacgcccatggtaatgaacccgaaaggagagctttagaaagtgggaatgccaattaagtttaaaacatctataaggtgtaaaaaatggtgttcaatgaaagttttctgttgtacatataccatctcattgtgtagagatgctttacatgcttgtctattgttgattttattaaacgttacttgggg

SEQ ID NO: 27337 - DNA, 398 bp, Gossypium hirsutum
  unsure (1)..(398): unsure at all n locations; Clone ID: LIB3148-002-P1-K1-A12
aaaaaaaaaaaaaaaaaaaaaaaaaaattttaaaaaaaaanaaaaaaaaaaaaaaaagggggggttttttaaaataaatgcgaaaaaataaaaaaaaatgtgataaaatatatattaaaattttataaactttttttttacaacataaaaaaatataaaaacaataaaaattaaaagggccgccctttttaaagaaccaaatttttcttccccttttttgcaacttttaatttttttttttgtgccccttaatttaaattatttgccccttttttaaaaactttttacttgaaaaacccttgcctttcccaaatttaatcccttttaaaaaaatcccttttttcccagttggttttataccaaaaaagcccaacctaattccctttccaaaaatttgt

SEQ ID NO: 27338 - DNA, 389 bp, Gossypium hirsutum
  Clone ID: LIB3148-002-P1-K1-A2
gttttcccatccccctatttgaccattcgactgccccattccgccattgaaattgatggacggtggctccccatggagttgtttcattctcctattctaagcctcacctcgaaaggtaagatttttagcccgaaaacccatctcaagcttcaatttcgacgaagaagagatggtcctcgatggctcgtttgaaggtatgcttccttttttattatattatgcataaaacatatgaaacacgaaaggaagatgaaacagatgcgaaaaaaaaaagaaacacaaggcgttcaaaaaaaaatcaccttctagttctattctgatttctctctattgcggattgcgtaaatgtctgtttttttatgtaaccgattacaaggattaaaatttca

SEQ ID NO: 27339 - DNA, 388 bp, Gossypium hirsutum
  Clone ID: LIB3148-002-P1-K1-A3
gaacacgaaggagacaacgtcgtgtttattgtccaaaagaaattgtggctcacaagtgagagcatgctgaattctgaatagaatatttccggattacaattcccacgtactctcattatatcttcttcagcagctccaaggtattaagaagctctcctattattaatccggcaagcaatttcattttgtggcattaagcaatggttcaaattgttttttcttttttacccctttttccttgtattgaattactttgacaagccatgaaatgatcatcatctatataggctattcttcaaacagatctcactttgatgccgtccaaagctttgcttcggctgatcatggttacccaatactatagtattccgactcttcgttttacttg

SEQ ID NO: 27340 - DNA, 459 bp, Gossypium hirsutum
  Clone ID: LIB3148-002-P1-K1-A5
cggggcggacccacgccgtccgcccacgccgtccggattgggatggtggggatattgggaggtgtatacccttcaaaaattaaggggaccagggtgttactttgcaatgaaggtgatggacaaagcatctttagcaagtcgtaagaaactacttcgagctcaaaccgagcgagaaatactacaatccctggaccatcctttccttccaacattgtatacccatttcgagactgataaattttcatgtttagttatggagttcttgccctggcggtgatttgcatacgctacgacagagacaaccaggaaagcattttactgaacaagcagtaaagttctatgtagcggaagttcttcttgctttggaatatctccacatgcttggtattggttatcgtgatctcaagccggaaaatgtccttgttcgagaagatggacacataatgctttcggactttg

SEQ ID NO: 27341 - DNA, 374 bp, Gossypium hirsutum
  unsure (1)..(374): unsure at all n locations; Clone ID: LIB3148-002-P1-K1-A6
gaagcaaccaacaactttgtggtaccatttcctaataacagttttggagtaataccgcctatggtagcttcatttggaaatgccgaatctcaagcacgtgaagtttctcgcctttcaagttttgttgttcctcatccatttgacccagcaacttattatgcccaattctaccgttcaagtgttgataatgatggtcgcgtntctccctttgcttcttctggagttgctgcaaagtacaatgggaacgtttcagttcttccttcacagacttctcagtctcaagagggtggaaacttaattgtactgaccacaacaagttcaatttctgtagtgactcaagctgctgggatgatgcaaagttctttggctgtgac

SEQ ID NO: 27342 - DNA, 298 bp, Gossypium hirsutum
  Clone ID: LIB3148-002-P1-K1-A7
gcgtccggctatgcgatccccctatctgaccaccacacttctttatgcctccatacgaaattgattgtgggggggctaataatggagtatggtcagtctactattataagcctcacctctaatggaatgtactgtattctcggaccccatctaaagcttcaattttgacgaagaagagatttttctatgaatacaaaaagaaggtatgcttgcttttttattatattatgcataaaacatgtggcccacctaaggaagacgaaacatcatgcacatacaaaagaaacacaaggcgttc

SEQ ID NO: 27343 - DNA, 99 bp, Gossypium hirsutum
  Clone ID: LIB3148-002-P1-K1-A8
acggttggtaagctgaaaaagcttgatgtttgatgtacgttgtgccaggtgttgcttatgtagcttcttgaatctgcaatacttctctgcctctttctc

SEQ ID NO: 27344 - DNA, 378 bp, Gossypium hirsutum
  Clone ID: LIB3148-002-P1-K1-A9
ttttaacccaaaaaagaaaagaacgctcaaaggattagcaacaatgggtctctcaggcgcgtctctaatccttgttcgtggtcgctccttgtgctcttatggcttcagccgtagctgctgaagccccagcaccgagtcccacctcaggaaccgcctccatctccccctcatgcgtctctgttttctttgccgctgccacggctctgcttgtcggctctactctcacgatctgaatggtgttggctatcgatggcgtacagaggctggatgattactcatatatatagatttaattactgggaggagtgaagtgtactatcagtcttagcatatctaggactacctatctatataaatatgcaagagtcctcagaggtt

SEQ ID NO: 27345 - DNA, 451 bp, Gossypium hirsutum
  Clone ID: LIB3148-002-P1-K1-B12
aggagctgtcagagcatcttggaatccgcagactgaatgagcggctctcacatcctgcagggcaggactcagttgaatctattttcccgagggataatcccaagaacacaaggttttcgatcaactttttcacttccattgggcttggtggtataactgagaatttgcgtgagtatttgaagaacatgccccggcttatcatgcaacaacaagaaccggcatctgaatcagaatcaggtgatgagtctgggagctttagttcatcggattcagaaagtgctagttcagagccggagtcagattcgtcaagttctgatgagggtgagaggcgcatgaagaaaagaaagaaatgaggtataatggctgctgcttaattgaagcgtttagtatcaaactcgtgaatgatatatgtctttctgatatataatgcatgtcgtcggttttattcctt

SEQ ID NO: 27346 - DNA, 342 bp, Gossypium hirsutum
  Clone ID: LIB3148-002-P1-K1-B2
cggacgcgtgggtttcacaccacattcttcagtgcaggcaccatggcagcttcctcagctgtggtcacccctatcttctccaccgtccaaaagaagaatggcattgttaccccctccagcatctcattccacggccttagacccctaagcaagggcaaatcttcatccaacgccatctccttctcaagaaactcagctgctagtgccaggcttgcaatcaaagcagagctgagcgcccaagttgtgataagcgtcagcactgctctctcccttttcttgggtagatttgtgttcttcaacttccaaagagagaacgttgccaagcaagtgcctgagcaaaat

SEQ ID NO: 27347 - DNA, 318 bp, Gossypium hirsutum
  Clone ID: LIB3148-002-P1-K1-B3
ccgtggttgatctctgagtaggaaagaaggacaagcctttcctcgtctctgaccacaacccctgaggcagatttatggtgagtcgcatcatactcaccatcaaaatttattttaacgaattcgcgatgtgggtagctccactttcttgtttcctttcccttaattgaccttcttatttcaagcccattaggttcaacaatatagttgttgatgaagtctgctatttgttgccctataaaaaatagatcaaaaatccaggtaatccactataaaaaatccatgttaggaaccagaatcaaattctgaatttttaatagt

SEQ ID NO: 27348 - DNA, 136 bp, Gossypium hirsutum
  unsure (1)..(136): unsure at all n locations; Clone ID: LIB3148-002-P1-K1-B4
aaccgatgcagcctttacttgtgctgcttgtggctgccataggaatttccatagaaggggtgagagttaaccttgttggccactgttcttcggctccatcttctaatggagcataaaaataatatatntatatttc

SEQ ID NO: 27349 - DNA, 284 bp, Gossypium hirsutum
  unsure (1)..(284): unsure at all n locations; Clone ID: LIB3148-002-P1-K1-B5
atcattgacttcattgagaagaacagggaaaaaactgctcatcaagaggcattaaaagatgagctctgaagaggggacttgaaaagagaagaggcataaatagtgcattgtacgttaaatacgagaattgctattgactaagcggatgactgatctcccgtttttccttagctntacatttaaaaaagacctagctatgaataatgcaggatgtatttttatttttagaaggtttagacgatgttataatagttctgtaacagttaaatttgctataagaaaca

SEQ ID NO: 27350 - DNA, 392 bp, Gossypium hirsutum
  Clone ID: LIB3148-002-P1-K1-B6
cccacgcgtccggaaagaccatcaccctggaagttgagagctcaaacacgattgataatgttaaggccaagatccaggataaggaaggaatcccaccagaccagcagaggctgatttttgctgggaagcaacttgaagatgggaggacccttgcagattacaacatccagaaggaatccactttgcacctggtccttcgcctccgcggtggttttaagtgttgtgccgaacacctgtccagttattgttgatgtgttaagtttgttatgtttgtgggtcgtatgctgatgtgagctggccactaggcaggggaagcttacaagtaaaaataattgctttttataaacgcttttagttgttttttaggtttgaataagttcgtttttgcattc

SEQ ID NO: 27351 - DNA, 213 bp, Gossypium hirsutum
  Clone ID: LIB3148-002-P1-K1-B7
ctcgtcggaggggttctgattccggaagcatggattatgcaaactctgatgcatggtctgccgcatatagcactgttgcagcaggggctgcagttgttgctgggcttggcttattagcatacttgaggaaagctgggaattagcatcggtagaaacttcatcccatatgtaactcaaaaatttgaaggttaaatgcaacaactttctttaggt

SEQ ID NO: 27352 - DNA, 279 bp, Gossypium hirsutum
  Clone ID: LIB3148-002-P1-K1-B8
gtttttaggttcgattgtatgttgttttattgtatgtatttaacaaagtagttaaggtctagcgagtgttcaactcatatcaatgatataagttcaagttgtaaattcaaaaaaaaaaaaaaaaaaaaaaaaaaaaaaaaaaaaaaaaaaaaaaaaaaaaaaaaaaaaaaaaaaaaaaaaaaaaaaaacaaaaataataaaataagggtttgcaatcaaagaagagctaagctatcaaaacggggccggccgcttaaaaggatccattctttctcaccc

SEQ ID NO: 27353 - DNA, 345 bp, Gossypium hirsutum
  Clone ID: LIB3148-002-P1-K1-B9
cttctcccatcactggttctttgttcctctgcttattctttgttcctctgctggtgctggttctttgttcttctgctgcttctttgttcctcttctccaccaccgagatattgaaaggcaataggcctagtactcatttcacaagagatggatggttgaaaataatgaccaactttgagaaagaaacgggcaagggtttttcacaaagacaacttaaaaataggtgggatgccctaaaaaaagaatggaaagcttggaagaaacttaaaggcgaagatactggtttagggtggaatcctataaaaagaacccgtgatgcatcggatggatggtaggagagtaggc

SEQ ID NO: 27354 - DNA, 218 bp, Gossypium hirsutum
  Clone ID: LIB3148-002-P1-K1-C1
ttttccttttgacgactttgatcgctgttatcttgaacacgggcaatgtgttccatgtagcatgctgaaaataaagaacagttgagaatgtaagccatggatgttttttctatggttctcttttttgttttggtggtgatgatgaaatgctgtaaaaacgattatgtaaatgcgtttattgctactgatttgcattagaatgtagtgccattgcgaat

SEQ ID NO: 27355 - DNA, 181 bp, Gossypium hirsutum
  Clone ID: LIB3148-002-P1-K1-C10
cccacgcgtccgcccacgcgtccggtttatgttgcgcaagtagctagctgtttcttatttgtgaaaggtatccaaattttcaaatctagacttggattttgggagactgatttaaatggatgagttgtttttaaagcataatcattatgtttaaatgaactaagttggtttttgagattat

SEQ ID NO: 27356 - DNA, 456 bp, Gossypium hirsutum
  Clone ID: LIB3148-002-P1-K1-C11
cccacgcgtccggctcgctcgagttgactcggagaatacgggctcgaactcttctgagggtacttacgtggaacctgatcctgacgatgagggaattcagtcgccggatgtgaagcgtatccaggaagatttgcttgatatcttggacgattcggatccggttattggacttgatccggagattcagggtctcgacttggttatcaaaagcttcgaagaagagatctcggtccccgctcaggatccggtacaggaattagattccggcgagtcccggctggagctagggtttggtttagaagcttctggatacgagttggatttaccgccggattttgaggagaaacttgcgacccttgatgtcgaggaaagtggagggacaggagcagttggattagcggatatgatggggtatgaatttccgattccgagttacgaatcggtcgagttttgagt

SEQ ID NO: 27357 - DNA, 470 bp, Gossypium hirsutum
  unsure (1)..(470): unsure at all n locations; Clone ID: LIB3148-002-P1-K1-C12
gcaaagcagaaatcagctaaataaacaggaaaaatggacgcaattgactcactttttggtgcgctaagggagttcgctaaggacagtgttcgtctcgtcaagagatgccacaagcccgatcgcaaagaatttacgaaggtggcgctccgtacagcgatcggattcgtggttatgggatttgtaggatttttcgtcaagctcatctttatccccattaacaacattattgttgcatccggttaggtttgctttcatgttactgactcaacagcacacatcgagagataaattgtctgacatctcgaactaatttcagtatagactttggctttcctctatattcatatttgntggattttggcttagcttttagtgttgaaatggaaactacttgaagcaaaatcaattcttgagtttttgtccaaaataaataatttttatattttattttttttgtctgcctttttttt

SEQ ID NO: 27358 - DNA, 190 bp, Gossypium hirsutum
  Clone ID: LIB3148-002-P1-K1-C2
ctgaggctaaaagaggagaaatggacctcataagaactgagatcattgccaagactcaatggggaattgctaggctctttgcaggatcaaataaaggagttgattcttcattaaggattggaagaaattgaaaacttatggtggttattagtgaataatctaattaattatatctgcatgtatagatatt

SEQ ID NO: 27359 - DNA, 417 bp, Gossypium hirsutum
  unsure (1)..(417): unsure at all n locations; Clone ID: LIB3148-002-P1-K1-C4
ggaaanaccgggncggaccaagccgtccgcccacccttccgaaaagaaggaattccaccttatccagcaaaggttgttttttcttgggagggcaggtgtaaaacggaaggactttggctgattacaatattcaaaaggagtccactcttcaccttgttcttcgtcttcgcggagggttctaagccttaaggtctcccttaatgtgggtcttctggttttacgtgaaggactgtgccctgtaatggccttttaaataacttctagtctttgtttaccggttgcatctatgtatggtttctctttgaatggaatttgcatatttaccttaactgaaagacttgataaatagcaaatgataattgttccttaaagtgcctttttcctgcttgttacaagcttatatatttaaagttatct

SEQ ID NO: 27360 - DNA, 414 bp, Gossypium hirsutum
  Clone ID: LIB3148-002-P1-K1-C5
gaggaaaggaaggaggccgaaaggaacccgaccgaaaaagccaaacctgaggaaaccgcaaggaaaaaggaggaaaagtcccctgaggaaggtgaaaacaaagaagaggggaagaaaggaagatctgcagaagcagaggaaaatagtggcaatcatggtaacgaggaggaaaccatgaagagaatgatttactattaccagcccctttacgttatcgagcaaatgccgcctgctcctcagctttttagcgatgaaaatcccaacgctcgttgcatttcgtgatgatttatcattacgacaaacttctttttctacctgtagattatttcaattttactataagggtgagaagtatacagataactagtatatataattaatgttcaggtcttaccactggagatgagagtttta

SEQ ID NO: 27361 - DNA, 439 bp, Gossypium hirsutum
  Clone ID: LIB3148-002-P1-K1-C6
acccgtccgccaacccttccgccaacgcgtccggaagatcttgctagggtgcagcgagctgtttgtatgataagcaataacacagcagtggcagaggtgtttgcacgcattgaccacaagtttgatctgatgtactcgaagagagcatttgtgcattggtatgttggagagggcatggaagaaggtgaattctcggaagcccgtgaggatctggctgctcttgagaaggattatgaagaagttggtgctgaaggtggagatgatgaagaggaaggtgaagaatattgatgctactatcgcaatatcatttattttgaagatgatgggttcaccctgtgagggtatcctgttctttcttattcgtgtgaggtttctcaaattatgcctatggaataaatttagaagtcgtgttgcttgtcatttttttgttgttagaaat

SEQ ID NO: 27362 - DNA, 432 bp, Gossypium hirsutum
  Clone ID: LIB3148-002-P1-K1-C7
ctcttacagataatgaaatgattccatgtgtcccgaatacacttattcgttccgtgcacgatttgtatggtgaagagcaacaagacgccatgttgctgtggttagaggaacacggacgccgtttagagaatggtattatcaaagtccgtaaagaaggagatgatcgtagtatcaatttatttcccgaggttcctcccttatgtgttactactgtaacaaatggtgtgcaggttcgtgcttcggctgtgttcgttccagaattttctgacgtactagatgaagccgagaagttcatgtttgcttattcaatccgcatgtcactcttacccgaagggtgcgtcattaatggaatgaccttcggctcctgccaattgaataggaagcattggatcattcgtgctgatgaagaagtcgtattcaagtgtgatgatg

SEQ ID NO: 27363 - DNA, 440 bp, Gossypium hirsutum
  Clone ID: LIB3148-002-P1-K1-C8
cccacgcgtccgagtttggtgacaagtcctctattgttcaagctaatccctgcattacttcatcttggggtgctcttacgatggttctcccctgagagagaaagtcccattgaggttggaattaaaggagataacctccgttcagacagcggaaagcatcacattactttgatggtgcaagaaccccatgattcctgattataccatgtaagtaaactaatcgagaagaaacatctccattacatgtttgattggccgttttttgtgacgctgcaggtgaagttaatgatctcgtgaaacacactttgcttcctgtttttgttttggtttactaaccctactatatttgattaacaaactgcattgttcctcttaaaaaaatgccaacagcatgaggtaacctctagcttgtgaagcaatgccttgtaatcattcatttc

SEQ ID NO: 27364 - DNA, 270 bp, Gossypium hirsutum
  Clone ID: LIB3148-002-P1-K1-C9
cttaactctaatttttcaccatcatgacggagatgaaggtttgcatggacaacatctacgcaggaaagtcatcgttctttgaggactacacaacatccagcaaatgtatgttttggcttgatgtgatcatccaatttaaacactataggtataaactgttaattgtgccataagcggattacaagatcgttttttcttgttagtctacgtatgcacacatgttatggtcagtttgccatcattttcaatggtcaagcttgttttgctcgt

SEQ ID NO: 27365 - DNA, 456 bp, Gossypium hirsutum
  Clone ID: LIB3148-002-P1-K1-D10
cccacgcgtccgaatatccgcctcccgacatcggcaacgatcgttcctcgatccgacggtgatgacgacctttactgtgccagctggcagttagccgtcgagaccagtaacgcaggaagttgggccgcaatcccctcccgctgcgttcccttcgtcagagattatatgaccggtcaacgctacgcttccgactgcgaggtcgtcgctaattactccctcgcttacgcttccaccgtcaagatcgcatccgacggcaaagacgcctgggtcttcgacgtcgacgagactttgttgaccaatttaccctactatcgagatcacgggttcggatcagaaacttttaacgagagctgttgggatgaatgggtggcagaagccaaggccccaactataccatcgagtttgaattgtataatgggttgaagcagatgaggttcaaaatatttgtgcttaccg

SEQ ID NO: 27366 - DNA, 205 bp, Gossypium hirsutum
  Clone ID: LIB3148-002-P1-K1-D2
cccacgcgtccggttttttactttgcctgtcttatgtaattcaaggccgaaaaaggtgtgttagtcacgtcttgctccaataaggagttaggccatgtaatcttccacttcaatctttattcttagctgcaaatctactttttttcctatgctttcttgaaggtatattatgagaaatagctgcctgccattcagccactatgtc

SEQ ID NO: 27367 - DNA, 65 bp, Gossypium hirsutum
  Clone ID: LIB3148-002-P1-K1-D3
gttttttaaggtaatgatactttcgcgtgaagtggttagagagccacaactcacttactagtttg

SEQ ID NO: 27368 - DNA, 460 bp, Gossypium hirsutum
  Clone ID: LIB3148-002-P1-K1-D4
gtggatggccacaaacgatattaaagtgccctccttccgaagtcagttcgagtaacggtgagacggttcaaaaaaggaatcaccttccaagttcctctgcttgtgtaactacagagaaacaaaaatcaatgtccaaaactaatttgtgttaccttgttttattgttaattctattgccttcttcatatttccttccgttagtccttgccaaatctcgaaatccgatcacagattctgagattaagaaaaagaagagtgaatgttatgctgatatcgacagtggactgtggggtgggcactgcaagtcttcatcaatagcaaaggagaattgtgccttaaagtgcctttctcctgcttgttacgagcttatatatgaaagtgatccgctcgaagaaggagagaaagattatataaggagccaagaattcaagtactgtatgtataagttatcattaggaga

SEQ ID NO: 27369 - DNA, 335 bp, Gossypium hirsutum
  unsure (1)..(335): unsure at all n locations; Clone ID: LIB3148-002-P1-K1-D5
agacaaactcagcactcagaccccatcatctccggagtttgcgcccaagtgaagatgactctttgaagggaccccagagatgggcaccctactgaatcagtgacatnggatgcnagctgtgcgatcaaagcttgcaaatgtaatcccatgccacctgttgaaaaagcttgatgaaaggccataagattattgaaaaaagaaaggcagcaaaataacaaggcctctgtaatggatttattttcaaggatggatgcctgcaaggtctatacatatggctctctctgtcttgtgtaatagaagctttgtttgtggtgaaaataatgtataagccattt

SEQ ID NO: 27370 - DNA, 443 bp, Gossypium hirsutum
  Clone ID: LIB3148-002-P1-K1-D7
gaaaaaaaaaaaagataaggaaaaatgatgcgaagtcggttgctatggttcagcttgggggtttcggtgacagcggcttcaatctctcaattcatatatagagacctttggactgatcgttacgcccttaaatctgatatgaaggagaaattcgatgctttagaagctagggtttcgaatctagaatccctccctacggagaatccaaatccagctcaggttgatggctagatgtttatttggggttcacataacttttgtgctttgaatgtatttgaattttttttgtttcctttttattatatatttgaggttattgaaactaagagttcaaagctctatcaacagacgggatcacccggttgttggcgaatgtatttgatttcgaaacaaaaaggaaaaaagaagatttaagttacttttaaaaaaaaaaaatttttttt

SEQ ID NO: 27371 - DNA, 434 bp, Gossypium hirsutum
  Clone ID: LIB3148-002-P1-K1-D8
cccacgcgtccgagcaaataataacaatcatcggcggatccccattcaccggtaatgaagcgcaggtccctctcatttccggtgcgtttaataatcactttatacgccatggacatgaagaaggtctccaccgccatcattgttgctgccgcctcaatgagcgccgtcatggctgccggtgcaccatctcctgccccttcagccggtggttctagtcctagctcctctcctggttccgctccagcatcaggaccggattccagcatggctgccgctaccttgcctgttcttggatcattggttggggcttccattgtttctttgctttcttacatgctgcagtaagctacatgtacgaaaaatcaacatgtgaacgattttttttttttgaaagaaacatgtgatgaatattgaaaatattgaataaatggagc

SEQ ID NO: 27372 - DNA, 467 bp, Gossypium hirsutum
  unsure (1)..(467): unsure at all n locations; Clone ID: LIB3148-002-P1-K1-D9
tgttgttaattntctatttaaaaactttttttacacccaacannccccaaaccactgttcgttttatataaaaagaaggtggtgcttaaaaaacaattttataattataataatcttaatattattatttttattatatacatattatcattattttattattatattaaactataattattattttttattatatataattttaatattatattatattttttcattatatatttattataattatatattttattataatattatttcatatatttttatttatattatattatacttaattaattttttatcatttatattaatataatattgttttttataatataatatttaataatttattttatattttataatatattatttaatataaatatattatactatatttttattttattattataaaatcatttttattttatcaaattaattatattata

SEQ ID NO: 27373 - DNA, 250 bp, Gossypium hirsutum
  unsure (1)..(250): unsure at all n locations; Clone ID: LIB3148-002-P1-K1-E1
cccacgcgtntcgtaactgttctcagtattgggtgcttgacagacggtggcatatctatgggtggtctctagcgttacctggttttgtttaatttactactgtatcttgtcattgtcaagaggtgcccccttggttttccaaggtggcttgaaacttttgtttatgattttcgttgaagttgcggaattatttattatgaaaaaaaaaaaaaaaaaaaaaaaaaaaatataaaaaaataactaatattat

SEQ ID NO: 27374 - DNA, 93 bp, Gossypium hirsutum
  unsure (1)..(93): unsure at all n locations; Clone ID: LIB3148-002-P1-K1-E10
gtccggaaattttgaaagtaatttaatgaaattcaaccttcgttnaaaaaaaaaaaaaaaaaaaggggggaaaaaaaaaaaaaaaaaagaaaa

SEQ ID NO: 27375 - DNA, 250 bp, Gossypium hirsutum
  unsure (1)..(250): unsure at all n locations; Clone ID: LIB3148-002-P1-K1-E11
cccacgcgtccggtggtggatagcataatcaatgtaggctgtgatagtgtttgatcaaagccttatgttaatgctttagatgtttccatgttattcttttagatgcgcatgccatctaagggagaaatgtacctctgaatcctgttggttccttttgaccttcagaaattaatagttgtagatgggataatctgcttctatatgtacttttgatttaaagttgaatggcttagataaatcctttttgtng

SEQ ID NO: 27376 - DNA, 463 bp, Gossypium hirsutum
  unsure (1)..(463): unsure at all n locations; Clone ID: LIB3148-002-P1-K1-E2
gacgaatattttatcaagaggaagctttatccaaatgttgatttctattctgggttaatggacgcggccatgggatttccaccagagttcttcactgtgttatttgcaatccctcgaatggctgggtacttggcacactggcgtgagtctctagatgatcccgatacaaagataataagaccccagcaggtttataccggtgtatggctacggcattatatgccactcaaggagcgcatggcgttgaatgatgcagacaagcttactcaagtatccatatcaaatgcctcgagacggcgactggctggttcggnggtttaggctttactgttatattataacatcaccaagtgaaataaaatggcaaacgggccgtatatgtatctctgctaaaataaatttactaccctcgtcattgccttctgcttgaaaactgtatgcttttgagctgacataatgcaat

SEQ ID NO: 27377 - DNA, 239 bp, Gossypium hirsutum
  Clone ID: LIB3148-002-P1-K1-E3
tgctttatctattattgcattacagatgtattgatgtaacaagttatcaagggaagttgagatggttattgttgctgctctcattgtgatcttgatatatggtatgaaccagtacacaccaacccattgttcattaggggtaaaaaaattacggttaatggtgttcaatcagttttatcaagctttgtttgttggatgctttttggcaggcaagtctgtttaatgtcgaatttgttgaa

SEQ ID NO: 27378 - DNA, 293 bp, Gossypium hirsutum
  Clone ID: LIB3148-002-P1-K1-E4
agcacagctgaaagctgtttgtgtggaggcaggcatgctagctcttcgccgcgatgcaactgaggtgaaccatgaagattttaatgaaggcatcattcaggtgcaagctaagaagaaggcaagcctaaattactatgcataatgggagagcatttcagtgcaagaatgtgaaggtggttgtgttgagagtaggttgatatacatatttgactctctgcccaattatattgtgttaggttttacttggttgcacttaatttatataagaaacccatttacaaatggattgttct

SEQ ID NO: 27379 - DNA, 223 bp, Gossypium hirsutum
  unsure (1)..(223): unsure at all n locations; Clone ID: LIB3148-002-P1-K1-E6
aaaaaaaccaagtatataggttgtgatggtaatgagttttatgttgcttactcatataagtgttttgattgaagtttctaacgaagtaaacttgcattcttactatcagaaaaaaaaaaaaaaaaaaaaaaaaaaaaaaaaaaaaaaaaaaaaaaaaaaaaaaaaaaaaaaaaaaaaaaaaaaaaaagcaaaancggggcggtcgttttaaaggaaccaaaat

SEQ ID NO: 27380 - DNA, 284 bp, Gossypium hirsutum
  Clone ID: LIB3148-002-P1-K1-E7
cccacgcgtccgcccacgcgtccggttttgattgatctatgatgtacatctaaagctagggaaccatattttacagttgtctcccggctttgaattcctccattgaaaaatttcaggttgcgttggatatgtaggaaatggctgcacatatttatatcatagttgtcgtcttcttcttttttctcctttcctggaaagttaatacaaaatctgtatcttatttatttgtatagttggtactgaatatctaaaactctttgttatgtgatatgtatttgattact

SEQ ID NO: 27381 - DNA, 421 bp, Gossypium hirsutum
  Clone ID: LIB3148-002-P1-K1-E8
cacgcttcagtggggagccatcacctgttaaatcaacagtgacaaaagcagttgcagagggtcggcgtactcatgctgatacatggaatgttcaaaaggattcatttaccgaagaacaacttgaggtcctagcagatacatcatcttcgtcatcatattttgcttgatctagatttgctttcctttaccaagagagagaagatttagcagaaatacaatgattgagaatagtagtgacaagttttatgatttacttataagtatcgtcatagttgaactatagcatgatttttatttacattgccaaatataaccttttatatccccccccccccaaaaaaaaagaagtttattgttggccatgtaatagaaattcttgcctacattattattctttgttgtaaaggcttctctataaata

SEQ ID NO: 27382 - DNA, 411 bp, Gossypium hirsutum
  unsure (1)..(411): unsure at all n locations; Clone ID: LIB3148-002-P1-K1-F1
agaagatctcatgcgccgncatggccgccgccgctttataaccccggccctggcttgtggggcttttccagctccaatctcagcttcagctccagctgcagctgcagcttcagcttcagcatctggcccaggcccagattccagcatcgcaatctcaacaatgcctgttattgagtccttggttggagccacacttgtttctttctttgcctactttttacagtaagccacagcaaaaaatggatgaaaccatgaagtattgaagaatcaaaaaaagaaatggtggattaataaatgtaaaaatactacttggggtgctntctttctttttgttcattgttgaagatggctttcttcactttacttgtttgtacgtttatgatatatgtttgaattccaagtgatactttg

SEQ ID NO: 27383 - DNA, 302 bp, Gossypium hirsutum
  unsure (1)..(302): unsure at all n locations; Clone ID: LIB3148-002-P1-K1-F10
ataccggggccgacccacgccgtccgttcattcaatctctggtttcaaattgtttccttggtttttaagatgaaaatgaaatttgtgttgttgtacttctaaaatacgttagtagggtaagttattaattggcatgctaccgtaagatgtcagaaacaattgcttaccttcaaagagaagcttctgttgtacttgtgaaaatgctgtgtggctttcttttccctttatttgtttatgatgcattgtctattctatcttgtagaatcttgaattatactatttatacttgttgattngacaaa

SEQ ID NO: 27384 - DNA, 454 bp, Gossypium hirsutum
  unsure (1)..(454): unsure at all n locations; Clone ID: LIB3148-002-P1-K1-F11
atgctgatcatgttactggaactggcctcatcaagggcagggtgcctggtgtcaaatccgttatttcaaaggccagtggttccaaggctgatgtttttgttgaacctggtgacaagatctcttttggggatctctttcttgaggttcgtgctactcctggtcatacaatgggttgtgttacctatgtcacgggagatggacctgatcaacctcagccaaggatggctttcacaggagatgctctgttgataaggggatgtgggaggacagattttcagggtggaagttcacagcaactctacaagtcagtgcattcacagatttttacattactgaaagagacattgctatatccagctcatgactacaaaggattctcagtaaccacttggggagaggaaatgctatataatccacgcttgacaaangatgaggagactttcagaaacatcat

SEQ ID NO: 27385 - DNA, 344 bp, Gossypium hirsutum
  Clone ID: LIB3148-002-P1-K1-F12
aaaaaaaaggtcttagtaataaatttttaaaaaatcaattaaacccttttaaaattaaaagatgagtttaaaaaatataaaaattataaaaaaataataaaaaagtttaaattataactttttattaataaataacaatatcaacctattaaaatctaacatttataagattttaaaaaaaaaaattgacccctactcttttattgaaactagaaacttttcgtaatctaagtttaagtttagagatcaaattgaaaaaaaaaaaaaaaaaaaaaaaaaaaaaaaaaaaaaaaataaaaaatttaaacttaaagtacatttttttttttaaaaatttttatatt

SEQ ID NO: 27386 - DNA, 84 bp, Gossypium hirsutum
  unsure (1)..(84): unsure at all n locations; Clone ID: LIB3148-002-P1-K1-F2
gtaaaaaccaaagcaggggccgcataaactaaatacctgcgtacaaacaaccagtcatattaaatcattctttttaacttcana

SEQ ID NO: 27387 - DNA, 382 bp, Gossypium hirsutum
  Clone ID: LIB3148-002-P1-K1-F3
ccaacgcgtccgaaaaaaaaaaggaggcaaaaaaccatggccaaggttcggtggtccatggttgtatgggggcttccagcttgggttagtgctacacccattctgaataaccaattgggggttgaaggctatgtgtcctgtgatacttgccgtgctggttttgaaacccctaagactagaaggctagctgatgccatggttaagctggtatgctccgacaggaagaccggcggagttgttttcgagaaggagggatataccgacaaaaccggaaaataccagattcgtgtatccgaggatcacttggatcagatctgtgatgcagttctcgtgaagagcccccagcttggatgtgccacaatgtcccccggtcgtgaacgtg

SEQ ID NO: 27388 - DNA, 328 bp, Gossypium hirsutum
  Clone ID: LIB3148-002-P1-K1-F4
cttcctttcccttcatcatcctcctccggcctagtacttcccaaaaacatgtctccgagggaactctttcccaccctctagtcttcaaattcaatcttaattcttcacctaagcttcttaaatcgtttgacccagagtttttcctccatctccgaacccgcaaaacaagttctcttggaggaattttgaccgacaaaactggggtgcgcgactcttcaagaactatgattaaaacttctgtgttaaaggagtctagggacagagacgatgggattcaagcgcttgaacaagaagtagaaagtttcattgacggatcaatgcgggttca

SEQ ID NO: 27389 - DNA, 443 bp, Gossypium hirsutum
  Clone ID: LIB3148-002-P1-K1-F6
gctttatagtcttgatgcaggttccgtcattcactcgctttgctttagtcctaataggtactggctttgcgcagccaccgagcagggtatcaagatctgggatctggagagtaagagcatagtggaggacttgaaggttgatcttaaggctgaggctgagaagtctgacgtcactgacatcggaaataagaagaaggtcatatactgcactagcttgaactggagtgccgatggaagcaccttgtttagtgggtacactgatggtgtaatcagagtttgggggattggtcgttactagatatgcttgtcttgagttaagattttgtttcaaatgtcggaaggttttttggtttattttcttaatatggttggatattgaggccttgccctcttctattctaatttggtttgggttatttaattaccggcttaggtttgaattg

SEQ ID NO: 27390 - DNA, 438 bp, Gossypium hirsutum
  Clone ID: LIB3148-002-P1-K1-F7
cgaggcaggcaagcatctaggtgtttctggacttggtgggcttggtcatgttgctgtgagagatcggtaaggcctttggattgaaagtcactgccattagtagctccccacagaaggagtctgaagcaatcaatagacttggtgctgactcattccttgtttctaacgatccggaaaaaatgaagtcagctattggtaccatggactatatcattgacacagtgtctgcggtccatcccctacttccactgcttagtctgctgaaggtgaatggaaaattggtcactgtgggattgcctaataagccactcgaattgcctgtttttcctttagtcatgggacggaagcttattggaggaagtgatgttggagggatgaaagaaactcaggagatgctagacttctgtgccaagcacaatatcactgcaaatatcgagc

SEQ ID NO: 27391 - DNA, 415 bp, Gossypium hirsutum
  Clone ID: LIB3148-002-P1-K1-F8
tgccttccaagctttgttacatgcagtagcttcaatgagaggaagaagaagatgagccctgcaatagctgtaaatgataggcctcaatatccatcaattcactagcacgtaggtcgacgaagccagattctcgacttctagaggctcgagattaagttggaagttttgttggaagtagtgaagtcgttggataatggtgatacataaatatggggattagaaggcatgtaaagaggatccaagtaaatgtttgatgtaaaactcctattaggaattttaccaactcaatcaaccataagtgaaaattttcttttcaacaagaagttagctcataaacaagtgttttgtaataaaagggcaaaagaatcaaaggaaaaatagtatatgaccctcgtaatgatatgttaagcaactg

SEQ ID NO: 27392 - DNA, 467 bp, Gossypium hirsutum
  Clone ID: LIB3148-002-P1-K1-F9
ctttgctgaaggccttccattccaatatatgaagcaccagattggaggacatgacgacaagaatttgtcatacagttatagtttgatcgaaggtggacctttgggggacaagcttgagaaaatcagctatgacaacaagtttgaggcagctgcaggtggaggaagcctttgcaagagctcgatgaaattttacactgttggcgactatgtgatcactgaagatgagatcaaggctcaaatcaaagggagtgaaggagtttacaaggctgttgaagcttacctcttggctaaccctgatgcctgcaactaagatatatgttggttgctttgaattctcataacttgaatttaaagaatggtgtgcttttggtattttcctttttagtcttaaaacttaaaccgtctttcgattgtcttaataaaaaatgcggtggtggatgatctttggatcatcttgatatatgatg

SEQ ID NO: 27393 - DNA, 308 bp, Gossypium hirsutum
  Clone ID: LIB3148-002-P1-K1-G10
attgtattgagtatggaccgcagagtgggggtatggaacgtataaatcatctcagttttgtgtcgttgcataggtctgccggtgaagccgtctgtacaactcattttcgtgttgattattacgagaaacattgatgtattgtggaagagattttgagtgtttactttgtagtttgcaacattatatttgatttttttttttgaaataatatatttggttttgatatagaagtcaaaaaaaaaaaaaaataaaaaaaaaaaaaaatctaaaattataaaataaaaaattataaattaaaaaatataaaa

SEQ ID NO: 27394 - DNA, 263 bp, Gossypium hirsutum
  Clone ID: LIB3148-002-P1-K1-G11
ccttcttccttctttttcatacatattaggtgtagcatttttcactgttcctttgaatccgttcttcatccaaaatcttggcttagagatttcaaagggccttaagatcatgtccatcttaagcaagagtccaagcagcaacatgggttcttctcctttcttccttgaattcaggaaacaagcttctttcttcctcaaggagaagatcaaaacagctcgtttagctttaactgatgtcacccctgctcagctgttgactgaag

SEQ ID NO: 27395 - DNA, 205 bp, Gossypium hirsutum
  unsure (1)..(205): unsure at all n locations; Clone ID: LIB3148-002-P1-K1-G2
ttttagttctggtattttgaaatactgtttctngcactctgaattttcattgatgtgctgggaattagcgacatcaatgtgtattttcagttgatattatctactcttcttatccacttccaactatggatgttctcttgttctgttataccgctttctgggactctctgtttcagcaaaagcatacaaaatggtgttcataaaa

SEQ ID NO: 27396 - DNA, 432 bp, Gossypium hirsutum
  Clone ID: LIB3148-002-P1-K1-G3
aagaacactgggcaactaatggaaaaaattctttttctagatatgagtacgaagaatgtgaatctgaaggtgccaataaaatgatcgaataccttagaggtctaatctcaaagagtaaggcaggtgaaaagtatggaaattatgtccttcaatttgctgatgacttttcatataccgatcccgtggatggaagtgtggcctcaaagcagggtgttcgatttgttttcacagatggttcaaggattatattccgtttatctggaactggctcagctggtgcaacggttcgaatctacattgagcaatttgaaccagatgcttctaaacatgacatggacgcccaagtggcattaaaaccattaatagacttggcatcgtctgtatcgaagcttgaagacttcacaggcagggagaaacctacagtcatcacat

SEQ ID NO: 27397 - DNA, 371 bp, Gossypium hirsutum
  Clone ID: LIB3148-002-P1-K1-G4
ggttgaaaaaaaaaatagaaatttatttgaaaaagaaaaagaaaaagaaaagaccaaactccattcgctcttcattgggattacttgccctcgatcggggaattatcaatgaaatgataaatcgaatggataacgaccgttctgagcattaaaaagaaaagactttggtttgaaagtttcgaagtcaaaagatttcccccagggcatatcataactcgggtttatgacatcaatattaagagggggaattggattaaatttattctctgtaaatcttcaatttcaatggcaggcccaccttcaattccttgctttgggggattttggttctttttaagctccttaagatgaccttagatctttcacaattt

SEQ ID NO: 27398 - DNA, 387 bp, Gossypium hirsutum
  Clone ID: LIB3148-002-P1-K1-G7
cccacgcgtccgcccacgcgtccgggagtctctgaatggaaagaaatttgatgataaggagtggtatgttgggaaagcgcaaaagaaatctgaaagggagcttgatctgaaacttcgatttgagcagtcaatgaaagaggcagcagataagtttcaaggagcaaacttgtatgttaagaatttggatgacagcataagtgatgaaaaacttaaagagctattctctcaatatggtatcataacgtcatgcaaggttatgcgagatactagtgggataagcaaaggatcagggtttgttgcattttcaactccagaagaagcatcaagagctcttgcagagatgaatggcaaaatggttgtcagcaaacctctctatgttgcactagc

SEQ ID NO: 27399 - DNA, 447 bp, Gossypium hirsutum
  Clone ID: LIB3148-002-P1-K1-G8
cccacgcgtccgagctgattggcttgttgagaagtgtactgaactgggagctagtagtgtaacacctttgctcactcaacgttcttctaccatctctgacaatcgggtggagagattgcagcgtgtcattttagcagcagctaaacaatgccaacggttgcatgaaatgaaactgaatcatcccatgaagattgataatcttatacctcttgttgccaagtcgaagcagtcttttatagccatagcagaaggtactcctctagttagtgcattgactgcaacaacaaaggaacctagtgggctgataatagtcggaccagaaggggactttacagagaaagaggtggatttgattacagaagcaggagctacagctgttggtcttggccctcatcgtttgcgtgttgaaactgcaactatagctattttggcaacccttactctatg

SEQ ID NO: 27400 - DNA, 428 bp, Gossypium hirsutum
  Clone ID: LIB3148-002-P1-K1-G9
aaaaaaaaaaaaaaaaaaaaaaaaaaaatttttaaaaaaaaaaaaaaaaaaaaaaaaaaaaggaaaaatataaaaaaaaaaaaaaaaaaaataaaaaaaaaaaaattaataaaaaaaatttataaaattaaattaatatataatatttattaatatatttattaaataatatatattaaatttatggggtgtccttttttttattttaattttttttccctttttttttcatcttatttttttttttttttatcccttttatataatttttttcccttttcttttaatatcttttatttttataaaccttttctttttcatatttttattctttttaaatatatttctctttttttcttttgttatattataatatattaccctaacaccaccccttttttcaatttgtctctacttttttttttttt

SEQ ID NO: 27401 - DNA, 172 bp, Gossypium hirsutum
  unsure (1)..(172): unsure at all n locations; Clone ID: LIB3148-002-P1-K1-H10
actagtaaatgaatatagttccaggaaattcgccagaccagtatctttattttacctgggagtctgtaaatcctataatttctaatagaaatttcttgtttcgggttgtaaaagataaacattaggattcaagctagcattatgtaatggtttataggcgcttctgactgng

SEQ ID NO: 27402 - DNA, 290 bp, Gossypium hirsutum
  Clone ID: LIB3148-002-P1-K1-H11
gctatgagttcacacagagaacaggggactctggatgtgtgcttccgagacttcatttacgattactaagtgcagttaatcgatcagaatctttcagcatgttgaatccatatttccaagtggagcatctttacataatctttgtaccttgattgtataaattataatactaatagaataaattgcggatgtgcatttctgttctaaaaaaaaaaaaaaaaaaaaaaaaaaaaaaaaaataaaaaaaaaaaccccatttttttaaaataaaaaaaaattatatttaaaaa

SEQ ID NO: 27403 - DNA, 165 bp, Gossypium hirsutum
  unsure (1)..(165): unsure at all n locations; Clone ID: LIB3148-002-P1-K1-H12
ataggatttagaaaaattttcgaagatcaatcaagccgccatcnaaacggcgtgataatttattgggctacaaagcaattacaggcacaaaccaatgtaaagattaattttttttaccttaggatgattgtatgcatatagttcccacagtgaaaaatgagttgc

SEQ ID NO: 27404 - DNA, 130 bp, Gossypium hirsutum
  Clone ID: LIB3148-002-P1-K1-H3
aaaaaaaaaaaaaaaaaaagggagggaaaaaaaaaaaaaaaaaggggcgccccttttatagaataccaaaatttcctccccgtccatacgaaaaaaataaatcttctatatagtgacctaaatataatat

SEQ ID NO: 27405 - DNA, 385 bp, Gossypium hirsutum
  Clone ID: LIB3148-002-P1-K1-H4
catttttcccctttggattgggacctcgatcttgtgttggtatgacccttgcaaccatagaaaccaagattgctctctccatgattctacaacgttacaccattaccatttcccctacctatgtccactctccaatagctattatcaccattcaaccacaacatggaattcaaataatacttgagccgctgcatagctgctaagaactaggggcttaatatagttagttcgtgtatggatgacatttaatatgtctaaggttctagcatttgcagccccttccctattcctagctatgcccatctttatacataattaaatgcaagtagctactactttccaagatggcgaaacatgctaccaataaaaaaaatgttgcttttat

SEQ ID NO: 27406 - DNA, 149 bp, Gossypium hirsutum
  Clone ID: LIB3148-002-P1-K1-H5
agacttcatctgcgttagtaattacagttagtcgggcagaatcttttagcatgttgaatctatatttccatgtggggcttctattctttgatttttggaccttgaatgcataaattataatactaatataataaattgtggtagtaaat

SEQ ID NO: 27407 - DNA, 177 bp, Gossypium hirsutum
  Clone ID: LIB3148-002-P1-K1-H7
gttggttttaatgttccatctcgttggaacatgttattatttccagtatgtacctgtgacgatctgccactgccgcccccaggactgtatttcaagcatttgggtcttggttgataatgttaggtttgctgtctaaaagtgaataattaattatattgactattaatatggcaagtc

SEQ ID NO: 27408 - DNA, 169 bp, Gossypium hirsutum
  Clone ID: LIB3148-002-P1-K1-H8
gggcttccctcttaccgaataaggatttttaaatcccaagatcatatcgaatcttaagcaggcgagcatagcataatctcgatatgattttaacttatatatatatatatgtactcgtactcatcatatattgaactttattcaataatttagcatctattttacacac

SEQ ID NO: 27409 - DNA, 378 bp, Gossypium hirsutum
  Clone ID: LIB3148-002-P1-K1-H9
agaattttcaattaaaatcttctttatcataatcgtatgcaagtgaggatagaaaagatgtgtaaggatgaactcaaaactcaaccccacccaaagttcttatcattaaaccaagatattgtgaagaataagaagggtgaagatacagtgtatctccatcagaacttcgtcgccggttgcatgtcgcttgtcggccacttcaacaaacaaaatttctcaattccttttttttttctctgccactttaatgaaacataattatagatggtgtgtgatgtttctggggttatcctttttgtcactttcattgagtcaagtccaactttttcaaacaataaattttccacgcaatcaaatgatttacacctatttacgctc

SEQ ID NO: 27410 - DNA, 220 bp, Gossypium hirsutum
  Clone ID: LIB3148-003-P1-K1-A1
tctagacaggcttacctaatatcatagtttatcaatgaaggaactgttatcgttgtttcgatttcaagtttcaaatgttacgcttcgcattgcaagaacttcagcctgtatataattcatatgttctgcttcgtagtatggataatgtaatgcaaccattctgacaaattaccacttcgatttagctttataattatcatcagaaatggcttgatactgc

SEQ ID NO: 27411 - DNA, 422 bp, Gossypium hirsutum
  unsure (1)..(422): unsure at all n locations; Clone ID: LIB3148-003-P1-K1-A10
gacccacgcgnccgaaagaagaaaagcgatgagcgagcagacttgtaatctaggctttctctatttgattgcgggatatgcgttcgttttttggtgcgagtgtctgggtttatgttgcgttcgtaaatgtgcgtatccaaatacaatcgatcaattcctggctttagtagccgaaactaaaatgaaatatgaataatcaaaatacaatctttttgctttttgctgctggcgtttaaccatttcttcgcaggtacaggggtacggggtcaactgtggggatatgtggcactagacgtggcgtgtacggaggcgttgaaggcggtcgaactgcgcgaaggctggggctcgcctgcggttgcggcgcaaatgtgaggaggaaaccctagggttacttttctaaaaacattgggcctatcgggctt

SEQ ID NO: 27412 - DNA, 340 bp, Gossypium hirsutum
  Clone ID: LIB3148-003-P1-K1-A2
cccacgcgtccgaaggtagagaagacatgttagctgttataggcctaaattctcaaaaggactcgactttggaaccttctcatcagttacagcaaagtcttgtactgcactcagacttcagtgccaactccaacgcatgtcatggttttgggtgctattgattttcttccaaaagaggccaagttggcggatagttcaatcgctttacattctggaaatgcaatggctgtggagcctgaaatggtgtcacatgcggtggcaactaaagtcgggcttcagcggagttcctataatgaaccgaatttccttccatttgcccctgatcttaatgtgagatttc

SEQ ID NO: 27413 - DNA, 381 bp, Gossypium hirsutum
  unsure (1)..(381): unsure at all n locations; Clone ID: LIB3148-003-P1-K1-A3
caggaaactccccttctatagggtaaaatttccagagcttgttcctgaggatgcagagggtttctggtgaagaggtccacaaggcttactttccaaaagcatgggaacaaagcaaaaaatccaacgcactataattcgaatatatgattatctaggtgatccaaggattggtccagctttgcttttgggagccttgatgtcctttggtagcatctggctgatgaggactcaacaaaatcgttcggttcagtcaagccaaccgagccaagcagataatgatgataaactgaaaccaagagagagacgccgggaaaggaatgcatcgaaacgcaacttacctncttcaataactgattttgagccaaaagattcataccagac

SEQ ID NO: 27414 - DNA, 419 bp, Gossypium hirsutum
  Clone ID: LIB3148-003-P1-K1-A4
gcaaaccacaaccgggacacttgttctttttgtggcactttggaaagtgcactttgatggagctgaaatggaaactggggctgaaaatggctgcaaatgtggagataactgcacttgcaacccttgcaattgtaaatgagaaagaaaaagcatccggatggtttgattgtttcttgttttactgaaatttcatgatggttaggtttttgttttatttttagagttcttttttgtgtttgggtgatgggaaagtgtctggggatgggaaaatgatgtgggatttggtctcttcttgtttgaagatgaccaaatggtttgaaataaaagtgttttgaaggatgtgttgaagaatatatagtatttggcttaattcattcttgttttgctgcattggattttttaaagcaatttcattttat

SEQ ID NO: 27415 - DNA, 412 bp, Gossypium hirsutum
  Clone ID: LIB3148-003-P1-K1-A5
gagcggattagctgtttctgcactactttacgaacatggttcacctaatgatttcctatcccagctcataagcaacattacagatatgactgatgaggtccaagaaagatcaatgggggtgactgatccaaaccttatagaaattgatggcgtggagtattatagatacattggttctttgactgtccctccttgcactgaaggtgtcatttggattattaacaagaagatagcaactgtttcgaaggaacaagtacatgcaatccgagaggctgttcatgattatgcagaacaaaatgcaagaccagtgcagacacacaatgaacgagagatggaacttcatagtccccacagctgaaaatctaaaacgctgtatttactacaccattttacgtatcttatatgctatatg

SEQ ID NO: 27416 - DNA, 126 bp, Gossypium hirsutum
  unsure (1)..(126): unsure at all n locations; Clone ID: LIB3148-003-P1-K1-A6
gtgaacatgtgcttttgtatgtctcgctgctttcgtgttagaaccgttcaaaggatgatgtgttgggtggatatatntttccaataattacgagagataagtgtttgctgcggtactttgattagt

SEQ ID NO: 27417 - DNA, 491 bp, Gossypium hirsutum
  unsure (1)..(491): unsure at all n locations; Clone ID: LIB3148-003-P1-K1-A7
tcgtcccactgcgtctntngtggaaatattgtggaaactcgtatccttatagctttaccgtagcggtttaatgaacgtgtgcttgtgacatttcaacacgtttcaagtccctgattcaaagcattcaatcgaaaaccgaactgtttgaagggtccaaggnngtgcaaaactacgtaaagaaccgatgtcgttttaccgtaatctccttcaagnttccagttattttcgagaggattagcgtgtaaggacacaaaggaaacgggtagaagaaagtagaattacgatgatgatannatgatgatgatgatgatggcacttacaacgtgatcatgcttagttgacgaatcatgtgaagaatctcattaagaatatctttggcgcattcaattcgagcctgatataagactgcaaatgttgtcatcaaagaattccaggaaagggaactcanaattgaaccctctagaacccagctgatctttgaacttttaaca

SEQ ID NO: 27418 - DNA, 282 bp, Gossypium hirsutum
  Clone ID: LIB3148-003-P1-K1-B1
cccacgcgtccgatctcgttctcgttcattatcggtgaattctgattgaaattggattgagctgcgatgatcacaagattatctcttttagctgattgtaatattttcttagcatgaactagagtttatattcacattttgaccaatcatgcatggtagttttgaactttagctggattataacatcaactgctgcatcatgattcatcattatggcttgtacttcataattgaatccttgaatttatacccaaaaaaaaaaataccattataaaaaatata

SEQ ID NO: 27419 - DNA, 400 bp, Gossypium hirsutum
  unsure (1)..(400): unsure at all n locations; Clone ID: LIB3148-003-P1-K1-B10
ggngaaccaaactcatttcattgtggtcttgtcaatgatagcctcgttcttcagctttggcaaaatatggaagagatgctatggtaataatgttagaaattgctcgggattctgttagtttgtaattttacactgtaattgtgttctgtctgaaacacttgtaatatgtataattacaaggtgtcaaacaaacaaggcaaggctaaggtaaacttgggttcaagagctaaacattctatttagcatcaaaacgtaaagaatttaatttacttgtttaaatctaaaaaaaaaaaaaaaaaaaaaaaagaaaaaaaaaaaaaaaaaaaataaaaaaagaaaaaaaaaaaaataaaaaaaaaaaaaaaaaagaaaaaagaaaaaaaaaaaaaaaagggggggc

SEQ ID NO: 27420 - DNA, 454 bp, Gossypium hirsutum
  Clone ID: LIB3148-003-P1-K1-B11
ctttgactttgtctctgacgaagatctctagatcgaagagttcatccaatctaatgaaatggaaaccatagcacctcctttaccgtcaaatggttgtacgtacgagtaaataaattcttacgactctggaaatggagaattatgtgtgtgtttgtcgattctacttctacttgcatttatcatttgatcaaattacattaggctttgagaagggtgtagaatctatgatgaagaatctgagtttggtgccatctaggcctcggttttcagcagaaccggtaaaatacgtggagaagccggcgaagactgtgaatgctaaaagtggtcgtcgttgcatccatcaacctcgttgaatgtgtgtattagccgtccaggttttagctgaaattctctggtcgtttgtaactgttaacctttgtagattttcaagttctataactctgctaccattcta

SEQ ID NO: 27421 - DNA, 312 bp, Gossypium hirsutum
  Clone ID: LIB3148-003-P1-K1-B2
cggagatcagtaccagactgtcacgctcgttaatactatggttgtacatcacgacaggtgttctaacatgctttcaggacggaactgattcattagaagatctgttgtgagatatgttcaactaccttcagacggagtcaacattgaatcgctttatggtgccactagacgtgaagcttgcggaagctgaaaaagcagcttctgacgacaaaatcaatgtgctcttaatgatgtagatggaatgcttgaaagattgtgacaagtcatcgaggatttacatcatcatgcattaatgttgacaaacgcgcttga

SEQ ID NO: 27422 - DNA, 424 bp, Gossypium hirsutum
  Clone ID: LIB3148-003-P1-K1-B4
gaaaacgcagagaaaaaagaagaaaagtcttctgaagaaggtgaaaacaaagaagaagggaagaaagaaggatctgcagaagcagaggaaaatagtggcaatcatggtaacgaggaggaaaccatgaagagaatgatttactattaccagcccctttacgttatcgagcaaatgccgcctgctcctcagctttttagcgatgaaaatcccaacgcttgttgcatttcgtgatgatttatcattacgacaaacttctttttctacctgtagattatttcaattttactataaggttgagaagtatacagataactagtatatataattaatgttcaatccttaccactggagatgagagttttagagaaatctggtggaccggtcgcacatgtatcatcaaggaatgtgggaaaatgggatcatt

SEQ ID NO: 27423 - DNA, 342 bp, Gossypium hirsutum
  Clone ID: LIB3148-003-P1-K1-B6
gtcacctggtacttgaagattgcagcgggtatcgagtccggaagcagccggcctggccacttggtcgccaccactttgtccgtcagacatatttacgagattgccaagattaagcaatccgatccatattgtcagtacatgtccctggagagtatttgtaagtccattattgggactgctagtaccatggggattaaggtggtgaaggacttggattagattcttcatttactcttcaatctaaaaaaaatggtaatgttcttcttagcttttggatttgatgcatcttagctgttcgacatattggctgtgttgaaaaaccttgaaacgtttttgttggat

SEQ ID NO: 27424 - DNA, 369 bp, Gossypium hirsutum
  Clone ID: LIB3148-003-P1-K1-B7
cccacgcgtccgcccacgcgtccgcttgctcctattctcttcccagacagggacttctaagtctctctaaaacaaagttgtcggatatctttgcaataaatttgctctgtatatgtatgtttgtatgtgtgtgggtgatctgagatggatttgcagtcaacaaattgatgttggatatttattgttgcagtaaagttactgtatgtctgatggtctgtgacagattggattacattccccactgagatactaagaaccttcttgattgtattatctttgtgtaattattgcaagtttaataagaaaaggcatgatattcatttaaaaaaaaaaataataataaattaaatttataattaaaattaataa

SEQ ID NO: 27425 - DNA, 287 bp, Gossypium hirsutum
  Clone ID: LIB3148-003-P1-K1-B8
agaatccacaggatgctgaaactcggctttagcattgatgaggatgcaggtgaaggtgaaggtgatgctgatatgcccccattggaggatgctgatgccgaaggcagcaagatggaggaagttgattaagcctaacatgtttttataagatcagtagatttatcttacttttgaagcatctgttagcttgttttacattttgtttggtgcttttgcttttgttatgtcgttgttagttattgtcgagtactcttaaatgataagagctgtttttttctgggttattt

SEQ ID NO: 27426 - DNA, 423 bp, Gossypium hirsutum
  Clone ID: LIB3148-003-P1-K1-C1
gaggagtgcaatgagcaaagacgtggaattcaattagccggtgaaaggggaggatgcgggggtgccattggcagcggtgttaataacttcagcacagtcatgaaaataagcacatatattttcccttttgtaactttttatttatttatttacattgccaaataatgtgatacgtgcatacatatacaatggtggcatcaagggaattcattgttgcgtatagaaatgttcaaagtaggaaatgggaccggattcttttgtgccctggcaccacacgtggccagttgtttgaattttattttgtaaaaataaaagttagtcagcaccatatgatttgttccattgtggttgggtgggttcattgttaatgttgtgacttattggctatgtggcatcaaactacatgcgactgctttgctagtc

SEQ ID NO: 27427 - DNA, 286 bp, Gossypium hirsutum
  Clone ID: LIB3148-003-P1-K1-C11
atttgctgttgcgtcttcatcattagcatatctatgagtttgttgacgatggatagaaggtcaaagagaagaacattgtaattgatcggtagattcagattttactttttatatgatcaaatggtgtttcatatatatgtgtgcaaacgtgttttgtttgtaaaacatcatgagtgctcttctttttagctttatgaatgcacaaatcaattaaaactgagatctatttgtttgcttaataaaaaaaaaaaaaattatgttaaattaaaaaaatataattttgaat

SEQ ID NO: 27428 - DNA, 428 bp, Gossypium hirsutum
  unsure (1)..(428): unsure at all n locations; Clone ID: LIB3148-003-P1-K1-C12
acccacgcgnccgaaatcatgctagcagcccctgtattagtagggttgcctttagcctaccgcctccaacagtagaatttccagaatccagaaaccatgtgtgcagcctcaagattacccctcatacttggatctcagcgaagcaaagaagaacccgtagcaaatgttgaaaaagaacgggtgtacggaggaacctggtgacgtggaggctgagcgcaagggtctgtcgtgtgtgagaccaaccctggtgccgttctagcttgttccagaatcttctggcattcacctgaggctgaaaccatttttgggcctcgattttgggctacatttagggatagaattgggttttaaaatttggtgggttatgaattattttggtacatgtaaaggaacattattgggctatttagtctctagtttttatttat

SEQ ID NO: 27429 - DNA, 338 bp, Gossypium hirsutum
  Clone ID: LIB3148-003-P1-K1-C2
gcgcttgcttcttcagtataaccctgtccacaagaaaatcccagttcttgttcacaatgggaaccccatctctgaatcccttgtgattcttgaatatattgatgagacatggaagcaaaatcccatattgccccaagatcctctacacagagccagggaacggttctgggccaaatttagtgatgaaaagctactaccatcagtatggggtgctttcaccaaagaagggaaagaccgagaggaagctatggctgcaacgatggagaacctgaaattcgtagaagaagagctgaaaggaaagaaattcttcagtggagagaagataggcctggtagatc

SEQ ID NO: 27430 - DNA, 235 bp, Gossypium hirsutum
  Clone ID: LIB3148-003-P1-K1-C3
actcgtccggcggttccttctgcaatttaaccctgtcttctagacaattctaacccttgctcacaattgcaaccctaggtttgaatcacgtgtgattcttgaatatatttatgatacatttaatcaaaatcccatattgccccaagatcctatacacatacccaactaacccttcttatccaaatttattcattaaaagctactaccatcactatcgtgtgctttcaccaaataa

SEQ ID NO: 27431 - DNA, 390 bp, Gossypium hirsutum
  Clone ID: LIB3148-003-P1-K1-C4
cccacgcgtccgcccacgcgtccgcggtggtcagcccgctggtcggattgtgatggagcttttcgcagattgcactcctcgcactgctgagaacttccgtgccctctgtaccggcgagaaaggcgtcggccgcagcggtaagcccctccactacaaaggctcctctttccatcgtgtgatccctaactttatgtgccaaggaggtgacttcacggccggaaacggtaccggaggtgaatccatctacggatccaagttcgctgacgagaacttcatcaagaagcacactggtcccggtattctctcaatggctaacgctggtcccggaactaacggatctcagttcttcatttgcacggctaagactgagtggctcgacggaaagcacgt

SEQ ID NO: 27432 - DNA, 359 bp, Gossypium hirsutum
  Clone ID: LIB3148-003-P1-K1-C5
accttgcataatataccatttgaattctttttagatttcatagctatctaaggaatgcgttcattgacttttgttagaactatggtggttccattgaactgcttcatccatgagaggttgagaaaaaaaaaaaaaccattccttgaatcagcaatgtaaattgtaaattttgtatataatatttttcttgtaattttgtatatatatattctctttccataaaagaaggaaatcaaatatatatttaaaagctttgtaacttttatgttgaaagtgtaaatgggatattggtaatattgcctaacgtcaaaaaaaaaaaaaaataaataaaactaattttatataaattaataaataaa

SEQ ID NO: 27433 - DNA, 341 bp, Gossypium hirsutum
  Clone ID: LIB3148-003-P1-K1-C6
ctgaagaacgtgcagctgctgttaaggcctctggcaagaagaaagaatctggcaagtcctctgtgttgttggatattaaaccatgggacgatgagactgacatgaagaaacttgaagaagcggtaagaagtgttcagatggaaggactgctttggggagcatctaagcttgtgcccgttggttatggaattaagaaattgcaaattatgatgaccattgtggatgatttggtgtcagttgacactctcatcgaggaacatctgacggttgaaccaatcaatgagtatgttcagagttgtgacattgatgcattcaacaaaatataatttgctatttgggat

SEQ ID NO: 27434 - DNA, 431 bp, Gossypium hirsutum
  Clone ID: LIB3148-003-P1-K1-C7
tgttttcagtggtgattgtttggatttattctcatttactcactgtgggtggagcttagaatggtacagcaccaaaaacacaaacaagctgtagaactgatcgttctggtctaatagatgctgctccatggataagagttccttatccctttcaatggggagcgccatcatttgatgctggtgaagcctttgctatgatgatggcttcttttgttgcccttgtagagtccactggggcttttatttctgtgtcaagatatgcaagtgcgactccaatgccaccatctattcttagccgtggtattggttggcagggagttgcaattttggtgtcgggattggttggaactgccaatggttcctcagtttctgtagagaatgctggccttttagccttaacacgagttggcagccgaagggttgttcaaatt

SEQ ID NO: 27435 - DNA, 252 bp, Gossypium hirsutum
  Clone ID: LIB3148-003-P1-K1-C8
cccacgcgtccgcccacgctttcgggcatttcttgaaacacttcatttaggggaccaagtgaaaggttaggtttcttcacattaagcctgccatggaatgtactttgtttaagctactgatgtactggtaatcttatagtagagatcggtgtattggttgggaaaggtggattttatggcaatgtatttagaattacacctcaaaaaaaaaaaaaaaaaaaataaaatataataaaaaaaaaaaaattataa

SEQ ID NO: 27436 - DNA, 229 bp, Gossypium hirsutum
  Clone ID: LIB3148-003-P1-K1-C9
actgcgtgaactccaggtgtgccatatttttatattctcatccacatcgagggtattcggtagtatttgaaactctctggttatacatattagtccttgtagctaagaaattttttgaaattttccagaatgtatacactatctttgagggtatagctatactccatagctaatagtaaaattacttatagtcgttttgtaaagcgtaaaataaatgataatggataag

SEQ ID NO: 27437 - DNA, 432 bp, Gossypium hirsutum
  Clone ID: LIB3148-003-P1-K1-D1
aaggaggtagaggcagtatgcaacccaattatcacagctgtgtaccaaagatctggtggagccccaggtggtggatcaactgaagaagatgatgattctcatgatgaactttaaaaaactggtaatgacattttgattgctgaaacaagcaaagcaaagcaaagggtgagaaggatgagagcataggtaggtgagatgaagatatacaggaatttttctccatggtagaagttaaaaaagggagaattatatccccctttgttcggatgttatttttgggtgaatgaatacgttttaacggatattattttttttgttttaaaaaaaaatatatattataaaaatatatattattatttaacttttaattttatttatatttatatcttttatttttttttctttttttttttatatatttatttatttatt

SEQ ID NO: 27438 - DNA, 386 bp, Gossypium hirsutum
  Clone ID: LIB3148-003-P1-K1-D11
cccacgcgttcgtctcagtaccgtgaaccgggagttttgttatggcgtggtttcacgtggcaagaattcgccgaccagtgctttggaaacaaagctgattatggaaaaggccggcagatgccgattcattatgggtccaaaaagcacaatttctgcaccatttcgtctcccattgcaacacaactttcccaagctgcaggcatagcttattctcttaaaatggacaacaaaaaagcatgtgttgtgtcatacatttgagatggtggcaccagtgaaggttattttcatgctggtttaaattttgcagcagttatggaagctccagtcattttcttctgtcgcaacaatggctgggcaatcagtacaaatgtatctgaacaatttcg

SEQ ID NO: 27439 - DNA, 192 bp, Gossypium hirsutum
  Clone ID: LIB3148-003-P1-K1-D2
cattgaaatgcatctcattcatgtttccactaattatatatatacatatatatattgtggtagtacagattttactatattatcatacaacttatttgcagtgaaaaaaaaaaaaaaaaaaaaaaaaaaaaaaaaaaaaaaaaaaaaaaaaaaaaaaaaaaaaaaaaaaagaaaaaaaaaaatagggggtcc

SEQ ID NO: 27440 - DNA, 207 bp, Gossypium hirsutum
  Clone ID: LIB3148-003-P1-K1-D3
aatgttttcagctcagaaaccttgaagctgtgtttggatctttgaatatatatagtgctttgatatgggttacaatattatttggttatacaggaatcactaaaaagaaaaccttgaaacagattataatgtggtaaagatggaatgtatagtgcatgctcaatttcttattaatgcaagtgttgcctgatcgaccgatgattgtgt

SEQ ID NO: 27441 - DNA, 365 bp, Gossypium hirsutum
  Clone ID: LIB3148-003-P1-K1-D4
cccacgcgtccggtttatcagtttaggatggcacagagcgaaatcgaccggtatttgaagatcgttcctcttatcactctcgttgataatgctcgagtcagggagagactcgaagttatcgagaaagatcaacatgagtacacattagatgaagaggatagaagggtgcaagatgttataatgaaacccgaaccctcggaaaatgataccatgatcttgaaaaaaactctttcttgttcatacccaaacatgcgttttaatgaagcgctgcaaaaggaaaatgaaaagcttcgattggagctacaacgttcgcaagctaattacgatgtgaagcagtgtgaagtaatccagcatttgcttgatgt

SEQ ID NO: 27442 - DNA, 447 bp, Gossypium hirsutum
  Clone ID: LIB3148-003-P1-K1-D5
cccacgcgtccgggcagaacttcaagatatgattaatgaagttgatgctgatggaaatgggaccatcgattttcctgaattccttaacctgatggcgaggaagatgaaggatactgattctgaggaggaacttaaagaggctttcagggtttttgacaaggatcagaatggtttcatatcagctgctgagctgcgccatgtcatgacaaatctcggtgagaagcttacagatgaggaggttgatgaaatgatccgtgaagccgatgttgatggtgacgggcagatcaactatgaggagtttgttaaagtcatgatggccaagtaactttctcaccaaccataaagatgaaccaaacattgatattaaagggaacagggcagataagttcgctaagacttatatctctgaataggaacattcatgcttttaaattattagcttttggt

SEQ ID NO: 27443 - DNA, 110 bp, Gossypium hirsutum
  Clone ID: LIB3148-003-P1-K1-D6
attttgatttgtggaaaaatgatgcctttttttctgcaacagaagaggttcaagaatctgctgatatgtatgttatttttttttaattttaaattttatgcctttttttt

SEQ ID NO: 27444 - DNA, 418 bp, Gossypium hirsutum
  Clone ID: LIB3148-003-P1-K1-D7
cccacgcgtccggatctcgatgatgaacattgtgaaagacgagggggttagtttggaggatctgcaaaagatgttcgccgatatggtcggcagcggagatggtatgagcttcaacgtcaacactgatctcacggagacgaagaaggcgcatttcacggcatctaagacttaagaacaaatgtaaacgcgaggtagccattagcattcaacctccctttgtcttaggtaatccaatgagcttgtaaggcctaatttccttcattagagaaatagagggtttgtttagttttagccaattaggaccttgtggaacttgggaatttctgaacctttttaaaatgattttagagaaatcggtgtgataattggcattggcatcaatggtgtgtctgtctttagctcttttactttttgctgc

SEQ ID NO: 27445 - DNA, 52 bp, Gossypium hirsutum
  Clone ID: LIB3148-003-P1-K1-D8
tgtgattcttgtactggattacagatttttatgaagttatgagttcattggt

SEQ ID NO: 27446 - DNA, 291 bp, Gossypium hirsutum
  Clone ID: LIB3148-003-P1-K1-D9
tgaaggccgaagaggtgaaggtttcatattaacgtcacttgcacatgggttagtctccgtaaatatgtaacatttactaggcggtttgtatttggaatcggcttataataaactgtaaagttccagggtttggactgagttgcagaggctgtaagattgttgacatatacatatatgaacacatacgtatatctatatttgttgttcagttatcagtcaatgtaatgttattagggtattaacataataacacacgcaggtatagacctctttttgatttctgactttgat

SEQ ID NO: 27447 - DNA, 67 bp, Gossypium hirsutum
  Clone ID: LIB3148-003-P1-K1-E10
gagatttattgaatattaaatgtaattagttacactttcaagaaaaaaaaaaaaaagggggaagggg

SEQ ID NO: 27448 - DNA, 316 bp, Gossypium hirsutum
  unsure (1)..(316): unsure at all n locations; Clone ID: LIB3148-003-P1-K1-E12
gngaacagggagagacagaccagggangcaatctggagtaagcgcggaccctaagcatgggaaaggcaatggagtgaatgccgaggcataggcacagaacacccgtgctgcagaggtgagacaagtgaccgacgaggaaacaggaacatgagctaccaaccgagaaaggcaatctaggaaagaggaacgtctaagcaacgtacttaagggaggcaacagagctaggttagccaaaaccatagcttctcaaagaggcacacataccgacagaaggcttcaccaaatgatgcgtgcggacagggattatgaacagacc

SEQ ID NO: 27449 - DNA, 371 bp, Gossypium hirsutum
  Clone ID: LIB3148-003-P1-K1-E2
ctctattggggaatcaccgccgacggatttgtggcctttgctgataatgctgaattgcggaaaggtgcctgtggcaaatctcttgcttctttccctcaaggctgtttctactccacagcagtaggaggattaagaagctatgagaatcctaagaacaagatcactgcagtgcctgctgaagaagaggagatatggggtgctaaattcaaggtggaagggccagctgttgttgctgccacagagtagtcctttgctttctccttctaaatctatggatccatggaattataggagctgcaaatgcatagcatatggatcagtctccatatgaaagtacttgtagagtgggaaatgaaaagaagaaaaagaac

SEQ ID NO: 27450 - DNA, 393 bp, Gossypium hirsutum
  Clone ID: LIB3148-003-P1-K1-E4
ggggttgaaaaaaatgggtgaaatcgagttagcagttcggttcgcatgtccgtcattgtgaccggacacatgttcggcttacggtcaaccattgcttccaagaatgcattatctccgcccacttggggtggctcaacaggaggcattacgcggagctgcgacaaagatggtagcacaatggctagcgaggtcagaaccgccgcttgggcaagaagtagtgaagtacatgctggatgcggattctcatacatggagcatgagaaagagcaaagcgaattggtttcggatcgttgccgttctagcatgggcagtggggttagccaaatggttggataatattaggaggtggaaaaacccggttactacagtattggtccatgttttatacttggt

SEQ ID NO: 27451 - DNA, 159 bp, Gossypium hirsutum
  Clone ID: LIB3148-003-P1-K1-E5
atttctcgtaaccatgaacttttaattatatattacattctttttcggaaaaaaaaaaagaaaaaaaaaaaaaacaaacaatataaaaaaataaaaaacttactaactacaaacatacaacaaaataacatattctatactttcacctaaattcaatta

SEQ ID NO: 27452 - DNA, 204 bp, Gossypium hirsutum
  Clone ID: LIB3148-003-P1-K1-E6
tcgtctcgacttttataaaaaacttttttttttgggtgttgtgtctctgtcaatggctctggctcccgaggtacaaatgtgggaaaaaaaaaaagacttaacactttttcgtggtctagaaagtcagatattataatattaccgataaaggacttcttttatataaaaaataacattctttcggtggctttggcacctgtcaat

SEQ ID NO: 27453 - DNA, 163 bp, Gossypium hirsutum
  Clone ID: LIB3148-003-P1-K1-E7
atgcttatatatattatagctatcggtcataatctacccttaaaccatggcaaataacagatttttcttcttcttttttctcttatcactcttcagtcatgcccaattccactttatttatttgaaaaaaaaaaaaaaaaaaaaaaaaaaaaaaaaaagggag

SEQ ID NO: 27454 - DNA, 397 bp, Gossypium hirsutum
  Clone ID: LIB3148-003-P1-K1-E8
cttggcttgagttgggaggcagaaggaaaaataaagtgttagcattggtgttttatgaatgtggcgcatcttctgttagccatcgttttcactatgaagaaaaacacaagaatgttttctaagtctatacatgttattggcagtggggctgtattacttggattgcaagtatttggataaaattctgctgaaaagaaagtatttgggtttttccatttaaatacttcagtccataatgatttttagtttttacaagtagaacatattcttaaatttatcttggaaacgaagtatcaaatgtaagacacatagccaaagattttaagaaaaaactacttgaaatcaccaatatggacatttataactaccattcctaatcttagtggtagttataact

SEQ ID NO: 27455 - DNA, 380 bp, Gossypium hirsutum
  unsure (1)..(380): unsure at all n locations; Clone ID: LIB3148-003-P1-K1-E9
agaacatnaatttcccaatgaattctgtgtttcagtcatacccaaagaagcatattgcatcctggtaaaaccagcgagacactctatgagcatgctcaacatgaggcattgagctctaaaagaatgctaaagtcagtacctgaacattttgattgttgtgtttgggagaatgtgtgctttttcttcatatatgaaatgtcggccttgtctgtactaatacctgaacagaatctcctagactgatttattgttgggtgaacaagaaagttgcttgttcagaattactgtctaatgcttacatgttgaatcaactttgttttagtgtcttgttagttaaacagtttgaaattgtgataaataaataaagccagtttggctgt

SEQ ID NO: 27456 - DNA, 441 bp, Gossypium hirsutum
  unsure (1)..(441): unsure at all n locations; Clone ID: LIB3148-003-P1-K1-F12
gattcttcgtacttcatggaatgtaattacagcaactacaaggtatggaactaaggacatgagatatatgatggaataaatcaagaaaaatgaaaggccattgacatattccaaaccagggaaaaacaaaaaaatttgcaaaagcatcatttaaaatttctttttacttggttgtctctttataaaattttatgccctttgcacttttgacctttcagtgtctcacactctttctccctgcaaaccaggctcaaaatgatgtgaaagagttgtagtttcttcagtggacgatgtcagacttgtggagaccttcagctgagtgaaggtcaatgaattttatcatcgactntggtgtggaaggttaatcttatctggtcttagtcctcattctcctttntttttttttctactttgcttacatttngtttctcaaccgaatgg

SEQ ID NO: 27457 - DNA, 198 bp, Gossypium hirsutum
  Clone ID: LIB3148-003-P1-K1-F2
attttcagttggaggtttccttgtttatgttgaagaaatgaaatagaaaggttttgcagggtgggttaaagttgaggtcgcaaatcattaatagtagggtcgattattttcattttatttttgggaaatccattaccatatggaaggaccaaattgtttttgttttgattcgatattatgcacggagagatttattgc

SEQ ID NO: 27458 - DNA, 333 bp, Gossypium hirsutum
  Clone ID: LIB3148-003-P1-K1-F3
ttcccgtgcatgaatttaacgttgaataagtcgtctgttgtagtttgtgtggtgtcttatatctttcagttaacctttgtatccggtactatgatgtaatggctatgcttatggccttatctggttaatgaagtatccttactataaaaaaaaaaaaaaaaaaaaaaaaaaaaaaaataaaataaaaaaaaaaaaaaaaaataaataaaaaaaaaaaaaaaaaataattataaataatattatataaaaaaataaaataaaatataataatattaaataaataaaaaatagggttgtcctttttaaagatccatagttttctttctcttactt

SEQ ID NO: 27459 - DNA, 335 bp, Gossypium hirsutum
  Clone ID: LIB3148-003-P1-K1-F4
gtgaaggttatggcgagggacatggctattgagagggtcatggcagcggtggggacaagtaaaatctaactttgagtgcatgcttgcttgaaaagagaaaaaaaatatatatccataaataaatgaagtagcatgttatttacccgtgtaatgcatcgagtaatggatgttcatatggtttcctataactaaatgtcagtccccaatgcttttgataattaacaagtccttggctgttgcacctctagagttatacatacattatatgattctgttggatgctaaaaaaaaaaaaaaaaataaaaaaaaaaaaaattacaaaaaatattataatt

SEQ ID NO: 27460 - DNA, 251 bp, Gossypium hirsutum
  Clone ID: LIB3148-003-P1-K1-F5
gctgaatcagattccgaatcaaaactaaatgaagatgaatcacaacctaaagccgaagcagcagaagaagaaacagaagcatgaagctagtactggaatactcattgaaccttcaagggaaatctttaaaacgcaggcaaattttaagtctaatgagacgtagggagggtcttgtgtacggcgtaattttttttcagggttcaaattttcaccattgcatagcaatcgaaatcaattggattcattctttc

SEQ ID NO: 27461 - DNA, 393 bp, Gossypium hirsutum
  Clone ID: LIB3148-003-P1-K1-F6
caaaaaagtttcttttctctagttctttataggagctctatacccatttgttcacattgtcactttcaaaattttggcttactgctttcgattagaattttcagggaaaattctagattactgctttgctttactctactcggtggctgtggtttggggattgagaatcgagataaaagaaatggagaagggaaacaggcaagtagttgtttcagcattgcaatttgcttgcaccgacgatgtgcccaccaatctcgccactgccgaaaggcagtggtaaatgaagatgcatctggagatgttgttgctatgagactgcaaattcaacagctgaagaaagaagtatctcgtctacgagcttttgttaatggcaaaagggaaaatctggataat

SEQ ID NO: 27462 - DNA, 152 bp, Gossypium hirsutum
  unsure (1)..(152): unsure at all n locations; Clone ID: LIB3148-003-P1-K1-F7
tcgtctcgtnacgcgattccagaaacaatatcttcttgaatataatgtattttactttttaaaaaaaagagaaaaaaagaggagaaaaaaaaaaagagaaaaaaaagaaaggaaaagacgaataaaaaaggaatcacaaagcataaacaaaa

SEQ ID NO: 27463 - DNA, 428 bp, Gossypium hirsutum
  Clone ID: LIB3148-003-P1-K1-F8
cccacgcgtccgcccacgcgtccggggcttcttatggatctttcaccctggttgaaacgttctctgacaaacttctttcctggtttccatattattatcacttcaagtttgcatttcttgtctggcttcaacttccttctactgaaggggctaagcaaatctacaagaaccacctgcgcccttgcttgctgaaacatcaagctagagttgatcaacttatgtgcattgcaagtaccgaaatggcaagattcatcacggcacaccaaaaagagtttcgatttgtccgggcaatgatgatcaagattataggatcagacccaaaagtgagtggcacggaaccggctgaaccaagaagtctacccgcaatcaatgatgaaacaagaacgactgcaaatccggaatctgataatggagactagtttctattt

SEQ ID NO: 27464 - DNA, 239 bp, Gossypium hirsutum
  Clone ID: LIB3148-003-P1-K1-G1
aaaagagcaaattgatgggctctatcaaatttgttgtgatctcattctaaatggggccagcagtagctgctttctaaaaattgtggaattttatggatccacgcttggtatgtagccaagcccaagaaaaaaggaacgaggggaagaatcgacaaggaatccataacaaaaaaataaaaaaaaaaaaaaataaaaaaaaaataaaaaataaaaaataaataataataaatattatattg

SEQ ID NO: 27465 - DNA, 165 bp, Gossypium hirsutum
  Clone ID: LIB3148-003-P1-K1-G10
ctaaaatccgagccaaatgcgtttgatggttgcaatgggctttgtgaagtagaaagaagttgggtataataataaaaaggttattatgaatcttaatttgtgtacttttgttgtgtgttggttgtcatgtgtaactcagtgtcctttgaatcttaaaataccttt

SEQ ID NO: 27466 - DNA, 154 bp, Gossypium hirsutum
  Clone ID: LIB3148-003-P1-K1-G11
aaagcaggatttgatggtgttagattatatagaaaagaaaaaaaaaaaaaaaaaaaaaggaaaagggaaaaaaaaaaaaaaaaaattataaataataaaaattaattaagaaaaatagatataaaattataaaaagaaaagaaaaaaacaaaaa

SEQ ID NO: 27467 - DNA, 364 bp, Gossypium hirsutum
  unsure (1)..(364): unsure at all n locations; Clone ID: LIB3148-003-P1-K1-G12
ccggcagncaggccttaagaagatgcatatgtgagtacatcgctcgagtgtgccatgcacatgctacgatgagtgaggcatttgtggaagctgcaatggccacctatgacaagccaattgacatctagaaatctggatttttacatgttagtcttgattttgatttattgttgaaaatttntgagattgactcggcagcagtcagcacaatatgtttatgtttttgtttgtccttactcgaaacagatgtcatgcttgaatagacatttgcttttcatcgtttacattttcccaagggcatataataactcagcatgttcattcctctgtttgaatcatggatatgcaattaataccttgaagc

SEQ ID NO: 27468 - DNA, 178 bp, Gossypium hirsutum
  Clone ID: LIB3148-003-P1-K1-G3
caaaaacatatgcatgtcttatgttttttttagctttgattgatgtagtaagtagatgagcaatgccctatatttaatgagtgaataaggaataatatttgtcgttagaataatttgttttgcttttccttccagtatgtaccatgcatgtattttatgaagtgtacatatttgggtt

SEQ ID NO: 27469 - DNA, 444 bp, Gossypium hirsutum
  Clone ID: LIB3148-003-P1-K1-G4
cccacgcgtccgggaaggcatccctccagtccagcagcgtctgatcttcgccggaaaacggctcgaagacggccggaccttggccgattacaacatccaaaaggagtcaactctccacctcgtcctccgtctgcgcggtgggatgcaaatcttcgtgaaaaccttgactggcaagacaatcactctcgaggtcgagagctccgacacgatcgacaacgttaaagcgaagatccaagacaaggaaggcatccccccagaccagcaacgtctcatctttgccggaaaacaactcgaagacggccgtaccttggccgactacaacatccagaaggagtcaactcttcaccttgtccttccgttgcgcggcgggatgcaaatcttcgttaagacgcttaccggaaagacgatcactctcgaggtcgagagctctgacacgatcgacaa

SEQ ID NO: 27470 - DNA, 376 bp, Gossypium hirsutum
  Clone ID: LIB3148-003-P1-K1-G5
ggcaggtgagaaaatatcaccaattgaggtagacgcagtgttattggctcacccagctgtaacacaggcagttgccttcggtgttcccgatgagaaatatggcgaggaggtaagaaaatccaattcatggttttgattatttttggttttgaatggctgtttggttgtgtaatttgtctaaaagtcggtgtcaaaaaattgcagataaattgtgcggtgattttaaggggaggaagcttggatgaagcagaaatcacgaaatattgcaaaagaaatcttgcgagtttcaaagtacccaagaaagttttcatcacggattccgtgccgaaaacagctactggaaaaatccagaagaagatagtagcagaacatttct

SEQ ID NO: 27471 - DNA, 274 bp, Gossypium hirsutum
  Clone ID: LIB3148-003-P1-K1-G6
aatgcttctccaggtgtggacaaaaagcatccacctcatctcctataaaaggccaacatttctgataaaaaagagcaggaaaaccatcttcaccaggtgccttcgtaggatgcattccaaataaagcctcccttcttcttttgtgtatttcgctataagattcctgttatcatcctctgagatacaccgctcaattccggagcgtatacgctcataattcgtttgattttctgacaagaacatttcttggaaatatgattgtacaatttgctcc

SEQ ID NO: 27472 - DNA, 105 bp, Gossypium hirsutum
  Clone ID: LIB3148-003-P1-K1-G8
cccacgcgtccggaactttcctactttggttcataattacagattaaagtgtgtatttggaaggcataatgccaaaaataacccctaacatttgactgattagtc

SEQ ID NO: 27473 - DNA, 379 bp, Gossypium hirsutum
  Clone ID: LIB3148-003-P1-K1-H1
ggagaaaataggttttgacctatgtgaattatgctacaattctccggccacaatcccaggccgatttagggagcagcataaaccagatcatcaatttaaaattgtacagccgttaagcatacgggaccttatgctaagactgaactctgaacaatctgatgatgatgatgatggtggcttagatgcttcggaacatatggatggtgcttctcatactcctggtatgcaagcggatgaaagccatggtgtttctcaagagcctgaagatatttcgcctttgatattttcagttgatgtctccttggatcacgaggataactctgaggatccaagtgataatatttcatcaggtttgacttaaaactgtagacaattgtga

SEQ ID NO: 27474 - DNA, 373 bp, Gossypium hirsutum
  Clone ID: LIB3148-003-P1-K1-H5
gttgatcatggagataaagaaaatccacatgaaactaatgatcgtgacacagccagttgggatgaggaattgcaaaaagatggagcaaagcaggaaagtattgaagaaccagcagcttctgtgctagacaaaaagattgtaggaagtaagttagatgagccgcaagtggaagagatggaggagagaacaccggacgactaagcttttcggctccagcgccaaccctatgcgtaataagtgctggtttttgttttgtgaataataataataatgtgaggactgagtaagcaggggatttagttttgtttgcagtttgtaaatcttatgtagacaacaacaatatagtctgcttaattacttagttattgcaccg

SEQ ID NO: 27475 - DNA, 423 bp, Gossypium hirsutum
  Clone ID: LIB3148-003-P1-K1-H6
cccacgcgtccgcggacgcttgggtagcctatgatgcacgagaaaagacactttgtttgcgttcttgtcatagaagttactaaatggtaggcaaaggtgtacgaaagaatggacaatgttccaagatcgtttgactactgcagagagagcatattatgcatcactgggaattactgatccttacaatttaacagctaattaattaatggatataatatagtttttttttacaatagcattagagttgtacaagtcagtcacttctatatgtgacctagtaaactttgatttttggatacatgaaaaggcgactttgatcctatcagagcacatgcacaagtgttgtttaaaaaaaaaaatattaaatttttaatttattatattattctattatattttatcttttttttcttttttttttat

SEQ ID NO: 27476 - DNA, 294 bp, Gossypium hirsutum
  Clone ID: LIB3148-003-P1-K1-H7
aaaaaaaaaaaaaaaaatttttaaaaaaatttaaaaaaaaaaaaaaaaaaaggaaaaaacgggaaaatataaagaacccaaactaacaatcaataaaaatacctctttttaaatctcgcccgctccctcctaagtatccatttttacgacccctttcttacaacccaatactttttatattagtgtcccttaactacaaaaacctggcccattacaaccaacatttgttactcttaaaaccctgtcattacccatcttaatctcattttcaacaaattaccccttttcccattt

SEQ ID NO: 27477 - DNA, 333 bp, Gossypium hirsutum
  Clone ID: LIB3148-003-P1-K1-H8
cccacgcgtccgaaaaaataaacatcaaatctctacagaaagaacggggatgtcaagacagcttgtaatgcatatcatctatctatgttgtatcttggtactctacaatttatcttaaattctctttcacaagcctgtaaaaaactcactagctgattttactcgtgcaaactaaatgtttgtgttcaatcatggatttgtatgataacagagctttgaaggagaaattccagtctttcacataaaaaaaaaaaaaataaaaaaaaaaaaaaaataaaaaaaaaaaaataaaaaaaaaataaaaaaaaaataaattttataatattataaaaa

SEQ ID NO: 27478 - DNA, 315 bp, Gossypium hirsutum
  unsure (1)..(315): unsure at all n locations; Clone ID: LIB3148-003-P1-K1-H9
ctccngcaaggcatgggaggaaacatacatgaagaagctgaatgcaaacttctctttatgtatcggatgtaatagtggttgtatatgtaatatggtagcacttgttttctggatgtgttgtgtccttaaaaaataatgccgatagtggcatgttgttatagttttagatgttagttttcatatgatctgctatatcgttgtacgagtagtatgttttgtttgtgttgaaacaatcttcatatcttagtgataattgttgagtagtcatagctttcattttgcaaatgacattgtgaagaaggaaaacatcaaaat

SEQ ID NO: 27479 - DNA, 417 bp, Gossypium hirsutum
  unsure (1)..(417): unsure at all n locations; Clone ID: LIB3148-004-Q1-K1-A1
cccacgcgtccgcggacgcgtgggtttgttaggtaaaatggaacaacctgcggcaccaagtgctgttcctcaaaaacttagtgacagagacagcagcagcaaagcgaagagaaaaattccaacaccccaggagctgatatcccattaccaaaaccaaggcctcgattcccaagaagcttccatcaaagtcattgaggatcttcaaaacgtggtgatgagggtcgtctcctccaactccaaacccaagaaagacaagttcttgatcgaaacttccagaaagattgacagtgtcaacaccaggcttgctgttgttgacatgaagctcgactccaagcctggttatttggagacttttgcaattggggtngcttctggtgctgcttttaatggaatttgcagtgttctgcctcatgtttt

SEQ ID NO: 27480 - DNA, 422 bp, Gossypium hirsutum
  unsure (1)..(422): unsure at all n locations; Clone ID: LIB3148-004-Q1-K1-A10
cccacgcgtccgcaaaaactctgccaagctgattggaatggttgtaaaagaattgggtcgtccaatcattgatgtttgaattaggtaacatcgttggccatctaaaattcattaacttccaaattttaattgattttttatagtatttgaaaatatgttccaccttttccacaccacctgcaatgtagattagcaaaagtaggcaggaaatttttaataattctccaaattttgattttaattttgttgggaaaatccagcaaccaaatttttttgtaaagtaaagggtcattnaaaaaaaaaaaaaaaaaataaataaaaaaaaaaaaaataataattacaaatattattataataaaaattttaatattataaaattattattttatttattttatttatattttntgggtttttttttt

SEQ ID NO: 27481 - DNA, 441 bp, Gossypium hirsutum
  Clone ID: LIB3148-004-Q1-K1-A11
gaaccaaatagtgtttttcaaggctataaatataaaaaaaaaaaaaaaaaaaaaaacgaacgaaatattataaaaaaaaaaaaaacaaaaaaaaaaataaaaataaaaaaataaaaaaaaaaaaaattataaaattaaaaaaaaaaaaaaattattaaatattataataataattaatattattataaatatttataaattaatatattatattttttattttttattaaaatatataaatttttattttttttttttttaaaaaaattaaatttttttttttttatatttttacattattacttttattttttttttttttttttaatattttttaaattttttttttcttatattaattaaaatttttttttcatattttatatatatattttcttatttttatattttctaattatttttatatatatttcttctcta

SEQ ID NO: 27482 - DNA, 411 bp, Gossypium hirsutum
  Clone ID: LIB3148-004-Q1-K1-A12
gggaatgtggacagaaccaagccaatcaattgtggacattgacatcaaatgataacacagttcgatctggcggaaaatgcttaaccacttatggatacagcttcaaaaattatgtgatgatctatgattgtgagacggctgttcctgatgccaccaaatgggaaatccgcagtgatgaaaccataagaaatcccagatctgggctagttttgacgggaagtagagatagttcaggtatgattaatttggttgtggatcataagtatgatggttctaggcaaactttctatgccagcaacaatacaaagccagcagtgaccaccattgtcggttacaaagacatgtgcttgctagcaagtggaagtcgggtgtggctggaagactgcgtgagcaacgatgctgaacaacaat

SEQ ID NO: 27483 - DNA, 421 bp, Gossypium hirsutum
  Clone ID: LIB3148-004-Q1-K1-A2
cccacgcgtccggtttatgggttatcctttctcgtcagaggaacaacaacaaggggtgcgtgaaaacattgtgaagatgtgcagtttcgacaatttaagtggcttggaagtaaataaaaccgggagacatcgtgaagggaaaggaaatatggagacggaaaataacattttcttccggaaagggaaggttggagactggaagaattatttgaccactgaaatggctcaacgtttagaccaacgaacactgcaacagttgagcagttcaggtttaagtctctaattgaagatctataatctatttagcatccagtgttgcttaaacctgatcagagttcgtaattatctcttttaataatattacttttaaataaggtcatcttggccgaaacttgtaataatattaatagtcttatataaa

SEQ ID NO: 27484 - DNA, 352 bp, Gossypium hirsutum
  Clone ID: LIB3148-004-Q1-K1-A3
ggatcctcaatgaaaacaaaagactatgacatttatgggatatttaaggagattgataaagtcagagttggaaataggcgatgttgactttgtccaaaaaaaaaaaaaaaaaaaaaaaaaaaaaaaaaaaaaaaaaaaaaaaaaaaaaaaaaaaaaaaaaaaaaaaaaaaaaaaaaaaaaaaaaaaaaaaaaaaaaagaaaggaaaaaaaaaagaaagaatatattgttttcctaaaattaaaaaaaaaggcccccgttctataaactttgctaaaatgggtaaaaaaaaggacaattgggaaaaaccacgttttgcggaatataacggtttttacagaataaacccttttg

SEQ ID NO: 27485 - DNA, 216 bp, Gossypium hirsutum
  Clone ID: LIB3148-004-Q1-K1-A4
ggaacccaagactaaggactgaagcaaacagtgatcaaagaagacgaggatgtcgaaccgtttgtgcaattctttttgctgtacctgattgtagcaggctttagtttctgtgttgtttgtgtcatgataccatgagctattcagatttaatctggccgtaacatgttaaaaagcactttgtaataactgaaccaattacagcagttgtttttgttt

SEQ ID NO: 27486 - DNA, 418 bp, Gossypium hirsutum
  Clone ID: LIB3148-004-Q1-K1-A5
cccacgcgtccgcgaaattcttggaggaggacaataagcaactcaatttcattgtgaatcaacagcaactgacttatgaaaatgtgagagagcatatggatcaccacggataccatcaagctgctcgtgctgacttcaactcgcagatgcctttcgcattccgagtgcagccaatgcaaccaaacttacaagagaggatgtgatgaacattgtgagggttatccaatagctaaagctgcctatatgagctataaggtcaaaaatggagggggtgcttagtttctgaatgataataacttttaagttctacgagtattccagtgtttatgacaatcttagtaatatagatatcaactatgaatttgatattatgaacaattattgtatctactttgagcaacttatatgtgtctctatg

SEQ ID NO: 27487 - DNA, 89 bp, Gossypium hirsutum
  Clone ID: LIB3148-004-Q1-K1-A6
aaaaaaaaaaaaaaaaaaaaaaaaaaaaaaaaaattaaaaaaaaaaaaaaaaaaaaaaaaaaaaagaaaaaaaaaaaaaaaaaaaaaaa

SEQ ID NO: 27488 - DNA, 350 bp, Gossypium hirsutum
  Clone ID: LIB3148-004-Q1-K1-A7
gacaccgccagtttcgatgaggaattgcataaagatggagcaaagcaggaaagtagtgaagaaccagcagcttctgtgctagacaaaaagattgtgggaagtaagttagatgagccggaagtggaagagatggaggacagaaccccggacgactaagcttttcggctcctgcgccaaccctatgcgtaataagtgctggtttttgttttgtgaataataataataataataataataataataataataatgtgaggaatgagtaagcaggggatttagttttgtttgcagtttgtaaattgtatgtagacaacaacagtatagtctgcttaattactagttattgcatc

SEQ ID NO: 27489 - DNA, 320 bp, Gossypium hirsutum
  Clone ID: LIB3148-004-Q1-K1-A8
cccacgcgtccgcggacgcgtgggtatatttataaaaaaaaaaaaaaaaaaaaaagggaaggaaaaaaaaaaaaaaaaaaaaaaaaaaaaaaaaaaaaaaaaaaaaaaaaaaaaaaaaaaaaaaaaaaaaaaaaaaaaaaaaaaaaaaaaaaaaaaaaaaaaaaaaaaaaggggggccctttttaaaaaatcaaattttttttccccttgtttgcaaaataatatttttttttttgtgcaccttaaataaaattaattgcccgggtttttaaaacttcttaattggaaaaaccttggttttcccaaatttaatccttttt

SEQ ID NO: 27490 - DNA, 409 bp, Gossypium hirsutum
  Clone ID: LIB3148-004-Q1-K1-A9
taggactaatatcatcacgaaaaacagccttagcagtcgatatcttgaaactcagggcctgtacatacttggtagctctatgtcaagctattgatttaaggcatttagaagaaaacttgaggaacacggtgaagaacactgtgagtcaagtagccaagaaaaccctcacaaccggtaacaatggtgaactccacccatcgagattctgcgaaaaggatttgctcaaagccgtggaccgcgagtacgtgtttgcttacatagatgatccatgcagtgctacttatcccttaatgcaaaagctaagacaagtccttgtcgaacacgcattcgccaatggtgacaatgaaaaggatacaaacacttccattttccaaaagatcacagcatttgaagatgaattcaaagctgc

SEQ ID NO: 27491 - DNA, 243 bp, Gossypium hirsutum
  Clone ID: LIB3148-004-Q1-K1-B1
ttgagttgcactccatttttttttactcaattttcttagttaacccatagggaaaattacgaaagttattccccccaaaaaagaggagagaaaaaagaagcattattggtcaaaatcactaacaaagcaactaaaacaaatgatcttttccattgtcttcaataaatttgctttgccttcttatgtattgcattagtgtaattttcatttatataaaatatcgatcatggaaatctttatgtt

SEQ ID NO: 27492 - DNA, 418 bp, Gossypium hirsutum
  Clone ID: LIB3148-004-Q1-K1-B10
cggaaactaaaagttgctgaaactacacctgatagctggtttggaaagatggtatgtcatgcttcacagggatgcttaagatgtgttgagtggacaatcaaatcagtgaatcgaaatgcttatataatgatcgcaataacagggaaaagcttctgtagatcttctgcaattgcaacagaattgatcatgaataatatccttagattagtgagggtgaatgtgattggagatgttatcctgtttcttggaaagttgtttgtcagcctctcgagcgctgtctttggtttccttgtgttggatacccacaagtatagttctggtcataacaaattatcctccccattgcttcctgtgctggtttgctggactcttggttatgtagttgcaactcttttctttgccgtggtggagatgtcga

SEQ ID NO: 27493 - DNA, 129 bp, Gossypium hirsutum
  Clone ID: LIB3148-004-Q1-K1-B11
attttcaaagatggtacgatttgtttatttcttggtttcttttcttttcttcattgtctgtttcattttcttttttttttaatatcatcgcttgttaattaactaaatattaaactatctgttctttcc

SEQ ID NO: 27494 - DNA, 310 bp, Gossypium hirsutum
  Clone ID: LIB3148-004-Q1-K1-B12
gatcactgaagatgagatcaaggctcaaatcaaagggagtgaaggagtttacaaggctggggaagcttacctcttggctaaccctgatgcctgcaactaagatatatgttggttgctttgaattctcataacttgaatttaaagaatggtgtgcttttggtattttcctttttagtcttaaaacttaaaccgtcttccgattgtcttaataaaaatggcggtggtgattgatctttgatcatctttgatatatgatgaaataaaataaatatataaactaggaaaaaatttacctagtatatattttatt

SEQ ID NO: 27495 - DNA, 419 bp, Gossypium hirsutum
  Clone ID: LIB3148-004-Q1-K1-B2
ggagaggtgtaaaaaggaatggagtatatttcaaacgaggttttcaagggcggagaaagcgtacttgaaggaaataaattcaacatctcgttaggaatatatatatatagcaaagcaaaactagaaaagctaaccctttctatactttcattattagttattaccccacccccccgcattgggatttcatcggatcttcaagtattcattcaatcataaaacctcactcccaatacctgcaatggttgcgttactaagcgagtctcagattttattttagaacgattcttcttcttattgttattcacataaagtttgatgaaatgcatcattgtttttgtagccacaactttctggtccccaaatcacattgagactttaattcccattttttttttttactttttgaaaatggaatc

SEQ ID NO: 27496 - DNA, 546 bp, Gossypium hirsutum
  unsure (1)..(546): unsure at all n locations; Clone ID: LIB3148-004-Q1-K1-B3
cgnntccgagttgtatggacacccttcaatttcaattttaatttttgttttanntctctcaaatannaatgtgtgttagtttgtgtaannaatttctnntttcaattttatatnnntcagcttcttaatgctnnntttgcagcaccacctnnttctgcntnnctcagacccagtgaatgggggtaaagttattttcgatttcntttttgtctcttannattgannaatgantnnttcttattttattagaaatcaaggggttcnttaatgcncnncctcgaagccttatttcatatnnncggttggcttctttcggataaacaccgnntaagttcaccttctacntnnttctgtnntaaccaaagggtatttattatgctataagcctagngnnaaatagaaaagaataaatttgatacctaagtnngagttgatgaaaacaaannngtttctattatttaccttnnactttaggtgatccgaatgaggaattgttttaggacatgntgtattacaatgattgtgatatgcanaatatgcttatgt

SEQ ID NO: 27497 - DNA, 388 bp, Gossypium hirsutum
  Clone ID: LIB3148-004-Q1-K1-B4
aaaaaaaaaaaaaaaaaaaaaaaaaaaaattaattttaaaaaaaaaaaaaaaaaaaaaaggaaggaaaaaaaaaaaaaaaaaaaaaaaaaaaaaaaaaaaaaaaaaaaaaaaaaaaaaaaaaaaaaaaaaaaaaaggggcgccctttttaaagaacccaattttacttccccttgcttccaactttttatttttttttttgggccccctaattttatttttttgcccccttttttaaaacctcgtgcctggaaaaaccctggctttccccaattaaatccctttgaaaaaaatccccttttccccagttgggttaataccaaaaaggcccgccccattcccctttccaaacatttccccacccttattggaaattggacccccccttt

SEQ ID NO: 27498 - DNA, 416 bp, Gossypium hirsutum
  Clone ID: LIB3148-004-Q1-K1-B5
atttggccagaagggcattccatacctgagcacatacgacgggcgtactattcgctacccagaccccttgatcaaggcaaatgacaccattaagctggaccttgagagcaacaagattgtcgatttcatcaagtttgacgttgggaatgttgtcatggtcaccggaggaaggaatagaggtcgtgttggagtaattaaaaacagggagaagcataagggtagctttgagaccattcatgttcaagatgctgctgggcacgaatttgcaactcgtctcggtaatgtcttcacaatcggaaaaggaacgaagccatgggtgtcgcttcccaagggcaaaggtatcaagttatccatcatcgaggaagctcggaagaggcttgcagcccaaaatgcagcataaactttagcatgagata

SEQ ID NO: 27499 - DNA, 304 bp, Gossypium hirsutum
  unsure (1)..(304): unsure at all n locations; Clone ID: LIB3148-004-Q1-K1-B6
cacgcccgtccnngcttcagccgaatgnnncacccagtatttagttgacaattagtgtgttgcnncaagcgaaccctcagttccaagaagagggatgatgannaccccaatgtgaaggttacccagggagtagttcttcataaannccaccacctatctacttcctattcacatgtataactttgcatcaatcacttccaggtcataccatcaggcattgcttggtataagattttgatttctttttcttgtacttagaaatttcacttattttatctttttaaattaatttacaactttttac

SEQ ID NO: 27500 - DNA, 410 bp, Gossypium hirsutum
  Clone ID: LIB3148-004-Q1-K1-B7
cccacgcgtccgcccacgcgtccgctctcgccgccgcctgcgtctctctcttcatgtctgtgaacctaaaagtctttagcttttcgcttcgagagagaccatgttggtttaccaggatctcatctccggtgacgagcttctttctgactcattcccctacaaggaaatcgagaatgggatgctgtgggaagttgagggaaagtgggttgtgcaaggagctattgatgttgacattggtgccaatccttcagccgaagatgctgatgaggatgaaggtgttgatgaccaatctgtgaaggttgttgacattgttgacactttcaggcttcaggagcaaccccctttcgacaagaagcagtttgtcgtgttcatgaagaagttcatcaagaacttgacaccgaaactggatg

SEQ ID NO: 27501 - DNA, 419 bp, Gossypium hirsutum
  Clone ID: LIB3148-004-Q1-K1-B8
tgattctaccacccctttgcttttcaggatgcctcatgatgttgtgcctttcatggagcgggatcatgctcatttttccgctaatcgacatcttggaattcctctcttggccactcatgctccttattctttcttacctacatcaataattgattctggttgtaaaattatttacatttgcagggaccccaaggatacatttgtttcaatgtatcacatctgtaccaggtatgcgaaatcccaaaacactcaacccatagaacttgatgaagcgtttgagttattttgtgaaggcgtaagttggtacggaccttattgggaccatgttctgggatactggaaagcaagcttggaacatccggacaagtttatgttcttgaaatatgaagaaatgaatgaagatactgttttgtatctta

SEQ ID NO: 27502 - DNA, 287 bp, Gossypium hirsutum
  Clone ID: LIB3148-004-Q1-K1-C1
gggtcaggccgaacccggtctaacacctccagttgtgcccagttttggttaatattagacggagaaaaaccaaatagttcatctaggttttagagcagtagggaaaaaaatactgaataggataacagagtgagagaacgagttgaacgaacccggtttgattgtttccggttcgaaaggccaaaaaaaatagtttaaaaaaatttccaaggtgggtgcggtaggttttctatcatagggatgtaactgatttagagaggactttattgtatctgtgttattttttt

SEQ ID NO: 27503 - DNA, 298 bp, Gossypium hirsutum
  Clone ID: LIB3148-004-Q1-K1-C10
cttgaagagtgggagaacaaagtacgacttttgagcaatttcatttgatttttgcgggggattagttagcatgctaggttatccatttaagtgatacttgattttcgcacgttttgatcgaatctaatacatgaatacatttagaagacagcttatagattcaagattgtggaaatgtacaatttgcgaaagttttctcattcatttgagaaacaaatgcagtagaaatatgtacaattgtagtttttggttaaagcagataaagtgaattttttcatgcctctctaacccggggatc

SEQ ID NO: 27504 - DNA, 421 bp, Gossypium hirsutum
  Clone ID: LIB3148-004-Q1-K1-C11
cacacatgatcttcaccctggtctttgtgctcacctatcaaaaatatggcactcggggcgtgcataaagcactttgcttggttggtagctattgttcaaagtctcttgattgtggcatcccgcaaacattacacggttgatgtagttgttgcatggtacactgttaatttagtggtattcttcatagacaagaaactgccagaattgcctgacagaagcagtggaagctcaccaatgttgctaccattgagcaccaaagacaaggatagttaaaccaaagaagagaaccacaagctcttgaatgggaattctgtagatcctgcagattggaggccgagaactcaagtaaatggcaagattcaggaagatggaaatggaatccatgatactgcaatgaacggggcatagatgatggaaatta

SEQ ID NO: 27505 - DNA, 293 bp, Gossypium hirsutum
  unsure (1)..(293): unsure at all n locations; Clone ID: LIB3148-004-Q1-K1-C12
ccagggttgactttaagtgccccttcatgtgaattgtacttttacttgtgtttcattgggaaccaaggaaggttcgttcttgcttgcanatgtagagttatttccctcttccttttgacagatcaaggttatgtaaagattgttaattgcaaaaagaaagaaagaaagaaacgctaaaataaataagcaaaaaaaaaaaaaaaaaaaaaaaaaaaaaaaaaaaaaaaaaaaaaaaaaaaaaaaaaaaaaaaaaaaaaaaaaaaaaaaaaaaaaaaaaaaaaataaaataataa

SEQ ID NO: 27506 - DNA, 424 bp, Gossypium hirsutum
  Clone ID: LIB3148-004-Q1-K1-C2
caagtctttcttagaagcactttctgttattaacagagattcccgatctttgccaaacaagatttcccgatctttgccacatcaaagcttcctaaaggatgaaattgaagaagaggtggaatgtatactcagcgtgagtgctgagatgaaacaaattttttgggacttgcttcctgatcacgagttggatgaggaatttgctgatgcctatggggaaggtttagaaggaagtgatgatgatagttgtattgaggatagtggttgttatgaaaatgattggaaaatggttaataaggacttagagagttgtatgtcccattctgtcaagtcaattgagagagatgaggttatacaggacgtgaaaatggatccagaatattcctcgagtaatgcgaaaagtagcgaagataaaaacagagtaaag

SEQ ID NO: 27507 - DNA, 397 bp, Gossypium hirsutum
  Clone ID: LIB3148-004-Q1-K1-C4
ctgtaggagacaaatgtgcaagatgcgccgacttcaagcaatagaaaacaaaaaacaggagaaggacctagaactcttgccagagacgacagacaataacgtgctggggtagcaaactttctttttatatttataataaaatttacaatactataaatacatgaaaaaaaaagtagaaaatttccaatttctttcttttcaaaaaaaaaaaaaaaaaaaaaaaaaaaaaaaaaaaaaaaagaaagaaaaaaaaaaggatgggggggtcggtataaagggattcgagcttacgtaccccttgcttcgaggtactaaaatttaatatactgcccgtaaatttacaacactgggcctgggaaaacaacgtcgttactgaaaaaactctggttgcaccaaa

SEQ ID NO: 27508 - DNA, 423 bp, Gossypium hirsutum
  Clone ID: LIB3148-004-Q1-K1-C5
tggccatctcgtgctgttacctttatagagaatcatgacactggttctacccagggtcattggaggttcccaggtggaaaggaaatggaaggatatgcttatatcttgactcacccaggaacgccggctgtgttctatgatcatattttctctcatcatcgatctgagattgccagccttatctctgtcagaaacagaaacggaatccattgccggagtttagttaaaatcgtcaaggcagagagggatgtgtatgctgcaattattgatgaaaaggttgcgatgaagatcggaccaggttattacgagcctcctagtggttcccaaagatggtccttggcccttgaagggagggattacaaggtatgggaaacatcttaaatgtaaaaccattgatattatttatgtttccaaatgtgtata

SEQ ID NO: 27509 - DNA, 214 bp, Gossypium hirsutum
  unsure (1)..(214): unsure at all n locations; Clone ID: LIB3148-004-Q1-K1-C6
acccacgcgtccgtaatgttttaaatgnattctaatcaacctttactattcttttacctctacatattttacgantggtttaatatattgcaaatcatccaaacccaattccataaacaatatatctcataaataaccattattatttcataaatatttccttaaatcctcctctaacataaaaaaaaattcttttctttctcaaaaacaaaaa

SEQ ID NO: 27510 - DNA, 369 bp, Gossypium hirsutum
  Clone ID: LIB3148-004-Q1-K1-C7
tttttttttttttttttttttttttttgtttgttttttttttttttttttttttttttttttttttttttaaaaaaaaaatttttttttttttttaaaaatttaaattttttttttttggcccataaaaaagggttaaaacaaaattaattaattcccccggggggacaatgataaaacccaaatgggtggttaaactttcccctaaattttttaaaaaggcaaatcccaacaaaaataacaaaccccacccttaaaaacctattgaccctttttattataaattttatgaacctaatttttggcgttttaaaaaaaaaaaaacccgaactggttcacttttctactttttctggaaatttttttttcg

SEQ ID NO: 27511 - DNA, 421 bp, Gossypium hirsutum
  Clone ID: LIB3148-004-Q1-K1-C8
cagtcttattactgtttgaattaagctggtgtgtaaaagattaatgtttttaggggtagagtggtcgaaatgaatagattaatcataatatgaggttataactctatatcaagtaaaaaaaaaaaacctttaaattcgtagagtagttgaaatggtgagaaggcttttaattttaagatgggccctcgtcattgaaattaaatttaaaggtggtggtggtggttgctgttttatttctgttctgctctcttttgacgaaggcggagacagagaaattggcagcggtggcggtgggtatttgatttaaaaacctgccggccgcctcttctttttggtttgctacaatttttgcttttaggtgaagcaatctgtaatcagcattcgagggataataaaatttgtactagttttatataaattt

SEQ ID NO: 27512 - DNA, 386 bp, Gossypium hirsutum
  Clone ID: LIB3148-004-Q1-K1-C9
gtgactattacataattaatgtaaggaattgagtcagattcataatgaatgaaaagaaggtcctatttcgtttgcaaaaaaaaaaaaaaaaaaaaaaaaaaaaaaaaaaaaaaaaaaaaaaaaaaaaaaaaaaaaaaaaaaaaaaaaaaaaaaaaaaaaaaaaaaaaaaaaaaaaaaaaaaaaaaaaaaaaaaaaaaaaaaaaaaaaaaggggcgccccttttaaagaacccaattttacttccccttccatccaaattaaaattttttttatagggcccccaaaattaaattcactgcccgctttttaaaaactttggaattggaaaaaccctgccttacccaaaataaattcttttgaaaaaaatccccttttccccagttggc

SEQ ID NO: 27513 - DNA, 315 bp, Gossypium hirsutum
  Clone ID: LIB3148-004-Q1-K1-D1
atttctggaatactcggatgttgaaggttccaaaaaggctcaagctgcaatgaatggtcggaaattcggcggaaatcaagttattgccgtttactatccagaaaacaagttcgcacaaggggaatatgacggctaatgtagagataaaatcatcatagcattgtgcttgtactgattctatgtttatgtctgatcattatctggttccttaggaattttgtagtggcaacctgttgtcgaacttcggaatttgacagtggaacatatcatgtcataatacgttagaactagtttagatgaatgtgttgtttaatg

SEQ ID NO: 27514 - DNA, 406 bp, Gossypium hirsutum
  Clone ID: LIB3148-004-Q1-K1-D10
gccttggcaccctgcattccttacgtgagaaacaacggtgctggtggcgtgcctgcatcgggctgcaatgggatcagatctctcaacgaggctgcccaatcaactccagagcgccaatcagcttgcaactgcgtcaaagctttagctgccagcatttctggcatcaactatgaccttacgaacaaactcccaggcatgtgtggggtgcacagccctttcaagatcagccccagcactaactgcaaaagtgtcaagtgaagtaggccatggaagctcgtcagcaaatgggaaaggaaataatgatatatagctacataataaaaatggatggcagcgctctttatctttgtcgtagttgtccctagaaatataataaaacctcaagctattgcatgagttttgagtt

SEQ ID NO: 27515 - DNA, 423 bp, Gossypium hirsutum
  Clone ID: LIB3148-004-Q1-K1-D11
cccacgcgtccggatgacttggaggtacttgtgatctcctcccagaaatgtaaagggaggatgtttcccaagggtggttgggagcttgatgaatctagagaagaagctgcattaagagagtcacttgaagaagctggtgttcgaggcaatgttgagtgtgaactggggaagtgggacttcataagcaaaagccatggcacattttatgaaggttatatgttccctttgcttgtgaaagaagaacttgatttctggcctgagcaaaatctgagacaaaggacgtggatgaatgttaaagaagccagggatgtgtgccagcattggtggatgaaggaagctttagacatattggttgaaagactcaactcattgaagcagcaaaatgaacaaaattatccaaacatctgctctgatttagtggca

SEQ ID NO: 27516 - DNA, 408 bp, Gossypium hirsutum
  Clone ID: LIB3148-004-Q1-K1-D12
gaaaaatttccacttagatgtattgaaatataaataaaattaatgtttagtgattattagaaagtaaaaaaaaaaaaaaaaaaaaaaaaaaaaaaaaaaaaaaaaaaaaaaaaaaaaaaaaaaaaaaaaaaaaaaaaaaaaaaaaaaaaaaaaaaaaaaaaaaaaaaaaaaaaaaaaaaaaaaaaaaaaaaaaaaaaaaaaggggccccctttaaaaaaaaccaaatttcacctcccccgccttccaaaaaaaaatcttttttataggccccccaaaaaaaaaaaaccccccccccttttaacacccccctacattgaaaaaaccctggcttccccaaaataaaccccctgaaaaaaaacccccttttccccagttgggtaaaaaacaaaaagccccacccctacccc

SEQ ID NO: 27517 - DNA, 299 bp, Gossypium hirsutum
  Clone ID: LIB3148-004-Q1-K1-D2
gtgatttgtgaagaacatcaaacaaaacatgcactggctttaatatgatgataagtattgtgggaattaattaattggcaaaaacaacaatgaagctaaaattttatttattgagccttgcggttactttcttgtgatgatcttttttattttctaattatatatagtttccttcgctttgaaaaaaaaaaaaaaaaaaaaaagataaaaaaaaaaaaaaaaaaaaaaaaaaaaaaaaaaaaaaaaaaaaaaaaaaaaataaaaaaaaaataaaaaaaaaaaaaaaaaaaattgtttgg

SEQ ID NO: 27518 - DNA, 347 bp, Gossypium hirsutum
  Clone ID: LIB3148-004-Q1-K1-D3
acgcgttcccacgcttccaaaagggtgcttttgggtttattggaatcaataatttgccccagtggtggtgtttggtgatttgtaattcgccccactaattccccattttaatgaaatttggaatttaatttcggcaaaaaaaatatatcggaatgaacctttgccctaatttaaaaaaaaatttcatgaaaaaaaattaatacccctctctttaaggaaacctctttaaaaaatccccacctttaaaaacccaaaaaatttaaaaaattccttataataattaaaaacctttctctcccttataaggacctaaatttttttcccttggggggaaacccaaatttttt

SEQ ID NO: 27519 - DNA, 265 bp, Gossypium hirsutum
  Clone ID: LIB3148-004-Q1-K1-D4
cccacgcgtccggagttgtacaagggtaattcatgtattctaccatgtagctgataatagttatgagtgttattaggctagggaaggagaaatttatcaactcctggaaattctgaccaacgtacgttaaccaaaagtcgatgtgtcttttgtttaaatatcgatttaaaaccgacgcttagggtgagggttggtttgattgttagatttgtggcttaggtaagtacacgctaatttaaggaacggtgtgatcttttagcagttc

SEQ ID NO: 27520 - DNA, 393 bp, Gossypium hirsutum
  unsure (1)..(393): unsure at all n locations; Clone ID: LIB3148-004-Q1-K1-D5
ggtctgtattatacaaggagcatttatgtgttgaaactctttatacatgcatgcatacctgatacattgatcaataataaaccattttggggaaacccttgtngtnaaaaaaaaaaaaaaaaaaaaaaaaaaaaaaaaaaaaaaaaaaaaaaaaaaaaaaaaaaaaaaaaaaaaaaaaaaaaaaaaaaaaaaaaaaaaaaaaaaaaaaaaaaaaaaaaaaaaaaaaaaaaaaaaaaaaaaaaaaaaaaaaaaaaaaaaagggggggccttttaaaaaaacaaaattttaattcccggggtttggaaaaaaaaaatttttttttggggcaccaaaaaaaaaaaaaaggggcggggttttaaaaacgtgggaatgggaaaaaccttggggtaccc

SEQ ID NO: 27521 - DNA, 133 bp, Gossypium hirsutum
  Clone ID: LIB3148-004-Q1-K1-D6
ggttgcttggtttgtgtatgtgtgtgtgtatatagtgaaatgaaattattttaactagcgttggggtgttactgccatgttatataactgatgaatgaatgaaggaaagctctatttgccttttgcttacaat

SEQ ID NO: 27522 - DNA, 352 bp, Gossypium hirsutum
  Clone ID: LIB3148-004-Q1-K1-D7
tgaaaagggacttgaattaaagcaaactcccagtcctgggccatctacacttggacaagggggtcgtgcttcatcatcaatctaaaagaaaaataataataagtcctcttttttaatgtctatttagtggtgtggtttgataagtttaaatgtcagtgcaactcgagaggtcttttgtttcagtgtgttttcctgttctgtctaacaatagggtgattgacacttcttttactttattattttaccctttactaccgaagcatggaataacagcaaatatgccaattgtttacaaactaataaaaaaaacctcatgtacggtaaatttatataaaattaaagctaaggtttt

SEQ ID NO: 27523 - DNA, 419 bp, Gossypium hirsutum
  Clone ID: LIB3148-004-Q1-K1-D8
cttcatcatttccaaattttgattatttttttcttttttattttatttttatttaaaaggggaaactgctaacattattacattttcattagcctcaagagaagaaaaaaaaatgtcatcgaattcaatgtctgcttcatggacagccaagcaaaacaaagatttcgaaagggctttagctgtttacgacaaggacacaccagatcgttggtacaatgttgctaaagctgtgggagggaaaactgttgaggaagtgaagaagcactatgagcttcttctggaagatgttagacacatcgagtcgggtcgggttccttcccccgactattggaccgttaccgggaatcgtcaaggtaaaaaacccgagagcatgaaagattccgaagctcaaatgaagaagaaaaaatggtggacttgca

SEQ ID NO: 27524 - DNA, 421 bp, Gossypium hirsutum
  Clone ID: LIB3148-004-Q1-K1-D9
cccactccttcgaccacacatatctgatatcagatgccattgcatgtcatccatggggcgggatggtggccttgatgattcaagcactctcacaccgaataaattatctgtgggtcgtctaacaaaatcaaactttattcgggattggaacctttgctataatgattaaaattttacgtgaaacgattgtgtaccatgacttaaggaaagctttgaagaaatccccaacataaaaagccaaaaaatttaagaaatccataataataataaaaaccatatatttggtgattgtgatttagatgtattaattcagggagatccagaatcttaaaaagaaattcaacctgaaagtaatcaacttaagtgcagatgtttatgaattaaaagaatggaatagattgaggtttctggagaacaaaaa

SEQ ID NO: 27525 - DNA, 363 bp, Gossypium hirsutum
  Clone ID: LIB3148-004-Q1-K1-E1
cccacgcgtccgagcaagtcagttggcgcacaatggcattggtggtctcagactggataaggcgttttattttcgggagggataccagtggcatttaaaaggtccctgggcaacttacaaacattaagatgtctacagtttgggattgaatgctgtagaaaaattttggtttttcctttaccatttaccaattcattcatttgataataattgctgccttgctttggcggttttgaaatgaattttgttacaagtttatactggtttttgaactttatatctgagatccgtgaaaaatatacctatttgcatattgttatctcttctccaagttcttataattgtgttttcccaaattgaaat

SEQ ID NO: 27526 - DNA, 309 bp, Gossypium hirsutum
  Clone ID: LIB3148-004-Q1-K1-E11
gtaagtcttcatttgctgacattgctcaaatagaatctgcaaaatctttttagtaacgtcggtattgaaggtattaataactaaaaaaaaaaaaaaaaaaaaaaaaaaaaaaaaaaaaaaaaaaaaaaaaaaaaaaaacaaaaaaaaaaaaaaaaaaaaaaaaaaaaaaagcatgcgacatcataaataaaaatataaagtcaccaaaattaaaataactgaccttcttttttacaatccacataactttaaaaaccctggcgatacccaaattaattactttggaaaaaataccctttttttcagttt

SEQ ID NO: 27527 - DNA, 333 bp, Gossypium hirsutum
  Clone ID: LIB3148-004-Q1-K1-E12
cccacgcgtccgggacaggccaaggtcaatggagagatggtgaaccgccattgtcgttggtttgttcaactctgacaacatggaccaataatattttgtcacctctcttcttttcctactgttcttttgctctggtaaagtggagcaaaggattcttggaaacagggagctatgcgttaaatcttcataccatatgtaatatggccactcagcccgtcattctttttatttttaatttctaaagcaaggagcctgtatttggtaggactcaaattttgtttaagaaacaatgtgggattcaccagtttatttttaatattccattggaatgtt

SEQ ID NO: 27528 - DNA, 65 bp, Gossypium hirsutum
  Clone ID: LIB3148-004-Q1-K1-E3
gaaaaaacggggggggccccacgcgtgcgcacacgggtggggttataaatcgcgagcgcctttta

SEQ ID NO: 27529 - DNA, 422 bp, Gossypium hirsutum
  Clone ID: LIB3148-004-Q1-K1-E4
cccacgcgtccggccaggcggtggctaaggttcttgaagaaatgatgtcgaaagtgttattcgggcggtccatggatgataaaatctattttaagccgctggttgatgaggccctgcacttatctggggttttcaatctctcggattatgtgcctttccttgctccacttgatcttcagggatatacaagaaggcttaagaaggtgagtagtggccttcacgaattttttgagaaaatgatagatgaataccaacaagggattaacatggatgaccaaaaaccttatagaagtttctttcaagtgatggtttcgttgttggatacacccataaaccctaacgataaagatcaaccctacatcattggtagagaaaacatcaaggctataatggtggacatggtggcagcttccttcgacact

SEQ ID NO: 27530 - DNA, 361 bp, Gossypium hirsutum
  Clone ID: LIB3148-004-Q1-K1-E5
aaaatatgaactttcaacaattgagtgcctacccatgtcttccatttctagtagtgaaagcaataaagatttaaatctattatctgtttcctggtattgtacaatttttaattgcaaacattggtaatgtaatttggagtctattctgggaaaaaaaaataaaaaaaataaaaaaaaaaaaaaaaaaaaaaaaagattaaaaaagtgagtaagtgacctaaacgaattatttgagaaaaatgaaagatgaataccaacaagggattaacatggatgaccaaaaaaccttatagaagtttctttcaagtgatggtttctttgaaggatgcgcgcgtttaccataactataaatattaacccc

SEQ ID NO: 27531 - DNA, 412 bp, Gossypium hirsutum
  Clone ID: LIB3148-004-Q1-K1-E6
atgacaaacatgaacatgagacccgatccttctaatggttacccaggcagaacctacagggtcgacacaggggaaaccatttatacatttggagatgggctaagctactccaaaatcacccacgaattagccaaagcacctcgattagtatcaatcccattggaggaagaccatgtttgccgctcatctgaatgtaaatcagttgaagccgtcgaacaaagttgtaaaaacctagcattcgacattcatgtgagagttcaaaacagagggaaatacggcggaagccacacggtgttcttgttttcgagtcccccatcagtgcacaactcgccccaaaagcatttgttgggatttgagaaagtttcattaacagggaaatcagagacattggtgaggtttaagggtggatgtt

SEQ ID NO: 27532 - DNA, 453 bp, Gossypium hirsutum
  Clone ID: LIB3148-004-Q1-K1-E7
cccacgcgtccgaaaaaaaaaaaaattaataaaaaaaaaaaaaaaaaaaaaaaaaggagagaaaaaaaaaaaaaaaaaaaaaaaaaaaaaaaaaaaataaaaaaaaaaaaaaaaaaaaataaaaaaaaaaaaaaaaaaataaatttaatattaaattttaaaactaaaataaactgaaaaaacttttgtgtttcaaatacttaatttcttttgtattaatattctttcttttttcattttaatttaatatttatagagtcctcttaactatttgccctttcttaacaatatttttatttttaatgtataattttaatttgtctttttaaatttttcattattattctgttttttttttttagtttacatttctattttatatacatctttaattttttcaaggtctttttaaatctccggtctctttttgttttttttattttttcttttttt

SEQ ID NO: 27533 - DNA, 291 bp, Gossypium hirsutum
  Clone ID: LIB3148-004-Q1-K1-E8
atgaaatgaaatctgtaactttaggtgattgctgttgaattagaatttagttttctgatgatataagatgttaatgggagaaagggtagaattagataaggttcttaagttgaacaaaagtggaagacgtgtatggtttccttgggtggggagctacacactacaggttttaaaattgaatttatgaacggtggatttgactcaaaaaaaaaataaaaaaaaaaaaaaaaccaaaataaaaaaaaaaaaaaaaaaaaaaataaaaaaaatgaaaaaaaagaattttaaaat

SEQ ID NO: 27534 - DNA, 350 bp, Gossypium hirsutum
  Clone ID: LIB3148-004-Q1-K1-E9
ctcctaacaatgattatgatgctgatcaagtcatgttcaaaatccttggactgattccaaaagctcccagttttactgaggaagaagcagaaaattgtgatgaagctgtttcaacttcaggttgatttaaagcagtgccttcttgatgtagttgtagtattgtggtcagtgacctttttcgttgttatgtttgttagttattatctgtaaggaattgcctgcgcaataataaatggcaacgagctcttttgttgcccagggtagtgtcgaaggcttagtctaatgcagtgaaagacttgtgacatatatttatttgataattaaaaaaagaagattagagttaacgtctt

SEQ ID NO: 27535 - DNA, 370 bp, Gossypium hirsutum
  Clone ID: LIB3148-004-Q1-K1-F1
cccacgcgtccgcccacgcgtccgcccacgcgttcggacttggcaacttcatttgcttcgatgaagttaaaatgaaaaaattttctgcaactttcgtctctgacatggaagaagcattgatgctactaaatttcatcgatacattaaagtgaaatagaaaacatttaatttgtgtggaaatgctgcaattgccacatagacccactgcgtgttcaaaatctatcactgtaatatactattttatttttcacttacgaacgtgtctcggcatataaaattatgctattgataccattcgaacatctccacgcttctttatttagcagtgaaaatggattataagaatgaactaagttttttatttgattta

SEQ ID NO: 27536 - DNA, 420 bp, Gossypium hirsutum
  Clone ID: LIB3148-004-Q1-K1-F10
gcagccgcagctagaaaagggttattgatgtaagaaatttagcaatgtctccagctaaagttgacagcaagaaaaaggccgatccgaaggctcaagcagtgaaggctgctaaggctgtgaaatcgggtgtgacatttaagaagaagtccaagaagatcaggacaaaagttacctttcatcggccaaggactttgaagaaggaccgtaaccctaagtatcctcgcatcagtgcaacaccaagaaataagttggatcaatatcaaattctcaagtatcctttaactactgagtctgcaatgaagaaaatcgaggacaacaacaccttggttttcattgttgacatccgtgctgacaagaagaagattaaagatgctgtgaagaagatgtgcgacattcagacaaaagaagtgaatacgttga

SEQ ID NO: 27537 - DNA, 104 bp, Gossypium hirsutum
  Clone ID: LIB3148-004-Q1-K1-F11
gcacttcaagcagtacctaaaagcttggtctgaaatatattcgtccattattatcgcccgccccccaattaacttggatatttgaaagtttatttttatctttt

SEQ ID NO: 27538 - DNA, 247 bp, Gossypium hirsutum
  Clone ID: LIB3148-004-Q1-K1-F2
cccacgcgtccgggaattctttgggctaacctattgctgttatttttgaaatgtaacaaaatgaaaatccgcaaactgatgaattgaaatttaataaattttcatttataatttgttttcgagaaataaaaaaaaaaaaaaaaaaaaaaaaaaaaaaaaaaagaaagacgggagaaaggaaaaaaacataacctacgcatgcaagcaacgaaaaaactatatatattgttgtacataaattaaaatt

SEQ ID NO: 27539 - DNA, 413 bp, Gossypium hirsutum
  Clone ID: LIB3148-004-Q1-K1-F4
agatagtgaagtcatcctatatcctcaagtctatcttcaaagacccattcaggaggggaaacagggttcttgttatgtgcgatgcttacacaccagctggtgagcccatccccacaaacaagagatgcaacgctgccaagatatttagccatcccgatgttgctgctgaagagccctggtatggaattgagcaagagtacaccctgttgcagaaagatgttaagtggccaattggatggcctcttggtggctaccctggacctcagggtccttactattgcggtgttggtgtggacaaagcctatgggcgtgacattgtggattctcattacaaagcatgtttatatgctgggattaatatcagtggcatcaatggagaagtgatgcccggacagtgggaatttcaagttggt

SEQ ID NO: 27540 - DNA, 424 bp, Gossypium hirsutum
  Clone ID: LIB3148-004-Q1-K1-F6
cccacgcgtccgcccacgcgtccgagaagatgttaaagcaaggcttaaattctgggcacaagctgtggcctgcactgtcaaactgtgcaactaaaagattcatgaacaatcattggaaaaatgagaatgaatatttttctcattgatgaccatcaactggataaaaccctacgctctgccgaaccatgccatggtggggatgacatttccagcaattgtgggaaatataccaggccaaaattttaaaaatggatcagctgcaaggagcatgggaagaagctggaaaggaagatgttacagtggtgagagtctccagttgagcttcaccaactagttccggacctctgcgtttgctgagggttttctttctcacggaacggaaggctgcaaattacacgcattccactgagatggctcatctttg

SEQ ID NO: 27541 - DNA, 377 bp, Gossypium hirsutum
  Clone ID: LIB3148-004-Q1-K1-F7
accttgagagttttcctgtctatagtttgaatatatctatccttttttttccctggggaaaaaaaaaaaaaaaaaaaaaaaaaaaaaaaaaaaaaaaaaaaaaaaaaaaaaaaaaaaaaaaaaaaaaaaaaaaaaaaaaaaaaaaaaaaaaaaaaaaaaaaaaaaaaaaaaaaaaaaaaaaaaaaaaaaaaaaaaaaaggggggggcccttttaaagaaccaaattttacttccccgtgttggcaaggaaaaaattttttttaagggcaccaaaaaaaaaaaaaatgggccccgttttaaaaacctgggaattgaaaaaacccgggggtacccaaaataaattgcttgggaaaaaaacccctttttccaattggggt

SEQ ID NO: 27542 - DNA, 425 bp, Gossypium hirsutum
  Clone ID: LIB3148-004-Q1-K1-F8
gcaattgaccggcttaaacaattatacattataagaagatgctcgaaaacaaagtcggggggttcagctttgcacaaaggttccaccttcaagcaaaagaagcttttttgctggaagtggacctggttacaatatgtccaatgtcaagagcaacataatgaagaaagcgaagatagatcttatgaagagccaggaagtgaaaaatctcgcagccatgaagaaaaaagcagttcaaagtcatcatagtggtaccaccataacaaagtcgagtggattttgcggaaagaattcagcttcgacatcaaagcatagcaaaccattagagaggagattctagaagaagcagtttctaaaaatttaagaacaaagtcccgaaaaaggttctattgccttcctcctcttttttcactgtaatatttggaaag

SEQ ID NO: 27543 - DNA, 420 bp, Gossypium hirsutum
  Clone ID: LIB3148-004-Q1-K1-F9
caaagagataacctcagaactaagccagcatggccccatttctgaaaccaatgtgtataactggtttcaaaacagacgagctaggtctaaaaggaaacaagtaatggttgcatcctccagtaataacaacaataatcataataatgcaggtgaatcagaggtagagacagaagttgagtcaccaaagacaaaaccagagaatcttctgcttgtatcagagggtcaaggtcaacatcatgatgtgtgctttcagaacccagagataacttctcaactgcatttcttgggtgtaggagatgaccatatgtctgctaaaagaatggggggaagctaccacatttatgaccaagcatggcagggtgagtgagtgaatgagtgaggcaaagaaactacatagcatgcatgctttgacatagtaaa

SEQ ID NO: 27544 - DNA, 409 bp, Gossypium hirsutum
  Clone ID: LIB3148-004-Q1-K1-G11
cgaaaccctaataaagcagaaccgtaatgttatacttccgattatctttccttccttggaaaggaatgcaagaagccactggaatcctgcagtgcagagcttgacactaaacgtccaaaagattttctctgacaatgaccccgagctctttgaggagtgcttgcatatgtttcaggaagaagaagcacgagaaaatgaggctaaatcaaaacgggaagccacatggaaacggttagaagagattgcagcaatgaaagctgccagtaatcaaccagtgctcatttccctgaaagtaactactcgcaagtgatccggctaggacacgaggttaccattgttgttggcaatggtacgtttacgagatcgatttgcaaaccataaggtttggtattaaagctgagttttatca

SEQ ID NO: 27545 - DNA, 294 bp, Gossypium hirsutum
  Clone ID: LIB3148-004-Q1-K1-G2
gggattcaaaaaccaacccaggtttccaatatatgctagcaacaaggttgtccatgatctttctgctgtggttgcttccattgtccaattattactatgaggacgatgaaatgttttaactgttctgcaagaaacttactgtctaatgccaagtaatgggcaataaaaatgtatgtaaagatgtgttatagatgttatgaaaaatggataaagagtgaaatgattagtggttttgtttaaaagaagaatggatgattggcattgaaacagtatgtcaatcattaattgtcctcc

SEQ ID NO: 27546 - DNA, 379 bp, Gossypium hirsutum
  Clone ID: LIB3148-004-Q1-K1-G4
cggacgcgtgggcatctgcatattaccgaggtgcggttggagctctccttgtgtatgaggtcagcagacgacagacttttgatagcatcggcagatggctaaatgaacttcagagtaagaaccacaatagaaaaaccaaacatttgtattatttcagacggtataagacaacccagaaaagaaaatagattttatatatagccacattgtcaccggctttgtgagtgtgtcatggcttggactttaacaaagcaaatgtggggtgttaagcagagaattcacttcaatttgttggtctgtatcaacttgaacctccaaagttgaaagtactgaagaattctccaagggattaaagttggaaagtaattcacgcgaaaca

SEQ ID NO: 27547 - DNA, 421 bp, Gossypium hirsutum
  Clone ID: LIB3148-004-Q1-K1-G5
cggatcagtcatggcagacgcgattgaactgaaaacagccccagctgactttcgtttccctacaacaaatcaaactagacattgtttcacccgctacattgagtttcataggtgcttggctgcaaagggtgaagagtctaatcaatgtgagaaatttgccaaatactaccgttctctttgtcctggtgaatggattgacaagtggaatgaacagagggagaatggtactttcccgggtcctctgtgactgtgatcacatattggaaaggaggtgaagcattgcttctttggcatggaaaacttgtctgtagctagtttcaatggttattcttgaacatttcgaattaataagctacaaatggaaatttgtggccgatgagttgttaaaaaactggaatatgctctgatgttttaattcatg

SEQ ID NO: 27548 - DNA, 231 bp, Gossypium hirsutum
  Clone ID: LIB3148-004-Q1-K1-G6
gcggtaaattccgtccaaggctaaatacgggcgatagaccgatagcgaacaagtaccgcaagggaaaaaaaaaaaaaaaaaaaaaaaaaaaaagaaaaaaaaaaaaaaaaaaaaaaaaaaaaaaaaaaaaaaaaaaaaaaaaaaaaaaaaaaaaaaaaaaaaaaaaaaaaaaaaaaaaaaaataaaataaataaaaataaaaatttaaaaaaaacaaactttatttttaaa

SEQ ID NO: 27549 - DNA, 294 bp, Gossypium hirsutum
  Clone ID: LIB3148-004-Q1-K1-G7
tatcagtgcaggaggatataggttcgagtgcattgaaacacattattctcttcaaagtagttttagacattttgtcaaaaaaaaaatcggaatctataatgagattatttaaaaaaattataaataatattcgcgtaaattattataattgaattctgaactttttttttttggttggaaatgatgttatagaaacctacttggtgaagatttagggccattggactcaaaggaacttgatcaacttgaacatcaattggaggcatctttgaagcaaataagatcaaccaaggt

SEQ ID NO: 27550 - DNA, 406 bp, Gossypium hirsutum
  Clone ID: LIB3148-004-Q1-K1-G8
cccacgcgtccgcccacgcgtccgcccacgcgtccgcccacgcgtccgctttcatcttcttaattaattgttaatcttcccaatggccgcctaccaaagaaaacgacgttttgccaatcaaactaggaggaactgaggtatcaactatttgcagttgtaaaacattccggattcagacctactgctggacactatgtttgctacattcgatcctctcctaatatatggcataagatgaatgattcaagggttacttgtgttgaagaagaagctgtgctgtctcaggaagcctacattttgctctatgctaaacaggatataccttggttttcaactgcaatagaagtgcaaaagccttgtgcagaccctggaatttctgattcttcaccgaagtcctaaatgacat

SEQ ID NO: 27551 - DNA, 416 bp, Gossypium hirsutum
  Clone ID: LIB3148-004-Q1-K1-G9
ctcaaatccaccctatgcatgaatcccccgacggtaactcccgttacgatcaccggttcttggccatggtgtcgcccagaaacccagcttctttcactaaccgtatcgtcgacagtagcaccacagacactgcttcttttttgcgagcttgttggctttgtaatcgccgcttagctcctggtcgtgacatatatatgtatagaggggatacatcgttttgtagtcaagagtgcagagaaaaacagatgaagcaagatgaaagaaaagaaaagctaaacattaattcttcaaagaaagaagaccgccatgcccattcctcttcaaccaccaccttctccaagacttctaaagcgaagcctgtggttgctgcttgaactttgaagaaaggtaatcgatgagtaatttccataggaatt

SEQ ID NO: 27552 - DNA, 311 bp, Gossypium hirsutum
  Clone ID: LIB3148-004-Q1-K1-H1
cccacgcgtccgcccacgcgttcgcccacgcgttcgaagagttggatggaatggaatcaaacgttggctttacaaaaaaaaaaaaaaaaaaaaaaaaaaaaaaaaaaaaaaaaaaaaaaaaaaaaaaaaaaaaaaaaaaaaaaaaaaaaaaaaaaaaaaaaaaaaaaaaaaaaaaaaggggggggtgttgaaagaaaaaaaaaaagtgttatacgttttaaaaaaaaaaaataaattttaattaaagtgaaaaaaattaaaaaaatgtgaaaacgggtaaaaaaactgaaaataccgaaaaaaaaacaact

SEQ ID NO: 27553 - DNA, 421 bp, Gossypium hirsutum
  Clone ID: LIB3148-004-Q1-K1-H10
cccacgcgtccgctcaaggaaaacaaaagaatggcgtggagaagccaattatctcgaaatgtcaaagagctacgaattctgttttgccaaacttctccttccagtgcctccgctagatcattcgtggagcaaaattacaaggatctcaagactttaaaccccaaatttccgatcctcattcgtgaatgccgtgggattgagccccaaatttgggctagatatgatatgggtgttgagagggcattcgcttggaaggtttgactgaaccacagatattgaaggcactagaagaccttgtgaaagcaggtgcatccctcaaagcctaatacattgctggtattaaatcgaattagtcgaaataagttgatcttctctgaaaagttttccctttgaaggttttccttatattcagctatcatga

SEQ ID NO: 27554 - DNA, 413 bp, Gossypium hirsutum
  Clone ID: LIB3148-004-Q1-K1-H11
agcttctctaagcttcctgacaaattttgaggatgtctacaagttgtgggcatttgtggcaaagttccttaacccttcattcatcagggagggtacacttccgaccgttgcggaggaagaatcagagacttaacgtctgcaattgagcaattcaaaatcatttgcaaaataatcccagagtctgagtggaagctaaagaagaccctgagaggatttggtggtaccattatatgcatatggtttgctcttcgttaagacgtttggatgcaacagggtgaatttgttaattcatatttattgttgcttgaagttttctttctctcattttgggttattgtagagttggttttagttttagaaatatatttgtactattttggatgttatcctgaccttaaaagcagaagtatatt

SEQ ID NO: 27555 - DNA, 303 bp, Gossypium hirsutum
  Clone ID: LIB3148-004-Q1-K1-H12
aaagaacaattgctaaagcatggactgattcaaggtctggcaaaacaaatgatcctttgaagggttatcgttgaatcccatttgaaaactgagatgaaatggggttcgttttgggtattttagcacaatggtcttgtttttatgctttttttgtttggacttgtactgaagttgcagaaagatttgtttctggatatttttgttctcgctataaaaagtataattgaaatttggagatggttggatttcttaaaaaaaaaaaacaaaaaaaaaaaaaaaaaaaaaaaaaaacacaaacctaaa

SEQ ID NO: 27556 - DNA, 187 bp, Gossypium hirsutum
  unsure (1)..(187): unsure at all n locations; Clone ID: LIB3148-004-Q1-K1-H2
ggcagaaatagaatccagtttccaaagatgaatgtggctggaaaacctctcccactcttctgttctatgctcatttgtttgtcttaatattttataatcaatcatcttcttgttttctattccgacaaacattcggtttcagatttaaataaatttcatagagttctgtctctagccaatttgnatt

SEQ ID NO: 27557 - DNA, 416 bp, Gossypium hirsutum
  Clone ID: LIB3148-004-Q1-K1-H3
agaagatgtcgttgtggagacgtttaagcccgttgagaagctgcctcatgcgggttcatcatcagcggcggttgagcaaccggccgtggctctctccggcgatgaacagcccgagccaaaattgtcgagccggtgctttatctgcagaaagaaggttggattgactgggtttaagtgccgatgcgggagtgcgttctgtggggagcaccggtacccagaaaaacacgagtgctccttcgatttcaagggcactggacgcgatgcgattgccagtgcaaatcccgtcatcaaagctgacaaattggagaggttttgaaaggtggggagcttggagtcagtttgcctgaatcgtgttcttcaatgggtttgccttcttttttgccctctcaactttttgagagttatattaggtttta

SEQ ID NO: 27558 - DNA, 68 bp, Gossypium hirsutum
  Clone ID: LIB3148-004-Q1-K1-H4
gccacgcgttcgtgaaaagcaaccgccttgtacctttgttaactactgcaagaattcaacaactggtg

SEQ ID NO: 27559 - DNA, 317 bp, Gossypium hirsutum
  Clone ID: LIB3148-004-Q1-K1-H5
gaaacatttggtgattggtagttattaaaatctgtgtttcccttctaaaaaaaaaaaaggggagggaaaaaaaaaaaaaaaaaaaaaaaaaaaaaaaaaaaaaaaaaaaaaaaaaaaaaaaaaaaaaaaaaaaaaaaaaaaaaaaaaggggcgaccaaatttaaaaaaaaccagcctaccggccccccgctatgcaagtgcaaaactttttattgcctcccccaaaattaaatttttctgcacttgctttacaaaaacccgtttgtgaaacccttggctctccccaaattaattgcccccctccccattcccccttt

SEQ ID NO: 27560 - DNA, 230 bp, Gossypium hirsutum
  Clone ID: LIB3148-004-Q1-K1-H7
cccacgcgtccgcaggaaggagaagacatttcttgcagagaataagaagtttatcaagaggcagccgaagtgaacacggattttctgtcaaattctggcgagggtcccgttaaaattttgctaaaaccgttttcattgaagttgcaataatttccatgggaaattagagtttgttttcttgagtaagaacagggaaatttacagaatccagactgatgctttattctctt

SEQ ID NO: 27561 - DNA, 426 bp, Gossypium hirsutum
  Clone ID: LIB3148-004-Q1-K1-H8
gaaaagcggatgctgtgaggcttagtgagttgccgttgtaccatctgcttgttcggtagtgggagcaaagcaaaaccagagcaagtctgctcatagggaagctgctttgaccaaatttcgccagaaaaggaaagagagatgcttccaaaaaaaggttaggtaccaaagcaggaaacgactagcagaacaacgacctcgcatcagaggtcaatttgtgcggcaaacagtgaacaacaatgacccagcatccaatgtcaattcatgcgacaaatagtgaacaagaaaaaaagcagaacaagagatgaagtaaaccttcttgctggtactgcaaagagaccggtctagactatttgacaatgttagtcttgatgaactgtgttttatagctatagaccttcctcttttcccttttttttttcttttaat

SEQ ID NO: 27562 - DNA, 341 bp, Gossypium hirsutum
  unsure (1)..(341): unsure at all n locations; Clone ID: LIB3148-004-Q1-K1-H9
cccacgcgtccgcatggatgcatgtggtgttcaatccaaagtactgagtgattgtctgaccaacttcggaagtgatatcagcaaatgccaattctatatggatatgctgcaagaatgccgcaagagctccggtgcgttgggcgcttaatgttgaaaatctaatatcccccattaaggtcattgcaatttaggagtttgagtaggcgtgtcctttttagtttgtctatattgatgcaaacaatgggtttgctggtgggaaaatggcactatttaggaaaactcactgctgtaaacttaacatcgcatatctaaattaataaataatattttttattgcnnaa

SEQ ID NO: 27563 - DNA, 369 bp, Gossypium hirsutum
  Clone ID: LIB3148-005-Q1-K1-A1
gcaggtgtgtatggcgcggtgttgctgacatggcgaggccattcgtgaggcgtgacgcgaagtcttccagaagcttcactatttgggactgctgatggtgtttgcggtgcataggaacggcggcttagtggcctagggtttccactttctgaaaagagtcaatggactaagttttgggttaggttattgggctgtgtaatgggctaggattaggttttaatgttttgggtcttaggcttggtctgttattgggtcctagaccgtttaaagggacttcgattatttatttggttttattttgtatgggctagtaaagactgtaagcggactatttttagactatttaatttaaaaaaattatatttttat

SEQ ID NO: 27564 - DNA, 419 bp, Gossypium hirsutum
  unsure (1)..(419): unsure at all n locations; Clone ID: LIB3148-005-Q1-K1-A10
cttggattgcctgtgatggcaacaaatggtagggctaggtgcagtctagagcagaagtctggttcaaacgggctgagctcgaaccccagcatggtggcatcaatgatggcggcagcagcagcagcggtgacaacggctgctgcaccggcaacggcgttggtggatgagagactttccacggaaggaacaggacttccttttggctaaagtaacaaccttctgggatggatcctttttggagtgtttggtttgatttgggcattgtattttatctatgtttctagtcttaaagaggatgaagagtctggattgtcgctttgatgaatgatgtaagaatattgggctcatggtttttactttccgccatttcttactaaattaaccctttcatttntatgaaagtaacanatcttggcttg

SEQ ID NO: 27565 - DNA, 259 bp, Gossypium hirsutum
  Clone ID: LIB3148-005-Q1-K1-A11
ggttgttgatttcaaagcaataatcttgttggaatcgaattagatcgattaatatgatcgggtgaattgagaatcgataaatgtattaattctgacgaaaacattgaatttgagcgaattatttagaaccaccattgaatcaaaaatcgaaataggttgaacaagtaaaaaaaactaatggaatcggtttgttatatttattaactgttaacattttaattgaatttggaatgttcaattgaattagaattattagttt

SEQ ID NO: 27566 - DNA, 389 bp, Gossypium hirsutum
  Clone ID: LIB3148-005-Q1-K1-A2
aaaaactctgctggagattattcccagagtgtggatgggccaacttctggcttagctgatgagattgcagcttctccaaaatcggaagtaaaagttgctactgaatctgccggtgggatgaagcgtaaaatggcataatagaccccgatgatgtttagaaagcaacatcaaacccaaatattttaaagaggtggctaaagccgtaaaaaaataataaaaacaatgcaaaaaaaataaaagcaacatccatggtttttgtaaaatatgtcatgcagtaatatacttttaaaaataaaacaatttggtttaacatttgttcgcacatttttttgtcacttattttctcaataatatacacgttcccaatagatatatttagttttcatttt

SEQ ID NO: 27567 - DNA, 365 bp, Gossypium hirsutum
  Clone ID: LIB3148-005-Q1-K1-A3
gcttctgccatgtttgatctgcgaaacgttgtgatttatgtacctctcccagctcttcgggagggcccaaatgttaggcagattgatggtgaatggagatatgactccagaaattctgtcttagaatggtccatacttctcattgataactctaaccgcagtggatcaatggagtttgttgtgcctccagcagattcatctgtgttcttccccatttctgtccgtttttcagcaacgagtacatacagtgacctgaaggttgtgaacatcattcccctgagaggcggtggagcttctcccccgaagttctcccagcgaacaaatttgatttacagagaattatcaagttgtgtgatgaacgactg

SEQ ID NO: 27568 - DNA, 289 bp, Gossypium hirsutum
  Clone ID: LIB3148-005-Q1-K1-A4
tataagggagagagggaggagaatttcaacaagtcaaaggaggtggatttgttggatgagagtagtgaaaagttggagaatgtggattgggaagatgttatcactatcttggatgataatgaatggccatccaaaacacctagcttccaggaaaccatgaaggaatacaggtttgagttgaagaaattcgcagaaaaggtgatgcaagttatggatgaaaacttgggattaccgaagggatacataaggaaggcactcaatgatggagatggtgataatgccttctttg

SEQ ID NO: 27569 - DNA, 369 bp, Gossypium hirsutum
  Clone ID: LIB3148-005-Q1-K1-A5
gcccaatgttgctgggctgatactggctggttcagctgacttcaagactgaattgagtcagtcagacatgtttgatcctcgtttacaagccaagattttgaatgttgttgatgtgtcttatggaggtgaaaacggttttaatcaagctattgagttgtctgctgaaatcttgtcgaatgtgaagtttatacaagaaaagcgattaattggaaaatactttgaggagataagccaggatactggaaagtatgtgtttggcatagatgatacgttgaaggctctggaaatgggtgctgtagaaacccttattgtgtgggaaaatctagagatcaataggtacgtgctaaagcacagtgcaaccggagaaat

SEQ ID NO: 27570 - DNA, 366 bp, Gossypium hirsutum
  unsure (1)..(366): unsure at all n locations; Clone ID: LIB3148-005-Q1-K1-A6
cccacgcgtccggaatgaccctgcttttacttatgaggaaacggtgcagactgctatttctgctgtacagtctgttcttcaagaggatttcaaggctactgagatagaggttggagtggtgaaagctgataatccagctttcagagtgttgtcaacagaggaaattgatgaacatctgacagctattagtgagcgcgactagtgagcatggaccaatattagctgctgcaaaaacctttctattatttgaaacaacatacatgctttagttgatcatgatgtttgagagggattgaacgagggttagaagagctntacatttatgttgcctcctattactgctcngaacttataattaaattcatg

SEQ ID NO: 27571 - DNA, 318 bp, Gossypium hirsutum
  Clone ID: LIB3148-005-Q1-K1-A7
cccacgcgtccggatttgtatacaacagtgatgaaaagattgaagaagagtgtgcagagaaggaggattcatccgatatcatacgactcaagggattgccaacaccgaaaggaaagcacctgcggtttcctctagatgaggttgacgatgattgataactatctcggtgtagaggtggggatgttgggattcattttgttgtcatcccaatttgtttgttctttctggaaaaagaaaagatcacgaacgaagtgattgaataaataaaaattgatgcaacgcaaaaattcctcggaaattgaactaattaatttttac

SEQ ID NO: 27572 - DNA, 352 bp, Gossypium hirsutum
  Clone ID: LIB3148-005-Q1-K1-A8
cccacgcgtccgggtgaagtaacttggtgccatgtgacgtttcatcattagcttggtgttgaggtatctttctgagatgcattgaaccttggtcaagtggtcttgcaagtgggaaccaggtcttggagggtcttccgtttggggccttgccttgggcctagctttccttggattagtcatgttgggtgctctggagatcatcttgagggttttggttgtccgttaccttctgcgatcaacttttattttcatctcaacaagaaccataaaatatttaaagatatcaacttttttaaatagtaaatgacatttttaaaattgtaaatgttaattatcttaaagtttgaccttc

SEQ ID NO: 27573 - DNA, 429 bp, Gossypium hirsutum
  unsure (1)..(429): unsure at all n locations; Clone ID: LIB3148-005-Q1-K1-A9
gcatcttgtattcacacaatcactatcgagaaacgaagaaaacggaattggatcgggggaagtcaaaagtagtcgagtagtcgactgtgttcgttgttaaccgagattttggaatcgtgtacgagctcagggatcatcagcaagcctatcacactatcgactgttttctttggtattttactaagttaaagtttgagcttatggcatgtatagtctggataaaataattgattttggaacttgtatgtatatagccatgcgaaaaatggcttgtctttaatcattagtatttgttttggtttttgtcttatgggttcttgattaagtgtttaactttataattntggttatggcttatttacatgtaaaatacggtagctatgttnntgtgataatatggtgaatgagatgatatataatatgagtgga

SEQ ID NO: 27574 - DNA, 208 bp, Gossypium hirsutum
  Clone ID: LIB3148-005-Q1-K1-B10
attcatataaaaaaaagttttgttctctaagttacatttgcgttgtgagtagttgcatttggaatttgtatagtggattcatctgattccatataaaacattcattaaaaatctcaagggaggaggggtagcgtaattaatttatatatattcattgtttatataaaatcaatcttcatcattagttcaatggagatagtttgtattc

SEQ ID NO: 27575 - DNA, 249 bp, Gossypium hirsutum
  Clone ID: LIB3148-005-Q1-K1-B11
ctaaaccctagacaaaaagaaaatcaaaatcagagaatttgaatccaagaaaaggaaaattggaggatcatattgttctcttggtcgaaattgcgtcgattttcttcgataaagagatccaagaaaatgtctaataaaccgcgagagtcggttgtgatccgatccgtttggtcggaaaatttggattccgaattcgagataatcagatccataatcgacgttttcccgatcatttcaatggacacagag

SEQ ID NO: 27576 - DNA, 422 bp, Gossypium hirsutum
  unsure (1)..(422): unsure at all n locations; Clone ID: LIB3148-005-Q1-K1-B12
ccagaatcaacgtaagaattagggttgtgtctagaaatggcgattgcagcgcgcatcagatccactctccctctctttcacaggcttttgagatccgattccctgccttctcacactcccagagctgctcttcaccgaactctactttgtcccgaactgtcgaggaaatattccacttctccgaagaaggacgagaatgttaaggtgcctttggctttgtttggtggatctggaaactatgcatctgcactgtaccttgcagccgtaaaaggaaatgctctggacaaggttgagtctgaacttcttgaccttgttcaggcatcaaaaaacagtcaattcttttctcaattcactaaggactngtcagtacctgcagagacacggggtcaaagcattaatgagatatgtggccaagctaaatt

SEQ ID NO: 27577 - DNA, 232 bp, Gossypium hirsutum
  Clone ID: LIB3148-005-Q1-K1-B2
aagaaattgaggcatcatttgaggcatccaaatttcttcctgtccatgcaaccaataaaagcgtggagcctgttgaagttatgcccctcttacccgattttgaacggtaccattaccagttcgttatggtggcattttataatgctcctacagctgactcagaaattcttagcaagctttcatggctctgtactttattaatattaattgaggtccatttttttaatgtttt

SEQ ID NO: 27578 - DNA, 293 bp, Gossypium hirsutum
  Clone ID: LIB3148-005-Q1-K1-B3
aaaaaaaaaaaaaaaaaaaaaaaaaaaaaaaaaaataaaaaaaaaggggggccataatagggagggaaaattacgacgccggcatgcaacaaaataaatattttttaatgtaaccataattaaataatttgtccgccgttttacaacaacgcgattggtaaaaaactggcgtttccaaccttaatagccttttagcacatcttcctttttccagctggtgtaatataaaaaaagaccttaccaattttccttcttaacaaaatggtcagccttaataaagaatgggacgcccc

SEQ ID NO: 27579 - DNA, 332 bp, Gossypium hirsutum
  Clone ID: LIB3148-005-Q1-K1-B4
gttaggtgtttggttagcaagaggtttttgattgccggtggcggtgctccggagattgagttgtgcaggcagcttggtgcttggtctaaggtgttgcatggtatggagggctattgtgtgaggtcatttgctgaagcacttgaagttattccttacacgttggccgaaaatgctgggttgaaccgtattgctattgtgactgagctgaggaatcgacatgctcaaagagagatcaatgctgggatcaatgtgaggaaaggacagattactaatatcttggaggagaatgtagtgcagcctttgcttgtaagcacaagtgcaattacactggc

SEQ ID NO: 27580 - DNA, 375 bp, Gossypium hirsutum
  unsure (1)..(375): unsure at all n locations; Clone ID: LIB3148-005-Q1-K1-B5
gatcattccaaacccgaaggaggtcaatggaatcaaggttcttcaactggaaactgcagctggtgcagcaattaggttctttgatcatgctattggtatcaacgtacctcgatcgcgattccttccagtgaaggcaacttcagatttgcttcttgttcagtctgacctttacaccttagttgatggatttgttatccggaataaagatagagcgaatcctacaaacccatccatagaattggggcctgaattcaagaaggttggtaacttcttaagtcgattcaagtcgattccgagcatcattgagcttgatagccttaaggtgactggtgatgtttggtttggtgctggcattgtgctcaagngaaagtgagt

SEQ ID NO: 27581 - DNA, 353 bp, Gossypium hirsutum
  Clone ID: LIB3148-005-Q1-K1-B6
taggactaatatcatcacgaaaaacagccgtagcagtcgatatcttgaaactcatgtcctctacatacttggtagctctatgtcaagctattgatttaaggcatttagaagaaaacttgaggaacacggtgaagaacactgtgagtcaagtagccaagaaaaccctcacaaccggtaacaatggtgaactccacccatcgagattctgcgaaaaggatttgctcaaagccgtggaccgcgagtacgtgtttgcttacatagatgatccatgcagtgctacttatcccttaatgcaaaagctaagacaagtccttgtcgaacacgcattcgccaatggtgacaatgaaaaggat

SEQ ID NO: 27582 - DNA, 431 bp, Gossypium hirsutum
  Clone ID: LIB3148-005-Q1-K1-B7
taaatgctgctgaacttgcaagctacgatcaagtaaagcagacgattttgaaaatccctggattcactgataatgttgtcactcatctcctttctggtcttggagctggattttttgccgtctgtattggttctccagttgatgtggttaagtcaagaatgatgggagattcagcttacaagagcacgctcgattgttttatcaaaactttgaaaaatgatggacctatggctttttacaagggttttatcccgaatttcggacggctaggatcatggaatgtgatcatgtttcttaccttagaacaggcaaagaaaattgtgagagatctagagtcatcttaaggagcttaaaaagaaccaaaatcccacaaagcaaggaattgaaggtgggactgccattgaaattgaagatttacagagaataaattt

SEQ ID NO: 27583 - DNA, 346 bp, Gossypium hirsutum
  Clone ID: LIB3148-005-Q1-K1-B8
ccacaaagatggcgaaagctgatctgatggttatttctttgttgttactagtaacactgtgtttcacggcggttgacggttacggaaggatggtgggagggagaacggagataaccgacgtgaagaccaacgaggaggtacaagagctggggaggttcgcggtggaagaatataaccggagccacggcctggggcggtggcggggatttgtaagtagtagtaacggaagacgggcggagttggttttttcccgggttttagaggcgcaaaaacaggtggtttcggggataaagtactatctcaagatcgaagcaatggagaataaagctagcaagacgtttgaatc

SEQ ID NO: 27584 - DNA, 432 bp, Gossypium hirsutum
  Clone ID: LIB3148-005-Q1-K1-B9
cttaggaggaagctggacaatgatccccagcatcccaacccacagtaacgtatctacgccggccaatcaagaccatctatacctttcccctcctccaccctcacaacaacaacagtttcatccacaacaattccaacaacaacagcagcagcagcgtatgttacagcagcagcaacaacaacaacagcagcagcagcaagtgcagcagaatcagcaacaacaatcactagcttctcacttccatctcttacatttggtggagaatttggctgatactattgataatggaagtcgggatcaacattctgatgctttggttaatgaactgaacaatcactttgagaagtgccagcagcttttgaactcgattgctgcatcaattaattctaaatccatgactgttgaaggtcaaaaagaaaaagctggaggaaa

SEQ ID NO: 27585 - DNA, 349 bp, Gossypium hirsutum
  Clone ID: LIB3148-005-Q1-K1-C1
aaaatattgggtctccaccagaatcagagcgtaaacgagctgaacttgatgcattagcccgacggttacaaggtattactaaatcagtgtcgaggtatccaactttcaggcgacactttgaggaatttgttaacaaactatccgaggatctctcaaaggacagtggcagcagcaacagcagcagatctagtaataggtctcatcaatcgaagaacaccgttctgcggttttttagcagcagatctttcaagcggagttcaagccaaaacatgtctgatcaagaatcacaatcagttcttgccagagatgcaaaaatcgaatgatgtaagaataggatgtcgatcaagaa

SEQ ID NO: 27586 - DNA, 168 bp, Gossypium hirsutum
  unsure (1)..(168): unsure at all n locations; Clone ID: LIB3148-005-Q1-K1-C10
ttaacctccttcaagtgcaacttaacatttttcaagctttagtcattctatgtttcggntcgcttatttttaatcaaaagaatcctttaaatattaatatcattttttataccacatcttatattccattctttttaatcattcatatcttctcttataccttatatt

SEQ ID NO: 27587 - DNA, 304 bp, Gossypium hirsutum
  Clone ID: LIB3148-005-Q1-K1-C12
attattttcatctgctcttggtttgtcgtttttagctgatcagtgttaaggtaaaatgctagtaaaaccaaaatttacaagtacaaaatttatatatctattttttcagaaccagaggtggaattgtgctgttcctttagagttgatatgaaattgtttttgttaactaatgatacatggtaatttgtgtattcttgtttatgttagggtttttttgttattatcatagttaaagactaatgatattatatgtacaaataatggacatgttataattattttatatgtatgtatgtatgtattc

SEQ ID NO: 27588 - DNA, 269 bp, Gossypium hirsutum
  Clone ID: LIB3148-005-Q1-K1-C2
gctcttttattagaaattaaaaagttttaattagggtaatgttatgtttgatatgattatgcttaagactttaatgtttgtattaatgaagggtaaatagttgtgacaataaaaagattggccacccagttttaatttatatttatttctaatttgggtgacatgtaaattggtttcgagaaacattgaagtacccataatgttggttcatgtatcagatatagtaaacactttggattaataaaaaaacctcctaatattttattttc

SEQ ID NO: 27589 - DNA, 378 bp, Gossypium hirsutum
  unsure (1)..(378): unsure at all n locations; Clone ID: LIB3148-005-Q1-K1-C3
cccacgcgtccggagaactgtgcgggtccatcgtgtggtaacccatacaaatatcgagattcgaagtcgaagctacctctttgtagtctgcagtgctacaaggcaattcaaaaacagcagatggctgaaactacctgctagtgttgctgaaaatccagcacttccctcttgtgcatgtggtaaattctgcacatttatgttccatttcaacccagggacggattaaaaaatagagccaaatgcaaatttctttttggagtaatattaatgtaattattacaggtacaagaaaatcttagttgtgcttattttagtataatccataaataaaagatttcctctccattccaatccnnnnnaaaaaaannnaaanaaaaa

SEQ ID NO: 27590 - DNA, 331 bp, Gossypium hirsutum
  Clone ID: LIB3148-005-Q1-K1-C4
ggaggatgcatacttgggaatacatttgacttcaatcaatgttgcataaatgtttctcctttgttgtttcaaaaaaaaaaaaaaaaaaaaaaaaaaaaaaaaaaaaaaaaaaaaaaaaaaaggaaaaaaaaaaaaaaaaaaaaaaaaaaaaaaaaaaaaaaaaaaaaaaaaaaaaaaaaaaaaaaaaaaaaaaaaaaaaaaaaaaaaaaaaaaaaaaaaaaaaaaaaaaaaaaaaaaaaaaaaaaaaaaaaaaaggggggggggccctttaaaaaaaaaaaaaattatctcccgcgggaaagaaaaaaaaaaattttttttttagggccac

SEQ ID NO: 27591 - DNA, 443 bp, Gossypium hirsutum
  Clone ID: LIB3148-005-Q1-K1-C5
cccacgcgtccgaggaataagagcacctttatttttctagctagctttcaatataattccttgtcgttctatttgcttttaaaatttagcctctaattagatacccagttctcattttctctttaaaattaaccacaaaataagctatcatttgtcttcttgtcgtgtctgcctttttttgcttgtttccttttctttcttcccttatttgacgccctgtggagttctcttatctaattttttgtttatcaaaggttatggttgaaaatgtctcttttttattttattgtattgtttttgttttatttcttttagttttgtttatttaattatatctttatatttattttttttgcatttttttcttttttatttttttatattttttttttcattaactttttttttcttttttttctctttctttattttttttttttttt

SEQ ID NO: 27592 - DNA, 360 bp, Gossypium hirsutum
  Clone ID: LIB3148-005-Q1-K1-C7
cccacgcgtccgccaaacctgacctaatcatgggactcagggctcacactgatgctggtggaatcatcttactcttccaagatgacaaggtcagcggccttcagcttctcaaggatggtcagtggattgatgttcctcctatgaaacactctattgtcatcaaccttggtgaccaacttgaggtaatcacaaatggtaaatataagagtgtgatgcaccgtgtgattgctcaaacagatgggaccagaatgtccattgcttccttctacaacccgggcagtgatgctgttatatatccagcaccagctttgctagagaaagaagctgacatatctcaagtgtaccccaaatttgtgtttg

SEQ ID NO: 27593 - DNA, 424 bp, Gossypium hirsutum
  unsure (1)..(424): unsure at all n locations; Clone ID: LIB3148-005-Q1-K1-C8
catcagctgcttcggatgtgccatcgaaattatctatcttatattatacattgtatacgcacccatgagggataaggtttttacagtgaaatggataatcttattcaacctaggagggtattgtttgataatggtggccaccaatttgtttagagaaaggtctaaacgtgtgacagtgatgggatgggtttgtgctgttaacagtgttgcagtctctgcttctcctttaggcataatgagacgtgtgataaggacaaaaagtgtagaatacatgccatttcttctctccttttttcttacattatgttccacaatgtggttcttctatggacttttcttacaagatttatacgtggcttttccaaatgtgttgggatttctgcttggaacagctcanantatcatctatgtgatatacaagaat

SEQ ID NO: 27594 - DNA, 345 bp, Gossypium hirsutum
  Clone ID: LIB3148-005-Q1-K1-C9
atgatgaggatggggagcatttgtccaaagagaaaaatggggttcgacctagaaacagaggacgagggaggagacagaaaaatcgtggtgccaatggacacggccatggaactacatcctcatgccatgccgtagaaccatcgaagccaccaccgggacctagaatgcctgatggaacacggggattcacaatgggacgtggacggtctccaatttctaaaccaagttaatgatgtggtattttgattatcatgcatatggtttcaaaggccaagtgtgaaaaacaaaaacccaaatggatttatctgtgttttataaatggtgatggtgttatcttttcttttg

SEQ ID NO: 27595 - DNA, 400 bp, Gossypium hirsutum
  Clone ID: LIB3148-005-Q1-K1-D10
gccgccacgtcagtcttcgacaagaactcctttcactaatctcagtcaggttgatgctgacctggctcttgctcgaaccctacaagaacaggaaagggcgtatatgatgcttaggatgaataatgatggtgggagtgattatggaagttgggaggctgggagctatttgcatgatgatgacgatgatgatgattttggggattcccaggatcatgatattactgacggcgatgatgaggatgaggatgatggtgaacaggaggatgaagatgaagaggaatatgatgggactgatgccgatgatgatgaggatgcgtttgatgtgcatgcacatgctgaggatggtgatgaggataacaaccctagtgctgaactcgacccactgctttttcgagtgatg

SEQ ID NO: 27596 - DNA, 300 bp, Gossypium hirsutum
  Clone ID: LIB3148-005-Q1-K1-D11
ggtatggggaagaaagcaggtggaggaatgtgctgataatggtgtgcttcatcttggtttacaggttcgtttcttatgtcattcttagatgtagatgctcacagaggggtctgagggcatcactttcatgacctctaattaattctctctcactcacgtgaatgtcgacaacatggttcacatgattttggaactacataagatagaaacgccaaaaggacaaaaacaaaaatgtttgtattgtaatttgtaatagaatattattataaggaaaataaatgtattaatctgcctgcaaat

SEQ ID NO: 27597 - DNA, 258 bp, Gossypium hirsutum
  Clone ID: LIB3148-005-Q1-K1-D12
cccacgcgtccgtccacgcgtccgaaaaaataaaaaaaaaaaaaaaaaaaaaaaaaaaaaaaaaaaaaaaaaaaaaaaaaaaaaaaaaaaaaaaaaaaaaaaaaaaaaaaaaaaaaaaaaaaaaaaaaaaaaaaataaaaaaaaaaaaaaaattaaaaaaaaaaaaaaaaatgtattttattttaaagaattattaaaaattgattcttggtgaaaaactttaaattttttttttttttagctttattaaatttaatt

SEQ ID NO: 27598 - DNA, 167 bp, Gossypium hirsutum
  Clone ID: LIB3148-005-Q1-K1-D2
accaggcgttcaaccacgcgtcggttcacgcgtgcggccacgcgtgcgcaaaggaaatgtagtggctgtggttacaagatagcagcggaggacgagcaaacaaagggtatcacaggtggagactgtatctggtttttgtacaactaacaaagaaccgaactcggtga

SEQ ID NO: 27599 - DNA, 234 bp, Gossypium hirsutum
  Clone ID: LIB3148-005-Q1-K1-D3
tttccccctcatttttcatctgagacagtcggattgttgttatgcctttatttgcattttgtgatgatcattaatttagttgggaacttatggctatattgtaactaaaaaactggctggttggatatataatacctttggattaaaaaaaaaaaaaaaaaaaaaaaaaaaaaaaaaaaaaaaaaaaaaaaaaaaaaaaaaaaaaaaaaaaaagcaaacggggggacggcccaa

SEQ ID NO: 27600 - DNA, 206 bp, Gossypium hirsutum
  Clone ID: LIB3148-005-Q1-K1-D4
gagacaagtgtgggctctcagataatactgctgtgtcgttcccaacgagcaaggcactcgcggatgaaaggggcctacctgatctcgggacgtgtgccgaccattcaaactctgtggcacaggctctaatggacatggcttgttacatctcagactgaatggcgagccttccaaccatgaacaatgcaatgactgcaacggtaccc

SEQ ID NO: 27601 - DNA, 247 bp, Gossypium hirsutum
  unsure (1)..(247): unsure at all n locations; Clone ID: LIB3148-005-Q1-K1-D6
gaggccaataggattgaaggccatggggagtatggaaagtgattcagattgaagatacatcaatggcagtagcaggaccctttttcttttgatatttttgggggaagatttttggaattggtgttaacaagttggggaggggcgtctatgggtagttttaagtattatgtcaaagtgagccgatataatcaaaacttataatgagattattcaaaaaaaagttttaaaatggctaaattattcnnaa

SEQ ID NO: 27602 - DNA, 427 bp, Gossypium hirsutum
  Clone ID: LIB3148-005-Q1-K1-D7
ctcatgctcgcttttctacgctagctatgtataattacttcaaggatgctcagaggatcgcaaaggaggtgaagagtagcttctccaacgatccagagaggttagccgaactccgaaaattagagcaggtagcagaacacaacagtgttgctcaaaatgtcatttgtcggttaggagctcttgacccttcacttaaggtgtcatttgagttcagccatcatccattctttgccactgttgttgtcaagagatcttaaaggtgtttgcttcttttgatgatctctaccaattttgaaacacacatacttaggattaagaggcatttgagtcccctggtgtagcaattgtaatattagcatgttttaagtcaatgttcttaatttttactataaagtattatatgaataatacaatgggaaattaaagc

SEQ ID NO: 27603 - DNA, 302 bp, Gossypium hirsutum
  unsure (1)..(302): unsure at all n locations; Clone ID: LIB3148-005-Q1-K1-D8
agatctagtgttggtgtggagttgggatttgaatgctttgtatagatggataggagtaggcctagggcagtacttttctttttctnctctttcctcttagtttcctgcttaccacctttttgcttaaaaaaaaaaaaaaaaaaaaaaaaaaaaaaaaaaaattaaaaataaaaaaaaaaaaaaaaaaaataaaaaaaaaataaatgtcgaccgttttaaagtatctaagtttatttctctttctttctatttattaatctttttttttttgtcacttaaatttatattttttttcctttttt

SEQ ID NO: 27604 - DNA, 379 bp, Gossypium hirsutum
  Clone ID: LIB3148-005-Q1-K1-D9
ggagatcggattgcttaagctggactgaccctgtcaggttgctgttgggtgcagatctaagctcgtggaagaacaagaactgaggaagagtatagcacgctcaagtctttacaaactgtgttctcgacaaatgccactgaaccaggtggtaagcttaaggagcacttacgaggcgaatgaaatctgctctacttacagtttatgtttttagtatatgtcattttattttattttattttaattttttttttttttttttgtatttttatttttttttctatttttcattttattattttttttaaattatttttttcttttttcctcttttttatattaatatattttatatattttttttttttctattttttttttt

SEQ ID NO: 27605 - DNA, 377 bp, Gossypium hirsutum
  unsure (1)..(377): unsure at all n locations; Clone ID: LIB3148-005-Q1-K1-E1
gagaaaaacagatgaagcaagatgaaagaaaagaaaagctaaacattaatgcttcaaagaaagaagaccgccatgcccattcctcttcaaccaccacctcctccaagacttctaaagcgaagcctgtggttgctgcttgaactttgaagaaagtagatgaatgattaatttcgataggaattaagccaaaatccaaacccagccagcctcaaaagaagaagagtagaaatcaatgggctttcgtcatatataatagtgggtgcagttaaattattataaagatgtggatggtgatgcaaataggcaaagctttaagcttcttatacatggattccaatgttataactctttctaatatagtttcctttntttactac

SEQ ID NO: 27606 - DNA, 407 bp, Gossypium hirsutum
  Clone ID: LIB3148-005-Q1-K1-E10
gactaatacttccaatggtgttagaatcaaaacttggccaggtgctgaacctggcacttgttcgaacattcactttgaggatattaccgtgaccaatgtcagttctcctattataattgatcagaaatattgcccatggaacaaatgcaaaataaatgaagaatcgaaagttaaactaagcaacattagtttcaaaaacattcacggcacttctgcgcgtccagaagctgtcaagattatttgtagtgctactttgccttgtgaaaatgtagaacttgcagacattgaaattacgcatagtggaccgactggacctgcagtatcacaatgttcgaatgtgaagcctaaagttagtggcaaacaaaatccagctgcatgttctgcccctatcccagcaaaacctaccc

SEQ ID NO: 27607 - DNA, 427 bp, Gossypium hirsutum
  unsure (1)..(427): unsure at all n locations; Clone ID: LIB3148-005-Q1-K1-E11
attatttcaatggaagttacagaatctcttctcctttttttacaaaaatgaaatggctttatatatagcttgaaaaagaagaaaaaatagatcaaatatagttgctattttgctgttttttttcttcggactcttttagtccgttttgcaagcgaacgtggtggaaacggcacgcgtggaggccgaaacttgcggcgactggagactgctggggtgtttgagggcggcggctacttgctgctactagggttttctgcttttatttaagtattgggcaatttagtgattgggctagggttaaatgtttgggcttgtttgttggtctgggcccgggcatatttgggcttgtacaccccangcttaagtttccatatttcaagctatatatacctngacatngaatataattggtggaatttattttatc

SEQ ID NO: 27608 - DNA, 335 bp, Gossypium hirsutum
  Clone ID: LIB3148-005-Q1-K1-E12
aaagtggctttcgctgttggtatgattgccttgcctgttgctgttcaagcccagtcccccgcccttgcccccaccacgaacgacggaacatcgattgaccaaggggttgcatgtgtattgatgttggtggcattgttgcttacatacatgattcatgttgcttacttatgcttcaacttttgagctatttgttacattgtcaaatttctagggagagggagggatatgctggatgatttgtaactatgcttgtaaaagtttaggcaaactcttgttggcttcttcccgtggataatttgataacttcaattttataatgtttagtggcattctca

SEQ ID NO: 27609 - DNA, 357 bp, Gossypium hirsutum
  unsure (1)..(357): unsure at all n locations; Clone ID: LIB3148-005-Q1-K1-E2
caacgactgccgcatttccggttcatgataaacaccatttttactaattgatgaatgtaaatttatccttgactcaaaaaccagtagtgggtgagatttcccttctttttgagcgccacggagagtgccaaagccgaaactagagcaagaagattagttttgtacgagagaagcgtgatgaaaaactaaagcaccattcgagtctgtgactttgttttcatggtttaccattgtaactgtgtgataaatcatggcaatgcatgttcattttatagctttgttatactctttgctaaagtactctatatttgctaatcaatagataatcaaacattggtctttagctccnnnnnaaaa

SEQ ID NO: 27610 - DNA, 68 bp, Gossypium hirsutum
  Clone ID: LIB3148-005-Q1-K1-E3
gtataattttggatagccatgcgaaaatggcttatatatgtttgagcataatattataatcatttggt

SEQ ID NO: 27611 - DNA, 361 bp, Gossypium hirsutum
  Clone ID: LIB3148-005-Q1-K1-E4
atcacgcttccgtccaaatcaacgtgggacacttggatgagcttggcagatacactggcacattctccacttttgctctttgtggatttgtccgtgcccagggtgatgctgacagtgctctcgacaggctttggcagaagaagaaagctgaagtccgacagcagtagttggatacctttttaccctagtctatctccgagcttgggaatgaaaaatctcatggcagtgactattatgttctaggtcttttcaggttaaactatgtcaaatttatatttttgttgattggatgacatttcagacttggttttcttatatttgaacctaatatatatgccttcggtcatgttaatcgacattt

SEQ ID NO: 27612 - DNA, 413 bp, Gossypium hirsutum
  unsure (1)..(413): unsure at all n locations; Clone ID: LIB3148-005-Q1-K1-E5
cttcgattcaagaggagatgtcaaagtaattcttgcaacaaataggattgaaagtcttgatccagctttgcttcgccctggtcgaattgataggaaaattgaatttcccctacctgacatcaaaacaagaaggcgcattttccagatacatacatcaaggatgactttggctgatgatgtgaacttggaagaatttgttatgacaaaagatgagttctccggagctgatataaaggcaatatgtactgaggctggcttgcttgctttaagggagaggcgcatgaaggtgacgcatgcggactttaagaaggccaaggaaaaggtgatgttcaaaaagaaagaaggcgtcccagaagggacttatatgtagtagaatntcaagagatcccatgtattccttaaattctggtttt

SEQ ID NO: 27613 - DNA, 68 bp, Gossypium hirsutum
  Clone ID: LIB3148-005-Q1-K1-E6
cccacgcgtccggttctagatcgcgagcggccatccttttttaagcttgtaaagtgcattgtttgttg

SEQ ID NO: 27614 - DNA, 100 bp, Gossypium hirsutum
  Clone ID: LIB3148-005-Q1-K1-E7
gttttttatttttatttttattttttattatcctttttggagttataatgttgctagcttttgtagcattttgtatttccaatataaatatagtttgtac

SEQ ID NO: 27615 - DNA, 92 bp, Gossypium hirsutum
  Clone ID: LIB3148-005-Q1-K1-E8
ctaatttgggcttgttgggcccggggcaaatttgggcctctacatggattatatctatgatgaatattataatgatacctactattctagtc

SEQ ID NO: 27616 - DNA, 275 bp, Gossypium hirsutum
  Clone ID: LIB3148-005-Q1-K1-E9
ggactgttgtagttgaatgttcataaatttgcaatcacgcgtgtagtatgctaacggtaacatctccagtcccttgttgtctggagcttgtgagtttgcatatgttgctaggggaaaacagagttctggaagtgatccctaattctttgaaggggattaaccatgatatgtttatttattaaatgcagtgttgttaatcattgttttgaacattcttaatctcttgaatcgttgacctctttccaactttttaataatatttcaagctctcttgt

SEQ ID NO: 27617 - DNA, 387 bp, Gossypium hirsutum
  Clone ID: LIB3148-005-Q1-K1-F1
cttaaaaaggcttctcccattaattaatggaaaaataagaaaatgataagtaaatagataagtatggaaaaaaaaaaaaaaaaaaaaaaaaaaaaaaaaaaaaaaaaaaaaaaaaaaaaaaaaaaaaaaaaaaaaaaaaaaaaaaaaaaaaaaaattaaaaaaaaataaataaataaaaaataaaataaaaaaaaaataaaaaaaataaaaataaaagggggggcgttttaaaagattaaaatttaattaccggtgtattgaaaaaaaaaaatttttaaaaggggaaaaaaaaataaaattaaaggcctgtttttaaaaaacttgtgaaatggaaaaaactcggtgtataaaaaaaaaaatagttttaaaaaaaataatttcttttg

SEQ ID NO: 27618 - DNA, 299 bp, Gossypium hirsutum
  Clone ID: LIB3148-005-Q1-K1-F10
cagaaagacaggcatgaagttcttgtttcagtgtccttgctgttcttgtttctgcttcatgaagcctaagaaagggaaaccaaagatgaaggatgacaaggctgagacaaaaaaggaagtgaaggctgaaaaagagaaggaagcgaaggctgagtgaaaatgatgatttacttacattatattcttcactgctgctcaagtaaattgtatgtaacttttgtttgaatgaaaaatgctgccttgccttggttattgtagtattatttgcttgtactgataataaacttgacatttctatt

SEQ ID NO: 27619 - DNA, 406 bp, Gossypium hirsutum
  unsure (1)..(406): unsure at all n locations; Clone ID: LIB3148-005-Q1-K1-F11
gtttcttgcaactcaagaaagctatgctcacccaacatacaaacagaaactgatcgaacacgatgaaaccgagtacaccaatatcttcggcagagcactctggcctggtgcaccgcagcgtgtcctgcgaacgccattcgtctgtgactggaaatccattcctgctcatgaaaacgaaagtaatcagcccatcatcggtcgatcactaatacatggcatggaaaccgaaatccaacgcttttctgcttcggatcccaatccaacaacaacaggtgagatcgaaaacatggcactttacgcaggccaaagtgtcggcctaatcaaagagattcttnctgctggagaagtagtgaagagactggttgaaggggctcaacatttgatccgncaaagatttaacgaggaa

SEQ ID NO: 27620 - DNA, 438 bp, Gossypium hirsutum
  unsure (1)..(438): unsure at all n locations; Clone ID: LIB3148-005-Q1-K1-F12
ataacaacagcaaagtcaagtgagataaatgtgttagtgcctactggacctgatggtgactggggggagcattcattgccgcaacagtatatccatgtatttaaggatggtcaatttgaaactaccccagtgtcgcactcaggagcataagtgagatctatttgaattgaaaactcagctttcctttggggggaaaaagaattatattctttcattttcttggatacatacctatgggtgaattttacttcttccgtacggctgtttatttattttaacacacatatcatttggtcatcatctgtattatttcacaactacagtttgaatctcttccataacctgttttttggttggtgtgtttttgtttttggcgatgatgagttgggaaattttgcaaatattactgntaaatttctaaatgtctacttttctttg

SEQ ID NO: 27621 - DNA, 285 bp, Gossypium hirsutum
  unsure (1)..(285): unsure at all n locations; Clone ID: LIB3148-005-Q1-K1-F2
cccacgcgtccgaccaattggactgatcactgggattcccattaaagagagagagaagcagaattaaacataagaaagatgccatggttatgttgttccaaagctctagacaaacactagggtttcttctgtttttcatcctagttgttggttttcctttgggtacttttctatgttatatgttggtggtgttggtttaatttctttgggattgtaaataatgagcaaataacatacttaaacttattataatttcaatcttaattccaatttattnacnnnnna

SEQ ID NO: 27622 - DNA, 275 bp, Gossypium hirsutum
  Clone ID: LIB3148-005-Q1-K1-F3
ctttgcagcttcctctttgggtgcttccactggggcggcttcggcttcggcttctgcttttacttcttcttctgctgctgcagctactgctgcttctgtagactctgggctttctttggtttcttcaacggttggctcagtagtctccttggactcctccgcaactggctctgctactggttcctcaagagtctcttcttcttttttctcaacttctggctcctcaatcacaggcttgggctcttcaaccaccttctttgattcaatttcaactg

SEQ ID NO: 27623 - DNA, 410 bp, Gossypium hirsutum
  Clone ID: LIB3148-005-Q1-K1-F4
cccacgcgtccggcggccctttttttcctctaccaggtgattttagctttgtgtgagttcctttaagcaattagccaagatgcagaacgaagagggtcaaaacatggatctttacatccccaggaagtgttccgccactaacaggctcatcacctctaaggatcacgcttccgtccaaatcaacgtgggacacttggatgagcttggcagatacactggcacattctccacttttgctctttgtggatttgtccgtgcccagggtgatgctgacagtgctctcgacaggctttggcagaagaagaaagctgaagtccgacagcagtagttggatacctttttaccctagtctatctccgagcttgggaatgaaaaatctcatggcagtgactattatgttctaggtcttt

SEQ ID NO: 27624 - DNA, 397 bp, Gossypium hirsutum
  Clone ID: LIB3148-005-Q1-K1-F5
gcctcacaatgtcatgatagatcatgagctgcgcaaacttcgcttgatagattggggacttgctgaattttaccatcctggcaaagagtataatgtccgtgtggcttctaggtactttaaagggcctgagcttctggtagatttacaagactatgactattccttggacatgtggagccttggttgcatgtttgctggaatgatattccggaaggaaccattcttctatggccatgacaaccatgatcaattagttaaaattgccaaggtgctaggtactgatgagttaaatgcttatctcaacaaataccatttggagcttgatcctcaacttgatgctcaagttggaaggcacagccgcaaaccctggtcccaaattattaatgcagataatcag

SEQ ID NO: 27625 - DNA, 76 bp, Gossypium hirsutum
  Clone ID: LIB3148-005-Q1-K1-F6
cccacgcgtccgtctagatactatttaaaaaaaataaaaaaaaaaaaaaaaaaaaaaaaaaaaagggaaaaggaca

SEQ ID NO: 27626 - DNA, 417 bp, Gossypium hirsutum
  unsure (1)..(417): unsure at all n locations; Clone ID: LIB3148-005-Q1-K1-F7
cggacgcgtgggtgcagtcataaacaaaagtagtgatggcttactggacaagtacaaaataccagataactggtggactcaggagttgttcaaaaacatggttcaaacggacgatgggcactggaagttcaatgacactgcctatgtgccagatccgccgagtgcttaattggaccggtcgatcatgtcaaataaataacatccttttaaatgcaatcatataaaaccagtattgcatctctgtcctgcaaagtacctctacttacagtcctaactcctaatagcaaattaaaacaaagttggacgttaaggtcgcttatcagcatagcccccattgcgtcggacatgattgtgctgtctgaactctgtgtgtttgtctacatatttncatgaantaaagtttgtgctttttttttc

SEQ ID NO: 27627 - DNA, 413 bp, Gossypium hirsutum
  Clone ID: LIB3148-005-Q1-K1-F8
cccacgcgtccggtttaatacgagaaaattctgcaccagttgaagcagcaaaaagatgattcactgtgttccaaatttcacatgcagatttagcagagatgtatttggatttggaataagtgcaccttctggagatacgatgaaccgaggtggagcagacaacatgccctccaagaatccttgcagctcatatccttctattatcaaccggatatgttgcttccattgaacaaagtttccttcctctagcttcaacgtgtcatggtgaggcaaagattgaaccaagcatgcacttgaaaatgacggactcataggatcaacagagttagaatctgttgacggtgccataacacgaaaatggaagcacgtaccaggactaggcgactgataccatgtaagatactatgcaaaat

SEQ ID NO: 27628 - DNA, 336 bp, Gossypium hirsutum
  Clone ID: LIB3148-005-Q1-K1-F9
ttccgtcgacccacctccgctcgtttggaaacccaaacaactctagatggaagatgtcaggaggaaggccgcgccttctttcctgaagggattcaacaagcctttttggctctataaggctcgatctctagctggaaagctggaaaaaagtattccccctccctttcttttaatagagatttacatacattcatgcatcatgtcttgatgttttccaaaacaaggaaacggaaatgagtgtaaatttgatattatctaatttttctttcttcaatttgtaaataaatttctgctttcattatattcgttcctttgccaatttttttgtgtaaattt

SEQ ID NO: 27629 - DNA, 395 bp, Gossypium hirsutum
  Clone ID: LIB3148-005-Q1-K1-G1
tgaggagaacttttgtttggagttactttgttcagattgttcaaagccacaacttccgaagtgcggggtgagtcagaatggaataattggcatgtccagttcgttcactcttcaacaaactagcaatgttcatctccatggctagactgaaatatttcacatttttatggttttgaaatgctgttaacatgatgagttcctgataattcaaggcagccagaaagcaaaatataaagaatatgatctctctccatctttcttgttgactttttaatctgctaaaagttttagtcgcttacgggacttagcttgaatagccttggggttctctgagctaaaaggtcaggaaactgcacttttgcatgtcttgtccaagaaaaacaatctcgctttgg

SEQ ID NO: 27630 - DNA, 477 bp, Gossypium hirsutum
  unsure (1)..(477): unsure at all n locations; Clone ID: LIB3148-005-Q1-K1-G10
aaaaaaaaaaaaaaaaaaaaaaatataaaatataaaaaaaaaaaaaaaaaaaaaaaaaaaatggaaaaattttaaaaaaataaaggataaaaaaaattttttattaaaattttaaattaaaattttttttttttattttttattattttttatttttttttttatttttttttttatttatattttttatttatatttttttattttttattattttttttggtttttatttaaattttttataaattttatttagtgttgcttttatttaatatttttttttttttttttatggtttattttttattttttttttatgatttttttaacactaaatttttttgtaattttttttttttttattttaattttttttttttttattttttttttttttttttttgtttatttttttttcatataatttttttctcttctttttttctctttcacntttttatgttatttttttttttt

SEQ ID NO: 27631 - DNA, 202 bp, Gossypium hirsutum
  Clone ID: LIB3148-005-Q1-K1-G11
cccacgcgtccggtcatttattgcattggattcttttaaatattggtagcttctattttcatgtagctgcttaggctattgttgcttgacacttaattactggatatttttgtggacgaagttaatcatgtgcttgtttcggttatgatgcccttcatctcttttcaaattatagtcttctttattcgagtattgttgtttg

SEQ ID NO: 27632 - DNA, 386 bp, Gossypium hirsutum
  Clone ID: LIB3148-005-Q1-K1-G12
cccacgcgtccgcccacgcgtccgcccacgcgtccgggcactctgcgctgaccataatgtgaaggtgctacgtgcacctagtgcaaaagctcttggcgagtgggctggtttgtgtaagatagattctgaagggaaagcacggaaagtagttggttgctcttgcgtagttgtgaaggattacggtgaacaacacgagggtgtcgaagttgttcagcagcacaaggattaagtaaagaggatggtttctttggtagaatcagagtttaattttggccattcatgatatttgcttaagtaattttgttttttcaaaggcagaacttcttggtgtttcttatgtatgctacctttctcattttaaattacttgcaaaccattttggaaat

SEQ ID NO: 27633 - DNA, 398 bp, Gossypium hirsutum
  Clone ID: LIB3148-005-Q1-K1-G2
cacaaataagcctttaggaaagtgcctattttcttatctcttaatgtaacatgttaatctaggtagaccttctgtttggaataaaagtttggtgatttcgaaaaaaaataaaaaaaaaaaataaaaaaaataaaaaaaaaaaaataaaataaaataataaaaatatataataattttaaaaagataataaaatgtaaaagtaaatgatttttaaatgtaataataaaagaaaatttaaagaatttgaactcttttcatcttttttgttgactatttaaaatggtttatgttttagtagattatggaaattagcttgtataaccttttatattttttttatttataatgtcaaagaaactttattttttgcctgttttttacataaaaaaaaaatttaa

SEQ ID NO: 27634 - DNA, 75 bp, Gossypium hirsutum
  unsure (1)..(75): unsure at all n locations; Clone ID: LIB3148-005-Q1-K1-G3
cccacgcgtccgaaaattatagttattgaatgtgatatcattnagaaaaaaaaaaaaaagagaaggattatatat

SEQ ID NO: 27635 - DNA, 429 bp, Gossypium hirsutum
  Clone ID: LIB3148-005-Q1-K1-G5
cccacgcgtccgcaaagtttcactggaaagcatacgactgaagtacaggaagaaaaagtaacgagaggaatccctaggaagagagcatgggatgcaaacctgaaagaaatcagtggcaatgatatccattgtgtaagggagaatgtagctgatgggacgagtcaaccggatgtcatacaagctgatcatccaatcatacgctgcattcccagatgaatatcttgacttgggttggtactacaaatagtattatacacattttaatactaataatttgaaaacactgtatgccttgtcagatacccatttggcattcggcgcctattcctaatattatattgaaaggaagaaaatattgaacggagtgcaaaatgtttttaactatttcataaatatgtatttattaataaaataaacttataaagtttt

SEQ ID NO: 27636 - DNA, 258 bp, Gossypium hirsutum
  Clone ID: LIB3148-005-Q1-K1-G6
gttcgattttggtaagcttagagtatggtttgcataatcagcataaaggggacctgaggttttcaatggccataaactatatatgtgtatgatttaaatttataaagatccaacgaaagcccaaaaccttgaaaagaaatgatgctgtgttgcctgtaaatatttgcgttcctgcactgtaagatttggttttagaagaagtgaaaaatattgtgtttgcatttaatgaatggttactatatatttgaattctcaact

SEQ ID NO: 27637 - DNA, 410 bp, Gossypium hirsutum
  Clone ID: LIB3148-005-Q1-K1-G7
gtaactgtgaaaccccagctccagcaccaagatttgtggaagaggttgcttacccaacttgagattttctcagttgttgtaacctatgcaggaaaaagctgcatggccaagacatttacatgtacagaggggaaaaagcgttttgcagttcagagtgtaggtcaacgcaaataatgatggatgagaggaaagaacagtgcagatcagaagtttcaagatctgcaaaagtctcaacctcctcttatgagtctggggatatcttcttctcaactgggattcttgcaatttagcctccggtcctcatttgggctcttcctgcgtatgtaattatatctatcggagaaataccatatacctttatgaggattaagaataacttattaagaatataaaaaaagaaatttggtcgt

SEQ ID NO: 27638 - DNA, 383 bp, Gossypium hirsutum
  Clone ID: LIB3148-005-Q1-K1-G8
gtcaagtgttgtaaaaccgatacctacggtcgctgaatttacagcccagctgcagatccttgaattacttgagaatgctatttttacagctggctataaggctgtcttgcacattcattctgttgttgaggaatgcgagatagttgagctactacagcaaattgatccaaagacaaagaaacccatgaaaaagaaagttctttttgtgaagaatggtgctgttgttgtttgtcgtattcaggtcaatagcctgatttgcgttgagaagttctcagattttcctcaacttgggaggttcactcttcgcactgaagggaaaaccattgcagtgggaaaagtcactgatcttccttcacgcagtagtgcttaaaaaaatttgttct

SEQ ID NO: 27639 - DNA, 289 bp, Gossypium hirsutum
  unsure (1)..(289): unsure at all n locations; Clone ID: LIB3148-005-Q1-K1-G9
actaccagccaccaactgttgttccgggtggagaccttgccgaggttcagagggcagtatgcatgatctctaactctaccagtgttgcggaagtgttttctcgcattgaccacaaattcgatctcatgtatgccaaacgtgccttcgtgcactggtatgttggtgaaagcatggaggaaggagagttctcagaggctcgtgaggaccttgctgccctggaaaaagattatgaggaagttggagctgactctgctgaangagatgaagaggatgagggagatgagtactg

SEQ ID NO: 27640 - DNA, 349 bp, Gossypium hirsutum
  Clone ID: LIB3148-005-Q1-K1-H1
atgcattgtacagcacggtgaagaagcttgtgcaaaatggatagaagctcctcgtatatgccttcgtgcagagggcttcaatgtttgagatttgatacacaaagtttatagagtgaaaacatttagttacaaaaccatttacacatattatttgaaaaatctaagaaataaaggacagatacattttcttgccctattgatgttggattcatcccaactgttaaattttcatgtattttcctttgttatgaggctgtttagccttatctaatctcttggaacagccacaatactttcatttgtaactggtttgagttcagacattaatggtgataaaaatgcttcatgt

SEQ ID NO: 27641 - DNA, 389 bp, Gossypium hirsutum
  Clone ID: LIB3148-005-Q1-K1-H11
cccacgcgtccgtttcaaaatggcaataatggttcattgcataggaagagagcaaaatgtgtggaagaagaaaggttgcctgctgataaaccgaataatcacaacaaagaagcagggacttcgagaggagaagaagacttatgctcgacagctgagtcttcagcatcgaagaggcaaactattagcagaatgtcattctctgttccccagtcttgttcttcgtccgatggcaggcctatgctggagtgtgaatcgtctgatatgaagcggtcatggcaagaaaagatcgatttggaacagacatcaagcaagaatggtaattaagaagctgcaaagtttgatataattgtggttcttgctggttatctatctgatacatcagattaaga

SEQ ID NO: 27642 - DNA, 391 bp, Gossypium hirsutum
  unsure (1)..(391): unsure at all n locations; Clone ID: LIB3148-005-Q1-K1-H12
acnncatctttgccctttcattggcttccttgtcctgccttaaancctccttcaagcattagccatgactacctgaaatggtaatgtgttgatgnaagtcccttttcctccacaaatcacaactaccaagccactatctcttttgggtcatggaattaccgacattgagattcactttttgcaaatcaagttcacagcaattggggtttaccttgaaccagaagttgtaggacatttgcaacaatggaaggggaagcctgggaacgtgctagctgaagatgatgacttcttcgaggctcttattaatgctccagtggagaagtttctgagagttgtggtgattaaggagatcaaaggttcccaatatggagtgcagctagagagtgctgtg

SEQ ID NO: 27643 - DNA, 288 bp, Gossypium hirsutum
  Clone ID: LIB3148-005-Q1-K1-H2
cacttaaggttctgtgttcgagtctctgtaagcataaggattgttttaaaaaaaaaaaaagggaaggaaaaaaaaaaaaaaaaaaaaaaaaaaaaaaaaaaaaaaaaaaaaaaaaaaaaaaaaaaaaaaaaaaaaaaaaaaaaaaaaaaaaaaaaaaaaaaaaaaaaaaaaaaaaaaaaaaaaaaaaaaaaaaaaaggggggggccccttttaaagaatcaaattttacttccccgtgcttgcaacgaaatagtttttttttagggcaaccaaaattaaattaacggc

SEQ ID NO: 27644 - DNA, 385 bp, Gossypium hirsutum
  Clone ID: LIB3148-005-Q1-K1-H3
gcctcacaatgtcatgatagatcatgagctgcgcaaacttcgcttgatagattggggacttgctgaattttaccatcctggcaaagagtataatgtccgtgtggcttctaggtactttaaagggcctgagcttctggtagatttacaagactatgactattccttggacatgtggagccttggttgcatgtttgctggaatgatattccggaaggaaccattcttctatggccatgacaaccatgatcaattagttaaaattgccaaggtgctaggtactgatgagttaaatgcttatctcaacaaataccatttggagcttgatcctcaacttgatgctcaaagtggaagcacagccgcaaaccctggtccaaatttattaatg

SEQ ID NO: 27645 - DNA, 366 bp, Gossypium hirsutum
  Clone ID: LIB3148-005-Q1-K1-H4
gtcacaatacaccaaagagtgaatccaggttgtttaaggttttgcttggtgccgagaatggtgatcgggttcgagctctggctgcttgtcatatggatacgtctcgatgggacgtcgatcatgtgtcgttccaattgctgaaaatcaagcccggctcttcccctgtgtgccatgttttcccaccggataatcttgtatgggtggctttgcctgcttgaatatatggagaaaaattcagtagatatcatatttcatgtgatgttatttgtaatgttattgtatgatatgaatgttaatatataacaccatgtccgagtcggctcagtgatttagaaccacgccataaatggaataaacgagttcaat

SEQ ID NO: 27646 - DNA, 135 bp, Gossypium hirsutum
  Clone ID: LIB3148-005-Q1-K1-H5
gtaagagcaggcggcagtggtgggaatcagttgcattaaagagataatagcaagtcatagtaggaactattgttgtaacaaagatgatataatactctattcacccgtatcgaataaacttataggtttcttatt

SEQ ID NO: 27647 - DNA, 388 bp, Gossypium hirsutum
  Clone ID: LIB3148-005-Q1-K1-H7
cggacgcgtgggaaccgacggaggaagtctaacgtgcaacataacccatatatcctgcagggcctcacaagaccacaataagtgctcagaattctccaggtcaaatcatgcatagtggatacactttttcccccacacagagttcgacgcgccagattactataatgaggcaccaagttattaaacaacctccacacatgtattttaattttctcaggaatttttagcaaccacaaatctgtgtaaaaactcttgtaatcctcattgtcgaaacctttttttggaaaaacgggaatcgacttagattttgaaaatgaaaatgaatagaggagtcgccaccaatcctttttgatgaggtgcgatcgggtcacctcgaattaatcatttt

SEQ ID NO: 27648 - DNA, 383 bp, Gossypium hirsutum
  unsure (1)..(383): unsure at all n locations; Clone ID: LIB3148-005-Q1-K1-H8
cgggaaatgtatacaaagcgatatttttacggttggaggctacgattgggcgatttatttttaccccgagggtaaaaatccggaggatagtgcgatgtatgtttcggttttcattgccttggctagcgaaggtacggatgttcgagcgcttttcgagctcacccttgttgaccagagcgggaaagggaagcataaggttcatagtcactttgacagagcgttggagagtgggccttatacgttgaagtacagaagaagcatgtggggctacaaacgattctttagaagaacaactntagaaaagtctgactacattaaggatgattgcctaatcatgaactgcacttgttgagtagtcagaactcgccttgagggaccaaaac

SEQ ID NO: 27649 - DNA, 172 bp, Gossypium hirsutum
  unsure (1)..(172): unsure at all n locations; Clone ID: LIB3148-005-Q1-K1-H9
cccacgcgtccgcagacaacaaaaccctccctcggcattccgcccttgaggaataataatggatccataatcagtgatcccattctttctggggctccttagaattagcggaacaaattttgttcatcgcattttagttttataactaatcttttcctggctttgtgtnnna

SEQ ID NO: 27650 - DNA, 408 bp, Gossypium hirsutum
  Clone ID: LIB3148-006-Q1-K1-A1
cccacgcgtccgtgaagattcaactcggaggaaactttgatgataaatcaatctctacccacagaaacaaagtgagaggcatagatacactacattttttgtttgttaattcaacataaatgaaagccttcaacttggtaaatttttagccaaatggatgtttaacagctaagcacttgggatggccttaaaagctctcaaagatcttgatgatgttatagccagagcttagttgcggcaattcctgtagcaacttcatattttcaattctcgagttagcagttttttttacccctttttataatcggctggcctgattttcatgtagccttttagccatagcatagattaacttctgcagaaattcaatgttaagttgtagcataatgtatccccctgtcaatttac

SEQ ID NO: 27651 - DNA, 381 bp, Gossypium hirsutum
  Clone ID: LIB3148-006-Q1-K1-A10
cccacgcgtccgggggctttgaaacgggtgtaaaatctcacataaaaaatcagagtggggcgccataaaacccggggtttgcaccaaacaccgccatacttcgtgaagacgccgaagactactgatgctgaaaaaggtcgtcgttgcatccatcaaccatcgctgaatgagtgtattaaccacccagcctttagctgaaataatctggtcggtcgtaactgacaaccttcgtagattatcaagttatataactatgctaccattctaatgccttggtttctagttgacgatatatcaaaaaggaaaaaaaatgtaaaagagactgtgaaattttagataaaaaaatagaaaaacggaaaaaagagagaatcatctttcatc

SEQ ID NO: 27652 - DNA, 341 bp, Gossypium hirsutum
  Clone ID: LIB3148-006-Q1-K1-A11
cgtccggctgaaaccgataagatcacactagaaactgctaaacttttaagggaagattatcttgcgcagaatgcttttactccatatgacaagttctgtccattctacaagtctgtttggatgatgcgcaatattgttcatttcaatgctttggccaaccaggcagtggagaaagctgccgggatggacggtcagaagataacatacagtcttatcaagcatcgtctaggagatctcttttatcgtttagtgtcccaaaaatttgaagacccagcggaaggagaagaagccctggtggcaaaattcaaaaagcttaacgaggatcttacagctggtttccg

SEQ ID NO: 27653 - DNA, 353 bp, Gossypium hirsutum
  unsure (1)..(353): unsure at all n locations; Clone ID: LIB3148-006-Q1-K1-A12
acgcccacgcgtccgcccacgcgtccgcaaatttccattatttttattgtcatatgcattgacggtgaagtaaaaatatcttcagctctcatacaacatgtaactctgttggggaactaaatttggtaaaagagatgttggtatcaatgggttaatgcccttaacattacaggtttgatatttattaattcaatcgatggggaaaattacacctatttgttgtggacatggatttatttagttatattgttttctgaatgtggaagtaaatctagcttcctattatgagattacccatnnnaaaaaaaaaaaaaaaaaaaaaaaaaaaaaaaaaaaaaaaaaaagaagggggg

SEQ ID NO: 27654 - DNA, 312 bp, Gossypium hirsutum
  Clone ID: LIB3148-006-Q1-K1-A2
gtaaacctggggcgacctgacccgattctcttactctgtagcaccatctgtttcaaccaaatagtgctaatatatatttgattttaggttgttttaaaaaaaaaaaaaaaaaaaaaaaaaaaaaaaaaaaaaaaaaaaaaaaaaaaaaaaaaaaaaaaaaaaaaaaaaaaaaaaaaaaaaaaaaaggactaaaaaaaaaaaaaaaaaaataaataaaaaaaaaaaaaaaaaaaaaaaataaaagaaataactgggggcccctttataaaaaaaaaaatttaagttagccgttttggaaacccaaaaatattt

SEQ ID NO: 27655 - DNA, 204 bp, Gossypium hirsutum
  Clone ID: LIB3148-006-Q1-K1-A3
cccaaccttccgcaaccacgacccgattcttttactctgtagcaccatctgattcaaccagcaacgactaatatatatttcattccaccgaccgcttaaaaaaaaaaaaaatacaacaaaaaagaaaacctacaactaactaaatttttaaccaaaaagatgattaacaactaaaccctcgcgatggccctaaaaactctcaaa

SEQ ID NO: 27656 - DNA, 370 bp, Gossypium hirsutum
  unsure (1)..(370): unsure at all n locations; Clone ID: LIB3148-006-Q1-K1-A4
cccacgcgtccggaaaacaattggttttatgagttgagaggatgaagcacgaaatatagggtgcgtatgggtgtttaaagcctaggaacattgtttcaattgttaatgggtttcttgatttggctcctatattgaaggaatgaaagttaagagtctttagggtctaaaaaaaaaaaaaaaaaaaaaaaaaggaaaaaaaaaaaaaaaaaaaaaaaaaaaaaaaaaaaaaaaaaaaaaaaaaaaaaaaaaaaaaaaaaaaaaaaaaaaaaaaaaaaaaaaaaaaaaaaaaaaaaaaaaaaaaaaanaggggggggccgttttaaaggatccaaattttcttccccgttcttgcaaaataaatatttttttt

SEQ ID NO: 27657 - DNA, 147 bp, Gossypium hirsutum
  Clone ID: LIB3148-006-Q1-K1-A5
gtcaaaattgacctgttacatataatattgaatttcttgattgttgtttgtgtttacatgtttttgtgatagaaagctactaatcgtatgttggtttcatgaactttgcaaattcagaatgtctcaatttatctcatatttactatg

SEQ ID NO: 27658 - DNA, 423 bp, Gossypium hirsutum
  Clone ID: LIB3148-006-Q1-K1-A6
cccacgcgtccgagctcctactctctgtgttcagatctaacagccgtggttgtaagtttggtttctcgtacaccttaaagctctattaaaaaattctgcactttaaaagctagatcccttcctgatgaaatcttcttctcatggagcatctgatttctcgagttccatataacccataatgcgtaacaaaaaatgcggatctgctcttttgttcctctactgaatacccagggcatttcctaaacacatgaaggctatccttttctgcagaacaaccacgtggacaccttgcaatagtggtcactctcttagatctgagattaacaagtgaagggatgtagttccaagatattcgccatatgaaaattaagatttttgttggtagcttgagattccataatttcctgtaaaaatctttaatat

SEQ ID NO: 27659 - DNA, 431 bp, Gossypium hirsutum
  Clone ID: LIB3148-006-Q1-K1-A7
cccacgcgtccggtttgagaccaaactcagcgaacccatcgctggagcagtagtgaaacgggaatgcaggaatcgtacagacaatcaccttaccttccagagccaagaaatagtgactgacgaacgtggagactatcacattgtagtggaaggcgattatgaggaatcagactgcgacgtcgccttggtgaggagtcccaacccggattgcaatgatccctccgaaatgtggaggatatccagggtggttctcaccacacttgacggcgtcagcggtgaacttcggtttgccaacaatcttgggtttaagaagaaggttgctcttcctcagtgtactcaagttcttcaagagataggctattatgagcttagccaagaagctggagacattgccccttggtcagaactataatatgtattttcacttcaac

SEQ ID NO: 27660 - DNA, 405 bp, Gossypium hirsutum
  Clone ID: LIB3148-006-Q1-K1-A8
agcttgtattggtgaattactagaagaaagagaagcaggcaaaactttcgatgtatgttggcagcaactgaaggcttttgctgatgttgtacccagttgggacaatatagttattgcttatgaacctgtatgggccatcgggaccggcaaagttgctacaccccaacaagctcaggaagtgcatgtagctgtccgtgattggcttaaaaagaatgtgtccgaagaagttgcatctaaaacacgtatcatatatggagggtctgttaatggaagcaactgtgctgagcttgcaaaagaaggaaatattgacgggtttctcgtaggtggcgcttccttgaaggggccggagtttgctacaattgtcaactccgtaacatccaaaaaggtggctggctaaatatatat

SEQ ID NO: 27661 - DNA, 254 bp, Gossypium hirsutum
  Clone ID: LIB3148-006-Q1-K1-A9
aaaaaataaaaaaaaagcaaaaaaaaaaattattaaaaaacaaaaaacaaaaaaaaacaggggggaattaaaaaaaagggaaagtttgaaaacaaacaaagaaataaaaaaaaaacaaaaacaacataaaaaatggaaaaaaaaaagcagaaacttaataaaaaaaaaaaaaaaacggacacagaccttgcggggaaaaacctcttttaaaaaaaaaacaaaaatcaaattaactgtacaacggtccccacctt

SEQ ID NO: 27662 - DNA, 307 bp, Gossypium hirsutum
  Clone ID: LIB3148-006-Q1-K1-B1
cccacgcgtccgcccacgcgtccgatttttttaatatagctactcaccatgctgacatcgttttggctttttccttttggattttcgaagtgacgataagaacaaaattgagtgatgattgtaaatttgagatgataaaagataacatttcgtttaaaaaaaaaaaaaaaaaaaaaaaaaaaaaaaaaaaaaaaaaaaaaaaaaaacccggaattaaaagaaaacaataaaaaatgtggagggtattaaaggggggagcgtaaaaaaatttggacggcgaaagcggagaaactttggcattggtaat

SEQ ID NO: 27663 - DNA, 88 bp, Gossypium hirsutum
  unsure (1)..(88): unsure at all n locations; Clone ID: LIB3148-006-Q1-K1-B10
attattttttaatggggaagtgttggnaaggagggagatccgatttttgtgtctnnnnnnnnnnnnnnnnnnnnnnnnnnnantttat

SEQ ID NO: 27664 - DNA, 172 bp, Gossypium hirsutum
  Clone ID: LIB3148-006-Q1-K1-B11
ggggtgtttcctgtactcggctacccattaatggttaactcaacagtctaccgatttgcatggctaggatgccttggcttcaacttcttgtgtttttgtgcaaagagattccatgtctggttcaccaacctccacaactccattagggacgacagataccttattggtcggc

SEQ ID NO: 27665 - DNA, 253 bp, Gossypium hirsutum
  Clone ID: LIB3148-006-Q1-K1-B2
gattgggcctgggcacatttgggtttatatattacccttaattctcctgactttcttggtgatggcatgcttttgccggccagcccaaatagaccttgggtctatttttcttttaagtcctcttccttttatcatttaagttatttaatcatttcttatcaaacaaaaaaggctatagaataaaaaaaaaaaaaaacggacaacaaaagcagaagatatattacataaaaaaaataaagagattaatgggggt

SEQ ID NO: 27666 - DNA, 360 bp, Gossypium hirsutum
  Clone ID: LIB3148-006-Q1-K1-B3
ggcttttattttaatttattcggtttatttattttttttaaaaataaaaaataaaaatcgttatgttttgtcttataccggccagcccaaatagaacctagggactatttttcttttaagtcctcttccttttatcatttaaaaatattcaatcatttcttataaaaaaaaaaaaaaatatgcataaataaatatatatactgacaacaaaaacataatatataaaaaaacaattttataaatataatacaaaaattaaaataattaaataataaattttaaataaaaaaatttatctgtggtctacattttttaggtatcaaattttccttcccttttctttcaaaataattacttttt

SEQ ID NO: 27667 - DNA, 232 bp, Gossypium hirsutum
  unsure (1)..(232): unsure at all n locations; Clone ID: LIB3148-006-Q1-K1-B4
aaaaaaaaaaacatcctttttctcgcctgcctaaaacctgttttttaaaaaaaaaaaacatannantaaattaattttattttttttatttccttcttttttatttccatcttttttattttctctttttttttaaaatattttatttttttttttaatcctcaccacaaatttntttgccacgcccccttttttttaaaaaaactcattttttattaaaaccccccttttt

SEQ ID NO: 27668 - DNA, 385 bp, Gossypium hirsutum
  Clone ID: LIB3148-006-Q1-K1-B5
cccacgcgtccgggccaggtggaccaggatgacctccgggatggggcggtcctcctccgggaccgggtttttccggtggcatttgtgacttcattggttcttgtttgagctttctgtgttgctgctggctgcttggagactgttttggtggtccaatgggtccaccagggccacctggaccacctggatttggacctccaccaccctagttatatgtctaccatcttcatattccaacacaaaaattggaggcttttctagcttctatctgggtttcaacttagctatctaaaatacatatttatgtaataattgtttgcatttttagtagaatttatgtttattgaaattaatctcaataaattgatctttcaatcttttttct

SEQ ID NO: 27669 - DNA, 360 bp, Gossypium hirsutum
  Clone ID: LIB3148-006-Q1-K1-B6
ggcttttattttaatttattcggcttatttatttttttttaaaaaacaaaactactgcgcggccaaataaaaaaaaaaaaaatttgagacttcattggttcttagaaagagctttctgtgttgctgctgactgcttgaaaactgttttggtggcccaatgtatccaccatggccacctggaccacctgaatttcgacctccaccaccctagttatatgtctaccatattcatattccaacacaaatttctggaggcttgtctagcttctatctgggttgcaccttagctatctcaaatacatatttatctaataattgtttgcatttttagcacaatttatgtctattgaaactaatctc

SEQ ID NO: 27670 - DNA, 389 bp, Gossypium hirsutum
  Clone ID: LIB3148-006-Q1-K1-B7
cccacgcgtccggccaattcacatctagaaatctggatttttacatgttattcttcattgtgatttatgtttgaaaattttcgagaacaacgaagataccaccaaggagaacgagaacaatggtgataacagcagaaggtttgagtgccattattgttgcagaaacttccccacctcccaagctttaggtggtcaccaaaacgctcacaaaagggaacgccaacatgcgaaacgagctcatcttcagtcagcaatggtgcacacctctttatctgatgctcatatttatggacttgttaactacaggctaggctcagctccaacaccaccaatcacttacccttcatggaactctagctttacccgtagtaccagtaggttttatggga

SEQ ID NO: 27671 - DNA, 413 bp, Gossypium hirsutum
  unsure (1)..(413): unsure at all n locations; Clone ID: LIB3148-006-Q1-K1-B8
gtcgaagcagatgcacagataaaggacatgactttcattgcagaatacacaggggatgtggattacattaagaaccgtgaaaatgatgactgtgatagcatgatgacccttcttttagcaacaaacccatctgaaagtcttgtaatctgccctgataaatgtggaaacattgctcgctttatcaatggcattaataatcatacaccgtaagcctgtataacctatctcctttgtgttgaatactgtatctcaaaaaaaaaatcatattgctcaatttctgatatacataacctctcatcatgtagcctangctaaaactacacaaccaccaataacttacccttcatggaactctagctttacccggggtaccagtaggttttatgggaaccatacctgcttttgtcatcacc

SEQ ID NO: 27672 - DNA, 320 bp, Gossypium hirsutum
  Clone ID: LIB3148-006-Q1-K1-C1
cccacgcgtccggaaatataagacttatttatctttacatatttctatcaagggttttccacctattttctccttgaattcgagtttcgagtaatcaatcattaatggaactgaatagcaaggttgatcttcaaaaaaaaaaaaaaaaaaaaaaaaaaaaaaaaaaaaaaaaaaaaaaaaaaaaaaaaaaaaaaaaaaaaaaaaaaaaaaaaaaaaaaaaaaaaaaaaaaaaaaaaaaaaaagatcaaaaaaaaaaaaaaagtggtgtacacttataataatagaaactaatgaaaatatggctaataaatttacaattt

SEQ ID NO: 27673 - DNA, 342 bp, Gossypium hirsutum
  unsure (1)..(342): unsure at all n locations; Clone ID: LIB3148-006-Q1-K1-C10
acgcaacgctaaatatgggtaaaatcttcctttttttttacgaatttgcgtggtggatccaagctgaaatnaaaaaaaaaaaaaaaaaaaaaaaaaaaaaaaaaaaaaaaaaaaaaaaaaaaaaaaaaaaaaaaaaaaaaaaaaaaaaaaaaaaaaaaaaaaaggaaaaaaaaaaaaaaaaaaaaaaaaaaaaaaaaaaaaaaaaaaaaaaaaaaaaaaaaaaaaaataaaaaaaaaaaaaggggggggggctgtttaaaaaaaaaaaactttttcacctggtaaaaaaaaggggttattttttttaatgggccaaaaaaaaaaaatctcttgggggggttt

SEQ ID NO: 27674 - DNA, 250 bp, Gossypium hirsutum
  Clone ID: LIB3148-006-Q1-K1-C2
gtttgcttttctttatattcaatgtgctatattgtctctgactttgcctattgatgctgggcggtgactctagtaaccgtcaaacgagatttaagagctgacagctaaagctttaagttgcccttgtttttttgtaaaaaatgttggacaagggtgcgctagcccacggtggctattgatgctttgtcattcaagctgccaccgtgagcggcggatatattacataaataaataaagagattaatggggt

SEQ ID NO: 27675 - DNA, 300 bp, Gossypium hirsutum
  Clone ID: LIB3148-006-Q1-K1-C3
cccacgcgttcgccctattggatgccaaacactcatcaacatcgatcacattgctcgaagatgggcaacactagaagtaagaaatactcccactaacataagagatcttttgatttttctcctccctctccaattgaataatttcgtcttcttcatcatccaaagaaagcaccgcaattgaatcttccattaagaatcaaaccaaaaagacaaccaggatacccaaaagaaacataaatgggataatggggtacaaaaaaaaaaaaaaaaaaaaaaaaaaaaaaaaaaaaaaaagaaagg

SEQ ID NO: 27676 - DNA, 222 bp, Gossypium hirsutum
  Clone ID: LIB3148-006-Q1-K1-C4
cccacgcgtccgcccacgcgtccgaaattatgtaaattgtggatttttttttggataagggggtgtcttttatctaagaagcaacaaaaatttcactgtcaacttagaaaatatttttactaaagttaaaatgtaattttattattttaataaaaaaaaaaaaaaaaaaaaaaaaaattgaatcttacataaaaaatcaaacaaaaaaaaacacacaatatg

SEQ ID NO: 27677 - DNA, 342 bp, Gossypium hirsutum
  Clone ID: LIB3148-006-Q1-K1-C5
ggaaggtaaaggtgttatcgatcataatttcttgggtggactctgctctttgataaagggggtttccgaagttctctctgattcaaaggaatcctcaatcaaagattgtgtggaatctgagaagccaggcatttgtaccgataatggaaattgccaatagagttaaaatggaaggacaccgtttccagagttcttagtttgttttttgctctgttttgagtgtcggttcttttccccgggaaaatcgtgattcctttctttgcggtttagagattgatatatatgtctcaataaaaaaattcagagatgaagatcactctctgtctaacctgataaaacctt

SEQ ID NO: 27678 - DNA, 365 bp, Gossypium hirsutum
  Clone ID: LIB3148-006-Q1-K1-C6
agaaaacggagaatgtttggcagaaaaagaactacgatagtaatttccattaattgccaggtaatttccattaactcgaaaataaatcatcctagatttgcagcattggttcgttttcttgtttctttgtgtcaaaacaagaagagtgaaataaacctcaatctagttaaagcaagagcttgagttaaaaaaaaaaaaaaaaaaaaaaaaaaaaaaaaaaaaaaaaaaaaaaaaaaaagggaaaaaaataaaaaaaaaacaaaagggaaaaaaaaaaaaatgaaaagggataaaaaaaaggtgaggggggggtgaatttaatttattgggggggggttaaaaaagttgggagtgggaaaattttt

SEQ ID NO: 27679 - DNA, 379 bp, Gossypium hirsutum
  Clone ID: LIB3148-006-Q1-K1-C7
ctccggaatgcctcgtcaatagctagattacgatgaggtttgaggttcgagatgatcggtttatggccggagcttgatggggtgaacttgaatagttgttgaataagtgaaaatagatgtgatgggatgagagttgagggcaataatgaaaacacagtaaattgttagtaagagaaaaatgtgtattcatttaattgttactactatatatttattgtttattataccaataataattaataaccaaatattatcatttaaaaaaaaaaaaaaaaaaaaaaaaaaaaaaaaaaaaaaaaaaaaaaaaaaaaaaaaaaaaaaaaaaaaaaaaaaaaaaaaaaaaaaaaaaaaaaaaaagggggcggccgttttaaaggat

SEQ ID NO: 27680 - DNA, 352 bp, Gossypium hirsutum
  Clone ID: LIB3148-006-Q1-K1-C8
gtgatgacttttcttctctatgcggtcctgttgttgacgatgtgaagcttttgagtgtgggtaacccttgatcatcaccgaccttgttcggggctgttgatgatccattgttggacgtggtctatcaacattttgtcttcctaaggatgatttttttttctttggttctttgtgggcttggaaaatcaaaggttttcgtgtgagctaaagctatatattgtggggaaaaaagaacctaggctatatattaatccaacaaaataaagtatatatatatatagactaatatcagggagtatactagtgtgattttattacgtgtttaattatgaattataccataataaatgcg

SEQ ID NO: 27681 - DNA, 403 bp, Gossypium hirsutum
  Clone ID: LIB3148-006-Q1-K1-D1
tagtaattgaaccaaagaaaagacatgggagtttcaggcactttggagtatttgtctgatgtagtgagcagtagtggtcataatcacaagaagagaaaacaattgcagacagtagagctgaaggtgaggatggactgtgatggttgtgaactcaaggtcaagaaagccctctcttcattgaatggtatatacatatatttcttccttttgatctcctttctttttggggggtgggggtggaggactgaaatgtaatgtttttttttttgcaggagtgaaatcggtgaacataaacaggaaacagcagaaggtgactgtaacgggatatgttgaagctaacaaagtgttgaagaaagctaagtcaacagggaaaaaggctgagatttggccttatgttccttac

SEQ ID NO: 27682 - DNA, 408 bp, Gossypium hirsutum
  unsure (1)..(408): unsure at all n locations; Clone ID: LIB3148-006-Q1-K1-D11
ggaagaagaggagtgaattgaaaggaaaggaagagaggggtcgtgttgcagttcacagggaagtcagaaaaataaagcaggaatcagattcccaacaaatcatggattgggcgtttggatttggacagccggaggncanacctgttcgacaccagctttccaggtctcccttggggttaaccgccccacctctctcatcacttggatttgatcccctatatatgtaatagttttggaatttggatgggaaagttctcatcataggtttaatggaagcctggctgacaggtaaaggacgncacaaccccatgaatatatcaattttaatggatttggttgcagtcaggttttgtttttcatttcttgttcaatctttgaatatgccaaagaaacaatctgatatatttt

SEQ ID NO: 27683 - DNA, 409 bp, Gossypium hirsutum
  Clone ID: LIB3148-006-Q1-K1-D12
tgctccccaatggtacgatgctggaaaattcgaatacttcgcatcctcctcccccctaggggtgatcgagttcatattgttccactacgtcgagatcagacggtggcaagacatcaagaacccaggatgtgtgaaccaagatcccatcttcaagcaatacagcctgcccccacacgagtgcggataccctggtggcattttcaaccccctcaactttgctcctacacttgaggccaaggaaaaggagcttgccaatgggagattggcaatgttggccttcttgggattcataattcaacacaatgtgactgggaaaggaccatttgacaacctgttgcagcacctctctgatccatggcacaacaccatcatcaacacaatcaggggttattaaattcaatttcccagt

SEQ ID NO: 27684 - DNA, 433 bp, Gossypium hirsutum
  Clone ID: LIB3148-006-Q1-K1-D3
cccacgcgtccggttcatccgaaccccagatatgtccgttcggaacggcgagtggcaacacattgcaagcacccttacattttgtaccaagaattaaccttcaaggggacctagagtcccaaggtggtagagccagccctctgcaattaggttccatgttattgcaacaacaacatcaaccgtctcaacacctcgggttagggttatcggaatctaatttaggaatgttggccgctcttaacgcctattctagaggcggtccgaacattaattccgaccaaaataatcccatggagcatcatcaacaacaaggtacaaatagtggagatgaaaacccaaataattctcaatgatgtggttagtaggcaaaaactttaattcccatagttgagatgcttttcaatttttgttccctttaaaaaaatacatttag

SEQ ID NO: 27685 - DNA, 314 bp, Gossypium hirsutum
  Clone ID: LIB3148-006-Q1-K1-D4
ctcgaatgaccagttcacacacaccgacaatttactcggctggaagagaagcgcgtatgggacgttgtcatgcgttaagttgggaaacaaggcgaacacataccgaggaccagggaagaggttcaaatcatggctgaagtccacatgccacggaactgtaaacagggtgacaacagcttgaagctaccgtcggcacattcaggttctggcatatatctcaactcaagtataacagacaatgacagatggaccggacagacgagcgcatagaggcgaaaaatccaattattgcatcacgtgatcttaatagcatg

SEQ ID NO: 27686 - DNA, 280 bp, Gossypium hirsutum
  unsure (1)..(280): unsure at all n locations; Clone ID: LIB3148-006-Q1-K1-D5
gcgggaccatgccacgccatatttcctctaccaagccacccacagacaaacgaccagccgagagtttacaatcctgtttcagctccaacatccacgtaacccaaaacacgcagacaacagcancaagcaacccacaacacaaccaggaccagacacaacgctcaaaacaaggacaacaacaatcacaatccaccctacacacgaacacaaccagcccccaaatccaaatattacactacctgatcttcataccatttactgcctctttactttcttatta

SEQ ID NO: 27687 - DNA, 225 bp, Gossypium hirsutum
  Clone ID: LIB3148-006-Q1-K1-D6
cagaacatgactggaccgaaaagtctgattagtatgagtggatgaaaacagatatggcttgggtttatagatcaaaaacaccttgattggtgtttactgggcacaggccaatgtacagttctttaggtgctgatgatcaatttcttgaaacagtataaccccttctcttgaataacaaggtgcatctggtcctttattgacatgtacatatttatgtgagaacat

SEQ ID NO: 27688 - DNA, 426 bp, Gossypium hirsutum
  Clone ID: LIB3148-006-Q1-K1-D7
aaaaagcgctgctatggctattatttcatgcttcacggcttgaaactgaaaatttaatgggcacttagattaaggtcgaatgagctaaaattggagaggcaattggagaacacagaggctgaaatttcttctttcaaaaagaaaatgtctagcctagagaaagagcgtcaggattttctatcaaccattgaagcacttaaagaaggataatttggaaaccctgttgcaagagaaggacatttaggctgatctagtttgttgcttgcagcatttgcagttaagatttgaaactgaagacaaagcaaggagacttctaagtaatgtgtcattgttgttgaaaccaaggggttattttttcggtattactcctgaaaaagtgattgccaaaaactgctgtttctggatttgtgtattttcctttttttt

SEQ ID NO: 27689 - DNA, 431 bp, Gossypium hirsutum
  Clone ID: LIB3148-006-Q1-K1-D8
attctcaactgcaacagttacaacagcattatacatcaaatgtaactgcaacagtggttggagctcctaaaaaaagtcagtaaccgtaaggtagccgacctaccagaaaaaggagacaggctgaactataaactcttgcaagcaacatgactatcctaaacaacgagcgttaaacttatttatcaaggataggggacctgaacgaaggataatttgaacaccctgacgcaagagaaggacatttacgctgatctactttgttgatagcagcatatgcagttaagatttgaaactgacgacaaagcaaggagacttctaagtaatgtgtcattgttgttgaaaccaaggggctatttgttcggtattactactgaaaaagtgattgccaaaaactgctgaatctggatttgaggattttcctttttttttgg

SEQ ID NO: 27690 - DNA, 324 bp, Gossypium hirsutum
  unsure (1)..(324): unsure at all n locations; Clone ID: LIB3148-006-Q1-K1-E1
gacaaaacggtagcagacgcaaaaacaagcctcgtcgggctgctgaggctgttgtcgagtgcaggtaatgcttgtgagatcatgtatggattgagatgtttcttgttgttacatggtatttgttttttggggttccaaggattccattttgataagtttgcagtacatgcttgtaatattccatggtgtcatcacaaattttaaaaagaaaactagngattttttttttctctgagaaaatcttgttattcagatgagaaatttgnctctctgcaacatctgtaaggaaccttgtttttatatctatcttggtaattttcttna

SEQ ID NO: 27691 - DNA, 342 bp, Gossypium hirsutum
  Clone ID: LIB3148-006-Q1-K1-E10
atgtaatgatattatatgaataaaaattatatgtttaccttaaaaaataaaaaaaaagcgcgaaaaaaaaaaaaagggaaaaaaaaaaaaaaaaaaaaaaaaaaaaaaaaaaaaaaaaaaacaaaaaaaaaaaaaaaaaaaaaaacaaaaaaaaaacacaataatttgcttaaataaaaaaaaattgaaaaacttaccaaaactaactttgaaatacatttatttttacaaagcttcaaaaaacttttttttgctctctatatttggacttaatatccctaccaaccatttggcaataacttatataactccattacctggaaaataacaaaattttttgcc

SEQ ID NO: 27692 - DNA, 316 bp, Gossypium hirsutum
  Clone ID: LIB3148-006-Q1-K1-E11
cgacccacgcgtccgaccaggtccaagcttcttttcaaacaacaaaaccccacatgtcttccttttcgggccggtgctttgcttcacaaccggcggtactgccggccacaagttcctctttcaagcccaaaacatgggttatggcagctcccacgaccgcgccagcgacttcggtggatgtcgactggggctcgggtcataactgtaaagaacgatttggcaaaactgcaactcacatctcctgtgtgcaccaacaagggagagaagattgcactaaatcgacacgtggagaaacactggcgtctaatatgatggg

SEQ ID NO: 27693 - DNA, 318 bp, Gossypium hirsutum
  Clone ID: LIB3148-006-Q1-K1-E12
caaattaaattatacatttctaaaaaaatttaaaaaaaaaaaaaaaaaaaaaaaaaaagggggaaaaaaaaaaaaaagaaaaaaaaaagggcggccaatctaaaaaaaaccaaaactaacaaacacatacatacaaaaaaaaaaaaaataaaatggggccccctttttaaaaaacccaagttcacttccccacacctgcaaaactttaaattttttttcgggcccccaaattaaaatccttgccccgcattttaacaacgccagctcgggaaaaaccctggagtcccccacttaactccctttccaacaattcccctt

SEQ ID NO: 27694 - DNA, 328 bp, Gossypium hirsutum
  Clone ID: LIB3148-006-Q1-K1-E2
aaaatcataaaattctttggagttgaataatgtaatttaaattaccaaaataagttcattgtgaggcaatgtaatcaacatcttaccatgtatcgaatatttgaagtatttcacacgatatctattttatgaggttgggtaaaaaaaaaaaaaaaaaaaaaaaaaaaaaaaaaaaaaaaaattaaaaaaaaaaaaaaaaaaaaaaaaaaaaaaaaaaaaaaaaaaaaaaaaaaaaaaaaaaaaaaaaaaaaaaaaaaaaaaaaaaagggggcggcctttttaaagaaccaaagtttccttccccgtgcttgcaacgtaatactttttt

SEQ ID NO: 27695 - DNA, 162 bp, Gossypium hirsutum
  Clone ID: LIB3148-006-Q1-K1-E3
cggacgcttgggaaaaaaaaaaaaaaattttttattttaaaaaaaaaaaaaaaaaaaaatggggggtgaaaaataatgggcgtcttttcttgtgtatccatatcttacagactcttacatgctatgtattttctgttgtttggtgtcacctaaattaaatta

SEQ ID NO: 27696 - DNA, 425 bp, Gossypium hirsutum
  Clone ID: LIB3148-006-Q1-K1-E4
attccgagaaagcagatgagttgtcggaggaggacgatcgtgtatagtgctaccaccggggaagaccaaaaaaaaaaaatactcgaaatcatgctcaagtaagtctacaatgccttttctgatgctgtgaagctgccttcaactgtttgcatttgtgaagacattacccattttatcctttttcttttcttctttgaatctatccacgtggtatttagaaaaagcctttatgatgaaaaaaactgatagaataggggtagtaatattttgccccattgttgttcagttttgtggtgggtgtgtggctgactgtgttatactttaagatgatgggttagggacggtccaaattttctttaattgtaattttaaaacctcattatttatagagcatttgtaaattattataaccgttttttttgttt

SEQ ID NO: 27697 - DNA, 418 bp, Gossypium hirsutum
  Clone ID: LIB3148-006-Q1-K1-E5
accaaatccgtcgccgccaccaccagcatgcccttcatgtgcttcaccttgctccagctggcgtccaccaccgtgctctggatgcccttcgccacccaaacaagtggttccttacttcatatatagctacaagaaccctccaccttctgagtcggccgctaccaacgcccactcacttttagtctccgccacacttgtaatcctttggggtactctcagcttattctctaattgaactacgcatgggggaggaaacatgcatcaagatatggttctatattcaaattgtagtttgtgtagtagactagtaataatttttttccatttctcatctgtgtatctagggtttaccaaatttgtccaagggcatcgatcaactaatctgcttagttggtgataatgtgctaaagctagaaat

SEQ ID NO: 27698 - DNA, 426 bp, Gossypium hirsutum
  Clone ID: LIB3148-006-Q1-K1-E7
cccacgcgtccgcccacgcgtccggtgtgttttgcttttcatactcatttagccccttgggttagcatcaaaatcactccagttttctttatcactgaaaaatgtcttgctgtggtggaaactgtggctgcggtactggctgcaagtgtggcagtggctgtggaggatgcaagatgtatccagacctgaacgctgccgagatgaccacaactgagactctggttcttggtgtagcaccccagaaagcacactttgagggagctgagatggaattcggggctgagaacggctgcaagtgtggagacaactgcacctgcaacccttgcaattgtaaatgattagagaccaaagccaaagctccctggaagcagaggcgcctttgtctttaagaaataatatgttttggtggttatgtgtttttaagat

SEQ ID NO: 27699 - DNA, 347 bp, Gossypium hirsutum
  Clone ID: LIB3148-006-Q1-K1-E8
atggttttaaaagtgtcttaaaaagtgctttatttgtttttgaagcactttgagacacgagttgcagtgaaaaaaaaaaaaactatactttttgtctttccccatcttctgaacttttttaatcattctctctttgtttttttcctccttaatggagtttgtgttgtattgaatcatatacaatatgtattcactgaatcttgtaataataatttctgaacttgttatggtcaaaaccccaaaaagcacactatgaaggagctgaaatggaaattcagggctaaaaacggctgggggtgtggagaacaactgaacctgccacccttgcaattgtaaaatgattagag

SEQ ID NO: 27700 - DNA, 88 bp, Gossypium hirsutum
  Clone ID: LIB3148-006-Q1-K1-E9
gaaagaaaaaaaaaaaaaaaaaaaaaaaatttttaaaaaaaaaaaaaatttaaaaaaaaaccgcaaaaaaaaaaaaaacgctgggttt

SEQ ID NO: 27701 - DNA, 278 bp, Gossypium hirsutum
  unsure (1)..(278): unsure at all n locations; Clone ID: LIB3148-006-Q1-K1-F1
gccgctcgggcggaagctttgaagcaagctttgaaatgctggattaattactgttgttcgcaggggcgatcacaacatgcctgaatatatgcgtgtaatttggcgggtcatgtggcgggtcttgtggtggttcaatcgaatgagtaatccaaagaaggctcccaaacatgtgctcatacatatcttggtgcaaaacaacattgaaataaacatcangatatgcatgatgttgtgcatggtcctgaagannnaccntaaaaaaaaaaaaaaattttatt

SEQ ID NO: 27702 - DNA, 276 bp, Gossypium hirsutum
  Clone ID: LIB3148-006-Q1-K1-F10
ttaactgaagcttcatcctctttggaactttggcataaaaggttgcgtcatactttcgacaaactaataaacttacttccttatgttaataactctagagatcatttgaataaagcatgtgaaatttgtcatcgtgctaagcagactacaaatagtattccaattagtgaacaaaaagtcacttgtatttttgagttagttcattgcgatttatggagggttttatgacactccttcaacttgtggatttcattattttttggaccaaaacccaat

SEQ ID NO: 27703 - DNA, 382 bp, Gossypium hirsutum
  Clone ID: LIB3148-006-Q1-K1-F11
cccacgcgtccgggcgagggaggtcatgatcatggtcacgagggcgaaaagaaaaagaagaaggagaagaagaagcatgaagatggccatgaaagcagcagcagcagcgacagtgattagatcttccatcatcgtcttactattcctctcccttatagtatcgggtgcatggaatgaatgtgaaggcttgtcaaaatatttgtatcatctttatttttatatgcggaaaaaatgaaaaaaaaaagtaaaaaaaggggttgtatttggtgtatgatggtaatagtgtgtgatgtatttgacaagctatgaatgtaatatgatatgagaataaatttttgtcattatctatactccaaatattatgtacatgtatgtttactta

SEQ ID NO: 27704 - DNA, 373 bp, Gossypium hirsutum
  unsure (1)..(373): unsure at all n locations; Clone ID: LIB3148-006-Q1-K1-F12
acggangcgtacggaaaaaaggaaaangnagaacngaaangtttaaagaaaaaaaaacgtttagaaaaagagggaaaaaaaaaaaaagggtgaatacaaacaaaaaagcgacaacaaaaaacaaaaaaaaaaaaaaatcacaaaaacgtttaactaatcatttacataataaacatcggaagcatacaatgaatgtgaaggcttgtcaaaatatatgtataatatagatattaatatgcagaaaaaatcaaaaaaaaaagtaaaaaaaagggttgtatttggaacatgataggaaaactgtgggaataataaaacaacctatgattgtactttgatataaaaaaaaaaaaaacggcattatctatactccaaa

SEQ ID NO: 27705 - DNA, 169 bp, Gossypium hirsutum
  unsure (1)..(169): unsure at all n locations; Clone ID: LIB3148-006-Q1-K1-F2
cacgccgnntccgcccacgccgtgccgcctcacgccgnntccgtatagtatcgctgagcctggcgcgctcnttagaggatctcaagcgttagcggtgacgctgtgcatgactgacgttncatagcttcttctattagtgtcacgctgaaattctaattcactcggcgct

SEQ ID NO: 27706 - DNA, 223 bp, Gossypium hirsutum
  Clone ID: LIB3148-006-Q1-K1-F4
cccacgcgtccgggtgccccttccggcctctttttcgttcagggtgaacctgtaccatttgaatgaaactaaaaaaaaaagaaacaataaaatcccatcaaagtggtcgggaacttagttcacaattctctcttcatcatcgattacaataacaatgttacaacatggttcaacggatagggtataatgtttcccgtgggaaagttctacaatattttatgag

SEQ ID NO: 27707 - DNA, 429 bp, Gossypium hirsutum
  unsure (1)..(429): unsure at all n locations; Clone ID: LIB3148-006-Q1-K1-F5
atacaggcagaaagaacaattcagtgatggcgttggctatagttggatcgatgggctcggggctcatgctgttgcacatgtgaccgataagatgatgcttaatgcttcaaacatcttccctcacaacactccgaccacgaaagaagcatactattataggatgatcttcgaaaggttcttccctcagaactcagcacgattgaccgncccgggaggagcaagtgtagcatgcagcacggccaaagctgtcgaatgggatgccacttggaagaacaaccttgacccgtcgggcagagcagcacttggagtgcatctctcagcttacgacgcggagacacctttcgataacaagccgtccaagattgttgagtcaatacccgtgatgatggagattcctggagttgccatacatggttaagtgccatgaaa

SEQ ID NO: 27708 - DNA, 386 bp, Gossypium hirsutum
  Clone ID: LIB3148-006-Q1-K1-F6
cacagacacacacaaaaagaaaagttttttgatgttctaattctttcatgtctgtgttggatttctaaatattaaatatttatttaaaaaaaaaaacaaaaaaaaaaaaaaaaaaaaaaaataaaaaaaataaaaaaaaaaaaaaaaaaaaaaaaaaataaaaaaataaaaaaaaaagaaaaaaaataaaaactaaaaaaaaaatgggcggcccgttttaaagaatcaaaattatccaccccggccatccaaggtaatagttattctatattggaacaaaaatcaaaaccactggcccagattaaaacatggagaacatggaaaaaccttgcgatgcccaaacaaatttccattacaagacatccaattttgcccagttgatataa

SEQ ID NO: 27709 - DNA, 226 bp, Gossypium hirsutum
  unsure (1)..(226): unsure at all n locations; Clone ID: LIB3148-006-Q1-K1-F7
ctggtcaattaaactcagatctactcaagtttgccgtcaatctcattccattcccgcgcgtgcatttctttatggttggctttgctccccttacttctcgagggtcacagcaatacagggctcttactgttcccgagctcactcaacaaatgtgggatgccaaaaacatgatgtgtgctgctgatcctcgccatgggcgatactngactgcttcagccatgttttt

SEQ ID NO: 27710 - DNA, 66 bp, Gossypium hirsutum
  Clone ID: LIB3148-006-Q1-K1-F8
taccgttcgattcccggtcgacccacctccgcggaccttggaaaaagtgactataattatggtgga

SEQ ID NO: 27711 - DNA, 122 bp, Gossypium hirsutum
  Clone ID: LIB3148-006-Q1-K1-F9
aagccattaaaaataataaaaacaatgcaaaaataataaaatcaacatttattatttttggaaaatatgtcttgcagtaatttacttttaaaaataataaagttacattaacatttgttcgc

SEQ ID NO: 27712 - DNA, 366 bp, Gossypium hirsutum
  unsure (1)..(366): unsure at all n locations; Clone ID: LIB3148-006-Q1-K1-G1
ctgacgtacatgagagcaagatttgagaaggtggtcggatcaaaggactcggaagcattgtgcatgattaatccagatggtgcacctggcccagaactgagtattttctttgtaagagctcgttagaatttgtgttatttttacacatgagcaccataaaaaaaaaatcaatgatggaaacaaacagatcaccatggctggactatgtttaatgtccnnanggtggttcaagctagctcattgntatagcgatagaattgaatgccaatataatctcctgtttctgccttgagaataagattgaataccgacacaccaagttccctttgtctcaaacgggacaatgaacatataatataattcatt

SEQ ID NO: 27713 - DNA, 94 bp, Gossypium hirsutum
  Clone ID: LIB3148-006-Q1-K1-G10
aaaaaaaaaaaaaaaaaaaaaaaaaaaaattaaaaaaaaaaaaaaaaaaaaaaaaaaaagggggaaaaaaaaaaaaaggggaaaaaaaaaaaaa

SEQ ID NO: 27714 - DNA, 91 bp, Gossypium hirsutum
  Clone ID: LIB3148-006-Q1-K1-G11
cccacgcgtccgcccacgcgtccgacttatttgggctttaatgtagacccggacaaatgggcccgtttacaggtcggattgagttggactt

SEQ ID NO: 27715 - DNA, 238 bp, Gossypium hirsutum
  Clone ID: LIB3148-006-Q1-K1-G12
gggaaagaaagaaaaggagaaagacaaagttgcaaaagagaagaagaaagaaaagaagggggaggtagaagaagatgaagaagaattagaagagggaaaaaaagaaaagaagaaagacaaagaagcaaaggagaagaagaaagaaaagaagaacaaggatgaggtagaagatgaagatgaagaattagaagagggaaagaaagaaaagaagaaagacaaagaggcaaaggagaagaag

SEQ ID NO: 27716 - DNA, 319 bp, Gossypium hirsutum
  Clone ID: LIB3148-006-Q1-K1-G2
tctttgaacccaacttgagacgcctcccttcagattcatgcatgcattaaaacccatggggctgggtaatattattgcatctagtcctgcaaaagcctgcgtctcaaacggtgatgcaacgtcaaagtgaagtaccgatttagaagccaagatttctccatccatcgcacgtacaatcaaacctgaaacctatctgaaaagctcttggtagatggctggacacattctttggtcatcatgtttgagatctctatcaaaatcaaagctaagtattttctcatctaaacctttcaactccgaaacgtaactaattatgtga

SEQ ID NO: 27717 - DNA, 209 bp, Gossypium hirsutum
  Clone ID: LIB3148-006-Q1-K1-G4
aaaaaaaatggcagctgcccggtctctcttaaatccatcttccaccacctcactaattggccaggccagaaaccaatcaaaacccacttgtcctgcttcatttctaaagccccacagtctacaaagtccttggcttggcttcaaaatttcctttcagccatgaaaaaccagaccctacttgcccaaccatcgcaccatcactgcaacta

SEQ ID NO: 27718 - DNA, 366 bp, Gossypium hirsutum
  unsure (1)..(366): unsure at all n locations; Clone ID: LIB3148-006-Q1-K1-G5
aatcaatcatgggtcattctaacgtctggtactctcaccccaaaacctacggccctggcgctcgcgcatgccgagtgtgtggaaaccctcatgccatcatcaggaagtacgggctcatgtgttgcagacagtgcttcctagcaatgccaaggaaattggattcattaagtaccgctgaggaatgtttatatggctagaagttggaaacactncntagctagtatgaacctttgtttcgaaattgtagcaacttttaagataacattgctgtttttttttaatgcagtttaaaagcttgaagttttgtttctgcaaaggataatttgttgttttctcaatgaagtaatcatactgtttttatcttaa

SEQ ID NO: 27719 - DNA, 369 bp, Gossypium hirsutum
  Clone ID: LIB3148-006-Q1-K1-G6
aataaaaaaaaaaaaataaaaaacatattttactataacaaaaaaaacaaaaaaacctgggtgtaaaacaaacacaaatgtatgaaaaaccctcataccataatcaagaaatacaagactcatgtgttgcaaacagtgcttcctagcaatgccaaggaaattggattcattaagtaccgctgacgaatgtttatatggctagaagttggaaacactttttagctagtatgaacctttatttcgaaattgtagcaacttttaagataacattgctgtttttttttaatttaatttaaaagcttgaagttttgtttctgcaaaagataatttgtttgtttctcaatgaagtaatcatactgtttttatctt

SEQ ID NO: 27720 - DNA, 359 bp, Gossypium hirsutum
  unsure (1)..(359): unsure at all n locations; Clone ID: LIB3148-006-Q1-K1-G7
gctgtacgtgttatacatgtcgaaatcattcccgagcctacattaatcatctactcagtgtccatgtaatgttggcacaaattttgttggaaatacataacacccaccattttctagggtttttccggttgataagggatgccatcaatgcaggccgatttgaataatttcgtagggaatttgttcaatgatggcgctgaatttcttagatgatactctggtgataaattaagaagngattcctgggatcatttgaaaactccatttttttacttgtttcagaagaattaccacatttatatttttaatctccaaaggattatttgttacacggccagttgacccataattttcaagct

SEQ ID NO: 27721 - DNA, 300 bp, Gossypium hirsutum
  Clone ID: LIB3148-006-Q1-K1-G8
catgtacagagcatgaatcacaacttcatgtacgctcccacaataatcatcgacgccgtgttcatttcatcttagcacataatatgaaccaaatacataacacccaccattttctagggtttttccggctgatattggatgccatcaatgcaagcctatttaaataatgtcccagggaatattatcaaaaattgcactaaatttattagattattctttggtgtaaaaaaaaaaagttatttttttgatcatttaaaaatcccattatattttttgattcataaaatctttctttttttt

SEQ ID NO: 27722 - DNA, 386 bp, Gossypium hirsutum
  Clone ID: LIB3148-006-Q1-K1-G9
gtcagctaagagtgagatgctctgttgatttgcctgttaaattggataaagggtggctgattgaaactcttgctgtttccatccatacagctcatcaaccatggctactacattagaaatcaagtatctctgggctttaatggcgtttcttttgatggaaggtatgttgccttttgctgatatgatatctggttcatttcacacacaacgcatttgcagaaacaactaaacaagcaaagatacaagaaaatgtaagattttgatgtttgacatgatataatacttgttataagttgtaacttggaagagctcaaacgttacattactggttcgataaaatgattattatcgtacaagttcaaaattacgaagtaatgttctgattt

SEQ ID NO: 27723 - DNA, 371 bp, Gossypium hirsutum
  Clone ID: LIB3148-006-Q1-K1-H1
cggacgcgtgggcaacgatcttctatctgttataatttttattgtctcagtatcattaaggttggggttctttttcccattttatgattcagaagaataattgacctcgaatcaatttcttaaagttatcaaccgaatgtgttgatccctctattgcaagcattaacctcaaaccaagtaatgactagttccatttatcttgtaaaaaaaaaaaaaaaaaaaaaaaaaaaaaaaaaaaaaaatttttttgtcttatttttaataaaaaatcataattactaacgcttttatgctacataatatcttatttttagcgccatctaaaataaattctttggccggcgctgtacaaagtctggactgggaaaacc

SEQ ID NO: 27724 - DNA, 406 bp, Gossypium hirsutum
  Clone ID: LIB3148-006-Q1-K1-H10
gctcgtaccggctcggaatcgatttcttttgacattggtggttcttctcggctacgtgctcgtctctcatgggctcggcggtgtatttggagcagtaatcatggatgccaaacaggcttcaaccattgttactgtcacaatgctagcatttgttctaacaggaggatactacgtgcataaggtgccagcatgcatggcatggatcaagtacgtctctactacatattacagctacaagctgtttgttaacgtccaatacagccaaggcaacaaaatttcctcgttgttgggttgcctgcaccatggaagtaatagagttagctgcaagtttattgatcaagacatcgcaaggcaaattagcccgaaactgagtgtgggaatcttgcttctaatgtttgtaggatat

SEQ ID NO: 27725 - DNA, 436 bp, Gossypium hirsutum
  Clone ID: LIB3148-006-Q1-K1-H11
aaacccgcgccgacccacgcgtccgactagatctcacactgccggttcatatgatttacgcgctcgtatctcttcagctcacccgtgaatttggagcaggggtcatggatgccaaacaggcttcaaccattgttactgtcacaatgctagcatttgttctaacaggaggatactacgtgcataaggtgccagcatgcatggcatggatcaagtacgtctctactacatattacagctacaagctgtttgttaacgtccaatacagccaaggcaacaaaatttcctcgttgttgggttgcctgcaccatggaagtaatagagttagctgcaagtttattgatcaagacatcgcagggcaaattagcccgaaactgagtgtgggaatcttgcttctaatgtttgtaagatataagttgctagcttaccttgcattgag

SEQ ID NO: 27726 - DNA, 274 bp, Gossypium hirsutum
  Clone ID: LIB3148-006-Q1-K1-H12
cgacccatgcgtccggttgctttcgttaatctttgtaatggccgtagatggtgttgcctggctgtgaaaacatgtgtatctgttccatcactagacttgtgtgaactttttattccagagtatagtcatttcattggctgtcaactttcaatttcaaaaaaaaaaaaaaaaaaaaaaaaaaaaaaaaaaaaaaaaaaggcaagaaaaaaagaagtacaaaaaatacccctcttgccagctggcgaaaaaaataatagtgtagggtacaataaat

SEQ ID NO: 27727 - DNA, 132 bp, Gossypium hirsutum
  Clone ID: LIB3148-006-Q1-K1-H2
cccacgcgtccgcactaatgcaccggatcccatcagaactccgcagttaagcgtgcttgggcgagagttgtactaggatgggtgacctcctgggaagtcttcgtgttgcacccaaaaaatttatatctcatt

SEQ ID NO: 27728 - DNA, 370 bp, Gossypium hirsutum
  unsure (1)..(370): unsure at all n locations; Clone ID: LIB3148-006-Q1-K1-H3
tatgcctgtgatgtggcccgaggttcaactgaacagcaacagacaacagtatccgcagcggttggattttgatgcatttcagcaacctgtttgggggagagaagaagtctgcaataattacttaactccggagaactcgcttttaagctatgattcctctgcaaactcagtgtcgttgcactcgaatcaattgaaaatggagctatgaagtccgaaagaagctcgaaatggttagatttatcaaaaaaaaaaaaaaagttctaatgatagctagnattggatatatattatatatatcagaaattagcagggaagtagaaaaaaagcctcaccatatatatatatcatttgggttccatgtgttctattt

SEQ ID NO: 27729 - DNA, 385 bp, Gossypium hirsutum
  Clone ID: LIB3148-006-Q1-K1-H4
tcgacccacgcgttcgtatagagggaacaaagaaaactaggaatatgggtaggaacacacactcagtttacaagggattgatatgctatgaattgcttagacctttgttcatgattaaagcaatctatggtcttttctgctctgctttataacttcttatacattgtgatagatcatattctcttcgacgatgcactcgaatcaattgaaaatggagctatgaagtccgaaagaagctcgaaatggttagattggtggccgataaaaaaaaacctctcatgctaactcgtgtttgctatatattatctatattagaaattaccaaagaagtataaaataggcctcaccatatatctatatgatttggaaaacatgtgttttattt

SEQ ID NO: 27730 - DNA, 424 bp, Gossypium hirsutum
  Clone ID: LIB3148-006-Q1-K1-H5
atgacatatgggtaattggttgattttgaatttttggcgtgaccattggatcagtaaatacagggcacaactcaatcattacaatcaatcaaaggtaatcccaaatcatcacacaccattatattaatggtgaatcctaatggtgattggaattaggaaaacactatctctttattgccatcgtcgattataaacaaaattgtgagtaagcatccaccatgtggttgggatatggatgactttcccgaatgggtatggaataaagggcatagtttctctatgcaatttccttacgaggctttgactggtaatactgctagtggtgtagataaaatatggtagcacttatggaagtaccaagggtcacggcgtgttaaaacctttttgtgtcttggtgcatgtaatagtctccttacatgttaaa

SEQ ID NO: 27731 - DNA, 318 bp, Gossypium hirsutum
  Clone ID: LIB3148-006-Q1-K1-H6
cccacgcgttcgcttcaagtgaagctgatatgccctcaattccattaggggatccctcagtccagaatcctttgtatggttgcatgcaatactcttcaaagttgcagagcacaaggcaagtggacccaccaacttcatctcgaacatttatcaaggtttataaatcaaggtcggtggggcgctcattggacatctcccggttcaacagctatcatgagctgcgagaagagctggctcaaatgtttggaattgaggggaagttggaagaccctcttagatcaagctggcagcttgtatttgtcgacagggagaatgata

SEQ ID NO: 27732 - DNA, 230 bp, Gossypium hirsutum
  unsure (1)..(230): unsure at all n locations; Clone ID: LIB3148-006-Q1-K1-H7
gaaaattgggttttcataggaagctgttttaaacattttccgttttggtatattaagtggtgaatttattttgattttgatttttattgaaaactgatgtatgctatattttctttctgccgccnaaaaaaaaaaaaaaaaaaaaaaaaaaaaaaaaaaaaaaaaaaaaaaaaaaaaaaaaaaaaaaaaaaaaaacaaaagaggaaggacaacaacccaccatgcgaggg

SEQ ID NO: 27733 - DNA, 307 bp, Gossypium hirsutum
  Clone ID: LIB3148-006-Q1-K1-H9
attgatgctaaaggattagtttccgggtcatcaaagcttcaagaattcttaaagtttgcggcgtcttccgattttgtgttgacagataaggtgtcgagtctctgcagtagagtcgaagcacttacaacccaatttcccattcctggtgtgtgaacaacaccgattcactaagtaatttttgagttattagaggctgagaagaaacgtcagaacaaggtgaaatctccaacacagattccagggtttatatttgaataattgaatgtattcacagatttatgaaaattttcaactgatattgagatct

SEQ ID NO: 27734 - DNA, 223 bp, Gossypium hirsutum
  unsure (1)..(223): unsure at all n locations; Clone ID: LIB3148-007-Q1-K1-A10
gctaaatggtggtggattctcatacgaacgttatatgctgtatcgtttgtctatcatgttggtacatattttccttattatgcggctgtttggcattgaggaaatgtgatctttttttaaaggtaaaagttnaaaaaaaaaaaaaaaaaaaaaaaaaaaaaaaaaaaaaaaaaaaaaaaaaaaaaaaataaaaataaaaaaaaataaaaaaaataactacaat

SEQ ID NO: 27735 - DNA, 408 bp, Gossypium hirsutum
  unsure (1)..(408): unsure at all n locations; Clone ID: LIB3148-007-Q1-K1-A11
cgtgtttgcagaaaagggctgacgttaagcttcaagaattgccggctgtgctcggcgcttgctgtgttttgcataatatttgtgagcttcgaaatgaagaaatggaacccgagcttaaaattgaaatttccgatgatgaagtcgtgccggagaataatttgagatccatggttgccgttcaagctagggattatattgctcataatttgcttcaccatggccttgccggtaccggttttctatagtgatttcattatattatccttagttaaaaaattttgtattttttttagtgtatagtccaataataataggtagataggcagattttgattgcattttttgggggtatggaataaaaaattctatttgactttttagttaaaaaaaaaanannnaannnnnaat

SEQ ID NO: 27736 - DNA, 324 bp, Gossypium hirsutum
  Clone ID: LIB3148-007-Q1-K1-A2
atgcgttcgatcacctgatgctttacttttaaaagtccaaatgactttaatcaggtcggataaatgtagagtcaggcctaataaaccaaaaaaaaatagattattttaaacaaatttaaaatttaatttaagaaaaaggaataaatgaaaaaaattaaataaaatataaaattttataaatttaaatgaaaagaaatactaaaatgaaaataaaattttttaaatgaattttttttaaaatcgaaatgagatttttttagacaaattttaaatgagattttttaaattgaaatgagattttttttatcaaatttaaaatttaaa

SEQ ID NO: 27737 - DNA, 413 bp, Gossypium hirsutum
  Clone ID: LIB3148-007-Q1-K1-A3
aatttttcaaaagttttcagtctcctcgcgaattctcatcaattttttttctctgtagaaagtgaaaaggagaatgtcttctttaggcacttcaaagggtgttcttgaaatcgccaaattcggtctctatgttacgatccctatcgttcttatatacactttcgccaagaacaccaagaatctccagaaattaatgggaaatcgttcgtatatagtgtatcctccagagggaccacgacctccatcaccggaggaattaagggagatggctcgggagctagctaggaagagaaacaaccattgatgatctttagtggtgtaagtgatctatgtagctttgacaattattcctgttactgttccagcaaaccagcctttgtgatatgctataataactattgtggtcttttcat

SEQ ID NO: 27738 - DNA, 384 bp, Gossypium hirsutum
  unsure (1)..(384): unsure at all n locations; Clone ID: LIB3148-007-Q1-K1-A4
cccacgcgtccgggccaggtggaccaggaggacctccgggatggggcggtcctcctcccggaccgggtttttccggtggcatttgtgacttcattggttcttgtttgagctttctgtgttgctgctggctgcttggagactgttttggtggtccaatgggtccaccagggccacctggaccacctggatttggacctccaccaccctagttatatgtctaccatcttcatattccaacacaaaaattggaggcttttctagcttctatctgggtttcaacttagctatctaaaatacatatttatgtaataattgtttgcatttttagtagaatttatgtttattgaaattaatctcaataaatngatctttcaatcttttttc

SEQ ID NO: 27739 - DNA, 338 bp, Gossypium hirsutum
  Clone ID: LIB3148-007-Q1-K1-A5
ccgggtaggaatggccgggaccaacccgtccgcccacgcgtccgtaatggagccatatggtcagataagcaatggaatagaatatctaaatccttcccttgatgtcagtaactaacttgcttgtcattttaaatatgcaagtcaattgctattaataattttctgttggattctttttggactggaaaataatttctggggatagtctaagaatcttaaattttatagaaagccaataaagtgcttgctggacgaaatgtggtgattaattgaattgcaaggtcatacatgctgttaattttttaagagctgataaatgagtatgacatagtgctcat

SEQ ID NO: 27740 - DNA, 422 bp, Gossypium hirsutum
  unsure (1)..(422): unsure at all n locations; Clone ID: LIB3148-007-Q1-K1-A6
ccgcccacccgtccggtaatcgaccactataagggccaaggaaaaaagttccagagattgaacctgcaaaaccccatagaaaagtgtttgaagcccttaaaagttgtcttcaccccaaaaactgaaaaagttgttgcctaagccgggtttgcaaactctaccagtgattaatttagcatattcatttgaagttaaatatgtcacagtttggtgcacatcattactgtattcttaataatttggaagttttttttttttgtatcacatagtatttggtttattattgntattattattacatgatatgtcatgatgaaaattcatacatttatattcttgntatggnattttctgatattcacaataaacccccaaagtcttctattttgtgtgacatgatattcttattcttntgttaaccc

SEQ ID NO: 27741 - DNA, 371 bp, Gossypium hirsutum
  Clone ID: LIB3148-007-Q1-K1-A7
tccacgcgtgcgatggccggctgcagtacttttaaaagtcgaaatgactttgatcaagtttgataaatgtaaagtgaggcctaaaaaaccaaaaaaaaagagatttttttaaacaaatttaaaatttaatttaagaaaaaggaatgaatgaaaaaaattaaataaaatataaaattttataaatttaaatgaaacgaaatactaaaatgaaaataaaattttttaaatgaattttttttaaaatcgaaatgagatttttttagacaaattttaaatgagattttataaattgaaatgagatattttttatcaaatttaaaatttaaattcgagattgatgaagctggatctcgtgttcgccttcgtcatgc

SEQ ID NO: 27742 - DNA, 390 bp, Gossypium hirsutum
  unsure (1)..(390): unsure at all n locations; Clone ID: LIB3148-007-Q1-K1-A8
tcgcccacgcgtccgatggccggctgcagcacttttaaaagtcgaaatgactttgatcaagtttgataaatgtagtgtcaggcctaaaaaaccaaaaaaaaagagatttttttaaacaaatttaaaatttaatttaagaaaaaggaataaatgaaaaaaattaaataaaatataaaattttataaatttaaatgaaaagaaatactaaaatgaaaataaaattttttaaatgaattttttttaaaatcgaaatgagatttttttagacaaattttaaatgagattttttaaattgaaatgagattttttttatcaaatttaaaatttaaattggggcatngacaattattactgttactggtacaacaaaccaacctttgtaatatgggg

SEQ ID NO: 27743 - DNA, 275 bp, Gossypium hirsutum
  Clone ID: LIB3148-007-Q1-K1-A9
caggttcaagtcagtacgccattgctatgtcattgaagagaagcagaacaatcttcgctggaaatttcaagaagcttctgcttgtccatttgaagaagcttgtggctgctgggatgttggttaaaggttacgcttcgtataaactttcttttgcttggtcttaaaagaccgatacttctgctgatgttcctgcgaaatagataccgtctactgcttagtcgaaagggacgcctgcctcaatgactaagggagggaagggtgctagctctactgct

SEQ ID NO: 27744 - DNA, 271 bp, Gossypium hirsutum
  Clone ID: LIB3148-007-Q1-K1-B1
ggcatttggttgtggacatcagacatgtgataggttgtgcgaaagacctcgaaacttgcccgatttgtcgaagtccaatacagaccaaaataaagctctacttttgattcttttattcttcttgaaaaaaaaatatacatttcccatgattcttttgttgatttgttatttttgtgataggtttgaggaagtcaatatgtggtgcctatgaccaaaagatgagatgaaaaaaaatcttccttttggatttctgatatttcatttttgaatt

SEQ ID NO: 27745 - DNA, 122 bp, Gossypium hirsutum
  Clone ID: LIB3148-007-Q1-K1-B10
cccacgcgtccgctcgcgtagctactttctaaaaattgtggaattttatggatccacgcttggtatgtagccaagcccaagaaaaaaggaacgaggggaagaatcgacaaggaatccataac

SEQ ID NO: 27746 - DNA, 286 bp, Gossypium hirsutum
  unsure (1)..(286): unsure at all n locations; Clone ID: LIB3148-007-Q1-K1-B12
cccacgcgtccgcgtcagtatcatctgtattttaatgaattttgtttctttgggtattgcattcttatctaccgtagcttgcattggaatgtattgaagccccaattgttgttccggcatgtaactgcactgtgccaaggttgtaggaagcctcatccttggggggatggcatgaggttttttcttgttgattcatgtacatcaaaatccgcatcagctagtccttgcaactcagtctgatggcttataaactaaaggtctgttttaggccagaccgagttnttgg

SEQ ID NO: 27747 - DNA, 382 bp, Gossypium hirsutum
  Clone ID: LIB3148-007-Q1-K1-B2
gtttccgttgatggaattgagctttaacctatgataaaaagctggaccggaacctttaggtgcataataatattgaatgccagtggttataaaaaaaaaaaaaaaaaaaaaaaaaaaaaaaaaaaaaaaaaaaaaaaaaaaaaaaaaaaaaaaaaaaaaaaaaaaaaaaaaaaaaaaaaaaaaaaaaaaaaaaaaaaaaaaaaaaaaaaaaaaaaggggggggcctttttaaaagatcaaagttaactaacccgggcatgcaaagggtatagctttttaaaagtggcaccaaaataaaattaacgggccggcgtttaaaaaagtggaaaagggaaaaaccctggggttaccaaaataaatcgctttggaaaaaaaacccttt

SEQ ID NO: 27748 - DNA, 394 bp, Gossypium hirsutum
  Clone ID: LIB3148-007-Q1-K1-B3
ctcctcttcttccccaagcctcttaccaccgctctaaccaccgctttagccaccaccaccttactcctaacctcccctccctcctccattgcctctgatgcatacaacgtctactacggaaccgccgccagtgccgccaactacggaggctacggtggaaactccgacaagaaagcctccgctgagtacgtctacgatgtccccgacggatggaaagagcgtttagtttccaaagttgaaaagggcaccaacgggacggacagcgaattctacaaccccaagaaaagacaagagaaagagtacttaacattcttggctgggttcaagcaattagccccaaaagacgtgattttgaacaacttggcattatcagacgtcgagttgcaagatttga

SEQ ID NO: 27749 - DNA, 58 bp, Gossypium hirsutum
  Clone ID: LIB3148-007-Q1-K1-B5
cgggtcgacccaagccttccgccaacccttccgaaaaaaaaaaaaaaaatttttattt

SEQ ID NO: 27750 - DNA, 402 bp, Gossypium hirsutum
  Clone ID: LIB3148-007-Q1-K1-B6
gtccgacgacaatgacaacaacgaagtggagtacaatttttttcaaggcttagaagatgcattagcaaacactgcctggggggaagttccagactacctcaaatctattgggatccgaatagaagatgctcgtggaaaagctacggagttttttcatactggaatacaaattctggtctgtgctgtaattaaagagatggaagatatgtcacttgaggatttggattggggtacattgaaaaagtgggtagctgcgctgaattacgctaatgaacatggttttcaagtaggatttgctgataatctgttgcagaggaatgtggttgcctactttcagaaaaaggagctctcatagtttatatttaatcctgtatctaacattctgctatgttttaatgtctc

SEQ ID NO: 27751 - DNA, 416 bp, Gossypium hirsutum
  Clone ID: LIB3148-007-Q1-K1-B7
gtcatttgtttgtggacatcactcatgcgtttgttgtgcgaaagaccttgaaacttgccgggggtgttaatatccaatgcagaccaaaataaagctctacttttgattcttttattcttcttgaaaaaaaaatatacatttcccatgattcttttgttgatttgttatttttgtgataggtttgaggaagtcaatatgtggtgcctatgaccaaaagatgagatgaaaaaaaatcttccttttggatttctgatatttcatttttgaattaaaatgtggcccaaaaaaaaaaaaaaccgccccactttaaaaaaagtaataatgggaaaaacctttgcttaaccaaactaataggctttgaaaaaaaacccttttttaccaattgggttaaaaaaaaaaggggcccccccttataa

SEQ ID NO: 27752 - DNA, 367 bp, Gossypium hirsutum
  Clone ID: LIB3148-007-Q1-K1-B8
cccacgcgtccgcccacgcgtccgcccacgcgtccgaaagaattaatcttgctaccgactctctcttttcttacatgatcaacgggctgaaagtagcctgttcctcctagggtaactaagtgcttgtgtgttttcttatcatgtaatatatgattagtgttggattggcattttattcaacttttatattttatttttactctattgataccaattaatatttctagtttacaaaaaaaaaaaaaaaaaaaaaaagggcgggtcgtccacgcgttccgccacgcgtacggtttattttttaatgttcttgaatgaattccatgttcttttaagggtttttggtggtggtcatttttggagtcacaaa

SEQ ID NO: 27753 - DNA, 287 bp, Gossypium hirsutum
  Clone ID: LIB3148-007-Q1-K1-B9
ttccaagggaaggatacatggattctaatgtacgatgacgattatttctgccttcggtttaaatggtcaagaccttcaaagctaatcccccggagtacggcaacaatcgaatggataatcccatcatctctctcaccgatagtctacagaatcaaacatttcggtgcttctaaatggcttatcggatcaattcagcattatactggttcatcaagggctttttttgtggcgtgagaaaattataagataaagccatgtattcatgatatggcacaacatacccaaag

SEQ ID NO: 27754 - DNA, 306 bp, Gossypium hirsutum
  Clone ID: LIB3148-007-Q1-K1-C1
acgagcggttccacaatgctcaatctctctttgctgacctcagacatgtgggctgtcataatccgcatttttgcttaccatgaaaaggttgattggatgtactttttagcctttgctgcagtagctgttggacttgttatttattccgggggagacaaggaagaggatcggcatcaatgcacagccggtgttggtgacgaagatgctggaagaagcaagcatttttatgaggaggctggttttgataacatcaatcgaggagctatagccggaagctcaaaaaccgggaatactagcaagcatgac

SEQ ID NO: 27755 - DNA, 180 bp, Gossypium hirsutum
  Clone ID: LIB3148-007-Q1-K1-C10
agatgattctgttgccaagatgaaggcagtcaaggaagccttggaagcaaaacaaaaagtaacaaatagcttgtctgctacctgttcttttttttttatcatgttttaaattttgtgacaaattgttcttggtactctgaagatatttatgcaaaattaccctatgattctattttattt

SEQ ID NO: 27756 - DNA, 370 bp, Gossypium hirsutum
  Clone ID: LIB3148-007-Q1-K1-C11
atgctttcgcccaaattggcacatagatttggtgggtatttggaggaggaagccattcagtcgtatacagagtacttgaaggacattgaaagtggtgcaatagaaaatgttgcagcccctgccattgcaatagattattggagattgcctaaagatgctaggttgaaggaggttataactgtaattcgtgctgatgaagctcaccatagggacgtaaaccatttcgcttctgatattcattttgcgggaaaggaattgaaagacgcgcctgctactgttggttatcattaagacttcatgttgtggatcgtgaagattctttaaaagggtccgtgcttgatgcaaaccttgattatatttatctatggtt

SEQ ID NO: 27757 - DNA, 283 bp, Gossypium hirsutum
  Clone ID: LIB3148-007-Q1-K1-C2
cccacgcgtccgcggacgcgtggggtcttttcttattccaattaagtccatgataaaggctgcgggaaaaaaaaaaaaaaaaaaaaaaaaaaaaaaaaaaaaaaaaaaaaaaaaaaaaaaaaaaaaaaaaaaaaaaaaaaaaaaaaaaaaaaaaaaaaaaaaaaaaaaaaaaaaaaaaaaaaaaaaaaaaaaaaaaaaaaaaaaaaaaaaaaaaaaaaaaagggggggggccttttaagaggatcaaagttaataaccgggggcttggaactatattcttttt

SEQ ID NO: 27758 - DNA, 77 bp, Gossypium hirsutum
  Clone ID: LIB3148-007-Q1-K1-C3
gacccgccctgtaactgggccttaacctcgggcggtgtagtgattacgcccagcgtggccgttacactcggcagggc

SEQ ID NO: 27759 - DNA, 194 bp, Gossypium hirsutum
  Clone ID: LIB3148-007-Q1-K1-C4
gttttatttttgaaacccgataacacaatttaatagcttagctattagaaatactgggaaacgcaatcaattggtttgctttaccacttaaagaagtacataaactctttcaggtcgcgaactgataccacctcacaaacccgaattcattcctgtttaccaacatcattttttttacagcattactcatttcg

SEQ ID NO: 27760 - DNA, 393 bp, Gossypium hirsutum
  unsure (1)..(393): unsure at all n locations; Clone ID: LIB3148-007-Q1-K1-C5
accggggcggaccgacgcgtccgcccacgcgtccgcccacgcgtccgcccacgcgttcgaaagaattaatcttgctaccgactctgtcttttcttacatgatcaacgggctgaaagtagcctgttcctcctagggtaactaagtgcttgtgtgttttcttatcatgtaatatatgattagtgttggattggcattttattcaacttttatattttatttttactctattgataccaattaatatttctagtttacaaaaaaaaaaaaaaaaaaaaaaagggcggnncgcccacgcgttcgcccacgcgtncggtttattttttaatgttcttgaatgaattccatgttcttttaaggttttttggtgttgttcatttttggagtcacaaaaat

SEQ ID NO: 27761 - DNA, 357 bp, Gossypium hirsutum
  unsure (1)..(357): unsure at all n locations; Clone ID: LIB3148-007-Q1-K1-C6
cgnccggccttttaattncttaagtgccaccaattttttggtgggggtcatgtgggaaagcacacaagcatcgaaagcctaagggaaagtcccctaaaaggcccatcactttgcctccccttgtgaaacctccaatcaagttgccaccggttgttccttcaatagttaagccacccattgaccttccttcggttaccggcccttcaattaaccttcccccagggacggttccttcagtaactaagccaccaagtgggaaaccctgcccaacaccaccaaccaaggacacttgccccattgacacactgaaattgggtgcttgtgtggatctgctgggagggttggtgcacattggac

SEQ ID NO: 27762 - DNA, 421 bp, Gossypium hirsutum
  unsure (1)..(421): unsure at all n locations; Clone ID: LIB3148-007-Q1-K1-C7
aaaattacgttagttatttcggtctttgtgtcctcanacatgtaggctgaaatcgcccgggtttttgcttaccatgaaaaggttcattggatgtactttttagcctttgctgcagtagctgttggacttgttatttattccgggggagacaaggaagaggatcggcatcaatgcacagccggtgttggtgacgaagatgctggaagaagcaagcatttttatgaggaggctggttttgataacatcaatcgaggagctatagccgtgtatctcaaaaaccgggaatactagcaagcatgactgtatcactagtggcgaaagaagtgaaactattgaaaacaagaacaccggaaaagatgtgcaatggaagaagtcatgatgtattaaactgtcacccgaactcttcattttcttaaaacta

SEQ ID NO: 27763 - DNA, 267 bp, Gossypium hirsutum
  Clone ID: LIB3148-007-Q1-K1-C8
gttgagagatacatgaacaaggaacttgaacttgataagttcatcactcactctgttcccttctctgagattaacaaggcatttgagtacatgcttgctggcgagggcctgaggtgcgtgattcgcatggatgcataaggattggctggccatggatgaagggctttttgttaagtatatgtgcattttaagggaataaataatgtaatataatgctacatcgttgtgctgtttttaatggtaaatttttatcttatcatgcatttc

SEQ ID NO: 27764 - DNA, 186 bp, Gossypium hirsutum
  Clone ID: LIB3148-007-Q1-K1-C9
aaaaaaaaaaaaaaaaaaaaaaaaaattttttaaaaaaaaaaaaaaaaaaaaaaaaaggggggaaaaaaaaaaaaaaaaaggaaaaaaaaaaaaaaaaaaaataaaaaaaaaaataaagaaaaaaaaaaaaaatatataaattgggaagtggatttaaattgaatgaagggtttttttgtataaat

SEQ ID NO: 27765 - DNA, 365 bp, Gossypium hirsutum
  unsure (1)..(365): unsure at all n locations; Clone ID: LIB3148-007-Q1-K1-D1
tatgtttaaaaactaaaatccccttttcttaatactcattttttcagtcttaaaaaanggggggaaaaaaaaaaaaanagggggaaaaaaaaaaaaaaaaaaaaaaaaaaaaaaaaaaaaaaaaaaaaaaaaaaaaaaaaaaaaaaaaaaaaaaaaaaaaaaaaaaaaaaaaaagggggggggggttttaaaggataaaagtttacgtacgggggcttggaaagtaaaaatttttttataggggaaccaaaataaaattaaggggcgggggtttaaaaacgtggggatgggaaaaaccttggggtaaccaaattaaatggctttgaaaaaaatccccttttgggaaggtggggtaaaaggaaaaa

SEQ ID NO: 27766 - DNA, 357 bp, Gossypium hirsutum
  Clone ID: LIB3148-007-Q1-K1-D10
gagcagatcggatggcaccaaagaaagataaggccgctccaccttcttccaagccagcaaagtctggtggtggcaagcaaaagaagaagaagtggagcaagggaaagcaaaaggagaaggtgaacaacatggtgttgtttgaccaggctacttatgataagcttttatctgaggctcctaaatataagctcatcactccctcaattttgtctgatcgtatgaagattaatggatcccttgctaggaaagctataagggaattgatggcaagaggatcgattcgtttggtgtctgcccattcaagccaacagatttacactagggcaaccaacacctagatgttttggtatagttttg

SEQ ID NO: 27767 - DNA, 342 bp, Gossypium hirsutum
  unsure (1)..(342): unsure at all n locations; Clone ID: LIB3148-007-Q1-K1-D11
actaatttataattaacttttangaatgttcttgatcccatcgcaccaaagaaagataagccgccattttttaatggcaagccagcaaattaataatagtggcaagcaaaataagaagaagtggatcacgggaaagcaaaaggagaacgtcaacaacatggtgttgtttgaccaggctacttatgataagcttttatctgaagctcctaaatataagctcattactccctcaattctatctgatcatatgaaaattaacgcatcccttactaggaaatctataacggaatttattgcaataagatccattcgattggattcttcccatacaaaccaacaaaa

SEQ ID NO: 27768 - DNA, 257 bp, Gossypium hirsutum
  Clone ID: LIB3148-007-Q1-K1-D12
cacgcgtccgccgacgcgtccgaaaaaaaaaaaaaaaaataaaaaaaaaaaaaaaaaaaaaaaaaaaagcgaaaaaataaaaaaaaaaaaaaaaaaaaaaaaaaaaaaaaaaaaaaaaaaaaaaaaaaaaaaaaaaaaaaaggccgccccctaaaaaaaaacggggcgcccggcaaaaaaaaacaaaattcaaaagcccgccaaaaagcccaaaaaacccaaaaaaagcgcccccaaaaacaaaaacacagcccgga

SEQ ID NO: 27769 - DNA, 390 bp, Gossypium hirsutum
  Clone ID: LIB3148-007-Q1-K1-D3
ccgccaacccttccgttaatacgaaaccgaccaaaacccaactctgatttactcctaattggtactggccgggtattttccatcactttcctgggaaaaaaaagcataaaaggaaaaagtttcaggagaaatgtactcagctattcggtcgttaccgttgaatggaagtgtaggagattatcaagggtcgtttgatggaaccaacttgcctagcgatgcttgtttggttttaacaacggatcccaagcctcgactccgttggacagctgagctccatgaacgtttcgtcgatgctgttactcaacttggtggccctgacaaagcaaccccaaagactattatgagaacaatgggagtaaaaggccttaccctctatcacttaaaatcaca

SEQ ID NO: 27770 - DNA, 294 bp, Gossypium hirsutum
  unsure (1)..(294): unsure at all n locations; Clone ID: LIB3148-007-Q1-K1-D4
cgcgnccggngggcggntcgctgcccgttacgtctcttgaagtccactttaccacacctttataggacgtggtgcacaaagnaagaagccccaaagcnaacacaagggtaccaccattttaaactagatgttcagtcacctatgattccaaataaacattatgtttttatataaggtcaaaaaaaaaaaggacaaaagaaggaaccaaactagacaagcgaagcgaggaaggaaaaaacaacggatcccaaagcctcgactccggaggacagcaagaccaccaagaacgaaaaa

SEQ ID NO: 27771 - DNA, 256 bp, Gossypium hirsutum
  unsure (1)..(256): unsure at all n locations; Clone ID: LIB3148-007-Q1-K1-D5
cggaaatnccggggcggcccaaggcgtccgcccacgcgtccgggacgtggacgtggtcgaggccgttgaatatgttgctttgtttccaaatggttgtgacagctggctgtgtaggcagctttgttatagtgagaatttgtgggcgatgctacgaattttaaaggaattgtattggtgttttactgttccgtgtgattattagcctgggttgaatagcttaatcaagaatcctgaggttcaccgctctttaattttt

SEQ ID NO: 27772 - DNA, 72 bp, Gossypium hirsutum
  Clone ID: LIB3148-007-Q1-K1-D7
attttatctatgttcttgaacatgtatcttcatgcttacacaacttttcaattcattgtccatcttttttgt

SEQ ID NO: 27773 - DNA, 189 bp, Gossypium hirsutum
  Clone ID: LIB3148-007-Q1-K1-D8
cagtaattagagctttttatgagtcgagttggatcgacccgaattagagaaaattacattcaaatagagttgttcatgagtcgagttggattaacttaaattagagaaaattacattaaaaaacttaaactcgactcttgaacaagtttaattgtaatcgttttcaacaagattgctttggtcgttttc

SEQ ID NO: 27774 - DNA, 247 bp, Gossypium hirsutum
  unsure (1)..(247): unsure at all n locations; Clone ID: LIB3148-007-Q1-K1-D9
tgcgtttattttccttttcacaggttttattgacgtggaggcgtatggagaagaagcgggtctttgagaggccgttcgtggaaacccncttctggctagctgcggcgctggtgttccagaaacctttaaggtttctggtgccttcccgatattgggctcactttggccatttatgaattgggttaggttaaagggtttgggtgaaatgggactttgaagtatggtcttgtttgggtgtttcgttttt

SEQ ID NO: 27775 - DNA, 343 bp, Gossypium hirsutum
  Clone ID: LIB3148-007-Q1-K1-E1
tttaaggagtttgtcgttggggagaagattaaaagagaagaaagatcggaatcacccaaagccaatgaagccgttaagaaatgttcgggcgaataccaatacctaagccagtaattcaatccgtctactctcgatgtgcttatcatattttgtgatacttcgatcccgtttttgttgtctgaggtagaaacagtgacatccatggcacaatttgtgagcttgtgtaatgtttcctaatttggtggttaagatacacatcctatatttgtattttttacgatacagtctttactcttccaaaatgtatctttccttcatagtccatcagctatttatggttcat

SEQ ID NO: 27776 - DNA, 359 bp, Gossypium hirsutum
  Clone ID: LIB3148-007-Q1-K1-E10
cccacgcgtccgcccacgcgtccgagcctttggaggccacatgagacggcacagggcggcggcaagcaatcaagctgctgtgagtgttgatactactagcattccaattgagtcaggcaatggtgatggaaccaagcctagaaatatcctagctctggatcttaatcttcctgcaccagaagatgatctcagggatgccaagttccaattcggagcaccccaacaagctattgttttcaccacaccagctttgatagattgccattactaaacccaaaaagaagaaaaatcatgtatcaatgtgaatcatatataatttgtattggttcaattcaatattattatttacaattattaac

SEQ ID NO: 27777 - DNA, 51 bp, Gossypium hirsutum
  Clone ID: LIB3148-007-Q1-K1-E12
gcgtccgcccgcgcgtccgcccacgcgtccgggtccgtcaatttttttttt

SEQ ID NO: 27778 - DNA, 205 bp, Gossypium hirsutum
  unsure (1)..(205): unsure at all n locations; Clone ID: LIB3148-007-Q1-K1-E3
ccaagccttccgccaacccttccaaaaatacaaagaaattgattacagatttctactaatcttggcaatttggtttctggcttgtacaaaaaaaaaaaaaaaaaaaaaaaaaaaaaaaaaanaaaaaaaaaaaaaaaaaaaaaaaaaaaaaaaaaaaaaaaaaaaaaaaaaaaaaaaaaaaaaaaaatgggggcggccgtttaaa

SEQ ID NO: 27779 - DNA, 271 bp, Gossypium hirsutum
  Clone ID: LIB3148-007-Q1-K1-E7
cgaagttgaatgcaagttaatcagaatcttcatggtgcattggtaatttcctaattgcatgtcaatttattcatgctccatttttatgttatattcatatattgaatctatctttgtgtatcctagttccaattatgctttagagtatatcaggacggctatatatcgatatcgatgcctcgtgtatgtagtttttcaatttttttcatttgtttcagtgactacatatgggaatatatgatccttggaatgttgggcagtatctttaatt

SEQ ID NO: 27780 - DNA, 407 bp, Gossypium hirsutum
  Clone ID: LIB3148-007-Q1-K1-E8
aagaacaaaggtggcaatggcggtgccgaatatggtggacatggtggtggtggtggtggtaagattgaaaggagcaagatggaatttatggttcaaccccaatttggatacatgcccgcttactcgggatatgagcacccgggctattggttccgttaccggcaccgctacttcgggtacctgccgggttacccaatatctggtcattcttctcaacacatgttcaatgaccagaaccctaattcttgggccattatttgaagaggaattgatttttaataacctaaaagtttatttttagggattgggtaattaaaaaccaaaaaacccggaggttactttggaagtcaaaattttgggttaaacttggatggcattttattaaatgttaattttagggttttgat

SEQ ID NO: 27781 - DNA, 382 bp, Gossypium hirsutum
  Clone ID: LIB3148-007-Q1-K1-E9
cgatggagatgaagcttttaaccctccttatcctcttctccttctctgcatataccgcggccccattagtagctttagcttcatctccttccgagagtcagtcccccagctcttctgaagaccagccaccccaaacagtttctaaaataccttccaacgccaaccctaagcttaaaaaaatctgtcaagaagttaatcaccccaccgaatgtattacaacagctggtccattcctaggtgaaaatgctgatataactcccgtgactgttcttcaagctgagattgaagcaattgatagcaaggctaaggaagccttcgcaaaggctacaaagctcgcagcggatccctctacctcaaaaacccgcagtgttcccctaaatgt

SEQ ID NO: 27782 - DNA, 356 bp, Gossypium hirsutum
  Clone ID: LIB3148-007-Q1-K1-F10
gccacgcgtcggttggactcggaagttgcaactatgaagaaatcgaagcagagagatctttattgagaaagatgttaaagaaagaatggagaagacaattgagacggttagagcgaatttaattccataggcagggagggcaaacccatcaatgcttgacaaagttgaggtggaatattatggaactccggtcagcttaaaggtttgctcaaatagactcctgagtcaagttctctattgattagccctttgacaaatcacttaaagctatgagaagctatgtaactctgatctggtatgactcaaacaatgaggtgaagtcattcgcttgtctctcctcaactgacaactgaaag

SEQ ID NO: 27783 - DNA, 383 bp, Gossypium hirsutum
  Clone ID: LIB3148-007-Q1-K1-F11
attgattcagattgggcaattaataatgggaattggctctggctatcatgctcatcattcttttaccagtacaaccgcatatactcaccaatatcatttggaaggaaatatgatccgaatggtaattatattaggcattttctccccatactaaaagacatgccaaaggaatatatatatgagccgtggacagctccactaagcgtgcaaactaaagcaaagtgcattattggaagagattatcccaaaccagtggttttgcatgatactgcaagcaatgaatgcagaaagaaaatggggcaagcttatgcacttaaccagagactcaatggacgtgtaagtgaagaatatttaaggaagttgagaagaaaatttgatgagga

SEQ ID NO: 27784 - DNA, 368 bp, Gossypium hirsutum
  unsure (1)..(368): unsure at all n locations; Clone ID: LIB3148-007-Q1-K1-F12
ggatggggcggtccttcacccggccagtgttccaccgggatgggggggtcctcctcggggaccatggggaccaccggggtggggcggccctccggtcggaccagggttttttggtggcttctgtgatgtaattggtgcttgtgtcaacttcctgtgctgctgctggctgtttcgagattgttttggtggtccaatgggtccttcagggccacctggacctncaccaccatagttacatgctttcttgctccttcataaatagaccttctatctgggtttgaacttagctatctaattacaatatttatgtaagaattggttgctttttagtagtagaaattaatatgaaggaaatctgttgagtgatt

SEQ ID NO: 27785 - DNA, 399 bp, Gossypium hirsutum
  Clone ID: LIB3148-007-Q1-K1-F2
ccggtggaattgggattaatttctttcacatgattggcgtttttaaagagcataggattgttcgattggtgaggaaattgaatgcgaagagaaatgatgatttttcaaggtttcgggaacttgagattctatttcttgggattaaaacgatagaatatattggctgatgtctaaaacaaaagtttgacaaggctaatgtacttctataattcatttggctttgtctgcctgatgggaaaataagtgaaagcaaggcgaaagctttggattttggcgtcataatccatttggctttgtttggttgattgggaaacaagagacaccgaagcaaaatctttggattttggctttatgtcattcggctttgtttagttgatgggggaaacaagaaaaaagcag

SEQ ID NO: 27786 - DNA, 76 bp, Gossypium hirsutum
  Clone ID: LIB3148-007-Q1-K1-F3
gggcccacgcgtgcgtccacacgtttgtccacacgtttgtccacacgtttttaaatagggggaaaaaaaaggggaa

SEQ ID NO: 27787 - DNA, 169 bp, Gossypium hirsutum
  Clone ID: LIB3148-007-Q1-K1-F4
ccgacactcaacaccaattcaagagtgaactaaattgaaggtaccggacgacgaaatacaacgatttgcctaggataaaccttgccttaataagctaaattgtagcgtagaaaacctattttaagcttggatgccaactaacaaaatagcgcttaccaagggttctttg

SEQ ID NO: 27788 - DNA, 122 bp, Gossypium hirsutum
  Clone ID: LIB3148-007-Q1-K1-F5
tttagcttcattctacaaccccgggggggacgctgttatttattcggcgcccgcgtttgtggagaaagaagctttgggaaaaaacaaacagggttaccccaaatttgtggttggagagggca

SEQ ID NO: 27789 - DNA, 354 bp, Gossypium hirsutum
  unsure (1)..(354): unsure at all n locations; Clone ID: LIB3148-007-Q1-K1-F7
atttttcacccattttgcttagctgagagagttgggtattttattttgtaaatgttcatggttctatccaggagctacctagatattctgtcgtggtaattaatttttaatttcttttcaaaaaaaaaaaaaaaaaaaaaaaaaaaaaaaaaaaaaaaaaaaaaaaaaaaaaaaaaaaaaaaaaaaaaaaaaaaaaaaaaaaaaaaaaaaaaaaaaaaaaaaaaaaaaaaaaaaaaaaaaaaaaaaaaaaaaaaaaaaaaaaaaaaaaaaaaaaaaaaaaaaaaaaannnnagggggggccgcttttaaagaaaaaaaattataaaccccggctggaaaaaaaaaaattttttt

SEQ ID NO: 27790 - DNA, 235 bp, Gossypium hirsutum
  Clone ID: LIB3148-007-Q1-K1-F9
accgttcgatcccggtcgacccacctccaagattttggaaggcttttataagaatgataatgtaagagaggtcggaaaaaaaggagaccctttaaaaagacatgtaaaaacaaacaaaaaaaaaaaaaaaaaaaaaaaaaaaaaactaaaaaaaaaataacaaaaaaaaaaacaaaaaaaaacaatttatttttaacgatagaaaaaaaactataatccctacggttcgcttttt

SEQ ID NO: 27791 - DNA, 350 bp, Gossypium hirsutum
  Clone ID: LIB3148-007-Q1-K1-G1
cttccgcggaaggttgggggacttttcgttgattggttcagggacttatgctggggacttagtggctgtttcatgtaccggtgaacgtgaagccattatacgaagcactttggctagggaagtagccggcggtgatggaatataaagggttgaatcttcatgaagcggtggattatgtgattaaaactagactagatgaaggcaaagctggtcttattgccgtgtcaaagaatggggaagtggcttgtgggtttaatactactggtatgtttaggggttgtgctactgaagatgggtttatggaagttggtgtctggtaaatttgtgtttggtttagatgctgggttcat

SEQ ID NO: 27792 - DNA, 279 bp, Gossypium hirsutum
  Clone ID: LIB3148-007-Q1-K1-G11
cggacgcgtgggcaattttcaatgataatatatattggagcctattttggggtgagggtgaactaccacacattgcatgaaagaatggatggttttagggcagccttcaaagccatgttacatcagtaggtagagcaatgttgctcagttgtttttagttaagtgtctgatataatttgtgtctgatagaacatgaccattaacggtgcttttcccacaaacgtcactaaagaacatggcctttaaaaaacttattttaattaaataatatttatttct

SEQ ID NO: 27793 - DNA, 133 bp, Gossypium hirsutum
  unsure (1)..(133): unsure at all n locations; Clone ID: LIB3148-007-Q1-K1-G12
cgcgtccgtctgttagaacttttaagagcggctgncatattttgcctatttcccagatcggggggctagtttgaaacgatgtctaccgctgntaaagctgcttgttcttacgctgctttgattctctatgatg

SEQ ID NO: 27794 - DNA, 283 bp, Gossypium hirsutum
  Clone ID: LIB3148-007-Q1-K1-G2
accggggcggcccaagccttccgaattttttaagaatggattattgtaggctttatgaaggcctattttggatatacttgatgtgagcaatttcaggactctgactgaaattgggaagaaaaagaacaaggctatgatgtctggactctgctcgcaaaattgtatgaattatgaactgaataatataatcatgcatgcaattgagaagttgtaaactgactagatgaaggcaaagctggtcttattgccgtgtcaaagaatggggaagtggcttaaggggcgg

SEQ ID NO: 27795 - DNA, 185 bp, Gossypium hirsutum
  Clone ID: LIB3148-007-Q1-K1-G3
aaaaaaaaaaaaaaacgggccatttttaaaaaaaaaatacacccaaaaaaaaaaaaaacaaacaaccaaacacctttctctacacaactatcaaactataaaaaaggccgcccccccaaaagaatccaaccttacttacccgtccatccaacaacaaaacttttttaaagggcccccaaaattca

SEQ ID NO: 27796 - DNA, 434 bp, Gossypium hirsutum
  unsure (1)..(434): unsure at all n locations; Clone ID: LIB3148-007-Q1-K1-G5
ccgggacggaaccgggncgacgccacgccgtccgcccacgcccgtccgtggtttccaacctctgcttgcggtccccnncgcccccgcacccggtggcagcgccttgcaggttctacctggagatgnctagctccctnccttctcaggcgcagcgctcctagtnncctagcagtgnngtgccgcacttgagggtctcggcttattggccgcagggagcacgcccgccgttgcttagnnttattttatgttctaaataccgatttatctcaaggggtgtctagcacgtggcttttctagggtttggatatcatcacgaaaagctgccttattaaattattttggtaatttgctaaatttgttttatgaataaaagaattggaaccggatggattgcatctttnaaaaaaaaaaannnnnnnnnaaannnnnnnnaa

SEQ ID NO: 27797 - DNA, 261 bp, Gossypium hirsutum
  Clone ID: LIB3148-007-Q1-K1-G6
cggtcgaccacgcgtccgcccacgcgtccgattcgtacgcggcggttttaattaaaagagaggtgaggagaggaggatgttggaaaaccctacacccacctcagctgatgccttttctgccatcaaacgctatgcttctcccaatcaacgaaatcgttctctcggacgccgtaaatctagagatcggtttgattggactaacaatgtttatgggaatgattctcagaagaatctatgtgccacatttagatacatttattc

SEQ ID NO: 27798 - DNA, 216 bp, Gossypium hirsutum
  Clone ID: LIB3148-007-Q1-K1-G7
cccacgcgtccggttaattgcagttgtctttagcttgtagagttggatgttaaattttggatgttgcatacgacaatgcagtctcttgttccggtatatctaactgataagactgtttcttggctattgcattttcagattccctttatgtaattatgtagtacattttccgattcagtgttaaatatgaaataccagtaagtaataacatcagat

SEQ ID NO: 27799 - DNA, 200 bp, Gossypium hirsutum
  Clone ID: LIB3148-007-Q1-K1-G8
gcccacgcgtcggttaattgcagttgtcttagctgtaagttggatgttaaatggggatgttgcatacgacaatgcagctcttgtccgttatctaactgataagactgttcttggctattgattttcagattcccttatgtatatgtgtcattttccgattcagtgttaaatatgaaataccagtagtaataacatcagat

SEQ ID NO: 27800 - DNA, 243 bp, Gossypium hirsutum
  unsure (1)..(243): unsure at all n locations; Clone ID: LIB3148-007-Q1-K1-G9
atcatcactgcaatactaggggcaatnattttagcagaaaaaatccaccttgaaagcagccttttttctattatcataggcacacgcctctacacagtggtgtcggataaaaccatatattggctattcgcatttaacaattccattaacgaacccatcatgcacatttttagctttagtattgagtcaccaatattcaaattactgtccgtcgtttaaaaacataccaacttgggaaaaccc

SEQ ID NO: 27801 - DNA, 108 bp, Gossypium hirsutum
  Clone ID: LIB3148-007-Q1-K1-H1
ttccggaaggtggggaaatttgacctttggcttttatttgtggatttctggcagtaaaaactggtgcatgacactgcgttttataaacttctagttcttttgcttttg

SEQ ID NO: 27802 - DNA, 148 bp, Gossypium hirsutum
  Clone ID: LIB3148-007-Q1-K1-H10
cccacgcgtccgtgttagtttctctcctttccgaatctgatttttgaaagcgatgaatgactttatgtagcacctgtgaggtattggctccaggttttggtggatttgaatttgtgttaagaatgcatacactattttaagtctcatt

SEQ ID NO: 27803 - DNA, 174 bp, Gossypium hirsutum
  unsure (1)..(174): unsure at all n locations; Clone ID: LIB3148-007-Q1-K1-H11
tatttaacacctgcacgccttctctacaggttttggnggatttaaatttgtgttaaaaatccatacactattttaagtctcattaaacaaaaaacatctttttaaaaaatacttaacaaataaaaaaaaaaacttccaaaatatacaaaacaaccaacctaaaacaaacctaat

SEQ ID NO: 27804 - DNA, 436 bp, Gossypium hirsutum
  Clone ID: LIB3148-007-Q1-K1-H12
cagagaatgacatgatcaaaccagcgacctaaggagtggtgaacgttttgaaagcttgtgccaaagcaaaaacagttaaacgtgtcgtcttgacatcatctgccgcagctgtgtctatcaacacactgaatgggacagatctggtcatgacagagaaagactggaccgatatcgagttcttatcatcagcaaagccaccaacttgggggtaccctgcatccaagacgttggctgaaaaggcagcttggaaatttgctgaagaaaacaacattgatctcattacagttatcccttctctcatgactggtccttccctcaccccaattgtccccagcagcataagccttgctacatctttgatttcagccaatgaattcctcataaatgctttgaaagggatgcaaatgctgtcaggttcgatctctatcacacatgt

SEQ ID NO: 27805 - DNA, 59 bp, Gossypium hirsutum
  Clone ID: LIB3148-007-Q1-K1-H2
agcaggaaaaacaggccgcccttttttataaagataaacttctccttcttttgcttttg

SEQ ID NO: 27806 - DNA, 301 bp, Gossypium hirsutum
  Clone ID: LIB3148-007-Q1-K1-H3
ttttcaagctggatctatattatccatgtggaaaatcttttgagagttgttgggaattggggactttctttttgcataggaagtccaatgcaagactgaagttttaaggtgttgaagaagaagaggatgcattttgcctaggttaggtattgtgaataaaaatgaaagaaaaaaaaaagaatctgattgtcatttgtgtaaatcatgtcagaaggagaagatggtagggcaggctttgagagaactggttttaatacaaaattatttagtacaaaaagaatcatgagaatattcgagtggc

SEQ ID NO: 27807 - DNA, 327 bp, Gossypium hirsutum
  Clone ID: LIB3148-007-Q1-K1-H5
gacgggcggaccgacgcgtccgaaggaactaaggacttcccgcagtgtggtggttcaaataccgtagtgcaaattttgaatgcttggaacgttccttttgaaaccataaacatattagagaacgaaatgctacgtatgggtctgaaggagtattccaattggcctacctttcctcaactttatatcgaaggagagttttttggtggctgcgatatcactgttgaagcatataaaaatggggaattgcaggaactattggagaaggcgatgtgctcttaaatacttatctgcattgaaaaacaaatgtagttgtacttgttcggaatt

SEQ ID NO: 27808 - DNA, 288 bp, Gossypium hirsutum
  unsure (1)..(288): unsure at all n locations; Clone ID: LIB3148-007-Q1-K1-H7
cccacgcgtccgcttgatgacacattccttgcaccagaaagtgaagagtgtgtcaggaaggtgaatcaggttgctgacaaatattgggatctctattcaagtgagtcacttgagcgagacttgcctggacacctactccgctaccccatcggtgtttctagtgatggatctgtcactgaattgcctggcatcgagttcttccctgacacaaaagctcgtgttcttggtgccaaatctgattatctgccacctatcctcactacttnagggatctttactttgttctta

SEQ ID NO: 27809 - DNA, 268 bp, Gossypium hirsutum
  unsure (1)..(268): unsure at all n locations; Clone ID: LIB3148-007-Q1-K1-H8
gttgggagaaggttgtgatttttgccatttcctttggttggttgccctgattttgtgcaggtagatcatctgatgcatttagcattagctgctgccctttgtaatggttgattgccattctttttcaagcctattattatggcttattattatatctaaagattctcttcatatttgcgcttaaaaaaaaaaaataaaaaaaataaaaaaaaagcccaaataatccctannaaaaataaaaataaaaaaaataataaaaaataatttg

SEQ ID NO: 27810 - DNA, 271 bp, Gossypium hirsutum
  unsure (1)..(271): unsure at all n locations; Clone ID: LIB3148-007-Q1-K1-H9
agaagcagtgggaagagaaagaaaaggcatggatggagagagaggcagctatgcaagtaaagaaggagcagagagagaaagctgaagctcanaggaaggtagaaggaaagagatgttcaaaaagacacgacatggtcagcctgtaatgaaatacagaatccagcatcttttgcagtccatacagggttcgtctagtgcttccagttaatacaaattagtgatcttcattagtgcttatagtagctgagagtagagaacatgtgcaacagta

SEQ ID NO: 27811 - DNA, 296 bp, Gossypium hirsutum
  Clone ID: LIB3148-008-Q1-K1-A1
cggacgcgtgggttcatattggatgagatgaggttgaaatcaaaggaagatggacttgcaaccacgggtgaagggctcgagtggggtgtcctgtttgggttcggaccaaggctcactgttgagaccgaggcgcttcatattatctatgcttaaacaaggatttaatgttcatgttggctagccctggctgcactacaaattgctttgcatttttatttattttattttcctttttattaatgaaatttgggattagtatggttatttgaaagagagtaaagctctgacatatggtg

SEQ ID NO: 27812 - DNA, 322 bp, Gossypium hirsutum
  Clone ID: LIB3148-008-Q1-K1-A10
aaatgtaactgttgtagtttttccgtttataaaaaaaaaaaggggaaaaaaaaaaaaaaggaaaaaaaaaaaaaaaaaaaaaaaaaaaaaaaaaaaaaaaaaaaaaaaagaaaaaaaaaaaaaaaaaaaaaaaaaaaaaaaaacaaaaaaaaaaaaaaaaaaaaaaaaaaatggggggacttttaaaaaaaataaagttacacaactgttaaaagcaaagatataggtaattttttgggggctccaaaattaaaaaaaagggcagaattttaaaatgtgggcaaggggaaaaaaagggaggatgccaaattaaacccgcttg

SEQ ID NO: 27813 - DNA, 230 bp, Gossypium hirsutum
  Clone ID: LIB3148-008-Q1-K1-A11
aaggccatcactgtgcctgaattttggagtgaggaccattaagcagatgggagagcctggaagaagagtaaattgccttatgacaacaagatatttattaatgcttctttaccctgcaagtcatgaacaagttacctcttctcagttctcagagcagaagcgtgtaagatttgcttatcctataacattatatgtccaaatatgcagattatagaattgaataattctgg

SEQ ID NO: 27814 - DNA, 221 bp, Gossypium hirsutum
  Clone ID: LIB3148-008-Q1-K1-A12
cccacgcgtccgggcagttgtcactcctttgaagaacccagcatggttgtaatgtttgtttgtttgttttcttacaaattgccatgaatctaaacttgaactaataagctgccagttttttaaattttgaatgatcagcgtatggtaggatcattcctgaactgataatttgctcatatttggatgagtatggggcataatgttttaaatatatgaataag

SEQ ID NO: 27815 - DNA, 324 bp, Gossypium hirsutum
  unsure (1)..(324): unsure at all n locations; Clone ID: LIB3148-008-Q1-K1-A2
gctgcgcaaaattgcacgcgctcggatttgtaccagggctgaaaaataggcttaaaaccagcggggtcgcgatcgatatgtatccttatttccaggtttatacatactaaccctatctaaaatgggctattacactgtgatcgaccattatattaaaaaaaaaaccacattttttttccccacagaacagaaaagaaccgaaccgaattgatcctgnnaaaataattttaacttttaatgaagaanattgggaaaaaaactgaaattgaaaagggtggaaaaggggggtggcataacgtttggtaactccttccatccgctttc

SEQ ID NO: 27816 - DNA, 385 bp, Gossypium hirsutum
  unsure (1)..(385): unsure at all n locations; Clone ID: LIB3148-008-Q1-K1-A3
gtccttgggtatgcattttgttttctcacatcattttgtggttttacttatggagtgccccgagcacgtgtagttggttatctgtactcaatgttactagtctattgaattcccaggattaccatagaacaatatataagcatactatagattgaagagaggtttatcaattgtataacctatattcttttgtgtaataagcttttagacttttgttggaaaaaaaaaaaaaaaaaaaaaaaaaaaaaaaaaaaaaaaaaaaaaaaaaaaaaaaaaaaaaaanaaaaaaaaaaaaaanaaaaanaaaaaaaaaaaaannaaggggcggccggtttaaagagaccaaatttacttacccggtcttgcaaagaaataattttttttt

SEQ ID NO: 27817 - DNA, 415 bp, Gossypium hirsutum
  Clone ID: LIB3148-008-Q1-K1-A4
gcccattattcctcagtcctatgttacacatgcgcttagagtggaaggtcttcgaggtataataacagtgccagccaagctggaatcgacaaccctcgtctttgcacatggagttgacctatttttcacgcagcttgcaccttcaaggacatatgattcactcacggaagattttagttatgccttgctactcattacaatcgtggcactcgtagcagccatctttgtaacatggaggttgtccgagaggaaagaactgcaagagaaatggaggtaaagtttcttctcattacgtttgtgtattaacacatttgcttagatgacacacacccttaattatttatttgaattagattagaaggggtctccttatgacttgtaattcttccaagttttgtagcattcaatctttaat

SEQ ID NO: 27818 - DNA, 430 bp, Gossypium hirsutum
  Clone ID: LIB3148-008-Q1-K1-A5
ctttttacttgctttctttccgtttcgaatatggatattaagaaacgattactccttccatttgtatgctattttctttcagtttcccagtttttccacgtctgccatggtgatgttgggactgctgcccagtacagccctccatatttacctacggcgtgctttggggaagatcaaacccagttcccatcaagcaatctgttcgcagcagcaggagatgggatatgggacaatggagcatcatgcggaaggcaatacctggtgagatgcataagtgcttcccagccagggacttgtgtccccgaccaaactatccaggtcaagatcgttgattatgctcctaccgctctctccccaccttccgctcaatccaccaccattgtcctttccgaaactgcttttggcggaattaccaatatacccatggact

SEQ ID NO: 27819 - DNA, 416 bp, Gossypium hirsutum
  Clone ID: LIB3148-008-Q1-K1-A6
gttacaatggaggttatccagtggacatccctgtggaatttatacaaggatgaatttgagaatgagaagaacatgcttggaggttctttgggtgacaaagctgcagaagatttgagaatgagaattattgaacataatatccttgttgtttcaaagtactactcgaggattacattgaagagacttgcagagttgttgtgtctcactatccaggaagctgagaagcatctttctgaaatggttgtctccaaggcactggtggcaaagattgaccgaccaatgggaatagtctgcttccaggtagcaaaggatagcaatgaaattctcaattcgtgggcttcgaacttggaaaaacttcttgatcttgttgagaagagttgccaccaaatacacaaagaaaccatggttcacaaagc

SEQ ID NO: 27820 - DNA, 193 bp, Gossypium hirsutum
  Clone ID: LIB3148-008-Q1-K1-A7
ttcaagttttatgatttgcttggtgtagtttcatataaatattttctttgatgcaatgcagtcatggcttagtcccatgcctctccttatgtatttttaaggtttccatatatagggaagtttgcagggaaatccttgttatttctaagatttgtaatctaagcttataatttccaatatatcagaaccttcg

SEQ ID NO: 27821 - DNA, 229 bp, Gossypium hirsutum
  Clone ID: LIB3148-008-Q1-K1-A8
gcgatcgggaaacggttttggttcgtcgcatgctccaggacgggttacttgatgttgtttgtttgaagcattagagagatgctgttggtttatggaatgccataggttttgtaaaactttgaggagtgtggaagtgttaaagttattcaaaattaacaagctcactataaagcagcaaatttatattagattcccataatatacttgctgcataaatgcctttgatttc

SEQ ID NO: 27822 - DNA, 295 bp, Gossypium hirsutum
  Clone ID: LIB3148-008-Q1-K1-A9
ctcgggtttgttagtgaagaagctgcaatttcttttgccgagggacatgggtgggattgtgtggttaaaaagcgccagacaccagtgctgaagccaaagtcctatgccgataacttcaagtggaaaggacctgctgtatctgaaaagtgatactatactattgcagatcctgttgcttttgattttcaaccataaatcaagttgcgagacgggggctcaggttttctttgttgcacattttctgctgtatcttgtgacaatttggattaaaataaatgtgatcaacagtgaccaa

SEQ ID NO: 27823 - DNA, 376 bp, Gossypium hirsutum
  Clone ID: LIB3148-008-Q1-K1-B1
cccctaaatactcgaaggctaggtatgatgaaattgtgaaggaagtctcttcctacttgaagaaggttggatacaaccctgacaagattccatttgttcccatttctggttttgagggtgataacatgattgagaggtctaccaacttggactggtacaagggccctacacttcttgaggctcttgaccagatcaatgagcccaagaggccttcagacaagcctctccgtctaccacttcaagatgtgtacaagattggtggtattggaactgtcccggttggtcgtgttgaaactggtgtcttgaaacctggtatggttgtgacctttggtcctaccggtctgaccactgaagttaagtcttgtgaaatgcacca

SEQ ID NO: 27824 - DNA, 366 bp, Gossypium hirsutum
  unsure (1)..(366): unsure at all n locations; Clone ID: LIB3148-008-Q1-K1-B11
cgtttttctattccttcctatataacatttaagtgtaagattgggtttggtctgtttggtatctgtcaattgccgggttttttcggactcgtaatgtcatgttttttcggatgtagtcgtaaaattgaccgacggattgggttgtgactgagggattgggtcgtgtcagtgagtatagttcggtttgtatcatttttttcgttttcttcgacgaggttcgtaaatgtgtatgaatattttcgcttagaatgattggaactaatcgaagcgtttgtagcatgatgtttgttgatgatgtcttatcttcgnnncnnnagangagactgcgttggaccatcaaacgaatctacataattatgaccctat

SEQ ID NO: 27825 - DNA, 296 bp, Gossypium hirsutum
  unsure (1)..(296): unsure at all n locations; Clone ID: LIB3148-008-Q1-K1-B12
cgttttaaacattgnnngccttttatttctttctctgttccttgttgcttccggggcagcctctcggtttctgagtaatcgaagataaaaaaggatggggctgtcttttgctaagctgtttagtcgactgtttgccaagaaagagatgcgaattcttatggtgggtcttgatgctgctggtaagactaccattttgtacaagctcaagctcggtgagattgtcactaccattcccaccattggctttaatgtggagaccgtagaatataagaacattagcttcactgtttgggatg

SEQ ID NO: 27826 - DNA, 397 bp, Gossypium hirsutum
  Clone ID: LIB3148-008-Q1-K1-B2
gtctgtacctaactaaggaacgtgacttcatatataaccattcaaagctgaattgtggccgtgcactggtctaaccatgctgaagatcaaaaatgttaatggtccaggacaaggggtttatgaatgtcgaaatacaataatgactattgaaatcttcatttgcttcatcagagtaagcgtaccttttaagaccagaacaaccgattagcgtgcacgtgctcaaggatatatagacatctcacagtgcgctcgacggtgtaggtatgtgctaaagacacttgaataatgaactatgtcataaaaaggcgacgcaggaagtgaaaactcaatgctcaacgcgatagatcttaccgtatcgaatattgagattgcgcccaatgaacacatatgacacatg

SEQ ID NO: 27827 - DNA, 391 bp, Gossypium hirsutum
  Clone ID: LIB3148-008-Q1-K1-B3
aaaaaaaaaaaaaaaaaaaaaaaaaaaaatttttattaaaaaaaaaaaaaaaaaaaaaaaaaaaaagggaaaaaaaaaaaaaaataaaaaaaaaaaaaaaaaaattaataaaaaaaaaaaaaatattttattataaaaaataaaataatattatatataaatattaaaaaaaacgggggggcggctttttaaattttaatttttttatttcctttttttggaacttttttttttttttttttgctcccttaataaatttttcgtccccgtttttttaacctttcaaacattggaaaacattttttgtttcaaatatttttttcttttgtaaaaaattattttttttcgcaatttggtgtattttaaaaaagccccacccgttaacttttcc

SEQ ID NO: 27828 - DNA, 104 bp, Gossypium hirsutum
  Clone ID: LIB3148-008-Q1-K1-B4
ctggaaactagagagtgttgggtttgttttgtgcagatatggaacatcaagtttgtgatcatcagctgattacttgaaacttttcagtggattttcatatggat

SEQ ID NO: 27829 - DNA, 431 bp, Gossypium hirsutum
  Clone ID: LIB3148-008-Q1-K1-B5
cccacgcgtccgctacaacaacaacaacagtttcaaactgatgttcggctctccattcgatgttgtcttcatttgattacaatgatgatctccaagcggttggagtggacaccatgccaaaacaagatgtctcaatctggttctagtaacaatctcaaggctgaaactgaaaccgtacccgactcaaccctactgagccccgtatcgtgtgtttcatcgttatcgtattttttcaagcttgtccgtgtagtaatagaagttttaacaagttttagcaggtttatcatatatggggaactgattttatacatagaatgtgactttgtcttataaataagttaggtgtctggttttttgttctttcatgttcactgtttttttatcagttttctaccattattattacatgttggggtaggaatctgataatg

SEQ ID NO: 27830 - DNA, 93 bp, Gossypium hirsutum
  Clone ID: LIB3148-008-Q1-K1-B6
atcgggagcgggcggtttaaaaggttcaagcttacctacccctgcctgccacggcattggtgttttattgggtgaacttaattcaaatcaatg

SEQ ID NO: 27831 - DNA, 423 bp, Gossypium hirsutum
  Clone ID: LIB3148-008-Q1-K1-B7
cccacgcgtccgctttctttctcatttggttaaccctaaatcccttacttcaaccaccaatttaccttcacaaacaacaacctgtgcattcaagtttgaaaggataggttttcagccttgagatcccctttcggtttcgatttcaacgaagcaaaaggaatctattggcatattcgcaaggtaagagttctctttctcttttttcctttgtttacaaacgcaatgatgaaagatcaaaggaaataaatcgcaagaaaatgaaaaaacttaaagaaaattaaaacagaaatcacctttaaaatctttgttggttttctttgtattcaatttgcattcgtaatcccatttacagtatattaatcggccttttatagccgaaccaagagaaaagggaaaagggaaaaaaataataaaaatgtaaat

SEQ ID NO: 27832 - DNA, 425 bp, Gossypium hirsutum
  unsure (1)..(425): unsure at all n locations; Clone ID: LIB3148-008-Q1-K1-B8
cccacgcgtccgcccacgcgtccgcccacgcgtccgcccacgcgtccgggttcatttgcttgatgattataaggaattgtggaacgtggggagcgagtggtacaacgagacgacgttgcttaacggcgggaaaccggtcgagttcgatggttacatgagagctgttgtggataccgaggtactttatcgagcgaaaactcgtgttgaaaccttttataatctgactaaagattgcaaagatggaattaatacatgttgaacaggttgtttaattgattcatattgctttgattatgttagaaaatgtaattggttgatgtattcttgtattggttttttttattacaatttatgtcattatcagntcatcatatgtttggtggttttttgtcataagtggtattcatatatagactttgaaaatg

SEQ ID NO: 27833 - DNA, 402 bp, Gossypium hirsutum
  Clone ID: LIB3148-008-Q1-K1-B9
aacccatgtatttcaaaaatatatacttttacaatgttttaagaattccaaaaaaaaagggaaaaataaaaaaaaaaaaaaaaaaaaaaaaaaaaaaaaaaaaaaaaaaaaaaaaaaaaaaaaaaaaaaaaaaaaaaaaaaaaaaaaaaaaaaaaaaaaaaaaaaaaaaaaaaaaaaaagggggcggccctttaaaaggatcaaagttaacttccccttgcttccaacgtaaaaatttttttatagggccaccaaaataaaattaattgcccgcggtttaaaaacgtgggaactggaaaaaccctggcttaaccaaattaaatcgcttggaaaaaaatccccttttcccaagttggctaaaaaccaaaaaggcccgaaccaatcccctttccaaaaatttgc

SEQ ID NO: 27834 - DNA, 326 bp, Gossypium hirsutum
  Clone ID: LIB3148-008-Q1-K1-C1
cccacgcgtccggccggagttttcactcataatatcgaaaccgccaacaccttgactcgggcattgcgagtcgggacagtatggattaactgctacgacatatttgatgctgcagtcccatttggcgggttcaagatgagtggtcaaggaagagagaaaggaatttatggcctttcaagttacttgcaagtcaaggcagttgtcactcctttgaagaacccagcatggttgtaatgtttggttgttttttttcttacaaattgccatgaatctgaacttgaactaaatatctgccagttttttaaaatttgaatgatcagcttatg

SEQ ID NO: 27835 - DNA, 65 bp, Gossypium hirsutum
  unsure (1)..(65): unsure at all n locations; Clone ID: LIB3148-008-Q1-K1-C10
gttttacattagtatatgaatgtgtaaatgttagcattacagcgganaaaaaaaaaagggggagg

SEQ ID NO: 27836 - DNA, 146 bp, Gossypium hirsutum
  Clone ID: LIB3148-008-Q1-K1-C11
cttaatgaactgcaattaataagactgggtggagacacaagccttcgagagtgatttaggtaaaactatatatttggattgtaactttttgttgaatgtttgcagtagtaatagatttaaggtaattagcattgcacctttttttt

SEQ ID NO: 27837 - DNA, 395 bp, Gossypium hirsutum
  Clone ID: LIB3148-008-Q1-K1-C12
gtacaccatcaaagctgtcgatgaccccttaacagcgaacaggactctattcatcaagggtcccaagaacacctactcatttaacgagctcatcgccctgtgggagaagttgattggcaaagcccttgagaaaacatatgttcctgaggaccaacttctcaaacagatccaagagtctccaatcccaatcaatattgtgttggccatcagtcactcaatctttgtcaatggtgactgcaccaacttcgagatcgatccatcattcggatacgaagcttctgagctctaccctgaagtgaaatacaccactgtggaagaaggcctcagtcattttgtttgagaaagctagaaatcaaatcagatcattgttattaaactgataccagtaataatgg

SEQ ID NO: 27838 - DNA, 69 bp, Gossypium hirsutum
  Clone ID: LIB3148-008-Q1-K1-C2
ttttattctaaacagtgaggatcctgtcaatttctactataaaagatttgatagaataaaattacttac

SEQ ID NO: 27839 - DNA, 252 bp, Gossypium hirsutum
  Clone ID: LIB3148-008-Q1-K1-C3
cccacgcgtccgaaaataacttgtgttgttaccttaaaaaaaaaaaaaaaaaaaaaaaaagggaaaaaaaaaaaaaaaaaaaaaaaaaaaaaaaaaaaaaaaaaaaaaaaaaaaaaaaaaaaaaaaaaaaaaatgggggagggggttgtggttttaaaattttaaagttttcgtttttgtgaattaaaatttttatttttgtgatagagaaaaaaaattgaatggccgtggtttaacaactataaaggggga

SEQ ID NO: 27840 - DNA, 413 bp, Gossypium hirsutum
  unsure (1)..(413): unsure at all n locations; Clone ID: LIB3148-008-Q1-K1-C4
cacaaaataagcggcagaatgcttggcagcagtttcagacaaccaaaggcaagactaaaaaggttggttttttctcggggcgtaagcgtgagagcattttcaaatcaccggatgatcctcaaggtaaggttggtgtgacagggagtggaaagggcttgacagatttccagaaaagagaaaagcacttgcatcttaagggaggtaacgttgagataagtgatgactaggcaggtagagttcctactatacttttagttgccttagctttgtttcgcactccattcaatagtttgacaagttcccaagtagggggtgttgtaaacatgtacttaccatcattcctctgcgccagtattttgtgcttgcaacttgttaattatacttgaatngntcttttttttcttccttttcta

SEQ ID NO: 27841 - DNA, 426 bp, Gossypium hirsutum
  unsure (1)..(426): unsure at all n locations; Clone ID: LIB3148-008-Q1-K1-C5
gtttgatttcttctaattagtgaatcatatggctagcactatggccctcaagcttgcatgtcgtgtggtcttgtgcttggttgtgggtgcacccctggctgaaggggccataagttgtggccaagtcatatcagccttggcaccctgcattccttacgtgagaaacaacggtgctggtggcgtgcctgcaccttgctgcaatgggatcagatctctcaacgcggctgcccaatcaactccagagcgccaatcagcttgcagctgcgtcaaagcattagctgccagcatttctggcatcaactatgaccttacgaacaaactcccaggcatgtgtggggtgcacagccctttcaagatcagccccagcactaactgcaaaagtgtcaagtgaagtangccatagaagctcgtcagcaaatgggaaag

SEQ ID NO: 27842 - DNA, 212 bp, Gossypium hirsutum
  Clone ID: LIB3148-008-Q1-K1-C6
gctaaataaaacatcagacatcaggtttcatgctacattccatacaaaatactgctcccaggaaattgagttacttgaaaggcttgatcgtgttcgatgcaagatctgtaagactgtaattgccaggcgcagtgatatgttggtgatgtctactgatggtcctatgggtgcttatgttaactcatacggctatgtgcacgaggtaatgactt

SEQ ID NO: 27843 - DNA, 128 bp, Gossypium hirsutum
  Clone ID: LIB3148-008-Q1-K1-C7
gctttgtattcatacctggctcgtgtgttttcaaggatgtatttcacggcgtcatgcaaatttacatgaaatgcatgactgattcaagtccaatcagaacaaggaaaatggcactatgatcttaattc

SEQ ID NO: 27844 - DNA, 417 bp, Gossypium hirsutum
  Clone ID: LIB3148-008-Q1-K1-C8
agccaaacaactagtacccaagcctcaacattcccaaaatccgacgacgaacggagagccctccccacggcattagcacgacggtatggtgaacgtggggcgtgggtcgtgctacacgtgagatggccggacgggtgaggtgcgtcgacgtgcgtggtggaggggagcagcagctattctcttttttgctgaaaagttagtttagtttcgggctgtttgggctctagggttaggtttattttgggcttataattgggtttgttgtttttgtaattttggactctttttggatttttttgggttttatttattgggctggaattaagtagcccgggctaaagttgggtcttacatgtattataatctaatttatcaagaaatccattttcccatgacaagctattctatttagcaatc

SEQ ID NO: 27845 - DNA, 149 bp, Gossypium hirsutum
  Clone ID: LIB3148-008-Q1-K1-C9
ggcttatgctttaagccttaaactaagttgaagaccgtgcttgttttgttgccatcagggtgagaacctgaattgagcaactctcatatgttctattcatgacaataccaatcccatagcattcaatggatataatgctttcctggcct

SEQ ID NO: 27846 - DNA, 392 bp, Gossypium hirsutum
  Clone ID: LIB3148-008-Q1-K1-D10
caacccggagaaccccatcatggaagagctgagaaagagagccgatgcagagaagaatgataaatctgtgaaggaccttgttctccttctcttcgagactgctctcctcacctctggcttcagccttgatgagcctaacacctttggcaacagaatccacaggatgctgaaactcggcttgagcattgatgaggatgcaggtgaaggtgaaggtgatgctgatatgcccccattggaggatgctgatgccgaaggcagcaagatggaggaagttgattaagcctaacatgtttttataagatcagtagatttatcttacttttgaagcatctgttagcttgttttacattttgtttggtgcttttgcttttgttatgttgttgttagttatt

SEQ ID NO: 27847 - DNA, 315 bp, Gossypium hirsutum
  Clone ID: LIB3148-008-Q1-K1-D12
cccacgcgtccggggtgatctaaagggcatggctcttgatatgggaagtgaacttgatagacaaaacaaagctcttgatcatctgggtgaagatattgatgaactgaattctcgagtgaaaggtgccaatcaacgtgcacgtcatttgcttaagtaaaaaaagttgcagagcttaccaaatttactttcacatacctgtattttaacaagttttaacaaattttttttgttctctatatttggttttctatcctacccaacatttgtcattactgatatactcgttttacgtggaatataacaaagtttttgccc

SEQ ID NO: 27848 - DNA, 368 bp, Gossypium hirsutum
  unsure (1)..(368): unsure at all n locations; Clone ID: LIB3148-008-Q1-K1-D2
atctgaggctggcaagaaactctatactaggggtgattttgctgaatcaaaaatctccaatcttgatggttatctcttgaaaaaggttggactgtttccagatttgttggagcgaaaagttatgcgacattttgaggaaggggatcaagtttctgctttggtgacaggggaattctatacaaagaaggatctctttccgggatttggaaggccttttgtatttaatgcagaggttttgcttaaagtagggcgcacatcagaggcaaaagattctgcaagggtggctttgaaatcaccatggtggactttaggctgcacatatcangatgttgccagtattgcacagtgggaagatgagcaaatcgagt

SEQ ID NO: 27849 - DNA, 416 bp, Gossypium hirsutum
  Clone ID: LIB3148-008-Q1-K1-D3
gaaaaaagaaaacagagggcctttaccctctctccctctccctgctcatttcggttagggtgcttagaaccttcatcgccgccttcaccgcagcgccacgacaggcggtggttggggtgtaaaccgggctttcaagcccctgtttaaggcgaactcaacagcgaaaacttcctcaaccaaagaagatccaaagaaggaaccccctacgacctctttgggtcgaatccgacgacggaggagcgatctccgacgacggtcacttcgattcgggtcatgggagtgtcagacgcgtggaaggccggtgattggcgccccgagcggtggtggcgcgcgtgagaaggctggtggctgaaggcatgcggctgaaaactttggtggctgctgaaattttttttttaacatagtgggcttgggct

SEQ ID NO: 27850 - DNA, 422 bp, Gossypium hirsutum
  Clone ID: LIB3148-008-Q1-K1-D4
gggtttcttccatagccgcccctgaaattatatagaagagagagagaatgaaggttgttgctgcttatttgttggctgttttgggaggcaacacttccccttcagctgatgatcttaaggccattcttggctctgttggtgctgaagctgaagatgaaaggattcaacttcttttatctgaggtcaagggcaaagatataacagagcttattgcatccgggagggaaaagcttgcctccgttccatctggtggtggtggtgttgctgttgcaactgctgctcctggtgtcggtgccgctgcagctccagctgcagccgaggctaaaaaagaagagaaagtttgagagaaagaagaatccgatgatgatatgggattcagtctctttgattaaagagttggtattttgcagaaattctcttct

SEQ ID NO: 27851 - DNA, 304 bp, Gossypium hirsutum
  unsure (1)..(304): unsure at all n locations; Clone ID: LIB3148-008-Q1-K1-D5
gcatttttatggggtatggtggtttggttcttagattattgtttgtaaggtaaggctaaatggtagatcaccttcatttctaagttgtattcaaggtccacataggagagaagaaatctcaaaaatgttgcgtgattcgtttttagttttttaccagtttcacggataaataagacatgtcgtgcacattgtattgtaatattttatgagaaatttcgaaattaggaatcatctattctcggattatacanaaaaaaaaaaaaaaaaaaaaaaaaaaaaaaaacaaaaaaaaaaaccaatagag

SEQ ID NO: 27852 - DNA, 425 bp, Gossypium hirsutum
  unsure (1)..(425): unsure at all n locations; Clone ID: LIB3148-008-Q1-K1-D6
tcggattcctttcgtctgggggtgccggaatttgggggaagcgctccggagaatccgagaaggggccgcgatgatccgaaccaaaggagaagcggggaccgggaatgttatcgaagctgttaggcatgtcagatccgtgatgggggatattagggcccttaggaacatggatgatgatgaggttttcagcttcgctaagaaaatccagtctccctacgatttggttatgcaaacgaagcagctggggaggttgccagtggttcagttcgccgccggaggagtggccacaccggcagatgcggcgttgatgatgcagttgggttgtgacggagtgtttgtcggatctggggttttcaagagtggtgacccggctaagcgtgcccgagctattgttcangccgtcactcactatagtgaccccaaca

SEQ ID NO: 27853 - DNA, 407 bp, Gossypium hirsutum
  Clone ID: LIB3148-008-Q1-K1-D7
cccaatgtcacgaaacgagtgtatggaggcaaagttccagtgcttgacgatgaaaactacaatatgagggtattggtggatcattcagtagtggaaagctttggagaaggagggaggacggtgataacatcaagagtgtatccaacggaagccatatatggagcagcacggctgttcttgttcaacaatgcaagtggagtgaatgtgaaggccacactcaaaatttgggagatgaattctgcttttattcgtcctttcccctttgaagaaacattatttcaggaaatggttgcttccacatgattatcatttgggaagggtggatgcaatacatattactattagtattatgtttgcagtgcttaatttttttttattggttgggcattatccattcactttgtttt

SEQ ID NO: 27854 - DNA, 276 bp, Gossypium hirsutum
  unsure (1)..(276): unsure at all n locations; Clone ID: LIB3148-008-Q1-K1-D8
nccaatacacaaaacttttgaatgttttctatatttccaatgctttacaatgaaagctacgggattattttattggtggatcattcacaaatgcaaatttatgtaaaatatttaagactttcataacatcaatagtgtatccacttaaaaccatatatttaacatcactttttttattgttcaacactgctagtttaataaatgttatggccacactcaagaataaagagattaattttccttttattcatactttgttttttgaataaactttat

SEQ ID NO: 27855 - DNA, 164 bp, Gossypium hirsutum
  Clone ID: LIB3148-008-Q1-K1-D9
ctcgctcaatgagaaaatgggtcagattctataggatcaaacctatgggacttagggaatgatggaagggaataaaataaaaaaaaaaaagaaatcaaaaaaagaggggaaaaaaataataaaaataataaataagtaaataaaaatgaagtagaagaaccgaa

SEQ ID NO: 27856 - DNA, 70 bp, Gossypium hirsutum
  unsure (1)..(70): unsure at all n locations; Clone ID: LIB3148-008-Q1-K1-E1
cccacgcgtacgttcttgatcgataatgtttatgatgaaacgttccgcanaaaaaaaaaagggagggtat

SEQ ID NO: 27857 - DNA, 393 bp, Gossypium hirsutum
  Clone ID: LIB3148-008-Q1-K1-E10
gatccctgacacaaaaggctgatctcaatctcggtgtttgggcgaaaaccaatgttgggtgcaattcattcaacatgcatcaaacactgaaaaccaattgctatccgctagcatcggaaggccttcgaaatatgtatttcccttacagtgaatttctcaaaaccgtccaagagccgacaatgagctcttatgcatgtccacttccaagaggtaatgtcccgtttaatgcttcctcaattaggacaggggtaggggttatcgtggatgggttcagaaagccgaatcaactgaatgagcataagccattggagaatattccaagtcctgcttcggaaaacaattcgaggaaccaacaagatgactccttcaaaagaaatgttgctggatgtaaac

SEQ ID NO: 27858 - DNA, 363 bp, Gossypium hirsutum
  unsure (1)..(363): unsure at all n locations; Clone ID: LIB3148-008-Q1-K1-E11
agatgctgtgcgctggcgtacagagacgcattggaggccgtacgtaagggagcagcgcgagagaaacccaagcttctgtttggccgaacctaggtctaggttttgggccattgggccatgtatttttaggtcttgggctgatgtaattggatttgggctgtctaatttgaacttcgggctttgggttttgggtctaggtaattgggacaaggtctgtaaatagactgtttaaaagatttggactttataatttggttntatttattatttttaatctgggccaaatttggcctattacagtgattgtaaagtgaaataagtaaattgatatttgataatgatacatgatacgtgttttttgtc

SEQ ID NO: 27859 - DNA, 351 bp, Gossypium hirsutum
  Clone ID: LIB3148-008-Q1-K1-E12
caaaacctttattcgagggagctgattggaccaggtgagagacgagatggattttactgcttctggcaggttttgacggtcaaagcgattttggttgaagcttcatcctctttggaactttggcataaaaggttgggtcatcctttcgagaaagtagtaaagttacttccttatgttagtaactctagagatcatttgaataaagcatgtgaaatttgtcatcgtgctaagcagactagaaatagttttccaattagtgaacaaaaagtcacttgtatttttgagttagttcattgtgatttatggggggttttatgacactccttcaacttgtggatttcattatttttt

SEQ ID NO: 27860 - DNA, 293 bp, Gossypium hirsutum
  Clone ID: LIB3148-008-Q1-K1-E2
ggtcaagaatgtgggaggaaaggtaaacttgccattgctgccgatatatttgcggtgacgccgtcgttcttggtggtggaagttaaaaaggaccatggcgacacattcgagtacaatcagttttgcagtaaagagctccggccggcgcttaaagacatcctatggacgtcgccgcccgagaactcgactgtggcttgatttatgtgaagtgggaagtcattgtttgatgatgaaggttattgttgttattgcgaaagtgtgattatgtgattgttttagatgggaaatgaaac

SEQ ID NO: 27861 - DNA, 191 bp, Gossypium hirsutum
  unsure (1)..(191): unsure at all n locations; Clone ID: LIB3148-008-Q1-K1-E4
cccacgcgtccggggtccagctaaggtagctaggtaagataccagattctgattaaaggctgaaaaacatacgccaattgtatctacatagctaagtggaaatttcaccatataatgtacttgtgatagttcacttcagctaaatatagggagagagagtttacanttnaaaaacaaatataaacagataa

SEQ ID NO: 27862 - DNA, 443 bp, Gossypium hirsutum
  Clone ID: LIB3148-008-Q1-K1-E5
ctctctctctgtcaataagtcttgccaacaataagttctataataaagttccaaatggatcgttcctctcattcagtctcagttgctttctttcttctgctgattcttttaaccacagagatggggcctatgtcagcggaggctaaaacatgcgagactaaaagcggtaaattcaaggggatgtgcatgagttctaccaactgtgctagtgtttgcaaatcagagcctggttttgatggtggacattgccgaggttttcgtcgtcagtgcgtttgcactaagccttgttaaaccactaagctttgttagatcagtaatctattatatttcattgtcacgaagatttcccctttttttttgcttatcatgcattttgtgcttgagagttgagagaaataacacatctccaacatatattgtataccagtaattttgttattata

SEQ ID NO: 27863 - DNA, 355 bp, Gossypium hirsutum
  Clone ID: LIB3148-008-Q1-K1-E6
ggtatgttgatatttgttttattgtttatctcccaatggttttttgcttcgtattcttattgatgaatactgccttgcttcttttatcatgttcttttggggtttgtaagattagaagatttgaatccattgctctcgttttagctgacgttcaatgagacgagaaagatatggattgggcttggcacccaaactgatccctttggttggactggggcctatggcgcggttttcgtcgtcagtgcgtttgcactaagccttgttaaaccactaagctttgttagatcaataatctgttatatttcattgtcacgaaaatttcccctttttttttgcttatcatgcattttgtgct

SEQ ID NO: 27864 - DNA, 434 bp, Gossypium hirsutum
  Clone ID: LIB3148-008-Q1-K1-E7
cccacgcgtccgaaaaagcataattgagtattattatatatttaatttgattttaaataaatcattgcaatatatgtaaaagcaatttaaaatataaatttattaatatatgtaaaaacaatttttctagaaaatatttttaggaaatctgtcaaacaacagaaaatattttacacagattcatccaaacactagaaaagcaaatcattctcagaaaagtaaatcatttttcagaaattattttctagagaatattttactggcaaacaaacggaggtttgaatccaaccgcatatataaaagagataatatttcgatgcataggtctcatgcactatcaattaatactaagatgaaacatcttaatttgtgaaaaacaaaaaaaaatattaaaggatttaaaaataaatgtaaatacctttattttaaaatat

SEQ ID NO: 27865 - DNA, 416 bp, Gossypium hirsutum
  Clone ID: LIB3148-008-Q1-K1-E8
cccacgcgtccgatctaaatgaagaaggtttaatgtaaaataatagcctgttaggaattggagtccacagacctttcaacatgagataaatttttcctgaagaaatggagaaataaggcgattcctttattagtagaaatttaggctggatggtatatacaaacgttatgctgccaatgcttatatgtgactattagttttcgcttcgtctttttaaaagtaaaatcatttttcagaaattattttcttgagaatattttactggcaaacaaacggagggttgaatccaaccgcatatataaaatgaaataatattttcggtgcataggtcttatgcactattaattaatacttagatgaaacatcttaatttgtgaaaaacaaaaaacaatattaaaggatttaaaaataaatgt

SEQ ID NO: 27866 - DNA, 205 bp, Gossypium hirsutum
  Clone ID: LIB3148-008-Q1-K1-E9
cccacgcgtccggcaattcaggcaacatttatatatatatatatatatatatatataaaaaggagtttacgatcttgttcattatgttatttatttacggattgtacgtttaattactcctaaaatatcttatgacacatatatatattatgtattatgtaaagaaatattttaatacattcttaagcagagtttatagtgtgac

SEQ ID NO: 27867 - DNA, 402 bp, Gossypium hirsutum
  Clone ID: LIB3148-008-Q1-K1-F1
gggaaacttcgacaattacgaggaatacatgtatttgttagcaatcgcaattctatcgactttgtacacgggaatacaagcgttgatacacgtgaatgcactttggaacgtgaagcagatattgaatcaacgtatctctgccatggtggactttgttggtgatcaggtgatgtcgtacttgttgatatcgtcagtatctgcagcaattccattgacaaacaggatgagagaaggacaagacaacgctttcactgattcctcagcttcggctattagcatgtctttctttgccttcctaacactggcaatatctgctggtgtttctggctataaattgtctactcaatcgtacatataatttttctttaaaaaagaaaaaaaaaaaaaaatatttaaggatgt

SEQ ID NO: 27868 - DNA, 394 bp, Gossypium hirsutum
  Clone ID: LIB3148-008-Q1-K1-F10
ccaaagctggggacagtgatgagccaagtgaagaagcttgaggtttcagtgttggtactgggtcaaaaaaggcattctccatttctaagctgtgtttgtgggagcagcagcacagaggagttcgtggagcggtgcatcaacaatgcagattgtttaaccattggggttaagaggcaaagcaaaggcgtggggggctatcttatcagcaccagatggcagaagaatttctggctcttagcttagcttaattttcttctaagcaactaattatatggttcttatagttaagacatgtctaatatcatcatgtgcatgctgtaataatattattagcttgctgatcttagaattactattcacctgatataaaattattactacttactgactagat

SEQ ID NO: 27869 - DNA, 394 bp, Gossypium hirsutum
  Clone ID: LIB3148-008-Q1-K1-F11
gttccaggacagttgatttgggaggtagtgaagaagaacaattgttttttggtgaagcggttcggaagaggaactgctgcccttcagttcagcaaagagcccaacaatctctacaatctcaactcctacaaatactctgggttggcaaacaagaaaacagtcaccattcagagtgggggaaaagaccagtctgtgctactagctaccaccaagactaagaagcagaacaagccatcgaccttgcttcacaaatcttccatgaaaaaggagtttcccaggatggccaaggctgtcaaaaaccaggtgacagacaactactacaggccagacttaaccaaagcggcccttgcaaggctgagtgctgtgcataggagtctgaaagtgccaagtctgg

SEQ ID NO: 27870 - DNA, 321 bp, Gossypium hirsutum
  unsure (1)..(321): unsure at all n locations; Clone ID: LIB3148-008-Q1-K1-F12
cccacgcgtccgcacacccatgcaaagtttctatattttgggcgattcgaaaacagcgggtgaatacaacattgaatctgttgtctaggttctgctagtgaattcaatcagaaaaatgtttagtgcaagatttaaaaaaaaaacatgtaatattacataaggtggcctcttcttttctgtcaagtgttgattatagatatgaattcttatgaattgccttattaattttctttcatcagttctttccttttaactgtttatctgaacttgggttataataaaaaacctggttatatttcttcgnnnnnaaaannnnnnngg

SEQ ID NO: 27871 - DNA, 399 bp, Gossypium hirsutum
  unsure (1)..(399): unsure at all n locations; Clone ID: LIB3148-008-Q1-K1-F2
tgttaggacaaaaaaggattgcatcccattatgtggacaaaggtgcaaattacactcaaggactaacctatgcttgagagcttgcatgacatgctgtgacagatgcaaatgtgtcccaccagggacatatggcaacagggaaatgtgtggcaaatgttatactgatatgagaacccaccgcaacaagcacaaatgtccttgaaaagcccaaccaaagcccccaaaaaacgacacttcttgagtatgtgtttttcatatttgtaatagcaaaaaagcttgcagtaataagttctgtaagaagagaggaaatggatggatttcttgtagtgtcttcgtttgtaatcctagaagctatgaacttgtcaaatagttntaattaacatataatngangattaat

SEQ ID NO: 27872 - DNA, 402 bp, Gossypium hirsutum
  Clone ID: LIB3148-008-Q1-K1-F3
gatcaagtgcttgaccaccccagagcaatatttcgagaaggttctacgtcaagccatcaataagttgggatccgatgaatgggctcttacccgagtcgtcacaactcgtgcagaggtcgacatggtacgtattaaggaggcatatcaacgaagaaacagcatccctctcgaacaagcaattgctaaagatacttcgggtgactatgagaagtttcttcttgccttgatcggagctggagatgcatgaaccgtcttcggtattaagttcctctgtatgaatgtctagtttgccttatccgctatgacttaataatttatgcttggtttttcatcgttttcattatctaaagcattgcttgcttccatgatagaacattcaaaataaaatgattgagttcgttt

SEQ ID NO: 27873 - DNA, 327 bp, Gossypium hirsutum
  Clone ID: LIB3148-008-Q1-K1-F4
cggacgcgtgggcggacgcgtgggccaagatcgacttaacttgatcaataagttcgctcgttgctcactactaagatggccaatatgtttgaagagatacaaatgacaaagatgacagtaaatgaaacccaattgtacattaacattgctccccaaataataatatatatttgttataactaatgtatattttatacatttggtttaaaaaaaaaaaattgcataaaacaaaactagaaaaacaatgaaccggcttcggtattaagtccctctgtacgaacgtctagttggcctgatgcgatatgacttaataatgaatgcttggat

SEQ ID NO: 27874 - DNA, 263 bp, Gossypium hirsutum
  Clone ID: LIB3148-008-Q1-K1-F5
cccacgcgtccgattaaatgataggtttatcttagtgcgtaggttccaatgttatgatgaaatggggttatggtggagagtgtgatgtctgatattttaatggataagatctcatgtctggtatagtttgttttaatctgcttcctaatcaaaactagtgacttcgaattaaaaaaaaaaaaaaaaaaaaaaaaaaaaaaaaaaaaaaaataaaaaaaaaaaaaaataaataaaaaaaaaataaactaaaaaaaaaattaatg

SEQ ID NO: 27875 - DNA, 219 bp, Gossypium hirsutum
  Clone ID: LIB3148-008-Q1-K1-F6
caattaagtagtagtagtagtaagtaagatgtttaaaagagtaagctgcagcgcagggtggtcgatgaccttatgtcattcaagattccggccgagagcggcggcagctgctgctatattaaattattattaaataaagggaaggggtattgtacgaatgatgttgcgttagtatgtgatttgaacatcaatttattaattaattttgggtttttgaca

SEQ ID NO: 27876 - DNA, 429 bp, Gossypium hirsutum
  Clone ID: LIB3148-008-Q1-K1-F7
cccacacattcgattaattgaaaatttattttatattttattactaaaaaaatcaaagatgtggaattcaaaaaatgggcactccacccaaaaaattacaattttttacatttgttgacatcctacttttttaaaaattattttttcgaatttgcaacatccctcttcaattttcaattccttaatatacttcgcttgactatcaaaaattttttcttaaattgatcattttttgagaatcattaacttaataatttttttacttcctatatatgaaagtgttaattccctctccttttttaacaaataattttttctttcctttgtatccttccccttttatttaaacattaatggtaccattttaatttcttaaaaaaaaaaaaaatttttatgttttaaaaaaaaattaatacccttttttaaaat

SEQ ID NO: 27877 - DNA, 390 bp, Gossypium hirsutum
  unsure (1)..(390): unsure at all n locations; Clone ID: LIB3148-008-Q1-K1-F8
gtgggcttactgttagctaagtttgcatgttgaaatcaattagtttcaattctagttgaataaggatgtgatagtattaaggtggatgaggcttgggactggggcatggaaatgacccaccaatgatagcttgcctattggctaaactaacatgcaattggcatatggcagggagagagagtttagagaaggttcaagcaggcattttgggggggggggggcatttttcatgttcaatctgttctctgtaatgggtggttcctgggtcccaagcaggtcgtttaaatttagtgtttgcgcttgtatgtttttattagaagaggcagtttgcatgttgtcttttacaagtaataataataaatcatagggcgtttgtttaaaaaaaaaana

SEQ ID NO: 27878 - DNA, 340 bp, Gossypium hirsutum
  unsure (1)..(340): unsure at all n locations; Clone ID: LIB3148-008-Q1-K1-F9
cccacgcgtccggtggaaatgtgtcgtggagttcaacatcccatacgtggactctttttaaggagttaccttgctcaaataagccgagataagttaccagatattggttccgagtatgagggtgatgctgacactgtgatggatgctgtggactttgtgctacagaatttcaccgagatgaataaactttgggtgagaatgcagcatcaggtgtcatggtgcttgtgaataattcatactctttggtcatcctgagttgaagccttcaattgcgatttctggtctgcagggacctggtagagttagagagaaccgagaaaatcgaatccgnaccananna

SEQ ID NO: 27879 - DNA, 417 bp, Gossypium hirsutum
  unsure (1)..(417): unsure at all n locations; Clone ID: LIB3148-008-Q1-K1-G1
cccacgcgtccgtttaagagacaacattcagggcattactaagcctgccattcgccgtttggctcgtcgaggaggtgtcaagaggatcagtggcttgatctatgaagaaaccaggggagtattgaagattttcttggagaatgtgattcgtgatgctgtgacttataccgagcacgccaggaggaagaccgttaccgctatggatgttgtttatgccttgaaaaggcagggcaggactctctatggttttggaggttaagtttaggatcattcttaagttcgtaactgtaatgcctttagatcttgactctagatctatatcgntatgtacttgtttgtgtactctgagtgatgttataatgatttgtaaccttaagattgatcgtataattttcatttgcaaagctttctttgngc

SEQ ID NO: 27880 - DNA, 386 bp, Gossypium hirsutum
  Clone ID: LIB3148-008-Q1-K1-G10
gctcctgctgttaaggtgttccatgcgctaaccggcattgggggcaaatgggaacttcgtggtctttggtggcccgttttttggatttcaccttaaagaaaagatctttaaaaaacaaaggataaaacttacctatcagttgaagaaatcaactggcctggagggttctaccgccaagatattgtatggagagcattttctcaaaagcaattttctagaaatgcttatgtcaacatcaaaatcctgcgcactacttttgactgaacatcttacagcaattggctcttacacccattgagaaatgaaattacctctatgaaagacttgaagaatatgtgactcttaaatatactacatttcctgaaaatacattgccctgtttctgt

SEQ ID NO: 27881 - DNA, 362 bp, Gossypium hirsutum
  Clone ID: LIB3148-008-Q1-K1-G11
ggcgggattacccgctgagtttaagcatatcaataagcggaggaaaagaaacttaccaggattcccctagtaacggcgagcgaaccgggaaaagcccagcttgagaatcggtcgccatcggcgtccgaattgtagtctggagaagcgtcctcagcgacggaccgggcccaagtcccctggaaaggggcgccggagagggtgagagccccgtcgtgcccggaccctgtcgcaccaagaggcgctgtctacgagtcgggttgtttgggaatgcagccctaatcgggcggtaaattccgtccaaggctaaatacgggcgagagaccgatagcgaacaagtaccctgagggactgtaaaaaggaca

SEQ ID NO: 27882 - DNA, 261 bp, Gossypium hirsutum
  unsure (1)..(261): unsure at all n locations; Clone ID: LIB3148-008-Q1-K1-G12
cccacgcgttctcccactcgtccgcagactaaaaaacaagcgggaatcactattatgttgtgacatacctatccccnaggagcgaattgaanaaccggttggggtatcgttggctgaaaaattagttggagataacccccgtagcactgattgtcaggccaaaggtgctgacctttgtaccacatgctctggttcaggattatatgtggactcaatactagagagccagggtatcaatgtcaaagtccgctgcctaggttg

SEQ ID NO: 27883 - DNA, 260 bp, Gossypium hirsutum
  Clone ID: LIB3148-008-Q1-K1-G2
acgaccacgcgttcggaactggtaatggacttgtgaattatccttccttctttgatcctccatgtatgaactattaatggagttccccaatttttgttctcaaaaaaaaaaaaaaaaaaaaaaaaaaaaaaaaaaaaaaaaaaaaaaaaaaaaaaaaaaaaaaaaaaaaaaaatatatacgccaaaaaaaaaaatagataaaggttttagaagataattatggcggggggggggcacgttaaaaagggtaaatggatttt

SEQ ID NO: 27884 - DNA, 377 bp, Gossypium hirsutum
  Clone ID: LIB3148-008-Q1-K1-G3
cccacgcgtccgaaaaaaggtggaggaattgctcaagaattatgaaaatgtatgtaccttgcgagttaggatgcctatttcatcggatttagccaatccccgaaacttcatcacaaaaatcactcggtatgataaagtggttaacattcctaactcgatgaccatcctcgatgagcttcttccgatttccatcgagatgggaaagaggaacttgactggaatttggaactttacaaacccgggagtggtcagtcacaatgagatattagaaatgtaccgtgactacattgaccctaacttcacctggaagaacttcaatctcgaggagcaggccaaagttatcgtagccccgagaagcaacaacgaactcgatgcca

SEQ ID NO: 27885 - DNA, 297 bp, Gossypium hirsutum
  Clone ID: LIB3148-008-Q1-K1-G4
cccacgcgtccgaaaaaaaaaaaaagaatttttaattaaaaaaaaaaaatgaatgaaccttgcgaaggaaagataactatttaataaaaaataaaacaatacaaaaaacataaaaaaaaaaggggagtccgttttatagggtccaaaatcattcctaactccatgaccatccttaattttttttttgggatacctatattaaatggaactggccgaacgtttactaaaatttggaacggtaaaaacctgggggtgcccaattacattgagttgtaacaaatgcacctttactacatt

SEQ ID NO: 27886 - DNA, 289 bp, Gossypium hirsutum
  Clone ID: LIB3148-008-Q1-K1-G5
atgggaattgattatttgataataataataaacaatatatttgacttaaaaaaaaaggggggggaaaaaaaaaaaaaaaaaaaaaaaaaaaaaaaaaaaaagggcagacaaagggaaggaaggaaaagtaaaaaaaacgaaaatgggggggggcggctctaatgatagccggacctaaattgacaggagagggccggcgatatacaacgtggggacggggaaaaaaggggcggacggaaatttatcgactgggaggacagggaaaacccgggggttgccaaaataaagg

SEQ ID NO: 27887 - DNA, 419 bp, Gossypium hirsutum
  Clone ID: LIB3148-008-Q1-K1-G6
ggatgattgggaacctgacagcgagtcccaattttattaagctggagcagacatagcagtgttcactgtgagcaatcatcaaccattcatttgcatcgacacttaatcaaataaaagatctgggcgctaaagccggagtcgctaaaccctgcaaccccgcttagtacgatagaatatgtacttgatgtcgttgatctagtcttgattatgtcggtcaaccccggctttggtgggcagagctttattgagagtcaagtcaagaaaatctctgacttgagacgtatgtgcgcggagaagggtgttaatccatggattgaagtcgatggtggagttggtccaaagaatgcatataaggttattgaggcaggagcaaatgctctagtggctggttcagctgtatttggtgcaaaagattatgc

SEQ ID NO: 27888 - DNA, 432 bp, Gossypium hirsutum
  Clone ID: LIB3148-008-Q1-K1-G8
ataaagaaaatctaaagattgggttgagacaggtgttaagggttctgattgcagctggggcagtggaagtgggaacctatcgaagcgatggccagagaattaaatgcaaaggtcttacagaagaaagtttgcaggagtttttggataacgttcccgtggtaggagggcttagttccaaggatgagtattggaccctctatattacagctcatcagataggaagttgtagaatgggcgcaaccgaagaagagggtgctgtggatgagaatggtcagagttgggaagctgaaggtttgtttgtttgcgatgctagtgtcctgccaactgcaattggagtcaatcccatgatcaccatacaatccacctcctactgcatttccaacaagattgcacaattgttgaagaaggaataaattaacacctttcatcact

SEQ ID NO: 27889 - DNA, 168 bp, Gossypium hirsutum
  Clone ID: LIB3148-008-Q1-K1-G9
cggacgcgtggggttaaacttctcaaagagctttgcaaccgaaaggtttcagcaggtactccagaatgtgttccaaatgaatctggaatgtctagtcagtaaggtatgtctagtaaatttttatgtagtgcagaactactcttatttatatgttaaacagtatgcatc

SEQ ID NO: 27890 - DNA, 312 bp, Gossypium hirsutum
  unsure (1)..(312): unsure at all n locations; Clone ID: LIB3148-008-Q1-K1-H1
cccacgcgtccggatgagtacaggaagaagtggggaggtggtatcatgggctcgaaatcacaagccagaaccaaggcaaaggagaagcttcttgcgaaggaagccgcacaaaggatgacttaagccaaccattactccctttggttaccaagtcaaatttactcctttgcccgaggattacttatatattttctagtttaactttcaaaacatcgagtagttgctgtttgtgatgtaactctgtgccttttcttaatgaaaattatgcccaaaccatcnaacaaaaataaaaacgtataaaaaaattaaacc

SEQ ID NO: 27891 - DNA, 391 bp, Gossypium hirsutum
  Clone ID: LIB3148-008-Q1-K1-H10
cccacgcgtccgcccacgcgtccggcaaaacgcgttgagcgagcattgagcaaaattgcgggcgcagatcgagagatcaataagaagtgcaagagtaacaacgatataaaaggttcatcgagttgggttccacatccaaagagtgggatatatttccccaaaggccatgaatgggtgatggatgacgttccggaccgggcggcttctttcagttcaagttactgggttcgaagcgtcgacggtgttgataaaccggagtcttcggttcatgatgaacactattcccatgcaaatatgtgatgatcaaacaaaattagtcatggagacaggggaaggggtttttatgaaatttgaataaaatattttggaattagaagctgcaactatcaat

SEQ ID NO: 27892 - DNA, 247 bp, Gossypium hirsutum
  Clone ID: LIB3148-008-Q1-K1-H11
cccacgcgtccgcaaccattgtggcgttgtcgtgcaaagaacggcgttcaattgtaatgacatgctcaagctcagacttatgggctccaacaagtgataagcagttttggggctctgcttttcttttttaatgttgttttggaacttgtaatatgcctggtctactactagcgtttaacttgaaaaaaacaaaccgaacggataatttaaaaaaaaaaaactaaaatcgggccggccgtttaaagat

SEQ ID NO: 27893 - DNA, 426 bp, Gossypium hirsutum
  Clone ID: LIB3148-008-Q1-K1-H2
aaaaaatattaataaatgagatcgtaactttattttgaggagaaaaaaaaaggaatataaagctgttgaaaataaacaaaggatgaaaccttacacagcggaactacgggtagagatccttaggcaaattagaaggtagcgactgaatagagacaaaaagaggaaagtcgcaggcaacccttctcagccacctcaggacactgcgcaactgaagtgtgggttggacaagcgaacactatcttgccgacattgttccattatttcaaatctattcctttgtgaattacaatgatgaaaacgatgtttgagtttaattttatttgccaaactatgagttaaatcctataggttgggattacttcgatgaaactttaattgtctttaatggctgcagtataaatttgaattatatttactgtttcattc

SEQ ID NO: 27894 - DNA, 69 bp, Gossypium hirsutum
  Clone ID: LIB3148-008-Q1-K1-H3
ttttagttttcattctaaatttgcatttttacttaagtgttctaaaaaaaaaaaaaaaagggggggggt

SEQ ID NO: 27895 - DNA, 163 bp, Gossypium hirsutum
  Clone ID: LIB3148-008-Q1-K1-H4
ggagcagtgataccatctcagttgtaccgcatatatatcattataatctcaaatgtagtaaaataaattaacagtacaatgacaacagctatgattccatatcagttgttgcctatcatgtctcagttttccaatagaattgaatgaagatccaccttccatg

SEQ ID NO: 27896 - DNA, 413 bp, Gossypium hirsutum
  Clone ID: LIB3148-008-Q1-K1-H5
cccacgcgtccggtcctacgggtattattgctcaaatcaatcatgctattggagcatctggggttgtaagtcaagaatgcaaggctgtagtttctgaatacggagagaagatacttgatatgctattagcgaaggatgaaccgaagaaaatctgctcacaaattggtctatgcttatttgatggaactcaaggtgtaagtatggggattgaaagcattgtgaatgagaatgctggaaaagcctctggcagtttacgcgatgctatgtgttctacatgtgagatggcagttatatggatgcaaaaccagcttaagcagaaccagacagaggaccatataattgactatgtcaatgagctctgtgatcgattgcctagtccaatgggagaatcaagtattgactgtaaaagtcta

SEQ ID NO: 27897 - DNA, 368 bp, Gossypium hirsutum
  Clone ID: LIB3148-008-Q1-K1-H6
cccacgcgtccggtcctacgggtattatttttcaaatcaatcatgctattggagcatgtggggttgtaagtcaagaatgcaaggctgtactttctgaatacggagagaagatacttgatatgctattagcgaaggatgaaccgaagaaaatctgctcacaaattggtctatgcttatttgatggaactcaaggtgtaagtatggggattgaaagcattgtgaatgagaatgctggaaaagcctctggcagtttacgcgatgctatgtgttctacatgtgagatggcagttatatggatgcaaaaccagcttaagcagaaccagacagaggaccatataattgactatgtcaatgagctctgtgatcga

SEQ ID NO: 27898 - DNA, 294 bp, Gossypium hirsutum
  unsure (1)..(294): unsure at all n locations; Clone ID: LIB3148-008-Q1-K1-H7
naaaaaaaaaaaaaaaaaaaaaaaaaaaaattaaaaaaaaaagggcggaaaataaaaagagaggggaaaattaaaaacgcatgcatgcaaaaaaaaaaaatggggtgtcgggtttaataaatccaatttactgtgcccgtgctttacaacgggtggtttttttataccgtgactttacttaatttaattggctggcgttttataactgttttgactgggaaaactattagttaacaggccttaatcgatttgcattcaaacagttttacaccctggatgtaaaatggaaaaggc

SEQ ID NO: 27899 - DNA, 65 bp, Gossypium hirsutum
  Clone ID: LIB3148-008-Q1-K1-H8
aaaaaaaaaaaaataaaaaaaaaaaaaaatttaaaaaaaaaaaaaaaaaaaaaaaaaaaaagggg

SEQ ID NO: 27900 - DNA, 60 bp, Gossypium hirsutum
  Clone ID: LIB3148-008-Q1-K1-H9
aaaattggtaatagaacacatataatatgtaaatctccggatcaatgatagaatctctgc

SEQ ID NO: 27901 - DNA, 134 bp, Gossypium hirsutum
  Clone ID: LIB3148-009-Q1-K1-A1
cccacgcgtccgggaaccaagtttaaaactattttaagtgatcgtaattaactgtcaataagaagcccaagcaaaacattgcagcttcaccattttgtaaattttgatttcacatagtaatgtgtttatgattc

SEQ ID NO: 27902 - DNA, 360 bp, Gossypium hirsutum
  Clone ID: LIB3148-009-Q1-K1-A10
ccttaccagacagaatttgctgtcaggtttcttaacatagctgaggtaaagagagcattaggagtgaatgaatccatggttttcgaggagtgcagcgatgttgttggggatgtattgcatgaagatgtgatgaagagcgtgaagtacatggtggagttcttggtgaagaatagcaaggtactgttgtatcaagggctatatgatttaagggatggtgtggtatcaacagaggcatgggtgaagaccatgaaatgggaagggattgagaagttcaagatggctgatagagtgatttggaaagtaaacggagagcttgcagggtacctgcaaaaatgggggagcttgaccaaatgtgtagtt

SEQ ID NO: 27903 - DNA, 335 bp, Gossypium hirsutum
  Clone ID: LIB3148-009-Q1-K1-A11
gttctgtccactcttattttcctggagaaacttgtgtggtggagctcaagaaatggagaagaaagtgtgccttttgtagtttgcagcgatccttccatagatggggcacttgcttctcaagcttcaattcagtcatctttcgatgaaacggctcaaaatgaagcgaaccatgaagctattgtccggaatttgaggcacaaaagagtgttccttgagcagtctggtgctagctgcatagttatgccgtgccatatctcaaatgcatggcatgaacagatatcagagggctgctcactgccattttttcatattggtgaatgtgctgctaaggagct

SEQ ID NO: 27904 - DNA, 177 bp, Gossypium hirsutum
  Clone ID: LIB3148-009-Q1-K1-A12
gttgccgccacggttacttggtgcttgccaatagatagagtgaagtactaatatttacttgtttttctgtccagtgtgagcatctctgctatctcaggatatattgtgactattacataattaatgtaaggaagtgagtcagattcctaattaatgagaagaagctccttttcgttt

SEQ ID NO: 27905 - DNA, 413 bp, Gossypium hirsutum
  Clone ID: LIB3148-009-Q1-K1-A2
gcccccccattttccttattatgccttaatcatctctgatagttccctcttccaagttttcacttccaattcgatcaaaaaacccttctttttttccctcatcaatccaccatgggaggaggaaatggccaaaaatccaagatggcccgtgagaagaacttggaaaagcaaaaagctgctggcaaaggaagccagcttgagtctaacaagaaggccatgtccatccagtgcaaggtgtgtatgcaaacattcatgtgtaccacaacggaagtgaaatgccgggagcacgctgaggcgaagcatccaaagtccgacgtgtacgcgtgctttcctcatcttaaaaaataaacatcgaaactccacagaaagaacggagatgtcaagacagcttgtaatgcatatcatctatctat

SEQ ID NO: 27906 - DNA, 436 bp, Gossypium hirsutum
  unsure (1)..(436): unsure at all n locations; Clone ID: LIB3148-009-Q1-K1-A3
acgcccacgcgntccggggtgagacggtcnttcagactccgatcttnntcaccttcattgatgaatgtggtcgaagggtgnntacttagattgacannaagtcagatttctcgcgaaccctcgtgaaccattggaagggtgatgagatggtcagcatgnnaatgagatggcagaaattgggttcttagctttgaggataaanaatcttccaatccatcatattcctggcccagagggtgtccgtggtcgtaattcagacaatacgttgatcaaagaaaaacttggttgggctcctacaatgaggttgaaggatgggctgagaattacatacttctggatcaaggaacaaattgagaaagagaaggctcaaggcatagacctatctgtctatgggtcatccaaggtcgtgggaactcaagcaccagtccagctgggc

SEQ ID NO: 27907 - DNA, 331 bp, Gossypium hirsutum
  Clone ID: LIB3148-009-Q1-K1-A4
cggacgcgtgggcaagtaccgcgagagaataagatgtaaagggataagcaatgaggagtttgaggagtttttggactcgatttctatgttaacaagcccgttgtgtaccggggaaaactgggtggtgcacaccagtgctcaccagatgggaagctgtaggatggggataaatgaagaggaaggtgcagttgatgaaaatggagagagttgggaagctgaaggattgtttgtttgtgatgcaagtgttttgccaagtgctgttggtgtaaatccaatgatcactgtccagtccactgcttattgtctgtcaaagaagattgcagagtcttta

SEQ ID NO: 27908 - DNA, 298 bp, Gossypium hirsutum
  Clone ID: LIB3148-009-Q1-K1-A5
aattcccggcatgttattaataaaaaaaaaaaaaaaaaaaaaaaaaaataaaaattttaattttagggcacacaaaaaaaaaaaaagcgggggggaaaaacacaaacatacaaacgtaataactcttctataatgaaaccaaaagtggcgtcccctgcccgggttttaacatcctttgcgcctgcaaacaccctggcgattcccctcttattctcctaaaaacacatccccttcccgcgaggtggccttttagcaatgaggtaccccccgttcgcccttcttaacagtgccgcagtct

SEQ ID NO: 27909 - DNA, 315 bp, Gossypium hirsutum
  unsure (1)..(315): unsure at all n locations; Clone ID: LIB3148-009-Q1-K1-A6
cccacgcgtccgcccacgcgtccgcaacatcaaccaagttgcctccatagtgatggaagcagaaagtgagcaggaggcggcaaaggcggtggtggaagcggctactgcctcatggaaaaagaagttcccatctccaaaagtagatgactgcaccgtggtttgcctcttcttccacaagaagcaaaagccaagctaaatagttgtgtggtagagaggaacatatgttttcaaacacccgtttgtgagctgtgactaatttgttaaccagcgttaactattctatagattgagatgctttttggtcccccnnaaaaa

SEQ ID NO: 27910 - DNA, 213 bp, Gossypium hirsutum
  Clone ID: LIB3148-009-Q1-K1-A7
aggcctccgaataattcgtatgattaatgttagggttttgtgaacttatataatattttggattaagtatggcttgtaataagaaacgttgtattactataatatatatatatatatatatagccttctacattatatatatgagagttttcaatgctaattagctattgtacataccctttgagatgtggataaataagcaatatctttttt

SEQ ID NO: 27911 - DNA, 424 bp, Gossypium hirsutum
  Clone ID: LIB3148-009-Q1-K1-A8
gggtcgcgccacgcgtccgcttctatctttgtgcccatgctggaatgattggaaccacgaggcctactcattatcatgttctcttagatcagattgggttttcggctgatgatctgcaggaactagtccactctctgtcgtatgtgtatcaaaggagcaccactgccatatctgtagttgctcctatttgctatgcacatttggcagccgcacaggtgggtacattcatgaagtttgaagatgcctcagagacaaactcgagccatggtggagttaccgcacctggagccatttctgtccctcagctgccgaggttgaaggagaacgtctgcaattccatgttcttctgctgatcccccatgttttgtataggcttttggttgttaccaaaatgactgaacgtttttaagttatatgaaagttt

SEQ ID NO: 27912 - DNA, 348 bp, Gossypium hirsutum
  Clone ID: LIB3148-009-Q1-K1-A9
cccacgcgtccgcttaggatttatatttgatttctttgatttcctttcaatttttgcccacccttttaaactggtattgggctgaccttaccaattaaaataaccaggatttaccatagtttgtattatggtgatcaatgtttccaaaattttagcacagggaggttcaagacatgtttgccatcacagattcagtctcttgcttaattaaatagtgcaatgataaccattgcaaattcacttgaattaaatattgtacacaaactgtccaagttgtaacggaagtgatattttggtgatatttgaattcacaccaattagattaataaaatcttaaatttatcaatc

SEQ ID NO: 27913 - DNA, 352 bp, Gossypium hirsutum
  unsure (1)..(352): unsure at all n locations; Clone ID: LIB3148-009-Q1-K1-B1
ggaagcatggcatctgtgggtcgttacaaggccctagtagatcttcgccaatctaaggacgcgcaaggcatatcacttgcggggttcataagttggttgatatggcgctcggcttacttgacgcgtgtggttagttggaggaacaggttctatgtggcagtgaactgggccaccacgctggtctttggcagagacgattccaggataggttgaggcatggcatggcatagtcattgccttgcgctgcacttttaatattttcaatcttatatgctgctataaatctttcatttttgtatggtttattattaacttaataaaatacccagaaaaaggaaacatagattcangc

SEQ ID NO: 27914 - DNA, 208 bp, Gossypium hirsutum
  Clone ID: LIB3148-009-Q1-K1-B10
cccacgcgtccgcccacgcgtccggcagataatcgttccaaacatattatattctaataacttaatgagtattacaataagtttaattattcaacaatcataaatgtattttatttaatgtttggaatattttacaatatgaactctgagaatatgtacaagagaaaaatgagaaaataaataatcttaagcttttctctttatattt

SEQ ID NO: 27915 - DNA, 155 bp, Gossypium hirsutum
  Clone ID: LIB3148-009-Q1-K1-B11
cgcttaattcagcccgtgttatcagttttctctctctttccttgggaagcatacccttttgcaagatctaagctttaatattgaacttgtaagaacttatcaaggagtactcgactttggccacgtgaatttggacattatatgatttttagatt

SEQ ID NO: 27916 - DNA, 335 bp, Gossypium hirsutum
  Clone ID: LIB3148-009-Q1-K1-B12
caaatttgttcaactgggtccaacttgtttaagaggtgaccataatatgtgtttgttgttagttaattaaatagatttagttgattttcatgtgtctttgctcaatttttcccaattttaagatgaatttagagaagcaatggaggtacccatttttctctttgaaatttcatgcacctagaaaaaaaaaaaagggaaaatctggaaagcttataatttgaaaattatgctagtgtttgtgttggtttgaattaaataagcatatttgtcaacattaaatgctttgttatttttgtttgtctcaagttatattttagtcacttatatttgaaatg

SEQ ID NO: 27917 - DNA, 389 bp, Gossypium hirsutum
  unsure (1)..(389): unsure at all n locations; Clone ID: LIB3148-009-Q1-K1-B2
ccaagagtttgatgtggtgggttggtgaatgctgaacaagatgaagtatccaactctttccaagatggctcgtgacattttgtcgattccggtgtctgctgctgcccccgaatcaatctttgatatcacagacaagcaactagatgaatatcgtagctctttgcgaccggagacagtggaagcactaatctgtgccaaggactggctacattttggatcttctgatgtttcaaatgcgcttgttaaaatggaattttagatgtagatgatattccagagtatcatgtttatggacatgtttcactgttaggcctctatttgtacaattagaaagatttgtttggatgcttagagtattttttcttaaaaaaaaaaaaaaaaaaanaaaa

SEQ ID NO: 27918 - DNA, 111 bp, Gossypium hirsutum
  Clone ID: LIB3148-009-Q1-K1-B3
aaaaattttgaactttaggatgtctaccttaaaaaataaaaaaaaaaaataaaaaaaaacaagggggggaaaaaaaaaagaaaagacaatataaaaaaaacaaaataacat

SEQ ID NO: 27919 - DNA, 314 bp, Gossypium hirsutum
  Clone ID: LIB3148-009-Q1-K1-B4
gtcccataacaaaaactaggcttgatagtggcaataataacagtcattatgaagaatgttatacaaggcgggccaggatccctttccttttggcaaagaagaaaaagaagatcatggtggcatcatcagatcatcatcatcaccaccaccaccatcatcatgctaatattgctttgaagagaagcaagtcaactacagctcccaggagaggccggttcttggatggtgaagtagataatggtggaggcttcagtcccagaaaaagaagtggtttttggtcatttctctatctttcttccaagagccatagttcc

SEQ ID NO: 27920 - DNA, 370 bp, Gossypium hirsutum
  Clone ID: LIB3148-009-Q1-K1-B5
cccacgcgtccgaatggacattcctacttcaatttagtactgatcaccaatgtttgaggtgctggggatgtacattcagtatccattaaagggtcaaagaccagatggcaagcaatgtcaaggaactggggccagaactggcaaagcaattcttaccttaatggccaaagcctctctttcatcggcacgaccagtaacggacacagtgttgtttctttcgacgttgctccatccggttggtcctttggacagacttacactggaggccagtttggggctaccaaaatataacagccccttgctatatactatatgatattatagtaaaaatatgtctgaagaaaaacttaagcgagttttttttttttaa

SEQ ID NO: 27921 - DNA, 268 bp, Gossypium hirsutum
  unsure (1)..(268): unsure at all n locations; Clone ID: LIB3148-009-Q1-K1-B6
aaaattcttgcgacatatataaatcatcaatttgttggcctgcnggaaaaaaaaaaaaagggaagaggaaaaaaaaaaaaataaatacggccggccgttttaaagatacacaaatttaataacgcttccttgcaaaaaatatagtttttttttagtgtacctttaattaaaattaattgaccaaagggggccccctttttaaagtggcaaacttttggccctccccaattaaattaattttttttttttgcgctttccaaaatctaat

SEQ ID NO: 27922 - DNA, 160 bp, Gossypium hirsutum
  Clone ID: LIB3148-009-Q1-K1-B7
ctttgtgctttaagtagggatttagtgatcattttctttcttttcccccctactttttcaaggttttccagttttcaagtcttgcaagtgtaatctattgaacgaacttgagaacagattctgtttcttattaatctgatgttttacatgtttcactgcc

SEQ ID NO: 27923 - DNA, 322 bp, Gossypium hirsutum
  Clone ID: LIB3148-009-Q1-K1-B8
cccacgcgtccgcccacgcgtccggtgagggtagaaatggtttctctgaagctacagaagcggctctccgcgagcgttctaaagtgtggaaaaggaaaggtttggctcgatcctaatgaagtcaacgagatctctatggcaaactcccgccagaacataaggaagttggttaaagatggttttatcatcaggaagccaaccaagattcactctcgatctcgtgctcgtcgcatgaaggaagccaagagaaagggacgtcactctggatatggtaagcgcaagggtacaagggaggcatggttgcccacaaagatcttgtgga

SEQ ID NO: 27924 - DNA, 169 bp, Gossypium hirsutum
  Clone ID: LIB3148-009-Q1-K1-C1
aaaaaaaaaaaaaaaaaaaaaaaaaaaaaattatatttaaaaaaaaaaaaaaaaaaatgggggggcggtttaaaaaaaaaaaacattcataacacatgcatacatgggcgttcgtttttttataaagtcaatttatttgcacgtcgttgaccactaatttacatggtat

SEQ ID NO: 27925 - DNA, 338 bp, Gossypium hirsutum
  Clone ID: LIB3148-009-Q1-K1-C10
gggagattctggatgcagctttgctcaacatgcggattcacggtcgtatagctgtttgcggaatggtgtcgctacatagtatctccgatccgaaagggatccacaatttgtattgtgttgtaccaaagcgcatcaagatgcaaggattcttgcaaagcgactacttagataaattccctgaatttttagaacatgtcactaagaacttcaaagaggggaagattgtgtacattgaagacatgaatgacggtttagagagtggtccagctgcttttgttggactgttttcaggccaaaatattggcaagcaggtcatatgtgtagccagagactgagct

SEQ ID NO: 27926 - DNA, 388 bp, Gossypium hirsutum
  Clone ID: LIB3148-009-Q1-K1-C11
cccacagtagcgtttagcctgccttgacccacagagatggcaactaagcagagggtaacaattgttgttgccaccgtctttgtgctaacattctgcagggtggcgacgggacaggaaccggcagcggtggggttggggttgggaccatcagcagaggcaccgacggcggattgttttacgaacttgttgaacttatcggattgcttgacgttcgtggaggcagggagcaatctaacgaagccggtgaaggcatgctgtccggagctggcggggttagtggaaagcagtccacaatgtttgtgcaatctattgggtaaaaacgcaaccgcagtggttgggatggacattgatatgaagagagctctgaatcttccccacagttgtaatg

SEQ ID NO: 27927 - DNA, 205 bp, Gossypium hirsutum
  unsure (1)..(205): unsure at all n locations; Clone ID: LIB3148-009-Q1-K1-C12
caaaaagcaggactagggttttttcctttttaaaaaaaacaagagtgtgttttcccttgtctagttgcgtgcttagatactaattaacatttgatttgtttacattaaaactctgaacttgcatttagctttgttgggtattaatttgtaagatccatgcattggttggtaaaaccaatcttttcaaaaaaggtactttttnttt

SEQ ID NO: 27928 - DNA, 109 bp, Gossypium hirsutum
  Clone ID: LIB3148-009-Q1-K1-C2
agttgatgttgtttgcaagtgtacaacttatagtatgtctcatgggtaggtttgctattgttggccatgagagtgttgtctaaatgtaaaatcaattctcttgttctcc

SEQ ID NO: 27929 - DNA, 414 bp, Gossypium hirsutum
  Clone ID: LIB3148-009-Q1-K1-C3
gaattgcgctcctttctcccaactctagacgctaggctgagtttaggcagaccaaagaacagttctgttcacttttcaggtaaaagaaaaaagaaaatgaagaagccaaatcgtcgttctaagcaaaagagcggctccgccgattcttctacttcgcctttgatcgtatcgggtgagaagggaaatccggctaataggatcagagatttggagctagaaaatgagactcttaagagggcgattgaggagctaaggagcaaagtgtttgacgttacaccaaactcctgtgttggtgttcaaaaactggatcaagggcattctcgaaattcagagacctctccgaagattgtggagttgaggaaactaggcatacagtctcaactcttcggcaaaaaagcctaaatcagatgaaat

SEQ ID NO: 27930 - DNA, 362 bp, Gossypium hirsutum
  Clone ID: LIB3148-009-Q1-K1-C4
ggaattcggtcgcccagctccggaaagctatgagcttctgttctttgtgatgctgaggttgctcttatcatcttctctagtcgcggcaagctctacgagtttggcagttcacgtatgagcaagacccttgagcgataccagcgttgctgctttacttctcaagacaacagctcttggacgcgaaacacagaattggtaccaagaggtaaccaagttaaaggcaaaatatgaagcactgcagcgcactcaaaggcatttgcttggagaagatcttggaccattgagtgttaaggatgctgagaaccttgagaaacagcttgaaggagctcttgcactggctagacaaaggaagacacacatca

SEQ ID NO: 27931 - DNA, 380 bp, Gossypium hirsutum
  unsure (1)..(380): unsure at all n locations; Clone ID: LIB3148-009-Q1-K1-C6
cccacgcgtccgggagtatcctagatgacacagggttctcttttgtgaagtgtaaggtgacaggggcaggggctttatatttagggagggcatggggtcctttctcgagggtggtctttgcttacacttacatggacaacatcatactgcctaagggctggtataattggggtgaccctaaccgtgagatgacggtgttctatggacagtacaaatgcacggggccaggagcaagctttgcaggcagggtttcatggtcaagggaacttacagatgaggaagctaaaccttttatttctcttagtttcattgatggctctgaatggatcanattataattatacaatgatccatcaatttttatttttttaatgtatatc

SEQ ID NO: 27932 - DNA, 362 bp, Gossypium hirsutum
  Clone ID: LIB3148-009-Q1-K1-C7
cttagaagggtttggttgtaaactattgttgctttttccgatgagcaaattagcatttatgaaaaatagaagaaggggatagctggaggtttatgatgaatatgaagccatcggaggacatagatggagatgatgaagataactaattaagaagaaataattttaaaaagaaagtggaaattcatactgtagatatctacacatacggtttttaactaattgcaggcaagtgatggatccatatgatgtttgatgttagatttcattacttcctgaagaagtaaaaaccattataatttgtgttggaagtttatgtaagaacagacttctttttcttaatgaaaatctcatttatcttcttt

SEQ ID NO: 27933 - DNA, 173 bp, Gossypium hirsutum
  Clone ID: LIB3148-009-Q1-K1-C8
cttgtaataatttctaagttgtattgcagtcccaaccatgaacttgttttaaaaaggaaagggaaaaaaaaaaaaaaaaaaaaaaaaaagggagggcgaaaaaaagagaccaaaaaaaaaaaacacaagcaagcgacgaaaaaaaaaaaactataggggaacctaaattggaa

SEQ ID NO: 27934 - DNA, 246 bp, Gossypium hirsutum
  Clone ID: LIB3148-009-Q1-K1-D1
agaaggtcgaaaagaaggaaaagtccgatgttgatttgggtttcagcctcttcaattaagcgcaagtaatgcaaatgtcaaggtttttcttatgcggttagtgcttttatttcaagcggtatatgattttgtatgtttgttactctctggtcgaaagttgtttctttatcaacctttaggttcgagttttctttggaaaatgtagttaaagataatccattcaagttgtaactttaattttggatt

SEQ ID NO: 27935 - DNA, 350 bp, Gossypium hirsutum
  unsure (1)..(350): unsure at all n locations; Clone ID: LIB3148-009-Q1-K1-D10
cccacgcgtccggggttcgatggctaaccaatttgttagccaaaagcagcttgaatatgattgattaaaaggcaactacatcattatttttttttaattgagcaatgattcggctgagtcgacacaggtgagtcaacttagtggcgagggagctcaagcaggattttgtattgaggtgtcttaaaaaagatattctgttattggattggaatttggaagttaaatgtgcatttccattttctcttaaattgacgaggaaaacataattcgacaagattttccatttcagagcnnannananaaannnaaaanaaaaaaaaaaaaaaanannnnaaaaannnnnnnnnnna

SEQ ID NO: 27936 - DNA, 445 bp, Gossypium hirsutum
  unsure (1)..(445): unsure at all n locations; Clone ID: LIB3148-009-Q1-K1-D12
gtccggaacaatcgataangttcaagggctaataagaattcgtattcagtcattatgtgttgccaattaatgatgcctnntatgttatgaatgcnnctgggcagaccaaactnngcaagccaaagatgtnngattgannattttatggggacntnnttgatgggagctttccacaagagcttctggaattgggaaaangatctnctcnntgctgctttgcttgggncctcgcttctgaaaagatgnngtcagcctacgtggtcgatggaaaaggtgaaaagctctgaatgtggagggtgcgccatctgacttcaaggtttctggtgccgaggttattttggagcagatataaagagggtatggtatcttttgtttattccactcccaagaggtacgggggctctttgaggtaggaaaataaaatggttaagagcacttaataagt

SEQ ID NO: 27937 - DNA, 226 bp, Gossypium hirsutum
  Clone ID: LIB3148-009-Q1-K1-D2
cccacgcgtccgctttctttgttcctctgcccattggatgtggggggcaatggaaagccactccatttgagcattgaggaaagtatagatttgttcagagaaaaaaaaaagaaaaaagaactacaccatgaatttagataccgatgtattttctgatgtcggaaattgtagagttaagatgatagggcgaaaagcctattgaattgaaaatgaaattcttttactt

SEQ ID NO: 27938 - DNA, 310 bp, Gossypium hirsutum
  Clone ID: LIB3148-009-Q1-K1-D3
cccacgcgttcgcccacgcgtccgctttattttgttgtctgttacggataaaatataggcaggggtaaaagaaagtattctcaaaacagttgttgataaatgaatttcagatatgtaatgttggaagaattggcttaataataaataaatataaaaaaaaaaataaataaataataattaaaatgaaaaaaaataaaatattaaatgaacataataataggaaaagagttactgatgatggaataattaatgatggaaaaaagttaggattttggtattttttttttaattatttgggggggggcctttt

SEQ ID NO: 27939 - DNA, 254 bp, Gossypium hirsutum
  Clone ID: LIB3148-009-Q1-K1-D4
cgttacgattatttattcaatcaattccatcgcctaaataatttaagtacatgttttgtacttttgatgtaaaagacatgttatcttaaataagtttacttttcatgtaaaagacgtgttgtctcaaataagtttcaaaatataaaatgtttgttaaaaaaaacaagattatgaattgaggtgtcttaaaaaaaaaaaaaaaaaaaaaaaaaaaaaaaaaaaaaaaaaaaaaaaaataaaaaattttatattgg

SEQ ID NO: 27940 - DNA, 100 bp, Gossypium hirsutum
  Clone ID: LIB3148-009-Q1-K1-D5
cccacgcgtccggcgtttacaacttggaattcactttcctagttccagtcggccgatacgcgtgggttttagaaggatgactcaacaaaaaacccaggaa

SEQ ID NO: 27941 - DNA, 198 bp, Gossypium hirsutum
  Clone ID: LIB3148-009-Q1-K1-D6
atgcaggcatggatggggatttcattgtaaaccttgggttctgtaaaatttttctcaaaaaggtaccctatagtaggatatgggtggactggagattgatttaatttacataaaaaaaaattcataatggctgttaatttgagtagacaaaaggcatgtgaggaacagggttttacattatttgtgatctggttggtg

SEQ ID NO: 27942 - DNA, 402 bp, Gossypium hirsutum
  Clone ID: LIB3148-009-Q1-K1-D7
gtggattggaggattatgccctgcatggtatcgaaaacccggatcttagatatgaccaaacattgagttatcctggccaagtcaataattccctaacgtgtgacgcagatatttctcagacttttggtgacgaggatcatcttggatattttgatggtgatcttcattcccagggccttggtttggaatcacaagcggatctacaaactgctgttgacggattccttgtgcaacgtacagttgctgacccagcgaagacgagatggaccaaggtttttagtgtactgaagtggttctctatcaaaagaaaagttaaagaaaaatttctaggtctgagatatggcactggactttaatacttttgcagctgcagtgggaaatagtaggggggagccaagtgct

SEQ ID NO: 27943 - DNA, 397 bp, Gossypium hirsutum
  Clone ID: LIB3148-009-Q1-K1-D8
aactccctcctttaagccttaactgcattttggtgctttttaacattttgcttgttataatgctacatcagtgttctcccttgtatgtttgatgctcatgagttctgcaaatgtgcactgcagatgtcttactgctggttggctatgttgcaactatcaatcccttttaattttcctgttaattttttgcttttcactggccatcttcatggtagttagttactgctgctggtctcattactgatggtaaaaagttgggttttggtatcttatttgaattatttgtagaatttgaatcataaaaacattgtcaagtatcttggatcattgaagacaacaactcacctgcatataatccttgagtatgtggagaacggttcacttgcaaacattatca

SEQ ID NO: 27944 - DNA, 339 bp, Gossypium hirsutum
  Clone ID: LIB3148-009-Q1-K1-D9
tattttttgagcgatttccttttgaaagattgatattgcgtctcctctcccgactctccagatgagaccattaagaaggagtcctttcgttgcccaaatacttctccagatatgatacatcatgttccatgaagttccccaagaaactaactaactgggcagccaagatttcagaaaaaaggccaatagggacatcatgaacctgaacctaaaaaggtgtcagaaatggagacatgtaacggatcctcccctaatttcaatttgtaaaggaccagcagatggaaccttttaaaaccctgttcattccatgatgtgaaagaattgaaacaaatacttttt

SEQ ID NO: 27945 - DNA, 283 bp, Gossypium hirsutum
  Clone ID: LIB3148-009-Q1-K1-E1
agttaatgcctgcctactggaagacaacagtatgtatgaattatttaataaaatgagtaggagctgtggcatgtccaaatgtatgaagtatttaataaaatgagtaggagatgtggcatgtccatcaaacttccgaatacattgttgtataatataggtgatatttacgagtactaagagattctgtgatcgttgcatcatcttttgtatcatcaacctatggtctttggtaagggaatcatatttgtagggagtaatatgatgaaatctccctttgttgtgt

SEQ ID NO: 27946 - DNA, 294 bp, Gossypium hirsutum
  Clone ID: LIB3148-009-Q1-K1-E10
ataaaaaaaattaaaattaaaatttttttttttaaaaaaaaaaaaaaaaaaaaaagagaaaaggaaaattttaaaataaaataattataattaaaaaaaaataaaggttggtgggcggccctttttaaggtttccatttttctttcccctcctttctaccttttttttttttttttgttgctccttttttcaattcccttgcctccgtttttcccccttgggccttggaaacccttcgcttttctcctttttttccctttttccccctttccctttttgcccgtttgctttttt

SEQ ID NO: 27947 - DNA, 351 bp, Gossypium hirsutum
  Clone ID: LIB3148-009-Q1-K1-E11
cccacgcgtccggcatcttagagttccagcaattttgttgtcaaaatagtgatatgtataacacatatatattagtaacttttgaacgttacgttcatatggaagacgccatttttgtagatacttttgaaagatatagatcatggttaaggtgtttcagtggtccaaaatacgatctggcaatggctcatctctttctttggtgtggaatgagccctttgctgccttattatcagccatggatttctcttggaatattatatgaataagatggttgaaagaaagtctaaattagttatttaaaatgatactaattttaatttcattaaataaattttcagtctttgattt

SEQ ID NO: 27948 - DNA, 117 bp, Gossypium hirsutum
  Clone ID: LIB3148-009-Q1-K1-E12
gttttataagagtgtcagaagaaaatatttttctttaagttggttattttttctttaaaagctttcctgaaccagattcatgtttttttagtatgatttttagttacttttgtcttg

SEQ ID NO: 27949 - DNA, 390 bp, Gossypium hirsutum
  Clone ID: LIB3148-009-Q1-K1-E2
cttcttcaaagaacaatgatgaagttgatggaaaaccgggacctggtactctttttgtcaaggtcagtatggatggagctccttatctgaggaaggtagatttgagaatgtattcaacttaccaggaactgtcttctgctcttgagaagatgttcagctgtttcacccttggtcaatgtggggctcatggtactcctgggaaggaaatcttgagtgagagcaagttgaaggatcttttgcatggatcggaatatgtgcttacatatgaagataaagatggtgactggatgctggttggggatgttccatgggagatgtttattgaaacatgcaggaggttgaaaataatgaagagtgctgatgcaatcggattagctcctaaagcaatgg

SEQ ID NO: 27950 - DNA, 416 bp, Gossypium hirsutum
  unsure (1)..(416): unsure at all n locations; Clone ID: LIB3148-009-Q1-K1-E3
aggggatgttatctgccatggggatgcaaagattgtaaaggaaggatacaaaagtttccctagtggtcatacttcatggtcctttgcaggtctttgtttcctttcgttgtacttgtcgggaaagctaagagcattcaatcgcggaggcaatgtctcgaaactttgtatcgtgattttcccggtacttgccgctgttctcgtgggtatttctcgagtggacgattactggcatcattggacggatgtttttgccggagctcttataggaacgtccatggcagcattttgttacctacaattctttccctgtcctcattatgaagatggttgggcacctcatgcatactntaagatgatntgcggaagacanagtgatgaaagtncagaaagcacagtcagatcttcaagcaagaatg

SEQ ID NO: 27951 - DNA, 290 bp, Gossypium hirsutum
  Clone ID: LIB3148-009-Q1-K1-E4
acgggcatgttgctgggaacacttcttcaaactgttacacttattattatcacctggaaaactgattgggataagcaggttctcttggctcattcacgagttaacaagtggtttgtaccagaatcccgggaaacaaacagcaaccaagaaaatggtgcttgaaggggtcaatcttgttatttttcctaatggacttatatttttttgttgctatatgtcatttcttgaaacgatcgacgcatctgcgttaggattttgatttcccatgattttaagaaaagttttggtgc

SEQ ID NO: 27952 - DNA, 174 bp, Gossypium hirsutum
  Clone ID: LIB3148-009-Q1-K1-E5
cccacgcgtccgcccacgcgtccgcccacgcgtccggtttttgcttagaaaacaaaggaaacccccgaaaaagaccagactagccatttttttcttttttcctctgtagggctatgattaagtgaagcagagtccatacctatcttcttcgtcaacttcattgttgttgtagtg

SEQ ID NO: 27953 - DNA, 364 bp, Gossypium hirsutum
  Clone ID: LIB3148-009-Q1-K1-E6
ggcaactgatggtgttgtgagacgtagtattcccctctgctgctggacaagctgttcagcttcttgtatctcgtcttttttgggcatgatagatgcttgtttttcttactttcgccatgaaaataaactcgcttatgcgaacattttacgtgagaaagtgacagttcagttgtatagtgattttccttagttttcaattggctcgtggactgtaccccttgagaattgatacaaatagggttgttcattttgttagttctgttaaatatttaaccgatattattgagcttgtagtgcgcaaaggttcggtaataccggtcattttcagttcaaaatatagtcgatattccggaaagttttattt

SEQ ID NO: 27954 - DNA, 275 bp, Gossypium hirsutum
  unsure (1)..(275): unsure at all n locations; Clone ID: LIB3148-009-Q1-K1-E7
cccacgcgtccgaaataagcattatgatctgtagttgcctattgtaatagtttataggcacttctgactgtaaattggccagaatgttctcctcgccaaacttgaaagtcgccatgttcttcttctgccaaaggaatttgcagaatcttttgtggaatattttctaaaaaggtattttcaattnaaaaaaaaaaaaaaaaaaaaaaaaaaaaaaaaaaaaaaaaaaaaaaaaaaaaaaaaaaaaaaaaaaaaaacnncccnacaaaaaaaaacaa

SEQ ID NO: 27955 - DNA, 382 bp, Gossypium hirsutum
  Clone ID: LIB3148-009-Q1-K1-E8
agaagttccatcgatttcagtttagcattcataatgtcaggaagaggaaagggaggcaaggggttgggcaagggaggaacaaagcgtcaccgtaaggtcctccgtgataatatccagggaattacaaagccggctattcggcgtttggctcgtaggggaggcgtcaagcgcatcagcggcttgatctacgaagaaacccgtggtgttctcaagatcttcttggagaacgtgattcgtgacgctgtcacctataccgagcacgcgaggagaaagactgtgactgctatggatgtggtttatgcgctcaagaggcagggcaggactttgtatggattcggtggttaaatgtgatttagggtttaggttttagaatggtggtgtc

SEQ ID NO: 27956 - DNA, 405 bp, Gossypium hirsutum
  unsure (1)..(405): unsure at all n locations; Clone ID: LIB3148-009-Q1-K1-E9
cccacgcgtccgtgaattctttaaagccattgaagcctgtgccgaggaatacatggaaacgtacaaggctgatctggacaagagacgagcagaaaaacaacgcctagaggaagaacgccggaaagagagcatggataagttgaggagggatatggagcaaacgagaggcgaaaccgttgtcttgagtactggtttgaaagacaaagatggaagaagaaatacaatgatggatcctgaagatgaagtggaagaaccagaagatgaagatgattatgacaggttcaccgacgaggatgaagatcttatccaggaggatgaagatgaagagattgccaggttctccttttaggaattgtttagcaccggcaagtctagcatctacgatcaaatngaactgggatttgt

SEQ ID NO: 27957 - DNA, 374 bp, Gossypium hirsutum
  Clone ID: LIB3148-009-Q1-K1-F1
ggtgatcaggcatgggagccctgttggatgtgaagcagtagagaaagcatatgaaggggaagatgagcatgaagagaatgcatcaatcaagagagaattctctgactttgatctccaagtccatgtggtcaactcaagtgaagaatttgattttggaaccaaaagggttgcttcttcagattcatttgaaactgaagccaaggaagaggttgaaaaggctgttgataagttccaaagtggacatgttagtgatcctgggatgaggagggctgagttctgggcttcacctatgcttaagcgctcgtgttctgatttggagaggaggaatgtgctaagagaggtagctgatcatttccctccatctcagtcatttg

SEQ ID NO: 27958 - DNA, 372 bp, Gossypium hirsutum
  Clone ID: LIB3148-009-Q1-K1-F10
tctggacatttggtacctgagcttgggaagcttgagcatttgcagtatctggagctttacaaaaatgacatccagggaaccatcccaactgaacttgggaacttgaagagcctcattagtttggacctatataacaacaacatctcagggaccattcctccttcactagggaaattgaagtctcttgtatttttacagcttaatgacaacaaattaactggacctatccctaaggaacttgtcggtatttcaagcctcaaagttgttgatgtctcaaacaatgacttgtgtggaacgattcctaccagtggaccgtttgagcacattcctttgaacaactttgagaaaaatccccgactggaaggtcctgag

SEQ ID NO: 27959 - DNA, 142 bp, Gossypium hirsutum
  Clone ID: LIB3148-009-Q1-K1-F11
gaagaacaattgctgtggctagtagccggtactcttttagatcgtaaacatgttgcatatgatatgaatgtttcagaaactaaaatgctgcctacttgaactttttctgtgtaagttgaagtaccaatgcatgttcctctgt

SEQ ID NO: 27960 - DNA, 352 bp, Gossypium hirsutum
  unsure (1)..(352): unsure at all n locations; Clone ID: LIB3148-009-Q1-K1-F12
gtttaatctaaataagccatagggtgagaacttccatgtacctgtataggcaactgtggagaaagaaaatgttaaatatggcagatttatgaattgctcatcattttcgcaaaaaaaaaaaaaaaaaaaaaaaaaaaaaaaaaaaaaaaaaaaaaaaaaaaaaaaaaaaaaaaaaaaaaaaaaaaaaaaaaccccaaaaaaaaaaaaaaaaaaaaaaaaaannnnnnnnnnaaaaaaaaaaaaaaaaaaaaaaaaaaaaaaaaaanggggggcgcccctttaaaagaaccaaattttatttcccgtgtcttgcaaaataaaattttttttttgggcccccaaaaataaaata

SEQ ID NO: 27961 - DNA, 399 bp, Gossypium hirsutum
  Clone ID: LIB3148-009-Q1-K1-F2
ggagattggatgttggtgggagatgtaccatggcatatgtttgttgaatcttgcaaacgcttaaggttaatgaaaagttcagaggcagttggattaggtctaacgacaggtccaaaatactcaagcacaaattaaagaaagaagcctttttaattcaagcatccaagaaagaaatcataaagaattgtacagaggcttttttgctttgtttgaactatttttacctgacgggcagggtttttgactaagatatagactgccaaattgcaagaaacataaattaaataagctgtaattgtagtgcattgatgttgtgggcttttttctccacattacttaatcatctcttcttccttttgtttcacttttcttaataaaaagattcattttcaacttaaa

SEQ ID NO: 27962 - DNA, 402 bp, Gossypium hirsutum
  Clone ID: LIB3148-009-Q1-K1-F4
ctggactgtgcacggactctactggggtagctactcaatacatcgaccagctgtgctcgaggattccatccaggagagtatctcctggatggaaaagggattgattaccattcacatttctcatacttacagcatatcagaggccaaccttgcattctctgcactgagagatagaaaagccatagggaaagtgatgattgtatttgatgatatgggaaggtctaagctttaagcgattaggatttatataagcattccttgctgaagcgccgaatctagaaataatataatatggaaaataacgagggtgtcaatggatgacactttgtttactttcaggatgcagatgattggcatgtaaggtgttgataatgagggtttcaatgatgcactttgttacct

SEQ ID NO: 27963 - DNA, 409 bp, Gossypium hirsutum
  Clone ID: LIB3148-009-Q1-K1-F5
ggttgatttctgcacaactagcaaacgcaagtgaaattactaccggagatgctgtttacgaggagcaagtcagaagtggagatgccagtgcaacagagctttttgagctaggtgccgttatgttgagaaggaaattttacccagctgcaaataagtttttgcttcaggcaatcgaaaaatgggatggagatgatcaagatcttgcccaggtttacaatgcccttggtgtcagttacgttcgggatgggaagcttgagaaaggaatcaatcaatttgaaactgctgtgaagattcaaccaggatatgtcacagcttggaacaatcttggcgatgcatacgaagaagaaaaaagactacaagtctgcactgaaaagcatttgaagaaattattgcttttcgatcctaataa

SEQ ID NO: 27964 - DNA, 372 bp, Gossypium hirsutum
  Clone ID: LIB3148-009-Q1-K1-F9
cccacgcgtccgcccacgcgtccgtaaactttcaagtttgtccgcaaagccgctgagcacaagtgtttgaagagaggagtaaaggaagtagttaaaagtattcggcgtggtcataaggggttatgtgttatagctggaaatatatctcccattgatgtcataactcatgttccaatcctgtgtgaagaggctgacattccctatgtttatgttccctcaaaagaggatcttgcaactgccgggtctaccaagagaccgacatgctgtgttctggtgctaaccaagcccacaaaaggggaactaagtcccgaggaacaacaaaagttaaaagcagattatagccacattgtaaaggatgtatctgagctcaca

SEQ ID NO: 27965 - DNA, 404 bp, Gossypium hirsutum
  unsure (1)..(404): unsure at all n locations; Clone ID: LIB3148-009-Q1-K1-G1
gcagaaacgtgttaacaaaggaaaatcagatccttgtggcaccgttcatattactataggagatggaggcaatagagaaggattagctcaaaagtacattcacccaacaccagagtggtcaatgttccgtgaagcgagctttggtcatggcgagctcaagatagtgaattcaactcatgcattttggagctggcaccggaatgatgacgatgaaccagtaaggtccgatcaggtttggataatctctctcatcggttctggatgtcttgcagaaaaggcttatgaatcaagtaaaattcttgtttctccttaaactaagacttggcggtcagtgtccctagattcgagctaagttgttgctaaacagctngatctgnngtatgtgtatatatacactaatacta

SEQ ID NO: 27966 - DNA, 312 bp, Gossypium hirsutum
  unsure (1)..(312): unsure at all n locations; Clone ID: LIB3148-009-Q1-K1-G11
nncgaacaaaaaaaatctttccagtttctattttttaaaaacaaaactgaaaatgtcttgctgcggaggaaactgtggctccanctctggttgcaagtgtggcaatggctgtggaggatgcaagatgttccctgacataatagagaagactacaactgagactattgttcttggtgtgacaactcaaaaaatgccctttgagggatctgagatgggagttggggttgagaatggattcaagtgtggagacaactgcactttgcacccttgcaattgtaaataagaggggggggaaaatgaacaacaaagaga

SEQ ID NO: 27967 - DNA, 233 bp, Gossypium hirsutum
  Clone ID: LIB3148-009-Q1-K1-G2
cccacgcgtccgaagaaaagcacaactttaaaacgctaacaggagagaaaacgaaatacaaacagaaaaaaaatgaagctagtttggtctccggagacagcatccaaggcttatatcgatactgttaaatcttgtgaacttcatcatgaatctggtgtagcagagcttgtttcagccatggcagccggctggaacgcgagattcattgtggagacatggtcacagggtggcgc

SEQ ID NO: 27968 - DNA, 320 bp, Gossypium hirsutum
  Clone ID: LIB3148-009-Q1-K1-G3
cccacgcgtccgcccacgcgtccggcaaaaataacaggcctctgtaatgatatattgtcaaggatggatgcctgcaaggtctataattatgtctctgtctgtgtcttgtgtaatagaagctttgtttgtggtgaaaataatgtataagccatttggttgggagcaaattgtccttttctccaaaggatttttgctgctcattcatggtgacttggtttatggttttatctgttgttgttaaaatcttataaaaatatatatcggttgctgctcttggtttgtatcaaatcattgtctgaaaatatatggcatcttttatt

SEQ ID NO: 27969 - DNA, 289 bp, Gossypium hirsutum
  Clone ID: LIB3148-009-Q1-K1-G4
gtttcagttacttcccatacaatggctgatgatatgcacatgcgacttctatacctagagaaccgagtggcatttgcaaggttacttttcccgagtgaagcgaaacttgccatggacatcgcacatgcagagagaacctccgagttttctggtctctcatcaaaaggttcaaatgggaacttaagtcaagttgacttgaacgagacgcctgtaatgcagaagaaacgacttcttgcgaagatggaagcccttatgaaaacagtggaaatgggtcggcgttatttcccgc

SEQ ID NO: 27970 - DNA, 294 bp, Gossypium hirsutum
  Clone ID: LIB3148-009-Q1-K1-G5
caacaaaaaaaatctttccagtttctttttttttaaaaccaaaccggaaaatgtcttgctgcggaggaaactgtggctgcagctctggttgcaagtgtggcaatggctgtggaggatgccaggatgttccctgccttattgagaagacctccactggaactattggtcttggtgtgacaactccaaaaaatgcactttgagggatcttggaaaggagtttggggttagaattgattctaatgtggagacaactgcacttgcgacccttgtcagatttgaaaataagaggggggg

SEQ ID NO: 27971 - DNA, 260 bp, Gossypium hirsutum
  unsure (1)..(260): unsure at all n locations; Clone ID: LIB3148-009-Q1-K1-G6
tcgaggacgcgcccgcgtaaaaaagaacctgtttaaaagcatgattttttttatttgtaaagggcattgcttggtggaccttgatggggcctgtttgaatggtgaaagaacttcgcctattatctaaaaaaaaaaaaaaaaaaaaaggggggcccgccttcattccactccccggnnggaaaaaaccgtggggacacgaaaaactttgcctttgccgaacattaattattttgccggaggggnttaaaaaaaaagggggg

SEQ ID NO: 27972 - DNA, 368 bp, Gossypium hirsutum
  Clone ID: LIB3148-009-Q1-K1-G8
cacattcccgctacagaaacccccccccctccaaaaaaaaaaacatggcaaacacccttttagaagctttcaacgtacgagttgtcggctccggcgacagaatccttgtcttggctcacggtttcggtacggaccaatcggtttggcaacggattctcccatttttcacacctaattatcgtataatcctatacgacctcgtttgtgccggcagcgtcaaccccgattacttcgattccactaggtacgacactctcgatgctttcgtcgacgatttgcttaatattcttaaagctctcggcgttcaccgttgcgcttacgtcggccactccgtctccgccatgatcggtatcttggctttcattcgc

SEQ ID NO: 27973 - DNA, 238 bp, Gossypium hirsutum
  Clone ID: LIB3148-009-Q1-K1-G9
actgcgtttacttcgaagaaagactacgggaaagatgaccgggcagcccaatggattctgtgctcagaggagcctacagggcttgatggctgcagacttggatttcaatggaagaagatcgagaacttctttgatagccgatcaggctaggcggcgtgctgaaatagccagacttggggagctacacactttaagaggtcatgtagaatcagttatgaggctaaagaatttggaccgc

SEQ ID NO: 27974 - DNA, 429 bp, Gossypium hirsutum
  Clone ID: LIB3148-009-Q1-K1-H10
gttgctaatgcctaatggatcagaccggatcacattgcaaatgcgacacctgaacagcagaggacgatgcttggtgaaagcttgtacccccttgtggaacggcttgagcgtgatgcagctgccaaggttacaggcatgcttctggagatggaccaaacagaggttttgcatctcctggaatcaccagaagctttgaaggccaaagtagctgaagccatggaggtgttgaggagtgttgctgctcagcaacaggccaacaatcaagccgaccaattggcttcattgtccctgaatgataacctcgtttcctgagtgacttaattcgggtccagtttcttggcaaagaagttgcttaattctttatcaaaactgggctatcttttgttattaagctttaagtttggaacctttatatatttgctttggttt

SEQ ID NO: 27975 - DNA, 385 bp, Gossypium hirsutum
  Clone ID: LIB3148-009-Q1-K1-H11
aaaaaaaaaaaaaaaaaaaaaaattaaaatttaaaaaaaaaaaaaaaaaaaaaaagcgaacagaagaaattcaaaaatacaaacacatacatacggggcgccccttctataggttccaacctttcgtccccgttcatgcgacgttatttctcttctttagggccaccaaaatccatttccctccccgactttatacaccggccgtactggaaaaacccgcccgttacccaattataaaggttggccgaaaatcccctttttaccaactggcgtaataactaaaaggcccgacccactcgcccttcccaaaattatcccaccctgaatgggaaatgggacccccctctgaacccccattaaaccccgcgggtgggggggtaccccc

SEQ ID NO: 27976 - DNA, 344 bp, Gossypium hirsutum
  Clone ID: LIB3148-009-Q1-K1-H12
cccacgcgtccgtatcctgcttcatcatttccaaattttgattattttcttcttttttattgtatttttatttaaaatttgaaactgctaacattattacattttcattagcctcaagagaagaaaaaaaaatgtcatcgaattcaatgtctgcttcatggacagccaagcaaaacaaagatttcgaaagggctttagctgtttacgacaaggacacaccagatcgttggtacaatgttgctaaagctgtgggagggaaaactgttgaggaagtgaagaagcactatgagcttcttctggaagatgttagacacatcgagtcgggtcgggttcctttccccgac

SEQ ID NO: 27977 - DNA, 360 bp, Gossypium hirsutum
  Clone ID: LIB3148-009-Q1-K1-H2
caaactcatcggtagagaagacttacgagttaccagacggtcagattattaccatcggggccgagcgttttagatgccctgaagtgcttttccaaccatcgatgatcggtatggaagctgcaggcatccacgagacaacttacaactcgataatgaaatgcgacgtcgatattaggaaagacttgtacggtaacattgtactcagtggtggtacaactatgttccccggtatcgctgatagaatgaccaaggagatctcggctttagctcctagcagcatgaagattaaggttgttgctccacctgagaggaagtatagtgtctggattggcggctcgatcttggcttcccttagcacat

SEQ ID NO: 27978 - DNA, 372 bp, Gossypium hirsutum
  Clone ID: LIB3148-009-Q1-K1-H4
aaaaaagaaatcctaataatttgaaaataaaactgtgaaactacgagtactaatacaactataggaaggattaaagggaaaaaaacctcatcaaagaaaataaaaagaataaacaataaagtaagaataaaattatactaagcacaataataatatgaaacctaataataataataataataacaaactagtaataacagtataataaaaataataaataataaataataaataaaataaaataataaatggggaggggccaaatggttgatgagggtcggtcgacgaggcatggggctccgacaacggcgagacgggtgacgacgatgaaaggccagtgactgggagaaaggaaaaggagaccgggttgat

SEQ ID NO: 27979 - DNA, 342 bp, Gossypium hirsutum
  unsure (1)..(342): unsure at all n locations; Clone ID: LIB3148-009-Q1-K1-H5
ccacgcccccggccgaatcgactcctccggtatctcctttttctggaggaagcagagagtcgtatcggtttcggagagggtcaacatcagatgcatacgagaaggggaaggagggtggaggtaggagccttgctcctccttacgacgtgtgagatgtgaacctctcctctcctctctgctgatcccccaattcgccgacaagtcaatattaatttgcatagtttctacgtttatacagctgaactttataatgttaattagagtttgcccactttgttttttttgcatgcatgtatgtatgtatttatgtgtacttgttttggcaatgtaactacttttntc

SEQ ID NO: 27980 - DNA, 235 bp, Gossypium hirsutum
  Clone ID: LIB3148-009-Q1-K1-H6
tctcactccaataataaatgttatttttgttttaaaaaaaaaaaaaaaaataaaaaaaaacgaaatttttattaaaaaataaaaaaaaacaaaaaaaaaaaaaaaaaaaaaaaaactgccggcccttttaaaaaactcccattttacttccccgtctgttccatggactgcctatcataacaaagattttaaattcacttctctctccttacgttttacaacacaccaaaccgga

SEQ ID NO: 27981 - DNA, 411 bp, Gossypium hirsutum
  Clone ID: LIB3148-009-Q1-K1-H7
gatatggagttttgattctcttctgaggcggaaattgttggtctctaaattaaaggttatactagcttataactggttgaaaatacaaatacattaaacataagttggtagttctagtgctatatcttggtcgcaattgcagacaaaagtaaatattgcccattttcaattaatcagagaacgagcattggtggcatgaaaaaaaaaaggaaaaagagaaagaccattatgagcaattgaagtttctccggatgcggcaaaattaattttgttttttgaattgagttatgagaatcatgtgctctcgatttatttttacccgaaaaccagatcttttttttatttttttgatggtggtgtagaaaatgatttagagaaatttcttttactaaattcctgagccttttcttt

SEQ ID NO: 27982 - DNA, 217 bp, Gossypium hirsutum
  Clone ID: LIB3148-009-Q1-K1-H8
cccacgcgtccgtgtcaactggtctatggtctttttaatcataaaatcggtttattattgcatttgattaggaatttttgacccgtagtcaaattgacattgaagcaaaggggtctttcatcatcttcttcaatatggcttttaattactcttctttttttttctgtaataaatcatcaaattgcaaatcccatggaagttcagtattgggtttttg

SEQ ID NO: 27983 - DNA, 349 bp, Gossypium hirsutum
  Clone ID: LIB3148-009-Q1-K1-H9
acacccccaaacgtggatcccaccgcatgcattaggttctttttgtcacattctggaggacttggccctatttttatccaaaaagggggaaagaatcagtcaatcttgcctcgctccagtggttccgttattcggtcaagaattactagttgtttccaaaaaagccatggtcgcccttccatgacacgctctaaatcatcctcatcttcaaaaattattgaaaacagtgtagatcagcgttggattttctgccggagttactagcgaactctttactgttaactggatcagttcttcttcaaaaagagctaattcattttctgcttccataccctcaagtcaccactcg

SEQ ID NO: 27984 - DNA, 418 bp, Gossypium hirsutum
  Clone ID: LIB3148-010-Q1-K1-A1
gagaatagagaaatggtggagggaggaaaaacgccacgaggctatggtactgccggatgtgggaacttcatttgcagatagcatctcagaagagatttgtaattctgcagccaagatggctaacaatttagaggtagatgccctttttgtttacacaaagacaggtcacatggcatctctcctgtcacgttgtcgaccagattgccccatctttgcttttacgaccacaacttctgtcaggagacgtctgaacctacaatggggtctcattccgttccgtctcggcttctccgacgatatggaaagcaaccttaacaaaaccttctcgttactcaaggccaggggaatgatcaaatctggtgacctcgtaattgccgtctcagacatgttgcagtccatccaagtcatgaatgtccct

SEQ ID NO: 27985 - DNA, 274 bp, Gossypium hirsutum
  Clone ID: LIB3148-010-Q1-K1-A11
gtccgtggctgaaggattctagccgggggcggcattttaggtatacaacgtatatggatgcactaagagagatggatgatcctcttacggaggggctcctgttcgccatggtaacttatcatacaggaatctgcgtgcctaggatatgttagacttatacctctaattggttattgacttcatttgctactggatccaaaggtgtttgactctggatattttcatcatttcaggcacgaatgattgatttttattacagtctgattatagtttt

SEQ ID NO: 27986 - DNA, 278 bp, Gossypium hirsutum
  unsure (1)..(278): unsure at all n locations; Clone ID: LIB3148-010-Q1-K1-A12
atttttccttgtcgttaagagtcaatacttttatcgtacccggtgtcagtagaatccttgttttattcggcgcagctcccttcatatacaagctcgcaatatacatatactcagtaacgaggatttcagtttcaaagactatcaagactttgactttgtggttttaagtcaattgaaatctttttaaattataaaatatatagttttattaaaaaaaaaaaaaaaaaaaaaaaaaaaaaaaaaaaaaaaaaaaaaaaaaaaaaaaaaanaaggggggg

SEQ ID NO: 27987 - DNA, 415 bp, Gossypium hirsutum
  unsure (1)..(415): unsure at all n locations; Clone ID: LIB3148-010-Q1-K1-A2
atcttgacccaatgccattcgacatggaacgcgaccttctcactccaacatataagaagaagaggcctcagttgcttaaatattatcagagtgtaatcgatgagatgtacaagagtgcaaacaaaccaaatgcttgataaaatgcttccaaaggcgtcggtgatatgttagatgatatggagttaaaacttgtgtattctttggtagtttggactgtacatgtagttccttcatcatcagaatttgtttaccaaaaaccaaattccctttgacacaactttgggaataatattacttggtaagttgtttaatgacccaaatgttaaaagttccaaaattacttatgatccggttttcaagacaactatttatggagttattgattatgatttttttttnaaaaaaaaaannnnna

SEQ ID NO: 27988 - DNA, 90 bp, Gossypium hirsutum
  Clone ID: LIB3148-010-Q1-K1-A3
aaaaaaaaaaaaaaaaaaaaaaaaaaaaaattaaaaaaaaaaaaaaaaaaaaaaaaaaaaagagaaggaaaaaaaaaaaaaaaaaaaaaa

SEQ ID NO: 27989 - DNA, 175 bp, Gossypium hirsutum
  unsure (1)..(175): unsure at all n locations; Clone ID: LIB3148-010-Q1-K1-A4
gtggatttttttttggataagttgttttcttttatctaagaagcaacaaaaatttcactgtcaacttagaatatttttactaaagttaaaatgttaattttattattttaaaaaaaaaaaaanaaaaaaaaaaaaaaaaaaaaanaaanaaaaannaggggggggggtgtgaaaa

SEQ ID NO: 27990 - DNA, 133 bp, Gossypium hirsutum
  Clone ID: LIB3148-010-Q1-K1-A5
cccacgcgtccgcggacgcgtgggcccacgcgtccgcccacgcgtccggggcgctcgcctaaggtctcctcaagtaggagagcctacgtcataatttgtggtagtgggggcctgcgttcgcgcggcccctgtc

SEQ ID NO: 27991 - DNA, 417 bp, Gossypium hirsutum
  Clone ID: LIB3148-010-Q1-K1-A6
cccacgcgtccggagagtgacccttcgtattatcaacttccttatcttgtaagacaaggtgaacagcctagggaaggtttcctgctgcttgtaaatcttcttgaggaccagatgggcggtactgttggttacgtggattggataatgcaaatacatcgacaagtccaacaaaatgcatgatatacgggtaattgttcaagaggttgctaaactttcatagtcttcttgaacttaagaacaactattgttccttcatttgggataacttctagtctagttttcggtagagacaagcaagtttttctagtcaagttctttagtcagtcttagtctcggagttaatggtgtttgagttaggggcttctttttatggaattacattgtaatgaatcatcatttgcttttgattctgattac

SEQ ID NO: 27992 - DNA, 210 bp, Gossypium hirsutum
  Clone ID: LIB3148-010-Q1-K1-A7
aaaggttgcatcaaaatagatagttgctatcgtacttcttgtgttctgtctctgacgtctgttatcacctaaggtagatggtctttcttccattccatcaatttctgctatgtaactgtggactcgttttgacaactctcgccctgtggttgttttccccttgtcgaaaccattattaaatttgaaaaccaaacgaggatcgactttttg

SEQ ID NO: 27993 - DNA, 415 bp, Gossypium hirsutum
  unsure (1)..(415): unsure at all n locations; Clone ID: LIB3148-010-Q1-K1-A8
atttggaagtgcatacaacatgggggcttaagatggcgtttgttgtggacaatggaaaaggcccaaatgagtctcttctaccacctccaagtgatttccccaagtgctgaattaaccaaaccaaaatgctgaggaatggagaagtagctaaaaggaaacaaaaggaggtggtagaaaaggcccaaatgagtctcttctaccacctccaagtgatttccccaagtgctgaattaaccaaaccaaaatgctgaggaatggagaagtagctaaaaggaaacaaaaggaaatggaatttttatacaacggcttaaagctataataacaaataagaagagtttattttgagcaagccaaggaaagtttgctccatatggaataaaagagagnctggatttgtttttctttttttctctta

SEQ ID NO: 27994 - DNA, 385 bp, Gossypium hirsutum
  Clone ID: LIB3148-010-Q1-K1-A9
cccacgcgtccgaaaggtcccaaaggaatttactgggagaagatttgggacctttgagcagcaaggaactcgagtcacttgagaaacagcttgattcatcattgaagctaattagatcgacgcggacccaatacatgcttgatcagctcaatgatcttcaaagaaaggaacatcttcttaatgaagccaataagaccctaaaacaaaggttggtggaagggtatcaagtaaattcgttacaattgaatccaaatgcaacggaagacgtcggctatggccgtcaacaggttcatcatcagcctcatggcgatgccttcttccatccattggattgtgagccgactttacaaatcggatatcagcatgatccaatgtcagtggtgac

SEQ ID NO: 27995 - DNA, 291 bp, Gossypium hirsutum
  Clone ID: LIB3148-010-Q1-K1-B1
tgttgacaaggagaaagttggaaaagcagaggaagaaaaaaagggttctgtctacaaggagagagcaaggatcatcgaagactttgcagagctccatcttgatgaatctaccaaggcagaaccttcagtaggtctagttgaatcaacaactgataagcaagcttagaatgatatgaaatgattgcttttgaactttgattttccttcaatgccttgattctttcattgttgtacaatacactgttacatgggattgtaattcaaaggaatttctgatatatattattatat

SEQ ID NO: 27996 - DNA, 240 bp, Gossypium hirsutum
  Clone ID: LIB3148-010-Q1-K1-B10
cccacgcgtccgaaaagaatggctctatatttgtgttgatttgtgtaacatttggcactgtgtatagatcttgtggttgataaaaaaaaaaaaaaaaaaaaaaaaaaaaaaaaaaaaaaaaaaaagggaaaaaaaaaaagggggaaacattttaaaaaatgcaagctaaaaaaaataggaattctatttgggggcctccaaaaataagtcaacttagaaaaagttcaaaacaacgtcgtt

SEQ ID NO: 27997 - DNA, 404 bp, Gossypium hirsutum
  Clone ID: LIB3148-010-Q1-K1-B11
cggacgcgtgggcggacgcgtgggccggttacctcgatgatgcattgttccccactgaagtccgggtcgagaaattctcaccacattacttggacccgaacttggccatgttccgacaagagatcattgtcgagaagtccaataaccaagtgaagtacggccagaaactcacagtacagatccgtggaaatggcgaaatcgaccaacaaaaacttcaagtgacggtttactcaccaccatttgtgacccatgggatctccatgaatcagagattgattcaattgggaattgtggaatttaacaaaaatgttgctccaaatacaaacaacattgttcttcaagctcccatgaatggcaacattgcgccacctggttattacatgctcttcgtaaactataatggg

SEQ ID NO: 27998 - DNA, 363 bp, Gossypium hirsutum
  Clone ID: LIB3148-010-Q1-K1-B12
aactcccaaacccactaaactaagagtccccaacatcaccggcgcggtgcacaactctagacccacctacaacaacaattacaaaagaccagcaacagccaccagcacctaaatcaacaccacctgatcttcttagcatttaaggatgttaatgttccaaaggggttgtagttttattactacttagtgttctttttgctctaactttaaggtgtttaaacgtttgttttttttctttttttgtgtatagtaggattggtgggggtattttgttataaaaaaagaagaagcttgtctttcatcatgctgtactgctagttttctcccctttctgttttgagtttatgaaacagctgttttatc

SEQ ID NO: 27999 - DNA, 280 bp, Gossypium hirsutum
  Clone ID: LIB3148-010-Q1-K1-B2
cacaaatctagagaaaattttgaactgactaatatagtctttcctcttcattatgttcttgaatttatcagtttaaatatttgctattacttataaggtttattatatttataaataagaattttaattttattaaaaaaattggcttaaaaatttatttgataataaaagtcgtcatatttaaaaataaattttaattttattaaaagaatttaaataataaaaaaactaaattttatattgaattattttatatttaaattagtatgtttccgttaat

SEQ ID NO: 28000 - DNA, 234 bp, Gossypium hirsutum
  unsure (1)..(234): unsure at all n locations; Clone ID: LIB3148-010-Q1-K1-B3
cccacgcgtctnnnacattaatttaaagttttatttccagcttctggacaaaaaacatatgaaagaaaattttttttaatatattctcccccaactcaaaaaaattcaataaaaactaaaaaaataaacaaacaaacaaatattcataaccttacctgtcgcccttcctctagctatcaatctaaaccccccttccaagcaacgtaaaactttttttacatcctccccaaaatc

SEQ ID NO: 28001 - DNA, 239 bp, Gossypium hirsutum
  Clone ID: LIB3148-010-Q1-K1-B4
aaaaaaaaaaaaaaaaaaaaaaaaaaaaaaaaaaaaaaaaaaaaaaaaaaaaaaaaaaaaaaaaaaaaaaaaaaaaaaaaaaaaaaaaaaaaaaaaaaaaaaaaaaaaaaaaaaaaaaggggggggccgttttaaaaaattaaaatttaattacggtttaatgaaaattaaaattttttttataggtgaactaaaataaaataaattggccgggttttaaaaaagttgtaaatggaaaa

SEQ ID NO: 28002 - DNA, 161 bp, Gossypium hirsutum
  Clone ID: LIB3148-010-Q1-K1-B5
gggaaagaaaaaaaaatagaaaatgtactttgtaactgtatttcgtatgtgatatatataatgtatcgtaatctttaattttttagtgatgctactacgttttatacgagtctgtaatgacaatagctttcccttttccatatataggaaggctcgtttgg

SEQ ID NO: 28003 - DNA, 201 bp, Gossypium hirsutum
  Clone ID: LIB3148-010-Q1-K1-B6
cgacgaagccggattctcgacttctagaggcttgagattaagttggaagttttgttggaagtagtgaagtcgttggataatggtgatacataaatatggggattaaaaggcatgtaaagaggatccaagtaaatgtttgatgtaaaactcctattaggaattttaccaactcaatcaaaaataagtgaaaattttcttttc

SEQ ID NO: 28004 - DNA, 413 bp, Gossypium hirsutum
  Clone ID: LIB3148-010-Q1-K1-B7
gcagaaggcaagcattgcgggaactgctatcatgagcaacagctacgtatctacaggagcttcatggctttcaaacgcattcactgcagttgcgagggcagctgaggacgtaggtatgttgacaaaggagaaagttggaaaagcagaggaagaaaaaaagggttctgtctacaaggagagagcaaggatcatcgaagactttgcagagctccatcttgatgaatctaccaaggcagaaccttcagtaggtctagttgattcaacaactgataagcaagcttagaatgatatgaaatgattgcttttgaactttgattttccttcaatgccttgattctttcattggtgtacaatacacttgtacatgggattggaattcaaaagaaattctgaaatatattattataatgtct

SEQ ID NO: 28005 - DNA, 242 bp, Gossypium hirsutum
  Clone ID: LIB3148-010-Q1-K1-B8
gtaaggttgagaataactcagcttctgccgctatattttctgctgcaatttagttttgtttcggtgtctgtctcttaatgtttttgttagtagttttggggtgccttcacccatacaatcttatcatgcaaggtcatttcagtcttttttagacgcctttttacaatgtacttcgccctccatctgtgttgttaatttttattgtttcgatgaaatgtatttgagtcaacattgatcgtctt

SEQ ID NO: 28006 - DNA, 399 bp, Gossypium hirsutum
  Clone ID: LIB3148-010-Q1-K1-B9
acggtattgtgattctgtgaatggtggaatcatgaatgagaattatgatcctgttgaaagaagacttaaaggtggaaaagagcggaactcgaagggttctcttaagagctcaaaatctctgcaggcaaacaatctccataaccttgcctctggagatgcagctggcattaataaaaacactgtttccaagcaaggtaagactggtgtagcagcatcttcaagtgaggtccgggctttgtccaaggagattaccgatttgaaactctcggttgacctcttggaaaagggaagagatttttacttcgccaaactgcgggacattgaaatactttgtcagtctaccaaagtggagaatcatccgatggcagtagtaataaagaaaatactgtatgcagctga

SEQ ID NO: 28007 - DNA, 394 bp, Gossypium hirsutum
  Clone ID: LIB3148-010-Q1-K1-C1
tacaaacacaaggcaaatgtttgggacgggctaccagcaatttgaggagcaacaaacccagagcttaatcgaccaaagaatcaaggaacatcttggccaagctgcagctttccatcaggttggagctgctttcaatcaacatctaatggctcagagacctcgacttcctgttcttccgactcctgttatgcctattccgagggttgcacctttacgtataaatcaaccaatggtccctgggattaggccacctgtactgccaagaccagttccaggttatgctcctgttccaggcatgccaccaacggtagcaccacctggtgcaccttccttccctggtcaaataaatggccttccacaacctcctacattggttcccccatcaaccgttact

SEQ ID NO: 28008 - DNA, 413 bp, Gossypium hirsutum
  Clone ID: LIB3148-010-Q1-K1-C10
gtgatgttgaatcttcttcgagaccagtttccgggagccaatgattttggaagtgaaataattccaggtgctacttccattgggatgagggtgcaagcttacctgtatgatggctactgggaggacattggtacgattgaggcattttataacgcaaatctgggaatcaccaaaaagccagtgccggatttcagcttctatgaccgttcgtctccaatctacacacagcctcgatatttgccaccatccaaaatgcttgatgctgatgttacagatagtgttatcggtgagggttgcgttattaagaactgtaaaattcaccattctgtggttggtcttcgatcttgcatctccgagggtgcaatcatagaagataccttactaatgggagcagattattatgagactgatgc

SEQ ID NO: 28009 - DNA, 302 bp, Gossypium hirsutum
  Clone ID: LIB3148-010-Q1-K1-C11
attttattggctgttttggagtttcagtggaacaataatggagttcgttcttcgctgtttcttcaagattgttgcttccctatgtcgcatctcgtttcgaaaaagatgggtaattttgtgagtgattctaagttttttgaatgtattggaaaatgaagcgtttttcccttagcgatttgcttcaccaaaaaagaaagaaaaaagtttggattaatgtttttttttggggtttaatttgtagggtattaaccaaaggtttaatttaggttttcaatgtaaaaagaaatgttaaaattctgatg

SEQ ID NO: 28010 - DNA, 403 bp, Gossypium hirsutum
  Clone ID: LIB3148-010-Q1-K1-C12
cccacgcgtccgggcagtcagaagcccaaagtctcgatttttcgaagcgatttcaaaggtaaattcgctttttatttattttaatggtacttgcatgtatttagagaagaaaaaaaaatgaaaaggtaaaggtaaaggtatatcacctttaagaaactgtatgtatttggcttttgtattccttgttaaaaatctcccccttcgtttacaggttacaaaggaggcttttatagccactgtttctattacattttgggaagaaatcttttatttctttccatatttgttttgcttgtttgctactgtgtctttctttcttttgcaggtaatcaaggaaagtagaccaccggtgttgattcggccgtagaccacggcatggttcgaagcccgggaatcacggcac

SEQ ID NO: 28011 - DNA, 241 bp, Gossypium hirsutum
  Clone ID: LIB3148-010-Q1-K1-C2
acccgccacgcctgttgtcccgaagcaacctgaatctgacccaagtttagagagctaaccatttaggcttatttttctttcacaataggtaaagcatccttgattcttccattagtgcttcttctaaagttctaatcttcgtatattatgtacaaaaatggaaaaaaaatgcattggcccatgtggatatctgtgaatgctgtctataacttaatgcaattagcaagagtttgttcgtttc

SEQ ID NO: 28012 - DNA, 377 bp, Gossypium hirsutum
  unsure (1)..(377): unsure at all n locations; Clone ID: LIB3148-010-Q1-K1-C3
gtggaatttggctttggggggaatattaataccccgactgggtcttggtcttggagatggtgtggatttttccagttttgagtgatgtttgtttgataatttttcatgtgattttgctgtatttgcttagtaaatacacttcatataattataaaaatgttaagttgaaaagaaaaaaaaaaaaaaaaaaaaaaaaaaaaaaaaaaaaaataataaaaaattaaaataattttaattttttaaaaatattaaattatttaattttatttaatttatttaatttttttatattttttttttttttattttattatatgatttttttttttttttttaanatatttttatatttttttaacttttttatataatttttt

SEQ ID NO: 28013 - DNA, 230 bp, Gossypium hirsutum
  Clone ID: LIB3148-010-Q1-K1-C4
gttcgatcaatcatgttcttactataccctttgatttaaaatcattcatactatttacttgggggcgttgaatatataaccacagttaatttctcccatttgttcatatgaaaagcttgaaatctgtacaattgtcaattgactcttgctgttttttatattaagtgcaaaaccattagtttaaaaaaaaaaaaaataaaaaaaaaataaaggataactaatattaaaaa

SEQ ID NO: 28014 - DNA, 247 bp, Gossypium hirsutum
  Clone ID: LIB3148-010-Q1-K1-C5
cacatgtggtggttatgcctaatgtttcattctaaaaactggatttcttcttgaatgggtgagtttaaaaacggtcgacttggtatcaagggaatgttcaacctccttgtattgcagcagagatagggaaagcgaattgcgtttgtgctctgcacaagtgaaaaaaaatatcagtctatgattcaggaattcctctattttcatgcagcttgtcatttggttttaatgaaatatcgattagattcat

SEQ ID NO: 28015 - DNA, 410 bp, Gossypium hirsutum
  Clone ID: LIB3148-010-Q1-K1-C6
gtcgaatggtgttaaacaagaacatcgatttcttctttgctgagaacgagcaattagcctgctgcccttccctcattgtccctggcatctattattcagatgataagttgcttcaaactagaatcttctcctattctgacactcaaaggcaccgtcttggaccaaattatctgcagcttccagctaatgctcccaaatgtgctcatcacaataatcaccatgaaggttttatgaattttatgcatagagatgaggaggtgaactacttcccttcgaggtacgatcctgttcgccatgctgagaagcaccctattcctagcaccgttttgagcggcaaaagagagaagtgcattattgggaaggagaacaactttaagcagcctgggggacgataccggtccttttcagct

SEQ ID NO: 28016 - DNA, 418 bp, Gossypium hirsutum
  Clone ID: LIB3148-010-Q1-K1-C7
cgactctccatcagttagaaaacaacacaattcagggtacaaacacaaggcaaatgttaggacgtactaccagcaatttgaggagcaacaaacccagagcttaatcgaccaaagaatcaaggaacatcttggccaagctgcagctttccatcaggttggagctgctttcaatcaacatctaatggctcagagacctcgacttcctgttcttccgactcctgttatgcctattccgagggttgcacctttacgtataaatcaaccaatggtccctgggattaggccacctgtactgccaagaccagttccaggttatgctcctgttccaggcatgccaccaacggtagcaccacctggtgcaccttccttccctggtcaaataaatggccttccacaacctcctacattggttccccca

SEQ ID NO: 28017 - DNA, 148 bp, Gossypium hirsutum
  Clone ID: LIB3148-010-Q1-K1-C8
cccacgcgtccgcccacgcgtccgcccacgcgtccggtaatttgttattaagatatgtaagaactacttaaataattcaagagtctttatgaattaaaaaagtaaaaaaaaaatccaaatttaaggaatgaatccaaactattactac

SEQ ID NO: 28018 - DNA, 319 bp, Gossypium hirsutum
  Clone ID: LIB3148-010-Q1-K1-C9
gggggaagaccgcacatggctgctatcgctgactagtcagatgcaccgcaccagtgggaattcagctgggattaggaggtcgattttgagtctgaagagaatgcttcaatagtctatgctgcatagggcgtcgataaagagcagcaaccagataaagtgaagaagccaatgtcgatctctgactggaaactgtctgtgcactttgaaactacagcagctatggttgtgcaggcatcattttcagctatcgttgctgtactcacacttgcctcgaagaccatctaataacttcgcccaggaatggtaacgcgatctttga

SEQ ID NO: 28019 - DNA, 410 bp, Gossypium hirsutum
  Clone ID: LIB3148-010-Q1-K1-D10
gtaattagtccatgttttttaaatcaaaggataaattagtcattttgttaaaaattttatctatttctattgttaaaaattgatctcgtatgtcagcataaggtacacatgacagatcacgagtagttgtctggttattcaatcagttatacaagtttttaacaatagaaatgaaaagaatttttaacagaaatgatcaatttactctttaatataaggtaaagagactaatttactcaattttttagtaacaggacaaaatgcaattgaatcctaatggaggggtgtccatgatactatactactatacttttacctagtatacatataaacggtaaaaaataatgtttttgatttgtctaaaaggttacagtgaatggtaccccttaccacaagagttgtttcaaatg

SEQ ID NO: 28020 - DNA, 407 bp, Gossypium hirsutum
  Clone ID: LIB3148-010-Q1-K1-D11
ggaacaggaactgctaaccagtgcccaaccatcgatggtggtgtcgactcttttgccttcaagcctggcaaatactacgccaagaagttctgcttggagcccacttccttcactgtcaaggctgagggtgttaacaagaatgcccctcctgagttccaaaacaccaagctcatgacccgtttaacctacacccttgacgaaatcgagggccctttcgaggtatccaccgatggcaccgtcaaattcgaggagaaagatgggattgattatgctgccgtcacagttcagcttcctggtggtgagcgtgtgcctttcctgttcaccatcaagcaattggttgcatcaggcaaacctgatagctttggaggagacttccttgtaccatcctaccgtggctcatctttctt

SEQ ID NO: 28021 - DNA, 412 bp, Gossypium hirsutum
  unsure (1)..(412): unsure at all n locations; Clone ID: LIB3148-010-Q1-K1-D12
gtcggaatcattttggtgttttgtggcactgatggaatgccttggtcccaatttcaaccgtgaccaaagtggcttgcactctcagctctttgccttatctaagctggtggagttgttagacaacccattgcataactatttcaagcagaatgattgcttgaattatttcttttgtttccgctggatgctaatacagtttaaaagggaacttgaatacgagaaaacgatgcgattgtgggaagtgttgtggacacattatttatcggagcacatccatctgtacgtgagtgtagctatcttgaagcgttatcgtggcaagataatcggagagcaaatggatttcgacaccctcttaaggttcataaatgaactgagtggtcggattgacctagatgcaacactcanggatgct

SEQ ID NO: 28022 - DNA, 276 bp, Gossypium hirsutum
  Clone ID: LIB3148-010-Q1-K1-D2
ctggaagtcaccatttaatgattgttttattttcaaaaagggtgaatgatataaaggtcgggtttttattatgtatctttatctattttcttttttataatattttaattttcttttttttatttatttactatttattttatatttatttttttttttttttatttaattctttattttttttatttttctatttttattatctttattaacttattttttttattttttattttttataatatttttatattatatttcaatttttttaattaa

SEQ ID NO: 28023 - DNA, 419 bp, Gossypium hirsutum
  Clone ID: LIB3148-010-Q1-K1-D3
gctgagaccaatataaggccgtggataaatgtattgaaggagataaagaagggcaacgagaggaggaagtggaaggaaagggtgccttatgcttattggagagagaaccccagcgtcgcccctactaggaaggaccttatgaaatgcaatgctaccgacaaaaattactggaacaccctcctatacgttcaggattgggaccgagaatctaaacaagggttcaagcactcaaatgtagaggaccaatgcagccacagatataagatatatacggaaggatgggcgtggtctgtaagcgaaaaatatatcctagcttgtgattcaatgaccttatatgtaaagtctcgtttctacgacttcttcatcagaggcatgctaccactgcagcatttatggcccattagtgaaaacaccaaatg

SEQ ID NO: 28024 - DNA, 345 bp, Gossypium hirsutum
  unsure (1)..(345): unsure at all n locations; Clone ID: LIB3148-010-Q1-K1-D5
ttctcattgttatggtaaatagtagcgcctatcgacatgttcatatattggctattctgtctgccgtggtcaggggcttttgtgtgcggcttgtgacatattcatataccaactttattgaccgagtaacctatgtctggtcttgtaaggcatatgtcctgtaatgctcctaccacacttcgattatgtattatgccgtcatttttatgctgcacttctcgtagcaagaagttgtgagtaggggtgtaattgagtcgagctatgttaaaatattgttaagcttgaacttgatatttggctcgagtttgatcggatatttatttttaagttcgagttcggcttgng

SEQ ID NO: 28025 - DNA, 407 bp, Gossypium hirsutum
  Clone ID: LIB3148-010-Q1-K1-D6
tgcggataaaagacgtggtattggttcattgaatgctgtaatgggcaataagttggctgtactagcgggagattttctgctttctcgagcttgtgtggcccttgctgctttaaaaaatacggaggttgtatcattagtagcaacagttgtggagaatctggttatgggtgaaaccatgcaaatgacaacttcatctgaacaacgttgtagcatggactattacatgcaaaagacatactacaagactgcttccttgatttcaaacagttgcaaggcaattgcgcttcttgctgggcaaacagctgaagttgcaatgttggctttcgagtatggcaaaaatctgggattggcatttcaattgatagacgatgttcttgatttcaccggcacatcagcttcccttggaa

SEQ ID NO: 28026 - DNA, 255 bp, Gossypium hirsutum
  Clone ID: LIB3148-010-Q1-K1-D7
cccacgcgtccggcttgctactgttctgcctgtcagggttttctatacggtcagttttttcaggttcggacttatttttcttttctcccctttttgagtctggttcagccaacattacaattaagttttaagttctcagatgttgattatggaacgtgttatttatgttattaaggaggtatggtttttgttttttattaaaaaaaaaaaaaaaaaaaaaaaaaaaaaattaaaaaaaaaataaataaaaataaa

SEQ ID NO: 28027 - DNA, 311 bp, Gossypium hirsutum
  Clone ID: LIB3148-010-Q1-K1-D8
aaaagaacaaacaggtttaccccaaatttgtgtttgaagagtacatgaaactgtatgcaggactgaaattccaggccaaggaaccaaggtttgaagccatgaaagcgatggaagctactgctcccattgcaacagcttaaaataaaaatattataacttagcttttgactttgtggaaaggaaaaaaaaaaaggaaaaaaaaggtgttccagtgttcctcctatattatagatgtgtgttgtttgcactgttgaatttattattgtagacgacaattctattatataataaaagaaaaggatttttgtctc

SEQ ID NO: 28028 - DNA, 116 bp, Gossypium hirsutum
  unsure (1)..(116): unsure at all n locations; Clone ID: LIB3148-010-Q1-K1-D9
ggccaacagtagctactttctaaaaattgtggaattttatggatccacgcttggtatgtagccaagcccaagaaaaaaggaacgaggggaagaatcgacaaggaatctcattcnna

SEQ ID NO: 28029 - DNA, 160 bp, Gossypium hirsutum
  Clone ID: LIB3148-010-Q1-K1-E1
gattaaaacatctattatgctgatgtctcttgtttctattgtgatagttgggatgatttgatgctctagtttcattctgaatttgctattaaaaacattgtgtgtaatttcgtgacgtataacttaataaattcaagttctacgtttgtgttttttgtct

SEQ ID NO: 28030 - DNA, 423 bp, Gossypium hirsutum
  Clone ID: LIB3148-010-Q1-K1-E11
acgctggctcaaacggagttaataatcggaatggagatcggatcccgcattacaatctatgacatggaaaacataaaagtgctgattagccggttggaaattgagatggaatctttattgcataatgctgattttgcagttagagaagaagatgcagtgaagcttgcaatcaatgagatcaagggaaaattagaagcatttatgaaaaccattgaggaattgggtcgacaggccgaaaattgtagccgtgatattaggatggcgaggacggtagttttgcagaagatgatgaaacgttctgggaattcatcaacgggtgacagcccgtgggaagtgtagcaatgaggtaaatttcagtgtgttaatgttgtaataattttatgctgtattcaaggtaatgaagttgctccactggatttgatc

SEQ ID NO: 28031 - DNA, 221 bp, Gossypium hirsutum
  Clone ID: LIB3148-010-Q1-K1-E12
cggagataactgcagctgcaccaactgcacatgtggtcgttaaacagacataaagagcaatgacgttctacttcttggtaatattggggacctaagattaatgaaatttgggtcgaataatatgtgtttgtgtgttttcatgtttaacagtaatgtaatggccttatttattgactttggtttatgaaaaaaaaaaaatttttttaattattcattttttt

SEQ ID NO: 28032 - DNA, 413 bp, Gossypium hirsutum
  Clone ID: LIB3148-010-Q1-K1-E2
gggtgtaaaagcagtcattgccaagttttttgagcgaattcaccgtagtaatttggtgggcatgggcatcattcccctatgtttcaagtctggagaggatgctgacactcttggattgactggccatgagcgctacacaattgatctttcaagctgtgtgagctaaattcgacctggccaagacgtcacattggctacagactgttgcaagtcattcacctgcacaatccgatttgttacacaggtgtatctttcatatttcaaccacttatgcatcactttttttttttattaataagtcctttttttttttaaacattttttaacttttttgttaattttttatttttttataggtttctccacctttttttcattatctatttatcccctttccttttttttttcttttt

SEQ ID NO: 28033 - DNA, 385 bp, Gossypium hirsutum
  Clone ID: LIB3148-010-Q1-K1-E3
gttccaacgatacgcgacttacttggatgcatttggtcctaacgaaacctacttgcgaaagaaggtagagaatgagttgggatcaaagatgatctacctaaagatgagatgtagtggcctaggttctgagtggggaaagattactgttcttggaacctcgggactctctggatcttatgtggaacaaagagcttagcagtaaattgttgagacatttcatgtgaactcttttttttgttctgttttagatcatgtttatgaatagtaggagacaagttggtgttgttctcctagaaaaccttgggagtttgcttggaaagctaaataaaaaggcttatgttgtcaaaaaaacaataaatcaaaatgtaaaatcatgtttctgaaa

SEQ ID NO: 28034 - DNA, 418 bp, Gossypium hirsutum
  Clone ID: LIB3148-010-Q1-K1-E4
cccacgcgtccgcccacgcgtccgcccacgcgtccgcaacaacatgcctagtcgctgcgaaattctgtgtgaactcttgatcgcgattttgatccctcctttgggagtttgcttcaggcacggttgttgcagcgttgagttctggatttgtgtgctgttaactattctgggttacgttcctgggattatttatgctctctacgctattgtttttgtggatcgtgatgagtacttcgacgagtacaggcgtccactttattactctgcttagttctcttttatgatctctctctttttctgtaaagtggtgatcctgaaactgtttgcatttgtgtttaattgaactcgatattgatgtgcttctactctttaattgatcttgacattgtgcgattgtaaatttgtaatggttctttga

SEQ ID NO: 28035 - DNA, 278 bp, Gossypium hirsutum
  Clone ID: LIB3148-010-Q1-K1-E5
aaacaatcctttcatgattatctttgcttgtattcaaattgttcttagccaaatcccaaattttcacaagctttcatggctttcaatccttgcggcggtgatgtgttttacacttgcgctcacaggggtcgggcactctatattgctaacgctgcatgggggggagcacacgtggagacacgctactctggtgtacaagtaggggttggcctgtcaggctctgaaaaggtttggagaacattccaagcttttggggacattggctttgcttatgctta

SEQ ID NO: 28036 - DNA, 424 bp, Gossypium hirsutum
  Clone ID: LIB3148-010-Q1-K1-E7
cccacgcgtccggtggatatgtgcgtgcaatgtataatgcttccctttgttatacatttggggaaggtttatcacatagtcgtagacaagcgaggaagtggatgaagagagcagctgatcgtggccatggcaaagctcaatttgaacatggacttgctctattttccgaaggggaattgctgaaagctattgtgtatcttgaacttgctacacgttctggtgaaactgctgcaactcatgtcaaaaatgcagttcttcagcaactctcggcaacttctcgtgaccgtgccctgcttcttactgataattggcgtgctttgccttcctcccgatgagtatacctacactgtttattgaactttctcatctaatcctgtaattgcctgttactttcggttctcttggtaaatgcttgacgagtgac

SEQ ID NO: 28037 - DNA, 424 bp, Gossypium hirsutum
  Clone ID: LIB3148-010-Q1-K1-E8
ctttttattgcttacctttgaagccaaattcaccttcttcttcctcttcaatccccctaacgtccaagttttcatccagtccttttcccccttccatttcacgttttcatccttctcagatccaaaaacccaacccatatatccctttcttttctttataaacaccataaatcccccccccccaaaaaaaaagaaacccataaagttttccccctttttatttggttgttgatgagaagatgtgttgtgggagagtatgcatgctgtgcacttgtttgattctagtcgtggttgcgattgggctgctgttcggctttggggttttcaagaatgggtttcacaagctcaaagatacattccatgaagattattgtgatcctaaattgtcttcttcttgtggaagacctttcttgggttatgcagc

SEQ ID NO: 28038 - DNA, 408 bp, Gossypium hirsutum
  Clone ID: LIB3148-010-Q1-K1-E9
gtttcctttggggcattggggatgttggggctcaatacatcacccatttcaccacaaacacacgccttcaatataaagattcagagcaagaatttataatcgattggaaaagagtggctatcaccagtatgtttggatttggctttgttggaccggctggacactactggtatgaaggcttggacagatttataaagttgaggcttcaactacgaccaaagtcggtgaaatttgttgctgctaaagtcgctatggatggccttatctttggcccctttgacttgttcgtgtttttctcgtatatggggctttccgctggtaaaagtgttccggaagtgaaggctgatgtgaagagagattttatcccagccttgattttggagggtggtatatggccgattgttcaga

SEQ ID NO: 28039 - DNA, 357 bp, Gossypium hirsutum
  Clone ID: LIB3148-010-Q1-K1-F1
tgggagtctcaaacatgaaaacatggtttatttgtttggctctaattggcatagtggcgatggaagaggtgatccaaattgatgcagcaatgacaatccaccatccagaggtctctggtcttgtttcctaccgtcgccttctccaagaagctgttaatccttggaatcgtggctgctcaagactcactaggtgtcgaagttaatgtatattttgataatatgtgacggtatctttcgtatataaatgtaaaaagctctgcatattaaggcaacataattaatacttatctctatcttttacctaacttggttcgccttaaccatgatttatgatctatctttgccttgtcatgatcc

SEQ ID NO: 28040 - DNA, 400 bp, Gossypium hirsutum
  Clone ID: LIB3148-010-Q1-K1-F10
gttgaatcaattgatagcaatggaaggcccatctctggctatggaactgagggtggaataggcattcctttatatggacctttaaaaattggcaaagccgaacctgttaatcttcaatttggtcactttggaattagtgcctggcctagtgatggtggcacaagtcgtgctgggagtgtggatgagtcgagatatgatgggactgaaaatagcagtagataccaatcttcttgctgtagctcaccgaggatgtccgatggtccagcaaaagagcttaaggaggaaaactcagtctatggcagcgatgaagaagttgatgatcaacctgaggtggacactgatgaggattttagtgatgatggtgataaagaggtccatgaagaggtaagttcagttgatg

SEQ ID NO: 28041 - DNA, 276 bp, Gossypium hirsutum
  Clone ID: LIB3148-010-Q1-K1-F11
caaaaaaaaaaaaaaaaaaaaaaaaaaaattttaaataaaaaaaaaaaaaaaaaaaaaaaaagagggggggcaaaatttcgggggcctaccataaaaaaagcgggcctgcggcgtcaagcggactactattgtcgtcctcttggttcaacaccttggcctctgttttactccgcccttattcgaaatacctgggcgtggcccaacttcatcttcccgcagaaaatccgattttcaccaacttcagtcttttcgaggattccccctcttgcccccct

SEQ ID NO: 28042 - DNA, 423 bp, Gossypium hirsutum
  Clone ID: LIB3148-010-Q1-K1-F12
cgagcaccttatcctccaaaccatgtggttggccatctaattgggagctttgctttcattgtcttggacaaatccacctccactttgtttgtggcttctgatcaatttggtaaggttcctctctattggggaatcaccgccgacggatatgtggcctttgctgataatgctgaattgctgaaaggtgcctgtggcaaatctcttgcttcttttcctcaaggctgtttctactccacagcagtaggaggattaagaagctatgagaatcctaataacaagatcactgcagtgcctgctgaagaagaggagatatggggtgctaaattcaaggtggaagggccaacagttgttgctgccacagagtaatcctttgctttcttcttctaaatctattgatccatgggaatataggagctgcaaatg

SEQ ID NO: 28043 - DNA, 405 bp, Gossypium hirsutum
  Clone ID: LIB3148-010-Q1-K1-F3
tggtattgcttgggcctttggtggcatgatcttcatccttgtttactgcactgctggtatttctgggggtcatattaacccagcagtgacatttgggctgtttttggctcgtaaggtctcattgatccgagccattgcatacatggtggctcagtcgttgggagccatatgtggggttgggctggttaaggcattccaatcagcatactacaacaggtatggaggtggagccaacactctagcagatggttacagcacaggaactggtttgggtgcagaaattattggaacctttgtgttggtttacactgttttttctgctactgatcctaagaggaaggctagagactcccatgtccctgtattggctcccctcccaattggatttgctgtattcatggttca

SEQ ID NO: 28044 - DNA, 360 bp, Gossypium hirsutum
  Clone ID: LIB3148-010-Q1-K1-F4
atggaactgagggtggaataggcattcctttatatggacctttaaaaattggcaaagccgaacctgttaatcttcaatttggtcactttggaattagtgcctggcctagtgatggtggcacaagtcgtgctgggagtgtggatgagtcgagatatgatgggactgaaaatagcagtagataccaatcttcttgctgtagctcaccgaggatgtccgatggtccagcaaaagagcttaaggaggaaaactcagtctatggcagcgatgaagaagttgatgatcaacctgaggtggacactgatgaggattttagtgatgatggtgataaagaggtccatgaagaggtaggttcagttgatg

SEQ ID NO: 28045 - DNA, 420 bp, Gossypium hirsutum
  Clone ID: LIB3148-010-Q1-K1-F6
gtagccgacaaggttttcaagtatgataccattcccgatgagcctccaagtgacaacactaaggtaactttggcacctattgtcctcaacatgacacatagaaactttgtggaaatcatcttcgagaatcacgagaccgccattcagtcctaccacttgtctggctactcattctttgctgtgggcatggacgttgggaaatggagccccgagaagaggatgaactacaatcttcttgacgccgtgagcagacacaccatacaggtattccccaactcctggtcagcaatcctattgacattcgacaactgcgggatgtggaacctgaggtcggagacatgggacaggcattaccttgggcaacagctttatgctagtgttatttcccctaaccgatccctcaaggatgagtacaactta

SEQ ID NO: 28046 - DNA, 418 bp, Gossypium hirsutum
  Clone ID: LIB3148-010-Q1-K1-F7
gttttcctcgtaatgaagaaaaccgtgcagcattcgaagctgttacaaaaatcgagccagaatttgtcctgtttttcaattgccctgaagaagagatggagaagcgtcttctgagtaggaaccagggaagagaagatgataacatcgaaacaataaggaaacgattcaaggtgtttctcgattccagccttcctgtaatcgagtactataaggtcaagggaaaagttcgagagattgaagctgcaaagcccataagagaggtgtttgaggccgttaaagttgtcttcaccccaaaagctgaaaaggttgttgcctaggccgggtttgcaaactctaccagtgataaattagcatattcatttgaggttaaatatgtcaacagtttggtgcacatcattactgtattcttaataatttg

SEQ ID NO: 28047 - DNA, 131 bp, Gossypium hirsutum
  Clone ID: LIB3148-010-Q1-K1-F8
atcaatcttgctctgaaatgtttcacaaattgtgtaaagatcatcacttgcaatgtgaatcaggttgtacataaccattgcacagtgattaaagaatttggaaactagaatgagttttagtgtctattttc

SEQ ID NO: 28048 - DNA, 201 bp, Gossypium hirsutum
  Clone ID: LIB3148-010-Q1-K1-F9
tgaacctgaagaagagtctgatgacgatatgggattcagtctcttcgactaaggttatttgtattaaagcataaacatataggattattgacagtttacattatctgctttattgtttctcatagttctcgttgatgtactttgattgctctaagttttggatgatttatgaagtcttaatttagtctttttgccagttct

SEQ ID NO: 28049 - DNA, 404 bp, Gossypium hirsutum
  Clone ID: LIB3148-010-Q1-K1-G11
cccacgcgtccgtgaagaaggaattcagatgcttaaggatgctggtgtggaagttgaccctcttggggaccttaatacagaagcagagagaaaattgggccagcttgttttggagaactatgacactgaattttatttgctgcatcgctatcctttggctgtgaggccattctacaccatgccttgctatgataatgccctttacagtaattcatttgatgtcttcatacgaggtgaggagataatttctggagctcagcgtgtccatgtaccagaatttttggcagaacgtgcacaggcatgtggaattgatgtcaatacaatctcaacctatattgattctttcagatatggtgcaccaccacacggtggggttggagtggaattggagcgtgtggtgatgc

SEQ ID NO: 28050 - DNA, 408 bp, Gossypium hirsutum
  Clone ID: LIB3148-010-Q1-K1-G12
cacgagcatcgtgcgacgtcgatgaagaaacgaagaagatggttaggtatgaagtggacatggcattggctttatcggccaaagggttcgcttggagccgtgccttgaaacacaagcttcgactgaactacaaggacgatgatcgtgtaggagatggtcatggtgagcccgtaacgaagaaaccgaaaaccgaacacgaagaggaagagaggatgatgtgtttgaggaagcttataccaggagggaaagagatgatggctgatgatgaaatgttgttgagtgaattgggaagctatgtttcatgtcttgaattacaggtgaatattcttagatcaatgcttcaaaataattaattttttttttaattttggaagttaatttctattgaggcatgcaatattcaatgtg

SEQ ID NO: 28051 - DNA, 403 bp, Gossypium hirsutum
  Clone ID: LIB3148-010-Q1-K1-G3
cccacgcgtccgcggacgcgtgggttcagatgcaactcattttgttcgatcttgcacgttgtacaatgagggacgactttactgcttcaatttaaggaactaagctctttagtcagattgattgatcacagcattagagagttgatgtatgcaaaattctactttattgtcaccatgatgtagcatctattctaatgcctgtgcactgtcattcaatctagtcaaaatctttatgggctaaatttatatctttttttccactagatgtgaatgttcttacctgtatagttttgaaatcataatttctaggttgaaggcaagtgcacaggttaagtttaattgttgatggtgttcgaggaacattcaatgatgattttatgctaaactctaaatgctttgaggc

SEQ ID NO: 28052 - DNA, 147 bp, Gossypium hirsutum
  Clone ID: LIB3148-010-Q1-K1-G4
cgagcaccttatcctccaaaccatgtggttggccatctaattgggagctttgctttcattgggttggacaaatccaactccactttgccttccggcttctgatcaatttggtaaggttcctctctattggggaatcaccgccgacgg

SEQ ID NO: 28053 - DNA, 52 bp, Gossypium hirsutum
  Clone ID: LIB3148-010-Q1-K1-G5
cttgaatcaaatatattcatttatcttatatttaaaggcacttcatttcatt

SEQ ID NO: 28054 - DNA, 267 bp, Gossypium hirsutum
  Clone ID: LIB3148-010-Q1-K1-G6
cccacgcgtccggaaacttattcgatggtgatggagtttatgcgtgttatctagaattctgtctacaaatatggtcatgtttctgtagaataaaggttaaattttaatgcattgtgccttgttgcgtaaaacggaacattgtaacacacagaaaagcttgaacagatgtggtgtctatgttgtaccgtttagccaatgcattggaatttgttgtttatgtggttcggtattatggtttgggtagtcagattataaattccaagattc

SEQ ID NO: 28055 - DNA, 312 bp, Gossypium hirsutum
  unsure (1)..(312): unsure at all n locations; Clone ID: LIB3148-010-Q1-K1-G7
cccacgcgtccggggatgtgaaattttgatttacccatctcggatttttggtttggttttaagaaatgaagtgatggatgttttatttatatctgaaaaaaaaaaaaaaaaaaaaaaaaaaaaaaaaaaaaaaaaaaaaaaaaaaaaaaaaaaaaaaaaaaaaaaaaaaaaaaaaaaaaaaaaaaaaaaaaaaaaaaaaaaaaaaaaaaaaaaaaaaaaaaaaaaaaaaaaaaaaaaaaaaaaaaaaaaaaaaaaaaaaaaaaaaannnaaaaaggggcgccccttaaaaaaaccaaaatttaaccccccgg

SEQ ID NO: 28056 - DNA, 354 bp, Gossypium hirsutum
  Clone ID: LIB3148-010-Q1-K1-G8
tgaaaatcaaagagtaactgaagaagatgcaaatattcgtcaaaaccctaacagggaaaactatcactctcgaggttgaaagcagtgataccatagacaatgtcaaggccaagattcaggataaagagggcatccctcctgatcagcagaggttgatttttgctggtaagcaactagaagatggccgaaccctagctgattataacatccaaaaggagtccactcttcacctagttttaaggcttagaggaggaaccatgatcaaggtgaagactctcaccgggaaagaaattgaaattgacattgaacctactgataccattgatcgtatcaaagaacgggttgaagagaaag

SEQ ID NO: 28057 - DNA, 109 bp, Gossypium hirsutum
  Clone ID: LIB3148-010-Q1-K1-G9
ggaaaataaagaggtctatgaaggagaggttactgaactctctcctgaagaaacagagagcgtaacaggtggttatggtaagagcattagccacgtaattattgaattg

SEQ ID NO: 28058 - DNA, 127 bp, Gossypium hirsutum
  Clone ID: LIB3148-010-Q1-K1-H1
ggaataaatgcctcaagttttttgtagggttgcatttgttgattcacccttttttttaatgactttctgaaagtacggatggccattgttggagtatttgaaatacaatatttcctgttttcttttc

SEQ ID NO: 28059 - DNA, 386 bp, Gossypium hirsutum
  Clone ID: LIB3148-010-Q1-K1-H10
cggctgacgagagtgggttagcgaatgagtgcagcaaagatttccagagcgtgatgacttgcttaagctttgctcaaggaaaagcagcgtcgccgtcgaaggagtgttgtaattcagtggcggggattaaagagaataaacccaaatgtttgtgttatattttgcaacaaacacaaacttccggtgctcaaaatctcaaaagcttaggtgttcaagaagataagctgtttcagttaccgtcggcttgtcaattgaagaacgctagcgtcagtgattgcccaaagcttcttgggttatctccgagctcaccagacgccgccatcttcaccaactcctcctctaaagcaacgacacccagtacttcaacaaccaccgcaacgccgtct

SEQ ID NO: 28060 - DNA, 343 bp, Gossypium hirsutum
  Clone ID: LIB3148-010-Q1-K1-H12
attttatctcattgtccttcgctacgatatttttctcgactcatatttggtgttgaatgtttggtattggaatcatgtacactccctgtagagaaaatagaaagatctcgctttcggttaaaaaaaaaaaaaattaaaaaaaaaaaaaaaaaaaaaaaaaaaaaaaaaaaaaaaaaaaaaaaaaaaaaaaaaaaaaaaaaaaaaaaaaaaaaaaaaaaaaaaaaaaaaaaaaaaaaaaaaaaaaaaaaaaaaaaaaaaaaaaagggggcgcccttttaaagaaccaaagtttacttccccgggtttgcaagattatagtttttttatggggccccaaaaataa

SEQ ID NO: 28061 - DNA, 225 bp, Gossypium hirsutum
  Clone ID: LIB3148-010-Q1-K1-H2
cccacgcgtccgatcgatgtccgtccaaattaattgagcttaatttggatgattaatgttggggttttgtgaacttatataatattttggattaagtatggcttgtaataggaaacattgtagtactataatatatattatatacatatatatgagaattttcaatgataattagctattgtaaataccctttgagatgtggataaataagcaatatctttttat

SEQ ID NO: 28062 - DNA, 400 bp, Gossypium hirsutum
  unsure (1)..(400): unsure at all n locations; Clone ID: LIB3148-010-Q1-K1-H3
agcctacctcaggcaataacaatgcacatgttgagctatgctggtaaggctgaaatgcaaagttctagtagctaaagatatcatccctgatccagagtttcttgctaaatgctttgaagatgccttgcttgaaatgaaggaggctgtattaaggaccaataaagcataggcaaaacaataattatttttttaaaactttaattaattagtgtacaagaaaaattcattacgaattttccatacataattacgtttagggtgtgtttagtattgcttttaagaaacacttttgagacaaaaagtatttttttgacaaaaatattccttaaaaaaatactntttgagaggaaaagtgtttttctcgagccaaaaatcaaactctttcttttatccttgttct

SEQ ID NO: 28063 - DNA, 454 bp, Gossypium hirsutum
  Clone ID: LIB3148-010-Q1-K1-H5
ccgaatcggaggttcgacccacgcgtacgcccacgcgtccgcacagcaggacccgaaggtcatcaagcagtggcctttagggcaactagtaataaagtcatcatgttcaattgccatttcaatgggtaccaagacaccctttaccctcacaaagggcaacaattttatagggattgtgtcatcagtgggacggtggacttcatctttggggattcggcaagcgtgttccagaattgtttgatcatcgtgaggaagccaggtgagaaccaaaacaacatgattacagcacctggaaggcaatacatagacactgactcagcccttgtacttcaaaactgtaccatcacgggtgcccctgattaccttcccgtgaaggacaagagcaagacgtaccttggtcgtccctggaaacccttggcgagagccatcataatgcaatctacgattgaagaca

SEQ ID NO: 28064 - DNA, 357 bp, Gossypium hirsutum
  unsure (1)..(357): unsure at all n locations; Clone ID: LIB3148-010-Q1-K1-H6
acgcccacgcgtccggtcgatgctttacaacccgccaccaattattataaccctcagctgcagcaagaccagatagctcttcaactagtctaatgttatgggggcgtgcatggttcattgctgctgtttcagttttagtgaagaacatcttagcattgtgtcagatgaaagctactatataaggcaggaatattatgttaactttccttaaatggaggaccctagatctgatcgtctgccatgtttaagatgcgtagagtgtgtaagaatgataagtttgattttcagacaagaatgtcctcttccatttgcttagaacatgcattaagatcctnnnnnaaaaaannnnnnnnnnna

SEQ ID NO: 28065 - DNA, 401 bp, Gossypium hirsutum
  unsure (1)..(401): unsure at all n locations; Clone ID: LIB3148-010-Q1-K1-H7
ccaacgcgtccgttccaaggaagcaacttgttaccaaggttgcccgtaaatctgccccaaccaccggtggtgtgaagaagcctcatcgctaccgtcctggaactgttgctcttcgtgaaattcgaaagtaccaaaagagtactgagcttcttatcaggaaattgcctttccagaggcttgttcgtgaaattgcccaggacttcaagactgatttgcgtttncagagccatgctgttctagctctccaggaagctgcagaggcataccttgtgggtctttttgaagacaccaacctttgtgcgatccacgccaagcgtgtcacaattatgcccaaggacatccagttggctcgtaggatcagaggagagcgtgcttaatttccatgtgtgtggatcagtcgc

SEQ ID NO: 28066 - DNA, 388 bp, Gossypium hirsutum
  unsure (1)..(388): unsure at all n locations; Clone ID: LIB3148-010-Q1-K1-H8
cccacccgtccgaagaattgtccgtcatattttcgatgttcatgtcattaatcaagagagaggaaacaaaagggacaccagatcaataactgttaccacaaacttgcctaaaacatgtgataatccaaccactggtgggttagaaattgaccctgcgaggaaaagaaacagtttaaaaagacctggtgggttaccgccaattggtccttcacgagtcaaatcttcacctttcatttctcgtagaaattccacgtctgctttagattatgaaaagtttaaaatagataatgaagtcggtttacttagagaaaggctaangattgtacagcaaggaagagaaaagctcaacgtacctgcagggcgcaaggaaagagaacaagttcaaatg

SEQ ID NO: 28067 - DNA, 414 bp, Gossypium hirsutum
  unsure (1)..(414): unsure at all n locations; Clone ID: LIB3148-010-Q1-K1-H9
aaaatcctacctcaggcaataacaatgcacatgttgagctatgctggtaaggctgaaatgcaaagtctagtagctaaagatagtcatgcctgatccagagtttcttgctaaatgctttgaagatgccttgcttgaaatgaaaaaggctctattaaggaccaagggagcgtgtgcaaaacacaatttcttctttgaaaaaacccctttccctgggcgctcgaaaaaaacaccacgcgtttccatacataattacgtttagggagagtttagtattgcttttaagaaacacttttgagacaaaaagtatttttttgacaaaaatattccttaaaaaaatactttntgagaggaaaagtgtttttctcgagccaaaaatcaaactctttcttttatcctttgtctaaaaanaaaaat

SEQ ID NO: 28068 - DNA, 308 bp, Gossypium hirsutum
  Clone ID: LIB3148-011-Q1-K1-A1
ggtagtggctgatactactttgaagtatttgggcactgtccatgtcaagagtggtgtcaaagacccccatttcgaggtggtgaaagaggcactcataaggacaattgaagaagcaattggagaagagaaatggaatgaagagatgaagaatgcttggggtgaagcttatgatcaattggctgagatgaagaaccatcatgatgaaactgcttaattactcttttacttcaattttattgttgtttgccaatattttcacaattttaatgaataaattttagtaataaagactattttgtttttctatc

SEQ ID NO: 28069 - DNA, 417 bp, Gossypium hirsutum
  unsure (1)..(417): unsure at all n locations; Clone ID: LIB3148-011-Q1-K1-A10
gaacagaaacaagagcctcctgcagtgataacggtagtattgaaggtcggcatgcattgtgaagcatgcgctcaagcattgcgtaagcgaataaggaagatccaaggcgtagagacagtggaaaccgatgtgggaaatgataaagtaaccgtaaaaggcaccgtagatcctacaaagctggttgattatgtttacaagagaaccggcaagcaagcgtccatagtgaaaggcgaagaaaagaaggaagaacaacaactacaagaagcagagaaaaaaccagcagaagaggccaacaaagaaaccaaaccagaagaagaagacgacagaaagagtgatgatgtaataaagcgaagtgaatacttacaatccaagtatttctcggagctggaatatcctnctcagttttcagtgatgaca

SEQ ID NO: 28070 - DNA, 213 bp, Gossypium hirsutum
  Clone ID: LIB3148-011-Q1-K1-A11
gtggtctttctgccagcgggatactgatgatcatctcggcaacgtgctccgaaaaggtgggatgtgagtgcaattattaatcccatgccccattcttccgcatccaaaatagaacattggcaaattttcatacttaaaaggaatctatactttactaacatcgaaaataatacaaaaatgaaagataataaatacaaaaaaaacaaaaaatta

SEQ ID NO: 28071 - DNA, 358 bp, Gossypium hirsutum
  Clone ID: LIB3148-011-Q1-K1-A12
cccacgcgtccggcagaaatgcctgggtgaggctgaaggataccttgaacctgttgaggagaatgaagcgattttggaagcttatgtgaagtcatgggtgtctggtgcccttgacaaagctgcaactcgaggatcagtcgcattcacattagttctgcatcacctttcatcttttgttttcagctctcataaaagtgacaagccattgctacggaataagcttgtgaagtctctactgcgagacaatgccaggaagaagcagcacgagggaatgatgctgcagttcatcgaatatatgaagccatcgagtgttacaaaggccgaaaaagaggaaggtttgacaatggagagtagcaat

SEQ ID NO: 28072 - DNA, 327 bp, Gossypium hirsutum
  unsure (1)..(327): unsure at all n locations; Clone ID: LIB3148-011-Q1-K1-A2
gaagaaatcaagggaagatgggcttcagaccacaggagaagggttggagtggggagtgctctttgggtttggacctggcctcactgttgagactgttgtgctccatagtgttgctgcttaaagttaaacaaacatgctttttaagtaattggtcgtgctccacttggcttgcagntttatcttcttcttttttcctttttagattatttaaatcccatgaatttgtgtgtttattgttaaagactagaggtctttgatggtgtgggcgggaagcttaacgcctattcaattcatgtatcaacttatattaaatttatggcaattatt

SEQ ID NO: 28073 - DNA, 304 bp, Gossypium hirsutum
  unsure (1)..(304): unsure at all n locations; Clone ID: LIB3148-011-Q1-K1-A3
gtaaatttttgaacaaattgatttaaataaaattttattgcaaaataatttcnnanaaaaaggggggtttttataattatgtggtgtgggttttttccctataaaaaaatataatttcaaaaaaaatataaaaatataaaattggttggtggttttcttaattttaaatttttagtgcatatgtttcgggggcgggttatttttaaattttttttattttaaaatcctttttaattgtgcttttatttttttattttctatcattttttatttatgattaactttttatctattatataaattt

SEQ ID NO: 28074 - DNA, 309 bp, Gossypium hirsutum
  unsure (1)..(309): unsure at all n locations; Clone ID: LIB3148-011-Q1-K1-A4
cccacgcgtccgnaaaaaaaaaaaaaaaaaatatatataaaaaaaaaaaaaaaaaaaaaaaaaaaagagggaaaaaaaaaaaaaaaaaaaaaaaagggttggaagttttaaaggataaaaagaattaaaatcaaatgcttgcgacggggttggctgttttatagggtcaacttatttgaatgcattggtcgaagttttacaactttttaaatgggaaaatcctggatttacctaacttaattttttaaaaggaaatcctgtttaagccagatggtttaatagctaaaaggcttggacctttatcctttt

SEQ ID NO: 28075 - DNA, 414 bp, Gossypium hirsutum
  Clone ID: LIB3148-011-Q1-K1-A5
cgcttgcatagagaagaatctccaacgaaatctcagttgcatacattgatagacttgaatgttggtcaagtttcaatggatttcgaaacggagggccccttcgtcacggagaccacgcaaaatagtgagaatttgtttgcacatacgtcattcaatcagtccgaagttaccatgcaacctgataaagttgcagaggtgaatcagcagccagtagtgcacaatcgaaggcaaagtaccaggaaccggccattaaccactaaagcattagaggctcttgaatgtgggttcttaagtcccaagaggaagcgaacggcagcggagactccacagattaactcacaaagaattcgcagtaagccggttgtgaatgccacttttaagaaggaaaaggcggtggagactccacagaatagc

SEQ ID NO: 28076 - DNA, 96 bp, Gossypium hirsutum
  unsure (1)..(96): unsure at all n locations; Clone ID: LIB3148-011-Q1-K1-A6
naaaaaaaaaaaaaaaaaaaaaaaaaaaaaattaaaaaaaaaaaaaaaaaaaaaaaaaaaaaaaaaaaaaaaaaaaaaaaaaaaaaaaaaaaaaaa

SEQ ID NO: 28077 - DNA, 389 bp, Gossypium hirsutum
  unsure (1)..(389): unsure at all n locations; Clone ID: LIB3148-011-Q1-K1-A7
tattcccatggttgtcgacaaatatttgaacaaggagctggggctggatatggacaagttcatcacacactctgtgccttttgccgatattaacaaggcattcgactacatgctccagggtataggtctgagatgcatgattcatttggatgcttaaggaaatgttgctgctgtatatttgcccatccaaggatcaaaactctaatgttttgtcctactatgtgttatattatgtgcctacttaagctacctttcccggttatcaagagtgcctatatagaactctctctctctcaaaaaaaaaaaaaagagaaaagaggtctntatatggagttttatattatatgctgaaagaaataaataattttgaaaaagcttgctttgtaatg

SEQ ID NO: 28078 - DNA, 286 bp, Gossypium hirsutum
  Clone ID: LIB3148-011-Q1-K1-A8
ggagtctatgcgtgatatctagaattctgtcttctaatatggtcatgcttttgttgaataaggggtaaaatctaaagcattgtgccttgtagctttaaacagcacattctttctcacagataagcttgctcagatcttagatctatgtggtcgcttggatccaaaggctaaggatttgttgggttttcgactatcaactcttttcagttttttttttaatttcctcatagaagaatgtaatttctagtttgggaaaaaggatatatttggtgggttatcatttgaa

SEQ ID NO: 28079 - DNA, 232 bp, Gossypium hirsutum
  Clone ID: LIB3148-011-Q1-K1-B1
cccacgcgtccgattcggtgtgatgggcctcttggaatgtggtggtcgctcctttagaggctttgactgattaagtcgtgccactattgagccggtgttttagtattcgaccttaaaaaaatgtcgttgtgtcctattatgttttcttatgaactgaggaaaaaaggataatcttgaattgttcttttagcacatcttagtatcaatgaagttttaatcgatgttttaacag

SEQ ID NO: 28080 - DNA, 223 bp, Gossypium hirsutum
  Clone ID: LIB3148-011-Q1-K1-B11
ccttttctatctatctatattattctctaatatgaccaagatattaactggtggtatcaccaagctttttcctttattattaattggagcctggttgtgtcgtatgatattgggaggcatccatatggtaatgttaatatatgaattgggcaaaacccaatcttgatggacaaaaaaaaaaaaaaaaaaacaaaaaaaaaaaaaaaaaaaaaacaagaataac

SEQ ID NO: 28081 - DNA, 277 bp, Gossypium hirsutum
  Clone ID: LIB3148-011-Q1-K1-B12
gggacttgatatcgatactattcagcagcattacacagtttaaagctaaagccaccgcagatgatgacgatatgcattttaatttgagacaaacaaaggatcattcatgatcttccctcccttgctacaaagaaaatgttgatgatgaacaaggcctatggagtatggccgatgttatgagaaaaaaaataatgaaacaggaatttgtattatggtaagtattctaagatggtataggttatgtatgttatgctcttctttggaacacgggataagc

SEQ ID NO: 28082 - DNA, 161 bp, Gossypium hirsutum
  Clone ID: LIB3148-011-Q1-K1-B2
gtttcttctatatatgtaaatgaaagatttagagaacatttggaacagtgggtttctttgatttatagctacagtagtggtgaatttccttgctattaagcatggataatttaatgaactgtcttttgttttttctttactaaatgaaaatgattgtatcc

SEQ ID NO: 28083 - DNA, 410 bp, Gossypium hirsutum
  unsure (1)..(410): unsure at all n locations; Clone ID: LIB3148-011-Q1-K1-B3
gaaatgtcggatctgttcgttagtaactagacggaagacctaggacattattgaaagacatggctactatccttttcatgttgaagacagtggggcactgatcattcaacacaactctcttgtgtctgagattaacaaaggacggaataaagttccaagagattctccatactattattttaatttttgaggggatgtataaattccatagtttcttgtagaagtttttagtttcggcatgtataatataactactaggatccaagttagacttctataatagtttataggcactcctgactaaaaaatccccgaacagttcccctcaccatacttgaaaatctttatgcgctgcctctgccaatggaatctgcatgatttttttcctgcgtcccccnnaaaaanannta

SEQ ID NO: 28084 - DNA, 351 bp, Gossypium hirsutum
  unsure (1)..(351): unsure at all n locations; Clone ID: LIB3148-011-Q1-K1-B4
attagattccacttgatgcaatttcggatttcaattcgagtagctaccgaataggacagtttgtatagtcattacaaataagcttgtattacattttttctggcatattgtccggattccgattattgaacgaaaaaaaaaaaaaaaaaaaaaaaaaaaaaaaaaaaaaaaaaaaaaaaaaaaaaaaaaaaaaaaaaaaaaaaaaaaaaaaaaaaaaaaaaaaaaaaaaaaaaaaaaaaaaaaaaaaaaaaaaaaaaaaaaaaaaaaaaaaaaaaaaaaaaaaaaaaagggggggcccttttaaagaaccaaattttttttcccgtttttgtcaaaanaaaaatttttttt

SEQ ID NO: 28085 - DNA, 62 bp, Gossypium hirsutum
  unsure (1)..(62): unsure at all n locations; Clone ID: LIB3148-011-Q1-K1-B5
ctggatcccggtcgaccacgcgtccgcccacgcgttcgaaaanaaaaaaattttttttaatt

SEQ ID NO: 28086 - DNA, 411 bp, Gossypium hirsutum
  Clone ID: LIB3148-011-Q1-K1-B7
gatttctgaagtggttctttccacttcctctctttttctttttctgggtttgcttattattaacatcaaagtttgtggtgaatcaagttgaggcgtctactaatcaggttctagactagcatatgccagtgtataatcttccatccaagatcctttgtcgggtgattaacgttcaactaaaggtaacttgcacatttttcttattgcaatttgaatgggtttcttttgtctatagggtttagttttgctaacgaaactaatatccttttgctgttaaccatttaggctgaaccagataccaatgaggtttttgcacaagtgactcttacttcctgaacctactgtaagctttggtctctactttttttctttgtaataatcagaatttaatgagaagttgaatttctcatg

SEQ ID NO: 28087 - DNA, 413 bp, Gossypium hirsutum
  Clone ID: LIB3148-011-Q1-K1-B8
gtgaacttgaacaaagttccatcggatgcttttgtggtgtatcaggggcaccatggggaccaaagtgtctatcgtgccaatgtaattcttccttcagcagcattcagtgagaaggagggtacatatgaaaatactgaaggttgctctcagcaaacattacctgcagtccctacagtgggtgatgctagggatgattggaagattattcgagcactctctgaggttgcaggaattcgtttaccttatgatacattaggagccatacgatccaggatgaggactgttgcaccaaacctactcaacacagatgagatagagccagctgcttttggaccttcattgagtccagactgtagtcagaagataagcttgacaccgttcaaggctgctgttgagaatttctacatgactga

SEQ ID NO: 28088 - DNA, 202 bp, Gossypium hirsutum
  Clone ID: LIB3148-011-Q1-K1-C1
aaaaaaaaaaaaaatggatgcaagaaataaaaaaaaagaaaaaaaataaaaaaaaaaaaaaaatatataagaagaaaaaaaaaaaaaaaagaaaatgacaaagaaaaagaaaaaaaaaaaaaggaaaaaatgagcaaaagaaaaaaatgaaaaaaaaagggaaaatgaaaaaaaagagtaaaaaaaaaaaaaaaaaattagg

SEQ ID NO: 28089 - DNA, 304 bp, Gossypium hirsutum
  Clone ID: LIB3148-011-Q1-K1-C10
tgagcctcttcattgatggaaaagctgtgctatatgtttcttagatcgtacattatatagtccccattcagtccttgtataactatgaccctcaaatgttcagattcatctgtgtatgctttcataagatagggaaaaaaatctcaatactttttcttcctgtaattgagaaaacctatgatgtggccatgaaaattgaaaatggaacacaattacagttttttgtcttaaaaatttaaaatattcttttaattttaatatattggcttttttattatcttttatttttttttatatatttttt

SEQ ID NO: 28090 - DNA, 379 bp, Gossypium hirsutum
  Clone ID: LIB3148-011-Q1-K1-C11
atttgttgagttgaaaaaacaaaaagaggtttagggttggagttcgattttagaacacactccggcacttaagttagactgaagtgcaaaaggctgcgtaagccggattttccctcacttgggttgtatagatccggtcggacacattagtggatgggacgatgttttcttattgaggggtttggtggttaatggtacgaaccatttttttttctcaagggctcaagctgtaagaagctggatatgatccgaaatatcttatgcaatgtcggttcgggttatcggaactgctgatttggactctgaatctaatgggcttaacagtaattcaaaagggaagacataatgatgttaacaagagatgactagattgtgattt

SEQ ID NO: 28091 - DNA, 386 bp, Gossypium hirsutum
  Clone ID: LIB3148-011-Q1-K1-C12
ttcgatgaacaaagtgaatcaaacgacttggaacttgaagctccaaatgcacctcaacaatggcggtcacacaggtcaatcaacaagaaaaaacttgcagatatatcaatacaattgtttttgtaaatagcttgttgtttgctattaaatcagtgcattacaagccattattttcttcaaagttttcattgaagaatgggaatttttggcttgtttttatgcatcttgttgtacaaaaaaagaagaaagggatagtatttgtttgaagggtcgtgttcttgacccttccgatttgattaaaaaaaaagagttaagcttaataaagatggttcatattcaatcttaaaaaaaaaaaaaaaaaaaataattaattttttttttttttt

SEQ ID NO: 28092 - DNA, 397 bp, Gossypium hirsutum
  Clone ID: LIB3148-011-Q1-K1-C2
ggcaaacgcttgcgatatgaacgtgcatcttccgttggagagggagttgtgtccgtttgatttggcgccggttacttcgacagcgatccagatggttttcggagatacggtggcaatagcgcttatgggagctaggaacttgactaaggatcaatatgcggccaatcatcctgctggtcggattgggaaaagccttatttttaaggtaaaagatgtaatgaagaagcaagatgagcttccagtttgcaaggaaggagatttgataatggagcagctggtggagcttactaggaaaggatgtgggtgtttgctggttatagatgaggaatatcacttgcttggcacatttacagatggtgatttgcggcgtacgcttaaggctagcggagaagccata

SEQ ID NO: 28093 - DNA, 360 bp, Gossypium hirsutum
  Clone ID: LIB3148-011-Q1-K1-C3
gagagaggaggaatcaaaggatgacccagttgattccgatgctgaggatgaagatgatgccgatgatactgaagggcacgagtctgattccgataccaaatcagacgatgatgacaaggaagatgctcatgatgagctctaagcactgcaatatctcgcagacaattcggtttggtataaatttttccctaccctttattttaaaaaaaaagttctagttttaggagtttcctgttagaggaaaaaggaattgaatgcttcaggcaaaagaactttcactgatgctttcttaatatgattttaactgtctgaacaaaggcatgctctttttcttttttatgatcactagatatttttact

SEQ ID NO: 28094 - DNA, 157 bp, Gossypium hirsutum
  unsure (1)..(157): unsure at all n locations; Clone ID: LIB3148-011-Q1-K1-C4
cccacgcgtccgatcaaatctgttgtgatctcattctaaatggggccaacagtagctactttctaaaaattgtggaattttatggatccacgcttggtatgtagccaagcccaagaaaaaaggaacgaggggaagaatcgacaaggaatccatanca

SEQ ID NO: 28095 - DNA, 200 bp, Gossypium hirsutum
  Clone ID: LIB3148-011-Q1-K1-C5
ggggccgaccacagccttccgccaaggcttctattaaattttggaaaaacttttttttaaagggggccacaagtagctactttggtggaacttgtggaattttatggatccacactcgctatgtagccaatccaaataaaaaaggaacgaggggaagaatctacaaggtttccttttcttaaaaaaaataaaatatgaat

SEQ ID NO: 28096 - DNA, 245 bp, Gossypium hirsutum
  unsure (1)..(245): unsure at all n locations; Clone ID: LIB3148-011-Q1-K1-C6
gccgcccacgcgnccggagaaanggaagaagcccanaagaaccaccggggggnnaagcggaacgagggggcaagcgacggaangnacacagccggagaaaaggaaaggacgggaaggagagaaaaagcgccaaagaacacaggggccgaacacaccaagggagcggaaggagacacanaaaaaagacgaggaagagaacaccccaaaaagaggaaaagagagagaagagaagccaagaaggggag

SEQ ID NO: 28097 - DNA, 380 bp, Gossypium hirsutum
  Clone ID: LIB3148-011-Q1-K1-C7
atcgcttgggacttgcttgatctatcactgacccaccaaccccaggcctaatgctggagctattaagaagtcgatggcaaaacctacttcatcctaagtaagccaaccaacaaacaaaaattttaaagatttgcctaagcaaggactcgcataaaatgtgctttattcgcaaatgtttcaaattcttttatactttcatttaggaagtcttaaatatatacatatccagttgtttttttttgttatatgccaaatattatatgttgtctttccttgtggtgatagctcactgttagctatgttctcagtatggaattatgtggagacattattagatttctattagggaacgatatttttttattacattatattttatt

SEQ ID NO: 28098 - DNA, 294 bp, Gossypium hirsutum
  unsure (1)..(294): unsure at all n locations; Clone ID: LIB3148-011-Q1-K1-C8
gtctgtccaagttggaagattcgctggtggagcgtggcaggcaggtttttgaggaatagtttatgatattattatacccatttgccttcccctttaggatgtttgtcttcagctcgcagaggtattgaaatttgcctttgcatgaagactttcttgcatacattgttgtggagtagatttggaattttagttatagttttatttgtaatttgatttgtacatgttagagatacagtacgtctatatatacaacagcgatgctcaattcttttcctacaaantaaaaatttaaat

SEQ ID NO: 28099 - DNA, 349 bp, Gossypium hirsutum
  unsure (1)..(349): unsure at all n locations; Clone ID: LIB3148-011-Q1-K1-C9
aaaaaaaaaaaaatattattaaaaaatttttttttttataaatataaaaaaaaaaaaagaggggatatttataaaaaaaaaaaatgttcttatattttaataattaacaattttattataaaaatggggggggccttttttatggatctaattttattttcgctttatttcaattttttatattttatatttttttttttattttaaaatttttggccttttttttaaaactttttgcctttttaaatccttgtttttttccaattttaatatttttgattattatccttttttcctattttggtttattttcaaattggttgtnnaaatattttttttcccttttaat

SEQ ID NO: 28100 - DNA, 247 bp, Gossypium hirsutum
  Clone ID: LIB3148-011-Q1-K1-D1
attaaaaaaaaaataaaaaaaaaaaaaatttttttaaaattaaaattataaaaatttaaaaaaaaaaaaaaaaggggcggccgttttttaagatttaaattttttttcgctttttttcgacgtctttattttttttttttttcacttaaatttattttatttgccgtttttttataacttttttattttgaaaacctttgcttttcccaatttttttgcttttcaaaaaattcctttttctccagtt

SEQ ID NO: 28101 - DNA, 225 bp, Gossypium hirsutum
  Clone ID: LIB3148-011-Q1-K1-D10
atggtcagaaaattacatttgagggactaagcttatgaggctccagatacaataactggagagggtgtttttgtattggaacaaaataaacaccccaaatttgataggagatttggggacgaactttatgttttccacaaaacttaattttgtctagaaggctttatttggtgtttaaaattttctcttatcttttcctttttattttctttcttatttttatat

SEQ ID NO: 28102 - DNA, 414 bp, Gossypium hirsutum
  Clone ID: LIB3148-011-Q1-K1-D11
cccacgcgtccgtcttgttcatcaaagactgtgtaagtatattctttacattgcaaaagcgcttttttgtgtttatttggagtttgtttattttgttcttcaaattatatttagtcaaaacatgttttgtttctttcctcaggcttttgatgaagccattgcagagctggatactcttggagaggattcatacaaggatagcactttgataatgcaacttctccgtgataaccttactttgtggacctcatacatgcatgatgatgggactgatgagatcaaagaagcttccaagcctgaggaagagaatacaaccgtgaagttcccagtctttgtggttgcattttacttctcttcttgtttttgtatggagaaattggttgatcccactcttctttttagttacttgctttt

SEQ ID NO: 28103 - DNA, 332 bp, Gossypium hirsutum
  Clone ID: LIB3148-011-Q1-K1-D12
cctacgcgtaggtatgggaagagctgcttttaccaaaacgaagatggtgatgctacgggaagcgcaactcgtggagcgaccatcgagcacaattgcaggcaccaatcgggagatcaataataagtgcaagattaacagctatttaaaaagttcatcacattgggtgccacatacatagagcgggatatgttatccgaaaggccatgaatgggtgatggatgacgctccttacctggcggcttgtttctgtttaagtatctttgatcgtatcgattactgtgtttattaacctgatgattacgattatgatgacgactatttctatgcaatta

SEQ ID NO: 28104 - DNA, 421 bp, Gossypium hirsutum
  Clone ID: LIB3148-011-Q1-K1-D2
cccacgcgtccgcccacgcgttcgccacatgttaatcgtactgactaccagttgatcgacatgtctgaggatggatttgtgagttggctgacctaaagtggagacactaaggatgttctgaggttctttacttgatgtgatctttttgaaacatatcaaggattttttaattttttgggatttgtttattgtttttattatttgaatttattttttgatttgcatccatttttactgttgtcattaaggtttttatattttcaaatacgtttatatttttttgttttttttcttatttttgtttatatttcctgtttttattcatatattaaattttatccattttaattttaacatacaaattcttttattgttaataaatatatatttttattttattttttttatattttttgtttta

SEQ ID NO: 28105 - DNA, 404 bp, Gossypium hirsutum
  unsure (1)..(404): unsure at all n locations; Clone ID: LIB3148-011-Q1-K1-D3
ttgatgggaaaataaatgaaagcaaggcgaaagctttggattttggcgtaataatccatgagggtttgtttgacaatttggagacctgganacacccattcaaaatctttacattattgctcaaacagtggaacaatatttgagaagtcgatttggttttatttattaatttcttgtttgttgttgttgtcataattttttgttttcacctgttttcttttttattctttttttttttcgatactttttattgtctttaatttttcaaagtactttttgaaatttaatggttcatttctttaaatttttctcattattttccatgattttttttatttattaatttttatattatttatatttattttttaattattttataatatttattatatattcttttt

SEQ ID NO: 28106 - DNA, 235 bp, Gossypium hirsutum
  unsure (1)..(235): unsure at all n locations; Clone ID: LIB3148-011-Q1-K1-D4
tggccgccctttttttttttttttttntttttttttttttnttaatgagatcgcgttgtttttctgttccgttgtgaatcattctgctcttctgttatatgattccgggtgtattttgaagatggatctgctcgatcctgatttgaacatgttagaattgaatgcaattaaatactaaaatttagcgttgaaaaaaaaaaaaataaataataaatatattaaatttaataaaatg

SEQ ID NO: 28107 - DNA, 81 bp, Gossypium hirsutum
  Clone ID: LIB3148-011-Q1-K1-D5
cccacgcgtccgcccacgcgtccgcccacgcgtccggcatttttaagtaaatcaccccaaataaataataagttactttgc

SEQ ID NO: 28108 - DNA, 412 bp, Gossypium hirsutum
  Clone ID: LIB3148-011-Q1-K1-D6
cccacgcgtccggcagtatttgggtggaatacctaagtctcctgaagctatattccattacaaccgtgatgatctcaaaggattaccatttaaatttcctaaaaccgtaattcgtgatgtggtacgcagccccatggtagaagctcaatgttcagtccagctatgctttcctgtggtgttgaagaatggaacaatggtagaagagattcactgtgtcggtttcctgagcaaacttattgaaacaaaaatagtgcaggttcttcgtttcaagcatgggcagatctattctgcttgtgtttctgggttccttggtggcaataaaccttctagaactggtgatgttcgtggagatgtgagtataaacttttcttgtgatccagaaatctcctcaaagttggttgatcttgctttg

SEQ ID NO: 28109 - DNA, 385 bp, Gossypium hirsutum
  unsure (1)..(385): unsure at all n locations; Clone ID: LIB3148-011-Q1-K1-D7
agatgatctctttttccactccgacacgatgagtaaacaatgtagaaaggtagtagtagcttaggaaaactgactcaaagagattaacctcttaaaaatgatgcatgttttagaaaatcaacgaggggaagaagagattaaaaatcttattacgatatttgagttaaaatgaggtaaataagtgtttttgggagggttggatatgtaatgtacttactcatgtagttagcttagctatgtttaaagaaagcagcctatccctttttgttaaaaaaaaaaaaaaaaaaaataaaaaaaaaaaaaaaataaaaaaaaatttataaaaaatataaaatatttaaaatatttaataatttattttataaaaaaantggggcggcccttt

SEQ ID NO: 28110 - DNA, 370 bp, Gossypium hirsutum
  unsure (1)..(370): unsure at all n locations; Clone ID: LIB3148-011-Q1-K1-D8
gtaaaaattaaaatggcatagatttaatatatgaataaaagcatggaccttgtacggattgtttgtttcacaatttggagacgtggaaacacccctagaagatggagacttcattggtcaaacagtggaacaatatttgagaagtcgatatggtttcagacatgaattcctgggagttgtcgttgccgtaattcttggtttcactgttttgtttgcatccatctttactgtgtccattaaggtctttaatttccaaagacgttagaatttatggtttccatctctgtaatgtttaaggtcatgcttttattcatatattaaatctatgccattttaattttaacatacaaattctttcattgtnnaaaaa

SEQ ID NO: 28111 - DNA, 393 bp, Gossypium hirsutum
  Clone ID: LIB3148-011-Q1-K1-D9
tcttaatgtgttaccagtacttacgagttccctagcttattgtaatcgcattttgttcagtgtattgctttgtgtgaaaatagattacagacgaataatcaatcgatttctactttgactaaaaaaaaaaaaaaaaaaaaaaaaaaaaaaaaataaaaaaaaaaataaaagtaaaatataataaatataataaaaaaaaaaataaaatattactatattaaaattattattattttaatatctattaattaattttatattggggtggtcttttatgagtatccaatattttctactttgttttaataaaacatataattttttttttttggcgtctctcaaaatttattttcagcggtcccctttttttcaacactttttttaatgggaaaa

SEQ ID NO: 28112 - DNA, 413 bp, Gossypium hirsutum
  Clone ID: LIB3148-011-Q1-K1-E1
aacagggatacaatctgcagtgctgtgagtgaaattcacccaccatccccgagattgttcgacaccaaaaatggtagtctccaacccaaagtgaatgatttgaaaccaagggctgaattaatatgtccaggcaagaagcaaatcgtggcagtggagtttgccagctatggtgatccatttggcgcttgcggagcctactttattggaaattgtacagcgccagaatccaagcaagttgtcgagaagtattgcttggggaagcccagctgccaaatcccactagatagcattcatttcagtgaccaaaatgacgcatgtacccatctcaggaagactttggccgtccaagtcaaatgtgcctaaacaaatgcgtgcttcgacacaactttggattaagctcacattttattttt

SEQ ID NO: 28113 - DNA, 348 bp, Gossypium hirsutum
  Clone ID: LIB3148-011-Q1-K1-E10
gaatcgaagatgagccagttgattccgatgctgaggacgacgtttattatactgatgatggtgaaagaagtgagtcggattcaaacaaaaatagtgctgtggagaatacgcattacaacatgatgagctatagggcaagaggtatacagttttgctggtgaattgggtgtgagctgctaaacaacaagtgcataaattctcttagtatctttttaagatgtagacttattagttgttatttagataaaaaaagaatagtttgctggcaagagaaaaaaatgagtgacgcgctctattatgatttaattaattatgtctaaataaacaagcggtgtttttattaacaaa

SEQ ID NO: 28114 - DNA, 371 bp, Gossypium hirsutum
  Clone ID: LIB3148-011-Q1-K1-E11
cgcctctgctacgaacgaggaagaaacattgttgtgaaccaccgtcttaagcaccaacaaatcccctttttggtcccatcctaccagtcctgttgctgacttggagcttcttctgtcaaacgctgcgtcgaactgaatcgttgcttttgggcactctcaaaatacatggaggctttcttcaaaccaggaccggcaacgagggcattcatcatttgtaatgacttttctgcacctgagattaacaaaattgggaatatagtctcatgagattcttccaatagtcattgtaattttttgggggtaactgttagccccataattttctataaaaatctttatattttggcttgtataaataactagtaagattt

SEQ ID NO: 28115 - DNA, 413 bp, Gossypium hirsutum
  Clone ID: LIB3148-011-Q1-K1-E3
accgaaagtcaggatgttcctactggaggagacacatctgaaagcgttcctccagaatggtggggccataagtatggatttatttctggaggttttctaggagaatctaccaggaaaaaatctaacaaaactggagagtgtaaaattttgaacgggagaactgtttgattcgaagatgaccaagagaatctctacaaacttgtgcaatataatgccacaactggaaagcaaggtttgggtattaaagatcgaccaaagaaaatagctggagttcgctttcaggggaaaaagacattattcagtgacagtgatgatgagaattcggatgattttggtccttcaagtaaacggatgcgagacaatgcctttgaaaccgagaaagccagtgaaaccaactttgaagttgaaaaagc

SEQ ID NO: 28116 - DNA, 323 bp, Gossypium hirsutum
  Clone ID: LIB3148-011-Q1-K1-E4
cccacgcgtccgcccacgcgtccgcccactttttcgcaacttcttatactttctaggagatactttgtatatacatatattaagatataaatttttgtacattattttttattttttaatttttttaataaacttatttgttttagctttatttattatataagttttgctttttttagttgttttttttatattataatagtgttttttaattttttaggtttttcattttttttttttattatttttttattttttttatttttttttaattttttttatttttttatataattttttttatttttttttttttataattt

SEQ ID NO: 28117 - DNA, 277 bp, Gossypium hirsutum
  unsure (1)..(277): unsure at all n locations; Clone ID: LIB3148-011-Q1-K1-E5
ggaatcgaaggatgagccagttgattccgattcttaaggccaccattattattcctgttattgtgaaaggatgagtgggatttaaacaaaaatagtgctgtggaaaatgcactacaacatgatgagctctatggcaagaggaatacacgttttcgctggcaatttggttgagagctttaaacacaagagcttaaattttcctttagtatcnttttaagatgtagtcttattagtttttaatttatataaaaaatgaattgaatgcttgcaagagaaa

SEQ ID NO: 28118 - DNA, 323 bp, Gossypium hirsutum
  Clone ID: LIB3148-011-Q1-K1-E6
gattggtgttgcaatgcatgaggttttcaagcaaagaggtctccttaattagtgtgtgtgtgattttccctagaaaaagaaaagcaaaacaatatttcctggattagtttcaggtgacaaacttgttcgaaatgctttcattgtttttgtgaaaaatcaattttatactgaaatgagggaaaaacccaaccaaagaaaagcaacagtttgatggttgggtcgatgcaaaattaataaacctgagaaggttgagacttttgatgaataaaaataaaaaataaaatagaaacaattgaaccaataaaatctagagttaatagacg

SEQ ID NO: 28119 - DNA, 199 bp, Gossypium hirsutum
  Clone ID: LIB3148-011-Q1-K1-E7
aagcacaccggacctgaacccgcaacatcccaatgtttgaatgtcaagcctaaaactagtggcaaattaaacccgactccatgttccagccctgtcccaaaaaccctaagtgccaccccttaaaccataccaacagattcagtgcaattgtaattaatatatttattcatattacataaaaaccgttctttttcatttt

SEQ ID NO: 28120 - DNA, 416 bp, Gossypium hirsutum
  unsure (1)..(416): unsure at all n locations; Clone ID: LIB3148-011-Q1-K1-E8
gagctacaaccaaaagaaaaagaatgggaaataaagcctccactgccaaaatcattgaaatgcagtcggcgagtcagtggagagcccagctagaggcctccaagcaaagtaacaagttgctggtagtagatttctcggcgacctggtgcggaccctgcaaatggatggaaccggtgattgaagaatatgccaacttatatgctgatgttgagttcatcaaaatcgatgttgataccttggaggatgtggctcgtcaattcaaagttgaagcaatgccgaccttcgttcttgttaagaaaggcaaagaaatatgcaggctggtgggtgctaaaaagactgaactccagaagctcattgagaaacacangtttgataattagcttgtttttgggggcaaactataaatatgggtgatg

SEQ ID NO: 28121 - DNA, 417 bp, Gossypium hirsutum
  Clone ID: LIB3148-011-Q1-K1-E9
cccacgcgtccgggctgaccctgatgagcttcgtgaccctgctgagaaagctcactatgctgccagagatcccatcacagcactgaaaaaatacctcattgagaacagtctggccagtgaagcagacttgaaggctatagataaaaagattgatgaggtggtagaggaagccgtggagtttgcagacgaaagccctgttcctcctcgaagccagctgctcgaaaatgtatttgcagatccaaaaggttttggaatcggacctgatggccaatatagatgtgaggacccaaagttcactgaaggcactgctcaggtctaagctttcaaaataagaagttgatcaaaactatttttgtcaacttatttattatttcatggtcacatatggttagtttggggagcagtcacgcgttcact

SEQ ID NO: 28122 - DNA, 399 bp, Gossypium hirsutum
  Clone ID: LIB3148-011-Q1-K1-F1
gtcacgagcttcctcaccatcgttatcctcggtgtcggtctcaacgccaagcccgatctcactatcgagacttgggcacatcaaaaagcccttgaaaaactcgccgccgaggagtcgtcatcttcttctgactgagatgttgtgaaacaaacttcaatctggatctgtagggggtacggatctttgtgaacgcttttggttttctgttgataaaatgtgtagttcgaataaaaagatggattccttttttttttttcaacagttgaagggcttgtagctgttgaaattttatgggttttttaaatttgatttaccttttcgatgatgatgatgatgatgatgaagtcgtttggcttatttgggatcgtaatctaatatttacttatcaagtttcaatgg

SEQ ID NO: 28123 - DNA, 399 bp, Gossypium hirsutum
  Clone ID: LIB3148-011-Q1-K1-F10
gcaggttctggatttagaatgttgtggaactctgtcaagtctttcctagatcctaaaaccacagccaagattaatgttcttggcaacaaatatcatagcaagttgcttgaaataattgatgaaagtgagttgccagattttctgggaggcacttgcacttgtgctgataaaggaggttgtatgctgtctgataagggtccatggaaggacccagagatcattaagatggttcaaggtggtgcacataaaggctcaaagaaatcacaggatgaaagcactgaagagaaaacgacatcagaggataaaactgagttcccaaagtctatgcctgctagtgaagccgtggctgctgagccagttccagatgcaccaattaaacaatcagacaattcttttgag

SEQ ID NO: 28124 - DNA, 415 bp, Gossypium hirsutum
  Clone ID: LIB3148-011-Q1-K1-F3
caccgagtcatagcccaaaccgatggaactcggatgtctttagcttcattctacaaccccggcagcgacgctgtcatctatccggcgccggcgttggtggagaaagaagcttgggaaaagaacaaacaggtttaccccaaatttgtgtttgaagagtacatgaaactgtatgcaggactgaaattccaggccaaggaaccaaggtttgaagccatgaaagcgattgaagctactgctcccattgcaacagcttaaaataaaaatattattacttagcttttgactttgtggaaaggaagaaaaaggtgtttcagtgttcatcctatatcgtagatgtgtgttggttgcactggtgaatttaattattggaacgaccattctattatataattattattaaaagggtttttggctt

SEQ ID NO: 28125 - DNA, 475 bp, Gossypium hirsutum
  Clone ID: LIB3148-011-Q1-K1-F4
cccacgcgtccgcgaaaaagatcatccccttgaatatgctgaaccaagtttcaaaacaccctgggtatgatgactcgggtcttgccggagttagctcacagatcatataaacaatgggttttgggggaagttttatggagtttcctcttatttgttattacattttttaactcttctttaatgttttctatttttaaattttcttctttcttgcattatttatttggagactgaagtttattttatttttttttttgtattattattaattttatctttttatttttttatttttctagtttttgttatattatatgtttttattattatatgtttttatctatctttttttttaaattttattttttatattttcatatgattgctatctatattttcttttggttattattattatccttatttttttattctttattatcttttatatattttttatttatatattcttttt

SEQ ID NO: 28126 - DNA, 413 bp, Gossypium hirsutum
  Clone ID: LIB3148-011-Q1-K1-F5
cccacgcgtccggccgatggaagtgcacacttaaggatggcatcatgcatataaacaataaagacattctctttaataaggcaacaggcgaatttgatttctgattttgttaagagaaaaatgtagtcgccatcgtattgcagcagttaccttaaaaagagcaggtcaaggggtgttattctgtgtttcgtaatttgtcttttaattattattagagtgaaaggttgattgaggggcatgggatatgctttattttaatgtcttccttaagacttgggttcgatggttgtcgtattgtacataaaggaagagagcattttcggccttagaatggattttctacttgtgacagtttctttgatttcttaaaactttttcattgtaatttttaattttttttatttcttttttct

SEQ ID NO: 28127 - DNA, 382 bp, Gossypium hirsutum
  Clone ID: LIB3148-011-Q1-K1-F6
cccacgcgtccggattacatattttgtgtatttacatcatatttatataaattttgataagttcataaaaaaaaaaaaaaaaaaaaaaaaaaccaaaaaaaaaaaaaaaaaaaaaaaaaaaaaaaaaaaaaaaaaaaaaaaaaaaaaaaaaaaaaaaaaaaaaaaaaaaaaaaaaaaaaaaaaaaaaaaaaaaaaaaaaaaaaaaggggcgcccctttaaaagaaccaaatttaactaccccgtccttgcaacgaaaaattttttttatggggcccccaaaataaaatcaacggcccgggttttaaaaacgtgggaatggaaaaaaccctgggttacccaaattaaatcccttggaaaaaaatccccttttcccaagttggg

SEQ ID NO: 28128 - DNA, 145 bp, Gossypium hirsutum
  Clone ID: LIB3148-011-Q1-K1-F8
cccacgcgtccggccaaccgcttccttactttgattctatcgtcgattcaaagcggtttcttattccatggcgtttcctttttgggccctccccaaaaccttacttcaaaccaggctaccttcttttctttttcaacccaccaac

SEQ ID NO: 28129 - DNA, 118 bp, Gossypium hirsutum
  Clone ID: LIB3148-011-Q1-K1-F9
cccacgcgtccgcccacgcgtccgagaattagaaatctgtacttttttgttcattttgttgtatttgcagtctctgcaaatcattaatgaaattctatggaattttaacggtttcatg

SEQ ID NO: 28130 - DNA, 385 bp, Gossypium hirsutum
  Clone ID: LIB3148-011-Q1-K1-G1
gtaaatttttcagggctaagaaagagaaaaaaatggctttgcaaaaggctaaggacatcatatctaccaataccgtcgtcgttttcagcaagtcctactgtccgttctgtgtggatgtaaagcaattgcttcaaaaacttggagcttctttcaaggccattgagctcgacaaagaaagtgatggagctgatattcaagcagctctggctgagtggaccggtcagcgaactgtgccaaacgttttcattggtgggaatcacattggtggctgtgattctacaacaggcttgcataaccaaggtaagctggttcctctgctgactgaagctggagcttttacaaaatcatctgtttagaatagagttaagctgcttgtctcccctaa

SEQ ID NO: 28131 - DNA, 359 bp, Gossypium hirsutum
  Clone ID: LIB3148-011-Q1-K1-G10
cggccgattcccggtcgcccacgcgtcggaaggttcttctcaaactaccgattgacgcccggggagcaagtgtgctgccacggcaagctgcgaatggagcccttggagaacaacctgcccgtcggcagacacacttggagtgcatcttcactacgacgcgggacacctttcgatacagccgtcaagattgtggtaatccgtgatatggagattctgagttgccatacatggtagtgccatgaaaatgaagcaaaatgtgtaaatttaatgattgattagtataatttggcatatatcatgaacttagttgctataatgtataatatggtattataaaccactttatatttatgatgcat

SEQ ID NO: 28132 - DNA, 119 bp, Gossypium hirsutum
  Clone ID: LIB3148-011-Q1-K1-G11
gtccaaacatttctcaacctgatgaagttctttacgagtatggaagtttctgcagatccactttcccaaataatgtttcgagcgtacccttgaataaaaaccactccccaatgttatgt

SEQ ID NO: 28133 - DNA, 143 bp, Gossypium hirsutum
  Clone ID: LIB3148-011-Q1-K1-G12
gtccaaacatttcttaaactgacgattttttttacgagcatggaagttactgcagagggggtgtctcaaataatgttactagcgtcccattgtataaaaaccactccccaatgttttgtcacataatcaatattctttaaaaa

SEQ ID NO: 28134 - DNA, 320 bp, Gossypium hirsutum
  unsure (1)..(320): unsure at all n locations; Clone ID: LIB3148-011-Q1-K1-G3
tcgaaaattaaaatataaataaataaaataaaaaattttttttatatataattttttaaaatatataatagtgttatattatatatatatttttgtttataaaattttaaaatataatatattaaattttaaaaatggggttgcttttttgggggttccattttttctttccttttttttctacttttttttttttttttttttncnccctattttttttctttgccctttttttaccccttgtgttttttggaaatccttgttttttgcctttttatttcttttttgaatttttctttttttccaagcttgtttttttt

SEQ ID NO: 28135 - DNA, 249 bp, Gossypium hirsutum
  Clone ID: LIB3148-011-Q1-K1-G5
gaaatgagcattttggcatgttgtaataagatttttaatatgttttggtatggatttgaataggttattgaatgatgatgatttagttataatgaaaaaaaaaaaaaaaaaaaaaaaaaaaaaaaaaaaaaaaaaaaaaaaaaaaaaaaaaaaaaaaaaaaaaaaaaaaaaaaaaaaaaaaaaaaaaaaaaaaaaaaaaaaaaaaaaaaaaaaaaaaataaattttttataaaattaataaaaaattta

SEQ ID NO: 28136 - DNA, 355 bp, Gossypium hirsutum
  Clone ID: LIB3148-011-Q1-K1-G7
gaagaatgccaagcgaccacatgaagcatcgggggacgattccaacgttgattctgcaatcaatatgtcaagagacgaggctatgaaagagaggacatcagcatccaacgaaattagtgattctgcgtataacatgttcagaaatgatgctttgaaggattctttcgagacaagcctagttttctttattggtcaattgaagagttttgcagaagcatctgtgaagatgtacacagaacttgacagggatattcgacaagccaaacataattatgaaatctctgtcaaaggagtcgaggttgccaatgaagaaaataacgctgagagcaacaaccaaagtggcagcgatcaacaa

SEQ ID NO: 28137 - DNA, 116 bp, Gossypium hirsutum
  Clone ID: LIB3148-011-Q1-K1-G8
gaataatgccaagcctcctcatgaagtttcttcggacgatcccaactatgattctcctgggcagaattttaagagaccatgcgaagtttttaattacatacatctccaacgaattt

SEQ ID NO: 28138 - DNA, 428 bp, Gossypium hirsutum
  Clone ID: LIB3148-011-Q1-K1-G9
cccacgcgtccgctgtgttttaaaatgagaagcaaagctggaaatgggactatatatatatgtatagatggaaccggatttgaagaggtaagttgcttttgtcttttgttatatttccttttccatgtcagttaattacaagtacaatgttgtcccatgaactagtacatgttatagtgttgcaaattaatcactattatagtatattcaacttttagctgtcaaaaaaaaaaaataaaaaattttaaataattaaaaattatttaatattaaaaattattaatattttattttttattttaatttaaaataaaatttttattttatttttaatttatattattattttttattaaaggggcggggtttttatttaaaataacaataatttttttctctttgtttatattaataatttaattattttt

SEQ ID NO: 28139 - DNA, 122 bp, Gossypium hirsutum
  Clone ID: LIB3148-011-Q1-K1-H1
cggacgcgtggggttggaaccattattatgttccgttgttattctctcttttctttatgcaactgagggaattcctcttttttcttttttaacagcataataataacaccagctttcataac

SEQ ID NO: 28140 - DNA, 408 bp, Gossypium hirsutum
  Clone ID: LIB3148-011-Q1-K1-H11
aaagctagcacttagcccggttacaccattaaatgaagaccctttcaacaagtcttcaccttctttagggaattcatctgaggaagagaaagctatagctgagaaaggcttttacttgcatccatcacctatgtcaacacctagagatactgagcctcagcttttaccactttttcctgttacttcaccaagagtttcaggctcttcttaaacatatgttagtttgagagtgatttgtcaagtgggttttggctgaaatttgagtgataaaaaaaaaaggaagttaagaagatctttcttcaattgtatgatttggtctccctttgattatggtaaagctcttctttttaccttctttcttcattttacttggattatggctaactagattattcccatatgaaaaag

SEQ ID NO: 28141 - DNA, 388 bp, Gossypium hirsutum
  Clone ID: LIB3148-011-Q1-K1-H12
tccgagacgaagaaaaatggttcaacggctgacataccggacccgccatagctatgccaccaagtccaaccagcaccgggtcgtcaaaactcctggtggaaaacttgtctaccagacaactaagaagagagctagcggacccaaatgtccagttactggcaaacgaatccaagggattcctcacttgagacctgcggaatacaagaagtctaggttacctaagaacaggaggactgtgaaccgtgcctatggtggtgtgttatctggcagtgcagtcagggagaggatcattcgggcctttttggttgaagaacagaagatagtgaagaaagttttgaagattcaaaaaaccaaggaaaaagtttcatcaaagaactaaaagatgaga

SEQ ID NO: 28142 - DNA, 324 bp, Gossypium hirsutum
  Clone ID: LIB3148-011-Q1-K1-H3
cccacgcgtccggggtgacccttgcaaaggtgtaaagaagagcttagctgtagaagtttcttgtgcatgaagaaatgtgattaagaatggattattgggtgccagagaagtgcaagcgttggatcaaataagcttttcaacaatgagttctgatgataatgggaaaaagacgtctcataccagaaacgtgttcttgctagtactagagaaataaacattagtgtagtgtatcacttcaatggtatttctgcatcagtatatcttttaacaccgtaccaagaaacgatatcaaagtaaattttatcaatatatatctataatgat

SEQ ID NO: 28143 - DNA, 412 bp, Gossypium hirsutum
  Clone ID: LIB3148-011-Q1-K1-H4
cccacgcgtccgaaatcagaacaaaacttccaaagctttcagacaagactagtgattcgtgttcaaagaaccaaacaagccaagtacatggttgatttggacgttcagatccctacaactttcgatccattcgccgaggctggggaatttggtggcactggaaccaaggagtatgttcatatacggattcaacaaaggaacgggaagaaaagcttgacgacggttcaaggcctgaggcatgacctgagctacgagaaaatcctcaagagtctcaagaaggacttttgttgcaacggcaacgttgttaaagacaaagagctcggcaagatcattcaactccaaggcgatcaacgcaagaacgtgtcgcaattcctcgttaatgccgggatcgtcaagaaagaccaaatcaaaa

SEQ ID NO: 28144 - DNA, 394 bp, Gossypium hirsutum
  Clone ID: LIB3148-011-Q1-K1-H5
cccacgcgtccgcgacgtgatttaccaatgaagaaaaatgtcagcccagttttacgggttgcaagtcttggccatggaatccatgcctatgtaaatggtgaatacgccggttctgcacatgggagcaaaattgagaagagctttgttttccagagagctgtaagcttgaaggaaggggaaaaccatattgctctcttaggctacttagtgggactccccgatagcggagcctacatggagaaaaggtttgctgggctcgttctatcaccatccttggtttgaacactggaacactcgacatatcacaaaatggttggggccatcaagttggaattgatggagaaaagaagaaattgtttactgaagaaggctcaaagtctgttcagtggacaaa

SEQ ID NO: 28145 - DNA, 400 bp, Gossypium hirsutum
  Clone ID: LIB3148-011-Q1-K1-H6
ttccgaataatgggatcatatgcagttcaaagacattatagtcaaagttgctagtgttgagctatattacaaggctgtccacttctacttgcaagagcaccctgatctcataaatgatatgttgaacgtgcttgcacttcgtgtggaccacactcgtgttgttgatatcatgagaaaggcaggtcatctgcgacttgtgaagccttacatggttgctgttcagagcaacaacgtgtcaacagtaaatgaggcgttgaatgagatttatgtagaggaagaagattacgatagattgagagaatctatcgacttgcatgataactttgatcagattggtcttgcacaaaagatcgagaaacatgagctgcttgagatgaggcgagttgcttcatacatttac

SEQ ID NO: 28146 - DNA, 357 bp, Gossypium hirsutum
  Clone ID: LIB3148-011-Q1-K1-H7
agctgatgagattcctgttgagaaagttgaaaaatagagcgaccaataccatacgtaaggtggcaaatgcttaaaggagcttcttttttctatagttggcggagtcatactactattatttatgattactatgtaggatgtgggatggtgagggctttctttttctttaatggttgtttctctgctttggggtttgatatttagtattgaacttgcttttgggtccaggggtcaacatgccgattgaagaaactatgggttttccattttgaagtgttttggatgtatgtatttatgtattttatttgtattttcttgaatataatatattttatttttttttagtttttatttatt

SEQ ID NO: 28147 - DNA, 62 bp, Gossypium hirsutum
  unsure (1)..(62): unsure at all n locations; Clone ID: LIB3148-011-Q1-K1-H8
ggcaannnaanaaacanagcaaagggcggagaaaaagaccagcaggagaaggagcggggggg

SEQ ID NO: 28148 - DNA, 55 bp, Gossypium hirsutum
  Clone ID: LIB3148-011-Q1-K1-H9
aaaaaaaaaaaaaaaaaaaaaaaaaaaaaaaaaaaaaaaaaaaaaaaaaaaaaaa

SEQ ID NO: 28149 - DNA, 304 bp, Gossypium hirsutum
  Clone ID: LIB3148-012-Q1-K1-A1
cccacgcgtccgcccacgcgtccggtctgattcgtagttgagttcataattttgatataaaagactaaccagcatatctcatgtttaacccttttcctccctattttccttttcttcgattaataatgaagaaataagatcgcaatttctattaaaaaaaaaaaaaaaaaaaaaaaaaaaaaaaaaaaaaaaaaaaaaaaaaaaaaaaaaaaaaaaaaaaaaaaaaaaaaaaaaaaaaaaaaagggggggggggttaaaagaaatcaaaaatttaggtgcccggggtgggacggctttggcttt

SEQ ID NO: 28150 - DNA, 354 bp, Gossypium hirsutum
  Clone ID: LIB3148-012-Q1-K1-A10
cccacgcgtccgatgatcatcatgaatggcagatgtttacaattgcatgccctgaaaaaaggggatatgagtgactcactgtaattcttttttcttatattattgaaaaccagcgtcagggctgtaaatgtgacttctctctttaaaaaaaaaaaaaaaaaaaaaaaaaaaaaaaaaaaaaaaaaaaaaaaaaaaaaaaaaaaaaaaaaaaaaaaaaaaatataataaaaaaaaaaaaaaatataaaaaaataaataaataaaaataataagggggcggccgttttaaagattccaagtttacaaccccgggcatgcaaagatataccttttttttagggcccccaaatttaat

SEQ ID NO: 28151 - DNA, 200 bp, Gossypium hirsutum
  Clone ID: LIB3148-012-Q1-K1-A11
cccacgcgtccgcccacgcgtccgaaaattttctacattagtcacaacatgtgtgctataattttcctgcccttcccatttagttttttactttgcctgtcttatgtaattcaaggccgaaaaaggtgttttagtcacttcttgctccaataaggagctaggccatgtaatcttccacttcaatctttattcttagctgc

SEQ ID NO: 28152 - DNA, 417 bp, Gossypium hirsutum
  Clone ID: LIB3148-012-Q1-K1-A12
gggtcatgtttggtatctcggaattgctaagccttccttggtggactcggaagaagttgagagtgagaaagggaagatagcggtgcagtctcgttgtggtcatttctacgtgcctccagccattgaagatgttcgtgtttttagaattgcaggtcctaagtttatcaaacttaatcgtggaacatggcacgccgggcctttgtttaaagctgatgctatggacttctacaacttagagctaagcaataccaatgtggtggatcatacaacacatgtgttcaagaaggaaaacggagtcatcttttcaattgatgagtagctttgttcgtccgatgccgaagatgttgagagatgtgattttggagagtgaaaacttttccaacactatcaaatatgttgattttgcgttttattttt

SEQ ID NO: 28153 - DNA, 188 bp, Gossypium hirsutum
  Clone ID: LIB3148-012-Q1-K1-A2
atatataagagttagtttaagtctatagaataactattatactacaactttatcgaaatataatcgtatgctgctccttctttccaaaaagcgtaaatgttctctactctaggccaacctcccaggaccgccaaacgtttgcaagttcataaatagcaatgaacaaaatttcgaaccgggcgccctta

SEQ ID NO: 28154 - DNA, 274 bp, Gossypium hirsutum
  Clone ID: LIB3148-012-Q1-K1-A3
gcttcttattcaaaaaataaaaaaaaaaattttaattaaaaaaaaaaaaaaaaaaaaaaaaaagaaaaaataaaaaaaaaataaaaacaaaaaaaaaaaaaaaaaaaaaaaaaaaaaaaatataaaattaaaaacaaaaaatcttttatttagctcaatcgtttacaactttctttacttttttttctcatcccattttctttattaatcccttttttaaaatttcccctttttattaacttataattttagtttcaaactttttccctttatt

SEQ ID NO: 28155 - DNA, 170 bp, Gossypium hirsutum
  Clone ID: LIB3148-012-Q1-K1-A4
gtttgtccatggacttcttagttttgggttttcaatcatttaccgaactgaattaaaaaaaaacaagtttactaaaaaaaacaaacaaaaaaaacacaattcaatatccttccttgtaaaaaaaatttatcttttctctttcaacccctgccacacaacaataccctttc

SEQ ID NO: 28156 - DNA, 392 bp, Gossypium hirsutum
  unsure (1)..(392): unsure at all n locations; Clone ID: LIB3148-012-Q1-K1-A5
cttttttttaaaaaaacagaagctttaacccctctccctagggtttgattcaacatgcaggggcctaaaccatcatttatttgatggcttcggcgcgccaatggcgaccggaccttgtcaacggaggacacgcccacggagatcgggtacagggtacgttagcatcgtacggaggctgtgctggtgctggcgcgggcgtggctgctggagggtacggagcgaggctgggggttgtacggcgcctggaggctgcggtactaagcaagggctagggtttctgaactttggtttaagtattgggcctattgggccgtctggattttgggttagacattagtttgggctttgataggntattggtttataaaatgacacttaattattgagttttt

SEQ ID NO: 28157 - DNA, 412 bp, Gossypium hirsutum
  Clone ID: LIB3148-012-Q1-K1-A6
caataacgagtccagtctcagatgcatggtacccaaccctagccctcttaatgctctccattggtcttgtcgtcaccgcttccttcttcatctatgaagcaacttcttcgaagagaaatcgaagtcttgccaaggagctcatcactggcggagtggcatcggtcttcctgggcttcgggtcactgtttttgctactttcagccggtgtttatgtctgatttttgatatcgttcaaccggcttacagagttttgcaaagaaaaggattggtgtctgcttttcttgcatttttgtagtttatcagatcaggaaagcttctttgataaacattttgatgtcacttgagtggttttattggtacatgcttgaatttgtatattcatgtcataagcatgtttcattcatgttacatg

SEQ ID NO: 28158 - DNA, 432 bp, Gossypium hirsutum
  Clone ID: LIB3148-012-Q1-K1-A7
gctgactgcacaaatgacaaggcatgcaacaactgtaggagaccaggtcacttggcacgggagtgtacaaatgatccaatttgcaacttgtgcaacgtagccggacatgtggctaggcattgccctaaaggcaacatgataggtgagcgaggcagttttggtggtggtggtggtggtagtggtagtcgtggcggtggctatcgagatcatcatcatagagatgtagtgtgccgtaactgccatcaattcggtcatataagccgggattgcatgggaccgttgatgatctgtcacaactgtggtggaagaggacacatggcatatgagtgtccatcaggaaggtatttggaccgttatcctcctcggaggtactagatgatgatgccagccaggttatggcaggatcaaaaaatattttaattaataacatgc

SEQ ID NO: 28159 - DNA, 397 bp, Gossypium hirsutum
  Clone ID: LIB3148-012-Q1-K1-A8
ctcagtctcttatccgaaggttggtccggcagcccacatgcacgatcttcgttgtcaacaggtctgctgcagacgacacctttcagatcactttctgatatcagttctgggaacaattctatatatgagaataagaagtcctgtgacagagcgagcctttgcgatgatgtgctcagctcgactcttgtaagttcaactttgattccttctgtaatccgaagctaaagatgggaagttgggagaagaactaagcatggaggagagcttgattagaagaatctttgaagaactttgtgtttgtctaatgaattttcttttaatctttggttaaattttaactagattgttctttctttttacaagtagagaatattgaagattcttagctcatttggaa

SEQ ID NO: 28160 - DNA, 266 bp, Gossypium hirsutum
  Clone ID: LIB3148-012-Q1-K1-B1
cccacgcgtccgaaccttttgatgttaacttttttgcctactttagtcttatacattaatcgctgatcatgaaaaaaaaaaaaaaaaaaaaaaaaaaaaaaaaaaaaaaaaaaaaaaaaaaaaaaaaaaaaaaaactaaaaaaaaaaaaaaaaaacaaaaacaaagacatcaaaaaaagaaaagaacaattaaacttacaccaataaacaaccaaagtgtgtcaaccgaaaaaaactaaaaaatatggggcgctcaactttgagaa

SEQ ID NO: 28161 - DNA, 181 bp, Gossypium hirsutum
  Clone ID: LIB3148-012-Q1-K1-B10
tatactctctattttcatccccagaatgcttctaatctcattcatatagtgccctaatcattatccttttttctcccttgatttttttttttttggttattctgagtttgtgtcctgtatcagtgtcgtattgcaaaaatgtatgagaattttgctataatatattaatggcacttgaagt

SEQ ID NO: 28162 - DNA, 349 bp, Gossypium hirsutum
  Clone ID: LIB3148-012-Q1-K1-B11
ggcttcctcaaggtgattattatcccaaagcttgccatgttggttttggacttgttcttggagaatatggcatgcgtttgctaacccccaacactgaagtggttcgtctagttgatctacttgacgatgccaagatccgatgttaagctacacttatcgagcatggtctgggtgaagaatggaccgaggaggagattgctagtactgctgatgcacttggttatggtgctgttaagtatgctgacttgaagaacatcagattgactaattatacacttaattgtgaccatatgcttaacgataataaagcatttcgcaaggtgcctcaatagtcaaagattcccccatc

SEQ ID NO: 28163 - DNA, 379 bp, Gossypium hirsutum
  Clone ID: LIB3148-012-Q1-K1-B12
cccacgcgtccgcaggtgacacagtttgaatttgaaaagccacccaaacactatggaggatgtcacaggaccatagaaggtggtccatatcttctggtgccttcatgcaaagagggcaatgaacatcaacctttagagttctttgtgacagattactataatgaggcagaaagttgctaaacaacctccaaagatgtattttgatttttggtgtgagtatagatcaaaaaaatttgtaaaagtccttgcaagcctcaaagataggcatgttgtaattaataccctatagggaatctgtaactaagacccgatatccacttcttatggagtaatctccaaaacccacatatttccagaccaaaccaataaaaacttgatc

SEQ ID NO: 28164 - DNA, 421 bp, Gossypium hirsutum
  unsure (1)..(421): unsure at all n locations; Clone ID: LIB3148-012-Q1-K1-B2
ggcagccaaagccgccatcacgtgcagcgacgtggtgaaccacttgatcccgtgcttgtccgacgtacaaaacggcggtacacccgctgctgcatgctgcagtggggtaaaagcactctacggcgaggttcagacctccccggaccgccaaaacgtgtgcaagtgcatcaaatcggcggtgaacggaattccgtacaccagcaataacctcaatctcgcagccggcctacctgctaaatgtggtctccaactcccttacagcatcagcccctccactgactgcaacaaggtgcagtgaggttgatgatgatgatatggaaggagtggaagagggtccagctcagctagataaagtagctagctanagtaaaataagctgagtgagtgtgttgttttttagaaattccatatataatcgggg

SEQ ID NO: 28165 - DNA, 115 bp, Gossypium hirsutum
  Clone ID: LIB3148-012-Q1-K1-B3
gtccggcaacccattccaatttcttattcatactttttgtaatacacctcctccccttccttccggaagggcataacagcgggccacccgcttcttcctactgcaacggggttaa

SEQ ID NO: 28166 - DNA, 454 bp, Gossypium hirsutum
  Clone ID: LIB3148-012-Q1-K1-B4
cccacgcgtccgaactttatcagctctactttatttttataaacctactcaccctcccaagagaagagagaacttttctatactctcaccccaccaaaattcaccgaccttggcccgacaacttttcctcttttatttctcaaaaccttcaaaacttaattctcttaaattatatatattattatttcaaatatatacttttatttaaaatttccaaattatttttcttctttttacattaataatatttctttatataatttatatatattttttttttatttttatatatttttatatttttaatattactcttcatttttaattatatctatacttttgtgtataattttatatccctattatttttttaattattacatatttaaaatttccctaattatttttagacttttatttattttttcattttttttattatattttttattta

SEQ ID NO: 28167 - DNA, 427 bp, Gossypium hirsutum
  Clone ID: LIB3148-012-Q1-K1-B5
tcctccccacatcgtccgttcctgaagattttttattacaggtttgctattcctatggggggggtattttttctttggcgattctctcctctttcaataatgtgtttgttaaatccttttgttttcataattatttttactttctaattatttttttcatttctttttatttttttttatctttattttatcttcatttatatttttattctttctttttttctttccttttatttttttttccttttttttttttaactattttttttttctttattttcaattttttttttttaattttttttttattttatttttgttattattttttttttgtttttatatataattttttttattatttatttacgttaattttatttatattttattttttattacttttttttttttttattcctttttt

SEQ ID NO: 28168 - DNA, 231 bp, Gossypium hirsutum
  Clone ID: LIB3148-012-Q1-K1-B6
aaattgctgaagagtcgccacatgtttatcttaattttagcaggaatatgtaaagcctagagcattttgtagaaatcactctatttatcacttatgagcgaatgttgcccgttattttgtacttgatttgtaatcaaaacatgatacccattcttcactgattaaataaaataaaaatcgacataaaacatagaaagaaaacatgcgaagaagctgatctacaaatgagga

SEQ ID NO: 28169 - DNA, 406 bp, Gossypium hirsutum
  Clone ID: LIB3148-012-Q1-K1-B7
cccacgcgtccgaagaaaaccaaggttgcaatggtggtttaatggacattgcattcgattggattaagaagaaaggtgggatcactactgagtccaattacccttaccaagctaatgatggaagttgcgatgctgccaaggtgaattctccggctgtggctatcgatgggcacgagaatgtgccagctaacgacgaggatgctctgcttaaagctgttgcaaaccagccggtttcagtggctattgatgctgggagtatggatttccagttctactccgagggggtattcacgggagaatgtgggacagagctgaaccatggtgtagcagcagtggggtatggaacaaccttggatggaaccaagtactggatagtgaagaactcatggagagcggaatggggtga

SEQ ID NO: 28170 - DNA, 247 bp, Gossypium hirsutum
  Clone ID: LIB3148-012-Q1-K1-B8
aagccaccatatgatttatgtgttagtatctgaatcatcgagcggcggaactctgcgttgcagcatgttgtattgagaggagttcttgtttgggtttattgaatggaagagctaacctgaagaaagggcatgctcttgattttgagtcgatggtggtcttaatccccatatgcaaagatggttcgggaacaattagtcctcgcgtcctaatgctatatggaaacccaattgactgcaatttcccagc

SEQ ID NO: 28171 - DNA, 312 bp, Gossypium hirsutum
  Clone ID: LIB3148-012-Q1-K1-B9
cccacgcgtccgtgccaaccccattgttactctaccattggtcattggaagcagatgaggaagttccatagtttttgactaccaagttctctctctctctttctcttttcttttttaaccctttaaccaggctttgtaagtttgtgtagtcaagtaggaaaaaagacatctttttgaatgaatatgcataaagcatcaggatccaaaaaaaccaacacgtatttttcacccattttgcttacattataaaaagaaccaggaaacgaaacaaaaaaatccaacagcaaggttaattgaaggtgatccaaaaac

SEQ ID NO: 28172 - DNA, 392 bp, Gossypium hirsutum
  Clone ID: LIB3148-012-Q1-K1-C1
cccacgcgtccggtacggtgccgcagtccaagccgcaatcttaagcggcgaatgcaatgaggaggtgcatgacctcctgcttttagatgtcaccccgttatccctcggattagaaaccgccggcggtgtgatgactgttttgatcccaagaaacactaccatccccaccaagaaagaacaggtcttttcaacatactccgataaccaacccggtgtattaatccaagtttacgaaggtgaacgaacaagaacaagagataacatcttattaggcatattcgaactctccggcatcccaccggctccacgaggtgtaccgcatattactgtgtgcttcgatattgacgccaacggcatcttaaacgtttcagccgaagacaaaacaaccggtc

SEQ ID NO: 28173 - DNA, 119 bp, Gossypium hirsutum
  Clone ID: LIB3148-012-Q1-K1-C10
gttgtggtgtaaggcatgtagcaagttggtgttagaagatccaagtttatttaaaaaaaagaagaaaaataaaaaaaaaaataaaaaaccaaataataaaaaaaaaaaaaaaaatatat

SEQ ID NO: 28174 - DNA, 171 bp, Gossypium hirsutum
  Clone ID: LIB3148-012-Q1-K1-C11
ctttcctagtatgtactatatgtatgatactttcaaataggtttagcgaatggaggaaagggcttgattcttaaaaaaaaaaaaaaaaaaaaaaaaaaaaaaaaaaaaaaaaaaaaaaaaaaaaaaaaaaaaaactaaaaaaaaaaaaaaaaaaaaaaaaaaaaaaaaata

SEQ ID NO: 28175 - DNA, 318 bp, Gossypium hirsutum
  unsure (1)..(318): unsure at all n locations; Clone ID: LIB3148-012-Q1-K1-C12
agaaaagtgtgtttccacgggtaaggcatttcgactgaggcaatgtacatcaacagcaactggggactcttaaaactctctggagcagtgaagttgaattgccgtttttcaaacttatatgttttgatctgttaaaatgcctgcaaatattatgtatttatgtcttaaatttatagaaaatggctctctttttttttggccgctagcctttataaatgtatgccccacgtgcaattaattttgggttttacgttactagccttttgaatttccaaaataaattattaaaatttacgacattaattttattacattnaa

SEQ ID NO: 28176 - DNA, 394 bp, Gossypium hirsutum
  Clone ID: LIB3148-012-Q1-K1-C2
tgcaattgctaaagaagttgaagctgagctggtttcgagggacataggctgccatctggttgaagtgctggaagcagtcaatttagttctttttgagtcaagaggcttgacaagatcccccgttcttgtagattctaagcattcgtacttacactcagtactgagctccagatgtggcagtgcaattttgcttagcataatttacattgaagtttgtcggcggcttggtctaaccattgtgggatctcgagttggggaagattttttgatatggccccagacagggtacccagaggaactcttcaaagtgacttcaggacacatcttgtttgctattgtcaatggaaggtgtgtggaggaccctagatcaatggcatcagatttaactggtact

SEQ ID NO: 28177 - DNA, 429 bp, Gossypium hirsutum
  unsure (1)..(429): unsure at all n locations; Clone ID: LIB3148-012-Q1-K1-C3
cccacgcgtccgaaatttgtcagctctaccggagggaatagaccgcctcaccaaccttagagaattgagaattggcggatgtccggagttgagcaaaagatacagagaaaatgggggtgaagattggcacaaaattgctcacatccaaaaagttgttattacggatgaagattgaggtatgtgataaaattgtaatttctctatcagattcgattccatattagagtagagtagagacgtggcttccataatagtccgttctaccagcatggttttggttagaaatttggtatgtttaaagttgatcaagtactcattgagttataaaacttgcatgaatgaaatgtgaagatggagatggaagaatgaancagaggttgaggcatggcacggaagacttttactttatttgcaagtgaagctttgcat

SEQ ID NO: 28178 - DNA, 381 bp, Gossypium hirsutum
  Clone ID: LIB3148-012-Q1-K1-C4
ccgtctcccgcggccgataaaaccgatagcatatccagtggaatcaagcttggtccccactgggtcggttccacggcggcgctactggttgctacagcggccgtgtttttccttgtattcccagctggatttgcttcaatagtttaggggtgttgcatgggatttcgagatttggaggtttatttatagttgaagtccattagtttttaaacggtctcataaaaaagatggactgagttgacaatcatgatgattcgtcgtttattcttcctttttcttatttgatttaacgtccctttgaattaaaactagtatatggtcccagcttcgcctgggaaatcctgttatatatatatatggaaaattttatcaataataatt

SEQ ID NO: 28179 - DNA, 407 bp, Gossypium hirsutum
  Clone ID: LIB3148-012-Q1-K1-C5
cagatattaatgaagaaagaaacgaattctatgactgcgaagctgatgtctctttggatagagatggatgtttctgctacggagccgcatacagatagaaaccaagggggttcctcatcttcaaagaagaaaaaaagcattctgatgcaactgatcatttttcttcttcatttcatgatgctaccactttattggcggaaaacatgcgggccattggcgaacaaatcagtaggagtattgcctctgatatgatagttcaacaaaagtcagaagaattccagatcatccaagacatagctataaatttatattcaaccttatgtgaaatagaacgtttaacagtggatgagcaggtatcgagcattgagttatattccagatcatccaactcaaatgctcgttttctt

SEQ ID NO: 28180 - DNA, 425 bp, Gossypium hirsutum
  Clone ID: LIB3148-012-Q1-K1-C7
gtctgcaagtataatttacaggtaagttaaagatgatagaagatgctcagaacggaaataagaaccttccttttgtgggtgagaatcgatatactatcttatatgtttgtactaattgtgtcggcaaagctcaaatgaacttgtctaagcccagtttatttatacttgtaagattctctgcactgtatcatctatttatattatacttaaaattgttatttaaaccgataaaaatcattacgttattatatgatccatccgtttcttttggaaaaaatttgatgacacggccatattttgtcttttacttggatcagtggtggaggcacgaccttaacaccaactacaccgggcacgacaacaacttcatcatcatcaacaaccaccacgcccttcatcatgaccccaggcaccaacaccccaac

SEQ ID NO: 28181 - DNA, 423 bp, Gossypium hirsutum
  Clone ID: LIB3148-012-Q1-K1-C9
gagaaaaagcagaagacaatcaagcagtctacaagcagaatcaggcttgccacgtcagaagcccaggcataaatctcacaatttgaggcaaagtgatgaccaattgagtgatatcagtagtgacatgagagatttgaatcaccaaggagatgatagttcgatgcaatctgagagcaatatgagcatggcctcctatggtgacactgaagtcactgctcaaagttatggcaagatagagggtacattctcccaagaacaggaaacgaagcagaaaaatccagcagcaaggttaattgaaggtgatccaaaagcagaacctccaagaactgccccggaacagcctagtcctgtctctgttctagatgctgcattttacggagatgaatcaccgtctcctgtgaagaaaacatcaaaagcttttga

SEQ ID NO: 28182 - DNA, 178 bp, Gossypium hirsutum
  Clone ID: LIB3148-012-Q1-K1-D1
aaaaagtttcctcgggataagctctacccctgatttgtgacaaaactattaaaactaggctgaaagccatgtataaccccgttgaagctttttagtcattctgtttcttcaaatgaaatctctctctttttgtcaagtgaaaaataaaaaaaaaaaaaaaaaaaaaaaaaaataaaaa

SEQ ID NO: 28183 - DNA, 366 bp, Gossypium hirsutum
  unsure (1)..(366): unsure at all n locations; Clone ID: LIB3148-012-Q1-K1-D10
gggaaatttaagcacggaaagcatggaggcggcaaattcaggaagtggaagtgatgttagtggccgcaaaagcatggagaattgggagtcaaaactgatagtgtcgaatgaatgaatgtaataataatttgacttcaactgctttgtattgaataatcacagacttgtttttctttctttttaattgttgacatataacaataacaacatttgattcaacgatctgatatatgcattacgacttanaaaaaaaaaaaaaaaaaaaaaaaaaaaaaaaaaaaaaaaaanaaaaaaaaaaaaaaataaataataaaaaaaaaaaaattattaaaaaaaaaaaatattaaaaaggggcggccgttttaa

SEQ ID NO: 28184 - DNA, 422 bp, Gossypium hirsutum
  Clone ID: LIB3148-012-Q1-K1-D11
cccacgcgtccgcccacgcgtccgcccacgcgtccgcccacgcgtccgcccacgcgtccgccagtttttttttttaccatccaaaaaaggagaaaattgacattatatggatagtaaagtaccgtctgaaaagtttactcaggagctagctcgcgagttgcttattgcgatatcttattctgtacctgataccgacccaaattcagatcatgcattgaaaatcgtagatggcgcaaatggcactgtggctgcaatcgacaaggctgaaaaatataggtctgaactgatttcgatatccgatacgtctcctgatgctcaagtgccttctgttgtgcttgggaaccatgcaggttaaaggagacaaaattgtaatggagattttaatacatgcagtggctgttaatgatttctagaactgaaac

SEQ ID NO: 28185 - DNA, 405 bp, Gossypium hirsutum
  Clone ID: LIB3148-012-Q1-K1-D12
cccacgcgtccgccacagttgagtctgagtaatattgctcagtagttccattctgcttggttagtctacaccaagtgacaccctcttttatacctttgtcagccattgggctaaggtcaattggtaaacctaaaatctgaacttttgatgtcaataccagctgatgatcttcactaactctttcatgttcatcgaccaacacaatctatcgacacatctgagcaacatttgtttgtctgtttcattcttgcgtcattgctactttttgtgtttaaacttttctaggtttgtactgtaaccattacttcttgcaaatgttggctcaaattgggagaggccattatgattgcacttacaatgcagataacattgaattgcgaatggagagattattactacagcttc

SEQ ID NO: 28186 - DNA, 329 bp, Gossypium hirsutum
  Clone ID: LIB3148-012-Q1-K1-D2
cccacgcgtccgcccaatcattgctgttctttttttctaacacactcacttaatctaatgggatgaggttcacagaggacaggctctttatccacataatccatatcatattaagagtgtctaccatgtaagctccaagattacttaacttttctgcattccaagagttacttattctcttactcatggtattgacataaacatcataccatccattgcttccaccaaagcaattatatctgctgcatgtacttcggaaaccttaaagattgcatcaggatacactaatactctatcaaactatcttacgtataatggtgttgaaagtc

SEQ ID NO: 28187 - DNA, 312 bp, Gossypium hirsutum
  Clone ID: LIB3148-012-Q1-K1-D3
cttagcagaaacccctataaatgcagctcattgtattgaatatgctcacttaattaaatgggatgaggttcacagtggacaggcttttgatccatataatccagatcatatgaagtgggtctacgatgaggctgtcaagagagctgaacttttcggcattccaggagttacttattctcttactcaaggtgttgtaaaaaacatcataccagccattgcttccaccaatgcaattatatctgctgcatgtactttggaaaccttgaagattgcatcaggatgcagtaaaactctatcaaactatcttacgta

SEQ ID NO: 28188 - DNA, 130 bp, Gossypium hirsutum
  Clone ID: LIB3148-012-Q1-K1-D4
cccacgcgtacgcccacacatacgaaaaaactatattatatttaagcatttacaccataacgagtgaggttcacagtggctatgaaacactgaaccaatgagagccaatctttgtatccgtagcaaacta

SEQ ID NO: 28189 - DNA, 343 bp, Gossypium hirsutum
  Clone ID: LIB3148-012-Q1-K1-D5
aacatacgtaaacacacacaaacaattaaactactaaagtattcctgcaactaatcaaggcaggtctctccaacaccatggacataaaaaagattatctcttgcgctgtcatattcgccgcttcctcatttagcgcactcttggcttctagcaccgcccctgctttctctccatatggcgccccacttagctccgcctcatttggcgctgcaccagcttctgcaccatgcccggactccagcgttgcaacctcaaccttgcctgttcttgggtcattggttagaaccctcattgtctctttccttgcttaaattatgggttaccgtgcattttttgaagagat

SEQ ID NO: 28190 - DNA, 355 bp, Gossypium hirsutum
  Clone ID: LIB3148-012-Q1-K1-D6
cccacgcgtccgcccacgcgtccggtttcaaacataaaagaaatcaccagtagactgaatcggttcaaacacttgaagaagtagtttggggttgagtgagatcatgtctcaaggtgcaacttccaagggaaagaaactcatgctgcaaccaacttccttgatggatggagctgtggagtatgttggtagagccaatgagaagcaagatatggttgagttgctcaaaattaacaactcagatggagtttgcgtcctttccatcgttggcatgggagggatgggggaaaacagctcttgctcagctggtttacaatgatcccagctatggatttaaattgcgagccgattccggtat

SEQ ID NO: 28191 - DNA, 307 bp, Gossypium hirsutum
  Clone ID: LIB3148-012-Q1-K1-D7
aagtttcagctgtatactgtgatgattataaagttaggcgtgctggacctggtacaagaatgactggttaggttatctgggattgatgaggaggacatatcgcctggtttagtcttgtcatgtgttggaaaaccgattcctacggtcgctgaatttactgcccaactgcacatcctagaattacttgagaatgctatttttacagctggctataaagctgtcttgcacattcattctgttgttgaggaacgcgagatagatgagctactacagcagattgatccaaagacaaagaaacccatgaaaa

SEQ ID NO: 28192 - DNA, 245 bp, Gossypium hirsutum
  Clone ID: LIB3148-012-Q1-K1-D8
atcaattgattgtctattcttagttggttgatcagtaatgtattcttctgagaactggtagaatcttttgttacagtataggcactattctcttattttttaatgaagttgtaataaaagtttaaggttgttgaaaatcatttgacatatgaaatcattatctgagtactgtactggtttgatacaaaaaacattataaaacaagaaagctataaagctgacttacacattcattctgtatgaaa

SEQ ID NO: 28193 - DNA, 281 bp, Gossypium hirsutum
  Clone ID: LIB3148-012-Q1-K1-D9
cccactcgtccgcccacgcgtccgaagataataaaaaaagaaaaaaaaaaaaaaactaagggggaaatattgatacaaaataaagaactataatattattatttaatagatatagtaataaaaggtctatggttgatagaattcatctgacatttgatatcatgatcatgtgtactgttctggtttggtgcaagaatcatttatattacagctgctataaagctatcatagacattcattatggctgtactaaatcttagctatcttggtttaaaaacaat

SEQ ID NO: 28194 - DNA, 377 bp, Gossypium hirsutum
  Clone ID: LIB3148-012-Q1-K1-E1
cccacgcgttcgggaagagctggtaacatgtgaacctggatttgttttttcttttttacatggttggtttggtggctcacttgtttcttattttatctcatttgccttcgttagatatttttcttgactcatatttggtgttgaatgtttggtattggaatcatgtacactccctgtagagaaaatagaaagatctcgctttcgggttataggttgagtttatagatttgattctgtctctgtttttctcagacccatagaaatttttatttttatttctattttcattgggatcgagaaaacccttaaataaaaaattttatcagtctgaatcgtttctcttctctatttagctttcaatttatataacaaatttt

SEQ ID NO: 28195 - DNA, 426 bp, Gossypium hirsutum
  Clone ID: LIB3148-012-Q1-K1-E10
acagccttccgccacaccttccggtgtgcccaagtgtctctacaaagagatgggcgctactctaagagagggggccccgtgtgttattatatcttgatgatgaacaaattttgatgtggagaggacgggattggaaatctatgtatggggacacttcttcaactttagttcctgttaaagctgacatttcaagtggtatagataattcagccaaatctagtgatgatagtggtacacctgatgcccaaagggtagtatcaagcccaaaaatgatgtccctctggaggcgtgcaatcgagtcaaacaaggcattgttattggaagagcttgctttgtgtccggatgctcttctggaaaaggtggaggaatttgaaggcatgtctctggcgatagagcattcctgtgaagcattagtcctgtccagcg

SEQ ID NO: 28196 - DNA, 299 bp, Gossypium hirsutum
  Clone ID: LIB3148-012-Q1-K1-E11
cgcgtttatatgcaagcggtgcatgaagaccggtggaaccgtttgctctcataaaatagcaggtttatgcaatgtaagctattcaatgtcaattccatattgaaatctggacgaatgacagtttgaaagagtttgatatttgcaaccaaaaaaaaaaagcttccaggtgctacccttttagtagtaattcggtcggaagcaatctctaagcttgtatgataatacacatggttctctaaaactcccaaaggctttaactatgggattattctctaatatggtgatttcagattctggct

SEQ ID NO: 28197 - DNA, 294 bp, Gossypium hirsutum
  Clone ID: LIB3148-012-Q1-K1-E12
cccacgcgtccggtaaaataagagttgctaactgagcaccagcagcaacctaatatacggagagaatatatggaggaaaaatgcttgaaattcaagctttaagagcagaaattggaaggaaaacaagaacagtacttaagcacacaaagaagaagcatgaataatagttgagagtattgatgaaaaaaatatgaattgtatttctttcatacatccatcataggcacattgccattacataaaatattaataaaacccaaaaatgattttcttatgaaaacattcaattatatc

SEQ ID NO: 28198 - DNA, 388 bp, Gossypium hirsutum
  Clone ID: LIB3148-012-Q1-K1-E2
cgagcaattcactgccatgttccgaagaaaagctttcttgcattggtacactggagaagggatggatgaaatggagtgcacagaagctgagagcaacatgaatgatttggtttcggagtaccaacaataccaggatgccactgcagaagacgaggagtacgaggaatatgaggaatacgaggaagaggcttaaaggatgctccttgttctttttatcatgtaggacattcggttgtgcaatctcggctttgctggttttcagcatttggatcgcttattgctgctgtctttgtgatttacagactagtattgctgctttgttttttatcaataattttcagcagtcagattcgtttctctcacaaatgtagcttacaattgtgagagc

SEQ ID NO: 28199 - DNA, 351 bp, Gossypium hirsutum
  Clone ID: LIB3148-012-Q1-K1-E3
gcgcttcccatcaaattaatattctatctaccgtccactccagcaaggaatgataaaaagtgttgaggagaatctgattacagcaaagctttcttactatctcaaagccttctgtaccattttgattctgcataagacgatttctactgctactatcagtaacacgcagtatatagtctttcttgcactgatgttgccgtcgataccttctgacacattgatgctcatcctcttttccgctagaatcatggatgctcttatgttattggccctttctccggcagttaccgactacgatttcctccataccgtatatcaacactacatatcagatttatacgattatgtctc

SEQ ID NO: 28200 - DNA, 363 bp, Gossypium hirsutum
  Clone ID: LIB3148-012-Q1-K1-E4
cccacgcgtccgggcaaatattcccataatcgctcttttctgcttcaccatttttgtttcggcctcgctcaatttcgtctatggggctgaaaatatgagctacgtcgtcgtaggccatgtttactgtgacacttgccgtgttgagtttgagaccaaactcagcgaacccatcgctggagcagttgtgaaactggaatgcaagaatcgtacagacaatgaccttaccttccagagccaagatattgtgactgacgaacgtcgtgactatcacattgtagtggaaggcgattatgaggaatcagactgcgacgtcaccttggtgaggagtcccaacccggattgcaatgatccctccgaaatgtg

SEQ ID NO: 28201 - DNA, 344 bp, Gossypium hirsutum
  Clone ID: LIB3148-012-Q1-K1-E5
gattccacagctgccaattcagcagccttccttctagacgaagtcacgtctttgaaaggtggggaggtcatagctcgtgctgagcacgcatattctgttctatctgccccataacctggttttcttaccaatacagttcccttccctattgcccaaaccagcttgccgagcgagaaaaaacctgggaggccaaagcggtttaaaatgtgaatcaagtttattattacaatttcatatatcttcatagtgatactgattcttggccacactgtgtcgatctaaatgcctgattactatataagaaaaggaagaaagtgtttaatggcgttgagcatgtgattctt

SEQ ID NO: 28202 - DNA, 413 bp, Gossypium hirsutum
  Clone ID: LIB3148-012-Q1-K1-E6
cccagtcctaaaaaccctctttatgaagcattgggtctctatgatatggcctcctcccaggctattcataccttctgctctcagttggatgcctctccttcacaaagagacgcagtagagaagtatgctaaagcaatacatgaggtaatcatggatataggtggaaaaatagcagagagtatgggattgaagggtgattactgcaaggaatggccttgccaatttaggataaataagtactatttcacccctcaatctgtaggctcggctggggtccaattacacactgattctggcttcttaacaatacttcaagacgatgagaatgttggtggacttgaagtgatggacaaatctggtgaatttgtagctgttgatcccttgcctggcagcctccttgtcaatcttgggga

SEQ ID NO: 28203 - DNA, 245 bp, Gossypium hirsutum
  Clone ID: LIB3148-012-Q1-K1-E7
gatgcctgcttcgatctgtagaataaggagcagtcaaatggcaatgtggaattacagataagttattaatattaatgtgtgtgtgtttacaattacttctttttttatactttattactaaagaaatagtaatctagttctgtaatgaacatttaagctacaatgttgtattttgttctttgtattgcgagaaatatttacattagttaaataaagaatttttataataaaattccatttttttt

SEQ ID NO: 28204 - DNA, 304 bp, Gossypium hirsutum
  Clone ID: LIB3148-012-Q1-K1-E8
gttaaaaccatcaccgaattatgtgaaatcgtcgatgctgtcctaaagatctgattgaatgggcccgcctaccttcattgcctacttctctaactaaattacttcgtattgcaaaaatagattttaaatgctctttgtgctttgtatttctcggaaatgagaggcttaatttttttttctattttacaccaacagatgaaggtgacagttataaacaaattatacatgattgaaatggatgaactagttataaccaaatttgatgatctatataaaaaatccaaacttacatacacatactttc

SEQ ID NO: 28205 - DNA, 260 bp, Gossypium hirsutum
  Clone ID: LIB3148-012-Q1-K1-E9
ctcgagaggcctccctttttttttttatatttttttttctttttttttttttttatttaaggggtttttttatttttattttttacttttttaacttaatttttttttttttcttaaatatattttttttgcaaaaaaaacccccttttaatatttttcaaaaaataattttttttttctcttccaaaaaaaaaaattattgtttcaaaaacaaaaaccttatatatttttaaaatttttttaactcccatttttttttt

SEQ ID NO: 28206 - DNA, 340 bp, Gossypium hirsutum
  Clone ID: LIB3148-012-Q1-K1-F1
aaaaaaaaaaaaaaaaataaaatacataaatttcactaaaaaaaaaataaaaaaaaaaaaaaaagaaaagaatctaatatcaacatgaatgattttaaaaacaaaataccttcattatcatttattccactacaaaaaaaaaatgaattcctttaatataaaaatatacgcgccccattcttaaattgatacattttttttccccctatcatttacaacattcattttttcaaatctcaccttaaataattttcagcgtccgaatcaaaaaatactggtgcctgtataatctacagactaccctttcttatcctgcttttcatcaataatcctttttcat

SEQ ID NO: 28207 - DNA, 195 bp, Gossypium hirsutum
  Clone ID: LIB3148-012-Q1-K1-F10
ctatctataacacttccgttcgcattctttgtcccggatctctcttacaaattcacaccatcatacactcttcttttcttgtgagacaaataattcatccttatattactatgattgccgtacaccttttgcccaaattatattctcatttccacatatgatgttctttcgaaagcgtccattcctatctaacat

SEQ ID NO: 28208 - DNA, 252 bp, Gossypium hirsutum
  Clone ID: LIB3148-012-Q1-K1-F11
tgtcttagttttactcttatctttccagatctttttttgttgatatttccccctatttaaatacaattttcttaaaacaaaacttaccctctacatcccccctttattttatctattttccttctttatttccctttactattatttaatatctaatcctttccctattaatttttttatttcctctttcatcatacctcttttcttttttttcctcaattatttttattatctttttttatttactttttt

SEQ ID NO: 28209 - DNA, 202 bp, Gossypium hirsutum
  Clone ID: LIB3148-012-Q1-K1-F12
cttcatattttcatatctatacccttaatttttcttcattatttttaatttaaaattcctaatcctttttattataatttaatccaactaaccatcaataaatatattcctaatttttattttactccatatccttatctcactttataaattttcatcaacatatatccctcatctttatcaatccttttttcattataat

SEQ ID NO: 28210 - DNA, 372 bp, Gossypium hirsutum
  Clone ID: LIB3148-012-Q1-K1-F2
gcgctttggcatacaagatcaactgctctgggtggaattgcttagagattaatgttattggattgcacagtcccagagtacatcatgatatgaatgtaacattaaatgcaacaaccccatgtatcgcattaacaaaaaccatagccctcatcttacaaatgattccatgttaaagcataaaggatgctccttgttctttatatcatgtaaagaacattcggttgtgcaatctcagctttgctggttttcagcatttggatcgcttattgctgctgtctttgtgatttacagactagtattgctgctttgttttttatcagtcgtttttaggagtcagattcgtttctctcacaaatgtaacttacaattgtt

SEQ ID NO: 28211 - DNA, 316 bp, Gossypium hirsutum
  Clone ID: LIB3148-012-Q1-K1-F3
gatgaatggcattcatggttaaaaggggatgaatttagaagaaaagaggcaaggaaagaatgaattggctacaaatgggaggaattgtttgagtagtttcgagggatgttaacctgcccccaacaatctctatttatctttcatcctgtgttaaatatgaatgtaaatttgatggttctcttttaggtgttctatttatatataaatataattatagtttcggccaagaagtgatatttatttgagtctagagtgaataaattgctaattttcgatttatgaataaatctagttctcaaaaatatagaggtttatt

SEQ ID NO: 28212 - DNA, 217 bp, Gossypium hirsutum
  Clone ID: LIB3148-012-Q1-K1-F4
gtctcttttcatagcaactttaccataacatggcatcgcgtttaatcccttctttcaatcgggatggggttccataaaacaattcctccttctaaaaccacttcctgaatcttacttcccgagacaacctttaaagtgccttccaacacaatcaaaacatttactccttaagcccgatataatgacggaaaactcaccccgcttactctaacttaaa

SEQ ID NO: 28213 - DNA, 424 bp, Gossypium hirsutum
  Clone ID: LIB3148-012-Q1-K1-F6
gaaccacattcctaccgtcaatggacctgactaacttgccctgcaggctcaacccaatatggaatcaaactccctattcattaatggctgcatcgctcctcctcgaacaagttcatgccatgttgcacatgctgagactcaaaagaagggccaactagataatgatggtaacactaatggagttccagttctgctttcatgcatgtgtggacaaacctgaacccttccctccatttatgcctttgcatctcattatttctgatgattcaattggtatgctttagaggttagggaggactaagctctattctctttgtcatatattactgtttgtttttcctttttcttcggtttttaaagcttaactgaatcaatgctttcatgaagctccttttcctacaaaatctttaggttttctataata

SEQ ID NO: 28214 - DNA, 337 bp, Gossypium hirsutum
  Clone ID: LIB3148-012-Q1-K1-F7
cccacgcgtccggttttggaccttaagttgaaggctttcaagttttggaccttgggtgacatataatgaatatattatgtcccaaaagtaatttatttaagattgataatccttgaatatctttttataactacaattaatttttatatttgtattgtatatttaatttgggatattaagtgtgaaagagaaatttgagtgagttcattagtttagacaatttgagttgagctagttattaagcaattaaacttggtgtttataattatttattgtaattggaacaattgttatagataatttagataatttgagttgaattaattattgaattatt

SEQ ID NO: 28215 - DNA, 391 bp, Gossypium hirsutum
  Clone ID: LIB3148-012-Q1-K1-F8
ctcccatcaaacctctccgctagtaagaacccgagtcttgattatggtttcaaaggtgctgaaatcgcaatggcctcctattgttccgagctccaatacttagctaatccggtcactaaccatgttcaaagtgccgaacaacacaatcaagatgtgaactcattaggactaatatcatcacgaaaaacagccgaagcagtcgatatcttaaaactcatgtcctctacatactaggtagctctatgtcaagctattgatttaaggcatttagaagaaaacttgaggaacacggtgaagaacactgcgagtcaagtagccaagaaaaccctcacaaccggtaacaatggtgaactccacccatcgagattctgcgaaaaggatttgctcaaag

SEQ ID NO: 28216 - DNA, 236 bp, Gossypium hirsutum
  Clone ID: LIB3148-012-Q1-K1-F9
caagaatgtttgagctttgggttagggattgtaattagggggtgtttacccgtttgttggttttgtgggttgagtaattcgtgcttcgaattgcagatttcaatgaaattttaacttcattttgttaaaaaaaaaaaaaaaaaaaaaaaaaaaaaaaaaaaaaaaaaaataataaaaaaaaaaaaaaaaaaaaaaaaaaaaaaaaaaaaaaaaaaaaaaaaaaataaaaataataa

SEQ ID NO: 28217 - DNA, 424 bp, Gossypium hirsutum
  Clone ID: LIB3148-012-Q1-K1-G10
cccacgcgtccggaggaaactccctaaagagagttgaagctgtgactgagtgtagggtgtacggaagaggcaaaggttctgtcaaagattctgttaaggaagagaaactaaaagataaacctggattcaaacaccttaatgagccgttgcatgtgttggtggaggctgaacttcccgaagatgtgataaattctcgtttggactacgctgttgccatactagaaaatcttctgaaacctgtggatgaatccttggataactataagaaacaacagcttagggagttagctttactaaatggtacattaagggaagagagtccgaaaatgagcccgactatgagccctagtatgtcaccctttgacggtactggaatgaaacgagccaagacaggaagatgacccttacagtgatgggatgttga

SEQ ID NO: 28218 - DNA, 423 bp, Gossypium hirsutum
  Clone ID: LIB3148-012-Q1-K1-G11
agataggcctggtagatcttgttttcggttggcttgctaacttgatctctatttttgaagaggtatctggcttcaacatagttggtgagggatatccattgttatcggcctggatgcaagaattttcagaactccctgtgattaaagatacctggcctcctcgtgacaagatgatcatcaagtatcaagcactttatgacaaataccatcctgcaaaatgacctgttcctgaggtttttccattggtagtttacattaaaagtttaggcatcatattgctgcaataagttcaaaactatgtgtgtagacaaggccttggagcttatttaccattaatgagggattttcctttgtaatctgtcaagaaactgaagttgtaattgttgaaccagattgcctcgtgaattatatcagttgttgctg

SEQ ID NO: 28219 - DNA, 323 bp, Gossypium hirsutum
  Clone ID: LIB3148-012-Q1-K1-G12
tcccatttcagacccacgcgtccaaaaattcgataaattgactcatcaaaccattttttaaaaccaaaacacaaaaaaaaaaaaaagaaatttttcaaaaaaaaaaaccccccatccatatacaaaaaaaatccttcaaacctacaccatcattcaaaccccccattcacccataccacctatccttctcttcccaacttccccattacttatcaaacccttttttacacctcccttcctccatcctaaccaaccccttcaaccccctcattcaatcctcacatttactatttcaacacaccatctctacttctctaaccttc

SEQ ID NO: 28220 - DNA, 297 bp, Gossypium hirsutum
  Clone ID: LIB3148-012-Q1-K1-G2
cccacgcgtccaaaaaaaggtgatccatattgatgcatcaatgacaatccaccatccataggggtcggatctttttccacccggccctttttcaaaaactattaatcctagaaatcaggctactcaaaactactaggggccaaagtaaaagatatttcatattatgtgacagtatctccctataaaaatgtaaaaagccctgctttttatggcataaactctacatacttaaaaaaatcgaatataaaactaaaaatttaaagaatttaaaaaaaaaaattgaagaacacagtaaaa

SEQ ID NO: 28221 - DNA, 399 bp, Gossypium hirsutum
  Clone ID: LIB3148-012-Q1-K1-G3
cccacgcgtccgggttgaatttctgcttgaatctcttgggctaagtgatagagatgatgtggtccgaatctatattggagatgacaaaactgatgaggatgcgtttaaagtcttaaaggaaggaaatatgggttatggaatcttggtatcttcagtgcctaaagaaagcaatgcaattttctctgtcaaggacccatcagaggtgaagaaatttctgaaggcacttgtgagattgaagatgcttgaagaagcttgaatgaaaagcaaggctttgggagcaaaaaaaaggcagaatataaatttcattgaagaggataatttagtttttatttttatattttgcagattatgtaaatattttgcatttcaattttttatcaacgatttattccccccttt

SEQ ID NO: 28222 - DNA, 395 bp, Gossypium hirsutum
  Clone ID: LIB3148-012-Q1-K1-G4
gcaagttcaaggctggtgattcacctgccgaggagctcgcaactgcaacccaagtccaaggaccatacatgcctatttctcgtgagaagccttccgttgagctcgtgaaggtcaccgacgacatgaaatcattcaaggcatacaacaagctccgtgttgaacgtacgaacaaacgtcatattggtgctaggttgaagaaggctgccgaggccgagaaggaagacaagaagtaaggttaccctttttggggacagtgttttgttatttggcttgctaaaaagaccttaaattttgtattcattttgtcaagtgaactgagacagctttagaaaactttggtattatgacagtaatccattttgttgagcattttattaaattgagaagtttcttgc

SEQ ID NO: 28223 - DNA, 391 bp, Gossypium hirsutum
  Clone ID: LIB3148-012-Q1-K1-G5
cggacgcgtgggatttttatcatggtcggctgaaccggaaatggaagagagaaaacggaaggggtttaagtggatatttgtgctatcacttgcacttctccaagcagcttattaccggcgtttgaaatggtcagttttgaaatcccgaaaactggtgcttgatgttgtcaattgattcccttctgtttatttgagaagagatagattggtaataattaattcattaaactgctaatacagttggacagattgatctccttttcgttgtactatttgtttacttagctaaagaataagctgcattgaattgtattaggatcagaaaccgaagttactcggatttgggtgtgaatattcgatttgagtatgtatgggtaatttatctaaaata

SEQ ID NO: 28224 - DNA, 288 bp, Gossypium hirsutum
  Clone ID: LIB3148-012-Q1-K1-G6
gcgtccggcgacatgaattctcggtccaaattttagcttcatttacaccacaacgctctaatagggaagaacatatgtatctgcatagatttctacaaaatgcatccattgctataaccattgcttattaaaaactaactaagacacaaaaaaaaaaaaaaatacaaacaaaaaataaccaaataaaaactaaaaaaaatgcataaaaccctgtctaaaaaaacataaaaccctatccatcattaatgcctttacatataattatttatttataattcaattaaaata

SEQ ID NO: 28225 - DNA, 301 bp, Gossypium hirsutum
  Clone ID: LIB3148-012-Q1-K1-G7
gatggaacaatgctggtctcctgatcctgaatcaaggccatcatttaccgagataaggaagaggttgcgatccatgtctatgttgcttaaacccaagggacctcgtaatcaaccgaaacaaacaaggccataatgtcaacggtatgattcaacattatatgcaagcacctgttttgttattttaggtatacctgtaaaagcttaatgtcttcaacacaccatttgaagatgtgcatatgtagaggttgaacattgatagccaaatttttttcccctggtggataatatatcttcattgttt

SEQ ID NO: 28226 - DNA, 329 bp, Gossypium hirsutum
  Clone ID: LIB3148-012-Q1-K1-G8
gtttaaccatcataatggagaaagcaaccatagcagatggcacagttatataaaaatgggggaccttaaaaatgacatccatgggggcagctttgaagattggaattcgagttgcgaaaaaagcaaccgatgaagattgaattcgagtctgaatgtcggatatggcggaatgctgtacatgcagcatttgcctttgaagaaaaagaaatgaaagctgcaacttattatgtaaattacaagttcttttatgtactgtaaaatatggttctcatagaaataagtttaagaaaattagatggctagcgctttagcagcccttgtttcctttt

SEQ ID NO: 28227 - DNA, 344 bp, Gossypium hirsutum
  unsure (1)..(344): unsure at all n locations; Clone ID: LIB3148-012-Q1-K1-G9
gatcccccgggctgcaggaattctgcacgaggacagtatatatctccactgtggagatgaaaagagagagaactacaataaagagctcagcggagaagatgaacaaagagacagccttgaaaataaataactcagctgagaagatgaagaaagaaacatcattaaatagctcagctgagaagatgagacaagagacagcttcagataatggctcagctgaaaagatgaagaaagagacagccttgacagtaaatatctcagctgaaaagatgaacaaacagacagccttgacaataaataactcanctgagaagatgaaagaagagatggcctggacagtgaat

SEQ ID NO: 28228 - DNA, 315 bp, Gossypium hirsutum
  Clone ID: LIB3148-012-Q1-K1-H1
ggcagagcaaatggcaatatatgacgccaacaacggaggaaaaatgccattaacatgggaacaaacaagaagcatgcctcttacacatagggttgtaatggagagcttgaggatggcaagtattatatctttcacattcagggaagcagtagttgatgttgactacaaaggatacttaatacccaagggttggaaagtgatgccattattcaagaacattcatcataacccagaattttttcccaatcctcaagaattcgatccatctagatttgaggtagctccaaaagccaacaccttcatgccatttggaaa

SEQ ID NO: 28229 - DNA, 422 bp, Gossypium hirsutum
  Clone ID: LIB3148-012-Q1-K1-H10
caacgtatgattaatcaacgacgggaacttggtttttccgacaagagtgatcttttgtcgagatttatggcgacaatgatcgacgacgaccagtatcttcgtgacattgtcgttagtttccttttggctggtcgtgatacggttgcttccggtctaactagtttcttctggttattatctcaaaacccgaaagtcgagttcgccattagagacgaactcgaaaaggtcactgccgggatttcgccgagcgacgatcaagatttcgtaatgttcgatcaaatgcgtgaaatgcattatttgcacgcggcattatgcgagagcttacggttgtttccgccggttcaattggactcgaagttcgctcaacacgacgacgttttgcctgattttacttttgtaaggaaaggtactagggtcactta

SEQ ID NO: 28230 - DNA, 421 bp, Gossypium hirsutum
  Clone ID: LIB3148-012-Q1-K1-H11
cccacgcgtccgcccacgcgtccgcccacgcgttcgcccacgcgtccgcccacgcgtccgcccacgcgtccgcccacgcgtccgtgcagctgtaccacacatgttcatcaatggctacaagaatgtcttggctgttgcagttgcaacagagtattctttccgtcaggccgataaagtgaaagagtatttggcggatccaagcaaatttgccgttgctactgcccctgttgctgctgctggtggtgctgctccggctgctgctgtccctgcagaggagaaaaaaccagaaccagaagaagagtctgatgatgatatgggattcagtctctttgactaagtttgtctttattagtataaagattcaggattggaagactagagaaaaatctgagaacgctatgagttgtttatcgtagttttg

SEQ ID NO: 28231 - DNA, 183 bp, Gossypium hirsutum
  Clone ID: LIB3148-012-Q1-K1-H12
cccacgcgtccgtgaagttcttcccctataatgttttgaaaacagttacagaaacttatgtggagtaacatagtaatgtcatgtggatgtggttactgtattttttttggacttgacacaatgtcttggaatgctcagttgccaaatatgatatactgtctgtatcaaatcctttttttgttc

SEQ ID NO: 28232 - DNA, 413 bp, Gossypium hirsutum
  Clone ID: LIB3148-012-Q1-K1-H2
tttccatttacttctctattgctacgtttgtgaatttttagtgagcgaaaatgagagagtgcatttcagtccacatcggtcaggctggtattcaagtcggaaatgcctgctgggaactttactgccttgaacatggaatccagcctgatggccagatgccaagtgacaagactgtcggaggaggtgatgatgcttttaacacctttttcagtgaaactggtgctggaaagcacgtccctcgtgctgtctttgtggatcttgagcctactgttattgatgaagtgaggactggtacttaccgtcagcttttccaccctgagcaactcatcagcggctaggaagacgctgccaacaacttcgctcgtggccactacactattggcatagagatcgttgactagtgcttggaccgt

SEQ ID NO: 28233 - DNA, 162 bp, Gossypium hirsutum
  Clone ID: LIB3148-012-Q1-K1-H3
gagccaacaaggcattggtgaacctggtaataggctgtaccttttttagccctactcggatgggttatcttgtaataatatgaagctaggttctgaagtctgcattatttcattgcaaaattttggtactctttgaatactacaaattctcctttcatattt

SEQ ID NO: 28234 - DNA, 75 bp, Gossypium hirsutum
  Clone ID: LIB3148-012-Q1-K1-H4
aaaaaaaaaaaaaaaaaaaaaaaaaaaaaaataaaaaaaaaaaaaaaaaaaaaaaaaaaaaaagaaaaaaaaaaa

SEQ ID NO: 28235 - DNA, 378 bp, Gossypium hirsutum
  unsure (1)..(378): unsure at all n locations; Clone ID: LIB3148-012-Q1-K1-H5
ggacagggtaacacaaccggcgacggagccgaggagggaaagtgactgtgatggtaggcttcttttacaataggatttgtattcctctggcggtcatctcatagactgttgtagaattaaaatcttcaacttgctctttaatgtagcagtttagttagtttaactcttgttgagaggttgttggcatgccaatgaattaaacaacaggttgttaagacaacgatggttttgttgtaaaaggaggtggtatataagagcatgtggtcactacctctgaggctatcattttgtagtaacctataaaagtttgcagcttgtatctaannnaaaaaaannaaaatttaaaaaanaaaaaattatttttaaaacaaaaaataa

SEQ ID NO: 28236 - DNA, 361 bp, Gossypium hirsutum
  Clone ID: LIB3148-012-Q1-K1-H6
gtataaattggagaaacaaacaaattaggggccttatatttgtggacataattagtttggtgctctaatgcacatgcggaaatgatgcttctgcttgtatttggtgttacggagaggcactgtcgctgctataaattaagtaataaacactcaagctaaaaataaagaaacaagaaatgaacacaaatacaagaacaaaaaaaataaagggtgaaagaaacatgcaagatattacagagctttattcaaactaaaatgaatcaaccgtgttgagggataacccggaccgaacaaagctagaaggaaaggctgttgcggggcgctcttaacttacttacttttgaaggtagggaccgcgttg

SEQ ID NO: 28237 - DNA, 261 bp, Gossypium hirsutum
  Clone ID: LIB3148-012-Q1-K1-H7
aaaacagaaaaaactagtaataattttatgaaacgactttgattctaacctttaacgactctatggatatgtcaaaaacaccatgtaatgtattgacctccgtgggggttctctacttttctccattcacaaaaaaagaaacaatacaaagtagttgactacaaaagatacttaaaacccaaaggttggaaagtgattccatcatccaggtacattcatcataacccagtattttttcccaaacctcaagaattcgatcca

SEQ ID NO: 28238 - DNA, 413 bp, Gossypium hirsutum
  Clone ID: LIB3148-012-Q1-K1-H8
cccacgcgtccggcgactcactgggtattgaacaagacgaaccattggccgttaatttcgcgttcaagctttaccggatgccggacgaaagcgtctccatcgagaatccaagagacgagctcttgcgccgcgtgaaaggattagcaccgcgcgtgctgacattagtggaacaagaaatgaacacgaatacggcgccgttcgcgtcaagggtgggagaagcatgcggatattacggagctttattcgactcggttgagtcgaccgtgttgagggataacccggaccgagcgaagctagaggaagggctgttacgcaaaatcgccaactcagttgcttgtgaaggtagggaccgcgttgaaagatgcgaggtttttcggaagtggcggcccagatgagcatggcggagttcgagt

SEQ ID NO: 28239 - DNA, 422 bp, Gossypium hirsutum
  Clone ID: LIB3148-012-Q1-K1-H9
cccacgcgtccgagcgtaaaggcactcctgctggtggtccacttgctatcccacataatcacgggttataccctacaacgcaaccaccgccaatggctgttggcctgccaccatccttcatccctaacggtgtagggatccacggcaatggccatgtcaatggagctgtcgggccttggttcaaccatgcttgatttctagggctacatgatgtatttctgccccatagagctggttaacatctctcatttctccatttgacgagatatcctattttttattttatttttctttttttggcatttttgctgctagaacttttggaagcacatctctgggaaagaaacaataaaaaggggggggggggcgcaaggcatcccattccccgttgaaggaaagggttgtgggtaagcatctgctga

SEQ ID NO: 28240 - DNA, 366 bp, Gossypium hirsutum
  unsure (1)..(366): unsure at all n locations; Clone ID: LIB3148-013-Q1-K1-A1
ctgactcgtgacatgttaaggcgggggactatatgccagtgggatacgggtgcagatagcggaggaggtactactgctctggatcctgaaacatgtataactgttctcaaagaggcgaacggcgctgtatatgagacactgttctgtttgaaaataactgcggtcattacttttatgttatcgatggaacacagttatgttaattttgggtcgaatgatggatatgatctgtgaaagtgcttggtgctctgtttccttccctgtaagggttgcaaaattgcaatgcatgccctttggttgtgtttgggaccagggcttttttgtcagattggaaatggaaaaaaggnagtgcaggtttattccaat

SEQ ID NO: 28241 - DNA, 365 bp, Gossypium hirsutum
  Clone ID: LIB3148-013-Q1-K1-A11
caattttgttatttgaatggattagatttcattgttgtattctattcgaggtgttggtagttgcaacattgttggttaattgatacgttgttagaaaaccactgcattgactatcactttttggttgttgaatatctggtcattaatttgatcaaatcccatcatttttatgtcaaaaaaaaaaaaaaaaaaaaaaaaaaaaaaaaaaaaaaaaaaaaaaaaaaaaaaaaaaaaaaaaaaaaaaaaccccaaaaaaaaaaaaaaaaaaaaaaaaaaaaaaaaaaaaaaaaaggggggccctttttaaagatccaagttttacttcccctgctttgcaaggtaaaattttttttttggggccccca

SEQ ID NO: 28242 - DNA, 127 bp, Gossypium hirsutum
  Clone ID: LIB3148-013-Q1-K1-A12
gtaagttgttgtggcagccatggcagatgtgaccttaaatcactccctagcttgtgtatagcatatatgtatcctgaggttgggaaaactcatttaaaaatgtaaattaaatatggattttcgtctc

SEQ ID NO: 28243 - DNA, 444 bp, Gossypium hirsutum
  Clone ID: LIB3148-013-Q1-K1-A2
accgaattgcagttccggcccagacctacgcatagaccacaaattggataatataatgttttagatgcttttgttgttattgtatgcaatttttttgctgatggcataatgcagtttggctgctctatgttgctgctgtgtgttggaggactgctgcttcttcctatgatataattcatgacggatgagttatttcatttacatttctggttctgctatgcttcgctgctactgtttgggagggaggagaaatgccgctaataatgagttctaccccgcatttatggtagttgttactgttctataaacagttggttgtagcgattccctgcctaatccaatttgatagtttatctacttttgaactttgtcaacaaaaagttgctttataaatacatttgctgggtgtatcgattatctgtacaatttgcttcaactttcatc

SEQ ID NO: 28244 - DNA, 393 bp, Gossypium hirsutum
  Clone ID: LIB3148-013-Q1-K1-A3
atgaaaatgaaatatctacaaaagttagaggtaatggcgaaaaaacttcaacgccatatggaatggctctctggtcaactggcattggacctcgtcctctcataaaggagttcatgaagcaaattggtcagggtaataggcgtgctttagcaacggatgaatggctgcgagttgagggatttggtaacatttatgcacttggcgactgtgctactgttaaccagcggaaagtcatggaagatatatcagaaatatttagaaaggcagacaaggacaactcgggaacacttacagtgaaagaatttcaagagatcattgatgatatctgtgaaagataccctcaagtggagctttatctgaagaacaagcaggtgcgtaacatggttgatcttt

SEQ ID NO: 28245 - DNA, 360 bp, Gossypium hirsutum
  unsure (1)..(360): unsure at all n locations; Clone ID: LIB3148-013-Q1-K1-A4
gaagaagaaggcggctcagctcacccagcgagaagaggcatagagatgaattcatcacttggaaacgtctaaacaatggcaaaagcctcccgagaccacattttaatcaacaatacaacaaaaaagagagtccctttaactccatttgagttgcgaccaggttggactcgtgacaatgatgtagaggatccaaacaatgatcaccccatcatcttaggacgttaattaagcactgggagcttcaaagctttcaaacttctgccctttttatttttttccttctttcatgtgtcttgcttttctattgtaaacctataaatgaaaaataaagaaatgattctcagggagggtaatntttnt

SEQ ID NO: 28246 - DNA, 152 bp, Gossypium hirsutum
  Clone ID: LIB3148-013-Q1-K1-A5
tttctttctgtttgttcttcttctattattagtatttcttcaatgtttgtacggtaatggcgccgttggaatttagaaataaatacaattcagcagtatcaaagtgtaataacaaaatttaattataactcctttgacatctttatattggg

SEQ ID NO: 28247 - DNA, 272 bp, Gossypium hirsutum
  Clone ID: LIB3148-013-Q1-K1-A6
gccgatatatttgcggtgacgccgtcgttcttggtggtggaagttaaaaaggaccatggcgacacattcgagtacaatcagttttgcagtaaagagctccggccggcgcttaaagacatcctatggacgtcgccgcccgagaactcgactgtggcttgatttatgtgaggtgggaagtcattgtttgatgatgaaggttattgttgttattgcgaaagtgtgattatgtgattgtttttagatgggaaattgaaaacccagatttggtggtg

SEQ ID NO: 28248 - DNA, 387 bp, Gossypium hirsutum
  Clone ID: LIB3148-013-Q1-K1-A7
cccacgcgtccggtaaggtggcaaaagcttaaaggagcttcttttttctataggctgtatgtcatagttggcggagtcatactactattatttatgattactatgtcggatgtgggatgatgagggctttctttttctttaatggttgtttttctgctttggggtttgatatttagtattgaacttccttttgggtccaggggtcaacatgctgatggaagaaactataggttttccattttgaagtggtatggatgtatgtatgcatgtgtgcatgcatgcacgcacgtatggttttcggtcccaagagagtctatatgatgagtttgatactggtgtgatgagatgtgatctccatatttgcataataaatatctatttttggtt

SEQ ID NO: 28249 - DNA, 289 bp, Gossypium hirsutum
  unsure (1)..(289): unsure at all n locations; Clone ID: LIB3148-013-Q1-K1-A8
cccacgcgtccgcccacgcgtccggggggaatcacaagaaaaaaagacattttggcacttttatatacaagcaaagtttccagggaaacaaacactcaagggtaaattttatattcattttgtagtcttcatggttctgtaataagtatggctgtctttagtgtttgagctgagagaatcagaaatggccgtaatgtatgtttttctatttaattttatttgaagtattcatgtccaacacattgagaggaatatgaaggatatttcaaatnnnnnnaannnnnacnaa

SEQ ID NO: 28250 - DNA, 339 bp, Gossypium hirsutum
  Clone ID: LIB3148-013-Q1-K1-A9
cttttggcaattccaatatcgactgtagcttctgaatcggcttttagcatgggcaagaaagttatcacacctttgaggagttcacttaagccaaaaacggttcaagccgttgtttgcttggatgattggatgcgagctaaggaattttcagcagaaattggttgcaaaaatgacgatgacgatgatgatgacgatgaggatgatgtttcttcggttgctttttaagatactctctttctaaatgtttaaaatttaatttagcttacaatttatattttgttataaaattaaatatgttgatggattaatatatgaatattatggttttttgcttattgc

SEQ ID NO: 28251 - DNA, 269 bp, Gossypium hirsutum
  Clone ID: LIB3148-013-Q1-K1-B1
cccacgcgtccgcccacgcgtccggtaacttttgagggaatgtataaattccgtagctttctgtgaaaaaaaaaaaaaaaaaaaaaaaaaaaaaaaaaaaaaaaaaaaaaaaaaaaaaaaaaaaaaaaaaaaaaaaaaaaaaaaaaaaaaaaaaaaaggggcggacaaaaaaaaaaaaaaaaaattttcgttcccgtgaaagaaacaaaaaagcttttctatggggaaacctaaattaaattcactggccgggggttaaaaacgattta

SEQ ID NO: 28252 - DNA, 169 bp, Gossypium hirsutum
  Clone ID: LIB3148-013-Q1-K1-B10
ctttcttcaagcattaaattgaagggcttgtttggctctcctctctgtgtggcttgctttgatatatatatatatgtatgtatgtatgtatttatgataccattctttcttcgttaaatttattgtaatgaacttgattttttgaataaaatgcttccgttatgattta

SEQ ID NO: 28253 - DNA, 407 bp, Gossypium hirsutum
  Clone ID: LIB3148-013-Q1-K1-B11
agtcgtttagaaattctacggttttttcccataatctaagaaagaagaggaagaatcaagcttgattttctctcaggatgtcggaggcaccattcagacctagggaaaagctcatcgagtatcagaaatattttcaaggcatccaaaaacacacttacttgaaaggtcgttacgataagatcacatctgttgccattcccgccactctagcagcaagttccctgtttttaattggacgagggatctataacatgtctcatgggattggaaaaaaggaatgagagctctcactcatggttagaagacatgtttttcatttttgggtttcattgtagtatgaaattgcttgtttatttgctctaataattggttggtttttatgccaaatggagatcttaaaagatacc

SEQ ID NO: 28254 - DNA, 160 bp, Gossypium hirsutum
  Clone ID: LIB3148-013-Q1-K1-B12
cccacgcgtccgcccacgcgtccggaacatttttctatatgaatgattgaaaaggtagttgaagttatattaaaaatatgtgattgacttatgatgtatgacgaattgaagattttgtaaagctccatcttatactgagaattttggtttatattcagca

SEQ ID NO: 28255 - DNA, 225 bp, Gossypium hirsutum
  Clone ID: LIB3148-013-Q1-K1-B2
ctctgaaaatgctttacaatctcattccaaagcaaagcatggcactcaagcgtaaaaagtgaaccggtttagggtcgttgtttgaattttgtttgtttctagaatggacaaatggacgtgactagttgaatgtagttaatgtagtagtacataattgccttatgtttgaagatggtcctttgcaaattaacaggtttataagatcttgtttgaaattgccagctt

SEQ ID NO: 28256 - DNA, 422 bp, Gossypium hirsutum
  Clone ID: LIB3148-013-Q1-K1-B3
gccagacgtccggttcctgttttgggcgtacttatcgacaggaaggtattcgagcctaagccgcatgctgctgaagtggacgctgtgtacgacgttccactggaaatgtgacattaatgatgaaaatcgaattgcacaatagagagaaatgctgggagaaaagtatcttcttcacttctttgactatgaaactgagaataagaagtatctaatttggggtttaactgctggcattttaatcagagcagcttcagtggtctaccaacgaccaccggccttcccggaacagagtcccaagtatgaatttcttagggatgtgggcaaaattaccaacgctcattgaatatagtctaggaattttaagcttgccttgtattgcaatggggcatcttcaaaagtaataatctagcagaaaatctaaa

SEQ ID NO: 28257 - DNA, 414 bp, Gossypium hirsutum
  Clone ID: LIB3148-013-Q1-K1-B4
cgagtttatcttaatcgtgttaccattgattggtgaactctaattgtcaattgtttgatagatgaagggtataaagaagtcccttgtcgcagggttatatggttttcattttcaggatcaaattttgcacggggccgagacgaactaagaggacatatggtataggaaagaggcccctaagtttatagagtgtggattcgttggatttgtgatgaacaagttttgggttcttgagcattaagaatttaaaacagttgattattttgctgtctgtttgactgtgcttatgtctattaacctttgatacatctttagtggtctctaaaaagaatgcccgtgatgcaatttctaatctcctttggatacttttcagacttacattaaaacttcatgccaaaatttgatttgatgttg

SEQ ID NO: 28258 - DNA, 397 bp, Gossypium hirsutum
  Clone ID: LIB3148-013-Q1-K1-B5
cccacgcgtccgcccacgcgtccgcccacgcgtccgtgactttgcaagcacatatcccaattcttatcgaggaactcactaagggcgatactagtgtccttcccgtcatcgttgctgcaagagatgtctccattcaaggactttgcaatggaaagtgtgccgatcatctacttactgaggatcccaagccgcgcccatacatcatcgtcgggaacccggaaactgagtgccctgaagaatgtggatggcctttcgttcccgctgaacctggctcaaaaggaccagtccttaaaccaccaagtggcaatatggcagctgatgctatggtcattgccttcgccagcactttggctgatgcggtcacaaaccctatggagaacggcatctaccatgagaa

SEQ ID NO: 28259 - DNA, 286 bp, Gossypium hirsutum
  Clone ID: LIB3148-013-Q1-K1-B6
tttaggttgggtcttgtttgggtttgggtgtaacgggttaatagattttgggccaaaagtgtaggctaattgggttgtaactaggtactgcgttttgggtagtttagctaggttacgggttaatggattttgggctatagtattgggtttgtaaactggactgtacaaaagctattttatttttatttttttgtttttatttgttaatgtatcggcccgggtaaatttgggttgctacaatcatcatatgattattttggatatatcttacttacattttctcggt

SEQ ID NO: 28260 - DNA, 388 bp, Gossypium hirsutum
  unsure (1)..(388): unsure at all n locations; Clone ID: LIB3148-013-Q1-K1-B7
ttcaggacaaagaagggattccaccagatcagcaaaggttgattttcgctgggaaacagttggaagatggaaggactttggctgattacaatattcagaaggaatccactctccaccttgtcttgcgtcttcgtggtggtttctaagctctcctatgaaaatgaggtttctggattttatgtgaatgattgtgatgtctggccctgttaaggcctcataaataaacctaaactattttatctatgttttatcttatgtaatgatattatatgaataaaaattacatgtttaccttaaaaaaaaaaaaaaaaaaaaacccccnnaaaaaaaaaaaaaaaaaaaaaaaaaaaaaaaaaaaaaaaaaaaannnnnnnnnaannnnnnaana

SEQ ID NO: 28261 - DNA, 415 bp, Gossypium hirsutum
  Clone ID: LIB3148-013-Q1-K1-B8
aaagagacacttaggctccacccaccagctcctctattggtcccccgagaaacaactgaggactgtgttgtcggagattacgagatcccggccaaaacaagggttatcatcaatgcgaaatcaattggaactgatccgaaatattgggaaaaccctcatgactttcaacccgatagattcatgaaaagttcagttgatttcaaagggcaacatttggagtttttgccttttggagtaggacgaagaggttgtccagggatgagtttcgcaattatgcttcttcagctcatggtggcaaacttcttatatcggtttgattgggaattgcctgaaagaatgagtgttgaagacgtggatatggaagaagaattagggatcacagtattcaagaaaactcctcttttgttggtaccta

SEQ ID NO: 28262 - DNA, 224 bp, Gossypium hirsutum
  Clone ID: LIB3148-013-Q1-K1-B9
cctggattcatcatgtgactctatcgggtcataggttgctctcagagttaaactatatattatatattatactctttaaaattttaggctgtttgtggattgttgattgtataattgctttctttgattatgttgattttgttggccttccaacacgaatactcgccacaacaataccttgattaatctatataaatatgatgttttaggcccttaacgggatg

SEQ ID NO: 28263 - DNA, 378 bp, Gossypium hirsutum
  Clone ID: LIB3148-013-Q1-K1-C1
ctgcgtccgaattttatggatcagcagataaaacctatgatctgaacttcaaggaagagaaaaatgatggttctcaaaagatatcaggagatgctctcaaagacttatacaagtcatttgtttctgagtatcctatcgagtcaattgaggatccctttgaccaagatgattgggagcattactccaaactaaccaatgaaatcggaacaaaagttcagattgtcggagatgatctcttggtcaccaatccaaagagggttgagaaggctatcaaagaaaaaacttgcaatgctcttcttctcaaggttaatcaaattggatctgttaccgaaagtatcgaagctgtcaaaatgtccaagaaagctggatggggtgtga

SEQ ID NO: 28264 - DNA, 339 bp, Gossypium hirsutum
  Clone ID: LIB3148-013-Q1-K1-C10
tctaaatggactctagagtgttttgttagagaataaaccaattgtcgggcttttaaagcgttttaagttaatggttcctcactttactatgctacagtttttgtctataaatataattttgcttttgcaaaaaaaaaaaaaaaaaaaaaaaaaaaaaaaaaaaaaaaaaaaaaaaaaaaaaaaaaaaaaaaaaaaaaaaaaaaaaaaaaaaaaaaaaaaaaaaaaaaaaaaaaaaaaaaaaaaaaaaaaaaaaaaaaaaggggcgccccttttaaaggaccaaattttacttccccttgcttgcaaagtaaaactttttttttggggcccccaaattta

SEQ ID NO: 28265 - DNA, 408 bp, Gossypium hirsutum
  Clone ID: LIB3148-013-Q1-K1-C11
agtgaagtagggtttagccaaagttagagggcatttaggtcatctatacagcccaccaccctcccctttttatatatagcttcgttgcttcggctacgatactttcctcaccggtttgccgcatattgtaattagtgggccctctagatttctgtttttccggccacagtgggccatctagattttgggcgcttttttttctctgtttttttactaatggcttaatagtacataagaccctaaattattccaaaataatcaatcgagtctctatgaactttttcatccaattacacctttgaacttataaaattgaccaaatcaatcctttgactgatattgaacattaatgatgtggcactggtatgctagaaaaaaactaaaaaaaatcaagaaaataaaatttat

SEQ ID NO: 28266 - DNA, 409 bp, Gossypium hirsutum
  Clone ID: LIB3148-013-Q1-K1-C12
ttcagttcagagtcataagcaacatcaatggctccttcaactctgacggctcttgcggaagagaaaaccttgcaggcaagcttcgttcgtgatgaagatgagcgtcctaaggttgcttacaaccaattcagtaatgatatccctgtcatctctcttgctggtatcgatgatgttgatggcaagaggggtgagatatgcaagaagattgttgaggcttgtgaggattggggtgtcttccaggttgtggatcatggtgttgatactaaactcgtgtccgaaatgacccgtcttgcgagagagttttttgctttgcctgctgaagagaagcttcggttcgatatgtctggtggcaagaaaggtggtttcatcgtctccagccaccttcagggagaagcagtgcaagattggc

SEQ ID NO: 28267 - DNA, 396 bp, Gossypium hirsutum
  Clone ID: LIB3148-013-Q1-K1-C2
attccctagcatcgttggtcggccacgtcacaccggtgtgatggttggcatgggccagaaagatgcatatgttggtgatgaagctcaatcaaagagaggtattttgactttgaaataccctattgagcatggtattgtgagcaactgggatgatatggaaaagatttggcatcataccttttataatgagcttcgtgttgccccggaagagcacccagttctccttactgaggctccacttaacccaaaagctaatcgggagaaaatgacccaaattatgttcgagaccttcaatgcccctgctatgtatgtagctatccaggccgtgctctcactttatgccagtggtcgtacaaccggtattgtgatggactcgggtgatggtgtcagccacac

SEQ ID NO: 28268 - DNA, 404 bp, Gossypium hirsutum
  unsure (1)..(404): unsure at all n locations; Clone ID: LIB3148-013-Q1-K1-C3
ctcgcaaatgccgagcacttcttggaaactaccgatgtttgcaccatacttcatgcctgtgatggtggaaagcaagaatcagtggcagattcttgattttattttatgaaaaccacaaaggatattttgttgtaatatagtgtctgtatatacacgtaaaacattttaatcccaggtttgcaaattgtgtgttgaacgaattataaatattgaaaatgttatgtatttgctcgaaaaaaaaaaaaaaaaaaaaaaaaaaaaaaaaaaaaaaaaaaaaaaaaaaaaaaaaaaaaaaaaaaaaaaaaaaaaaaaaaaaaaaaaaaaaaaaaaaaaaaaaaaaaaaannnnnaaaaaaaaaaaaaaaaaaaaaaaaaaagggggggccttttaaaagaaccaaattt

SEQ ID NO: 28269 - DNA, 383 bp, Gossypium hirsutum
  unsure (1)..(383): unsure at all n locations; Clone ID: LIB3148-013-Q1-K1-C4
cccacgccgtccgatggggtataccggttgatgncgattttaaacggagntggagatcatgnaagatgaagtaactccgtttattagtcttgacggtaaggtgcctgcggagttgattatgaagtgttggccaagaagaactcttgggattctgcttcctttgattgctctcgcctgtttgctgttgagcttatctgccattgtgcataggaggaagagtaatgctgaattgttcccatggtcgaaactgcctacggatatccatgaaatatctccaaagcaagccaaactacaactatcaaacattgttacataaacattgtaaagatccaaatccactggctttataatatactattacaagtagctaggtggggcatact

SEQ ID NO: 28270 - DNA, 240 bp, Gossypium hirsutum
  Clone ID: LIB3148-013-Q1-K1-C5
cccacgcgtccggttttttttgggattgaatttaatgcaatgtgtttctcgttagcttttgttgggaacattttttttaatcttctggttattgtattgaattttgtgatgttatgttttgatccaaaagtcttttggtgttttcaaaaaaaaaaaaaaaaaaaaaaaaaaaaaagggccatctagattttgggcgcttttttttctctgtttttttactaaatggataaataatacatg

SEQ ID NO: 28271 - DNA, 386 bp, Gossypium hirsutum
  Clone ID: LIB3148-013-Q1-K1-C6
attaatgtctttcattcatccttattttgttctatttgtattttgttagatttctggtgtagtatgataagtgcggtattttgtttggcgggatgtatttatatcatagattattcttcttctcaaaaaaaaaaaaaaaaaaaaaaaaaaaaaaaaaaaaaaaaaaaaaaatgatgttgatggcaaagaggggtgagatatgcaagaagattgttgaggcttgtgaggattggggtgtcttccaggttgcggatcatggagttgatactaaactcgtgcccgaaatgacccgtcttgcgagagagtttatcgctttgactgctgaaaagaagcttttgttcaatatgtctggtggcaagaaaggtggtttcatcgcctgcagccat

SEQ ID NO: 28272 - DNA, 423 bp, Gossypium hirsutum
  Clone ID: LIB3148-013-Q1-K1-C7
acccgtggggatgatgctcccctagcccaattgcccaaatcctaaaacgactacggaatgcggaagcagaaattgagcaagggaaatcttctggcatctttggtcatatattatacaatgataatctcgaggagtgctatgagaatcttaaggaactgctagggctgaatggaagtgcaccaactaatcataagccatcacccaaagggattgatctgccttcgaaccattcggtgtcaaaaatcgataacaagatcctcataaattgtgagactccggaactcgagaaagcgtcaaagaacttgattgcattggatgtgtcgtcgctaaaaggtggggcacccggtcggacaagaggactaaatgtctatgcccttgattcattttcagatggcttaaatgagaaactgagctgacgactgc

SEQ ID NO: 28273 - DNA, 111 bp, Gossypium hirsutum
  Clone ID: LIB3148-013-Q1-K1-C8
cccacgcgtccgcccacgcgtccgcccacgcgtccggtttttggccaaattgtttgaagatgtgtgctttttgattgtcattattatgcaactccatgatcataacctttc

SEQ ID NO: 28274 - DNA, 103 bp, Gossypium hirsutum
  Clone ID: LIB3148-013-Q1-K1-C9
atttattttagattttttttttacatattagttctcttaaactattttatgtatcatttatttaaaattgatttataggattcatttcaaattgttttattgt

SEQ ID NO: 28275 - DNA, 409 bp, Gossypium hirsutum
  Clone ID: LIB3148-013-Q1-K1-D10
cttttctccggtgtctccgccacgatgcttcgacaaacgttgtactctactacccgtatgggactttatgaaattataaagaacaaatggactgacaaggaaactgggaatttgccacttacgagcaagatattggctggacttattgccgggggtgtcggcgccgccgttggcaaccccgctgacgtagcaatggttcgaatgcaagctgatgggcgactccctattgatcagcgacgcaattacaagagtgtaatcgatgcattgagtcaaatgacaaaacaagaaggtgtgggcagcttgtggcgcggctcagctctcacggtgaatcgcgcaatgatcgtcaccgcatcgcagcttgcgacgtacgatcaagtcaaggagacgatactggaaaaaggagtgatgg

SEQ ID NO: 28276 - DNA, 409 bp, Gossypium hirsutum
  Clone ID: LIB3148-013-Q1-K1-D11
ggtttgtattaggggattgaatgtaacaagggatataagaacaacccagaggctaataaatcggcttttcaatttggttggttccacactggggatgtcgggttttttgactccgatggatacttgcatcttgttggtcggatcaaggagctcatcaatcgtggaggtgaaaaaatatcaccaattgaggtagacgcagtgttattggctcacccagatgtagcacaggcagttgccttcggtgttcccgatgagaaatatggcgaggagataaattgtgcggtgattccaagggaaggagtaagcttggatgaagcagaaatcacgaaatattgcaaaaggaatcttgcgagtttcaaagtacccaagaaagttttcatcacggattccgtgccgaaaacagctactg

SEQ ID NO: 28277 - DNA, 251 bp, Gossypium hirsutum
  Clone ID: LIB3148-013-Q1-K1-D12
caggatttaggcgaaagataccatgtaagtatatgcaaagaattcaacagaaaaggaaatgattgaaatgaattgagaaaattgatttattattgtctattttgatacagtttatcaagtgtatttatatacaatttacaaagggaaaaaaaaaaaaaaaaaaaagaaaaaaaatataaaagataaaaaacttaaaaaacaaaagcatgcaaaattataggtcttatatagtgaaaactaaatttaatgcg

SEQ ID NO: 28278 - DNA, 137 bp, Gossypium hirsutum
  Clone ID: LIB3148-013-Q1-K1-D2
cccacgcgttcgcccacgcgttcgaccacttatatttaaaaaacgtgggcggacgcgtaggcggaggctttatcaaacacaaaagcttgaacagagatcttgtatatgttcacgcagatagaaaatacttgtctatt

SEQ ID NO: 28279 - DNA, 304 bp, Gossypium hirsutum
  Clone ID: LIB3148-013-Q1-K1-D3
cccacgcgtccggaaatcaccactacaaggtttgtttcaaaaaaaaaaaaaaaaaaaaaaaaaagaaaaaaaaaaaaaaaaaaaaaaaaaaaaaaaaaaaaaaaaaaaaaaaaaaaaaaaaaaaaaaaaaaaaaaaaaaaaaaaaaaaaggaaaaaaaataaaaataattgaggtgttttttaatgtgacaataaaatatataaattgtttaatagttttaaattaattaaattttattgacatttttttttatcccaatttgtttttattaaataatttggtattttttaattcatttttgct

SEQ ID NO: 28280 - DNA, 374 bp, Gossypium hirsutum
  Clone ID: LIB3148-013-Q1-K1-D4
tatgaaatgaatatatataatttttcatgttcatatgcgaatacgagaatgctatgttagtaaatgctgataattctttttccttgtaatcattgcttaaagcagtcacaatcgcataggattattgttttcaaaagtttgtttgtagctattgctatctctaaattgctgtattcttaggatgattatgtggcttgcattacaattacgaactacattccctagggactgaaactaagctttccttgcaattaaaggacttcttatattatgcaaaaaaaaaaaaaaaaaaaaaaaaaatataaaaaaaaattaaaaaaataaaaatataataattcttataaaaatataaaatataaaaatttaaaaaaata

SEQ ID NO: 28281 - DNA, 409 bp, Gossypium hirsutum
  Clone ID: LIB3148-013-Q1-K1-D5
cccacgcgtccgatgaaaacttgacgtgtttgccggctgatgccggtgccataaggagtatgattagtgttccacttgcaggatttaacagcaaagatgatctttataacttacacatgaactgttgtcttcttttacggatttggttcagaacaacctagtaaacgtaacccttgacgaacattccttgcttggcttcctcggaccacccttcacccatgtacttgccgagttgagcgagagagttggcctttgccgaaacaagcagcacatcctgagccaccttcacgttctcaggtccgccttcccatttctttaggcaagtattttgaagggctcttgcatatgagaatgacacatgccatggattcggagcaaggtagcctcaatttcagactgcccaccggac

SEQ ID NO: 28282 - DNA, 243 bp, Gossypium hirsutum
  Clone ID: LIB3148-013-Q1-K1-D6
gttttattcatcttttagtggcacaaacacaagcttacagcagaaaataagctggagcatcagaggtaggcactaaaacagagtggatcaacactgagtgaagaacaactcatttttagaagagttcatctcgttgtaaaccctaaataaaaaaaataaaaaaactgggacagcatatagaaactccatcttgaagaaaacgcaatgttattggctcacccaaatgtaacacaagcgggcggc

SEQ ID NO: 28283 - DNA, 413 bp, Gossypium hirsutum
  Clone ID: LIB3148-013-Q1-K1-D8
cccacgcgtccggatgacggatggtgttccggggcttcagatttgcagggagaaatccaaacaaccacaggtttgggaggatgtgccaagcataagtggggcattcattgttaacattggggacatgatggagaggtggaccaattgtttgttcaggtcaacactgcatagagtgctgccacctagacaagaacgttactccgtaatgattcacccttttgctgtttatgcagaacagttccatttttttggaaagttcaactatgttaggaaataggaacagtttgttgaatgtccttttgatttcgaaatcttcatgttgaatgatattatctgttcataatctgattatttgatgagggtgcaaaagattgaaatgtattcaccagtcattgcacattgtttattctata

SEQ ID NO: 28284 - DNA, 377 bp, Gossypium hirsutum
  unsure (1)..(377): unsure at all n locations; Clone ID: LIB3148-013-Q1-K1-D9
gtgagaagccttccgttgagctcgtgaaggtcaccgacgacatgaaatcattcaaggcatacaacaagctccgtgttgaacgtacgaacaaacgtcatattggtgctaggttgaagaaggctgccgaggccgagaaggaagacaagaagtaaggttacccttttggggacagtgttttgttatttggcttgctaaaaagaccttaaattttgtattcattttgtcaagtgaactgagacagctttagaaaactttggtattatgacagtaatccattttgttgagcaaaaaanaaaaaaaaaaataaaaaaaataaaaataaaaatatttaaaaaaataaaaaaaataaaaaaattaataaattattttattttttt

SEQ ID NO: 28285 - DNA, 207 bp, Gossypium hirsutum
  unsure (1)..(207): unsure at all n locations; Clone ID: LIB3148-013-Q1-K1-E1
tggctaagatggctatggcagacagtgatggatcgtcttggcagacgttagatatgcttattaatgaactatgcaacaagaagcaagacgtccgcctttaaaattgtgttcaattccacatcacacgtgagagtcgtgtacttctttcttttttgtgcgggtgtggtcctaatttcaataaatgaagatcagtgtttctatggcnna

SEQ ID NO: 28286 - DNA, 385 bp, Gossypium hirsutum
  Clone ID: LIB3148-013-Q1-K1-E10
gcataccaaaccctagcgccaagatttagtgttgaaaatctcgagcacaatggccaccggtgaactcgcctgtacttacgccgcgttgattctccatgacgatggaatctcaatcaccgccgagaagattgctacattggtgaaggcagcgaacttgagcgttgaatcttactggccaagccttttcgccaagctcctcgagaaagtcaacgtcgatgatctcatcaccagcgttggctccggtggtggtgctgcccctgttgccgttgctgctgcttctggtgcagctggcggtggtgctgctgcggctgccccggctgttgaggagaaaaaggaagaagagaaggaagagagtgatgatgacatgggattcagcttggttgac

SEQ ID NO: 28287 - DNA, 405 bp, Gossypium hirsutum
  Clone ID: LIB3148-013-Q1-K1-E11
attttctctcaactgtctcgcagccgatcttcctaacctcccatcttccccatggctaccaaagaaaacttattctcttgctccgtgaaatgcgtaaaataaaacatgatttcatcctctttgaaagcacttaaaaaaaaacccttcaaaacattatttcatcctctttgaaagcacctaaagaaaagcccttctcttccacgagtccatcgaaaatatgaggttcaaagccctcttcgttgcgaaggttttaatacctgctgaaacaccatatgagacgctccgtgagctttagacctcgtgagctggattaattgagattctatacttgacgacatggatggaatattttttatttatgatgacaaaacatcaatagatggggattaagttaatttgcatatt

SEQ ID NO: 28288 - DNA, 211 bp, Gossypium hirsutum
  Clone ID: LIB3148-013-Q1-K1-E12
cccacgcgtccgctttctcccaataccaccccctcttgcctcatttgacaccaaaatggcgaactcagcatccggaatggcagttaacgatgaatgcaagatgagattcttggaactaaaggccaaaagaagcttcaggttcatcggtttcaaaattgaagaaaaccttccaccaggtattggtggaaaacttggggggacctaaggaaaa

SEQ ID NO: 28289 - DNA, 343 bp, Gossypium hirsutum
  Clone ID: LIB3148-013-Q1-K1-E2
cccacgcgtccgcttcaccggagaatgcaaagaatgtcgccactgtctgtcagaagaaagcaatgacatgtgcgaactgcttaggatcaactgcgaccgaggtgttatgcttgctgatgggaaaaccagattttccatcaacggcaagcctatctaccactttgttggaacctcgacctttagccaatatactgtcgtccatgttggccaggttgccaagatcagtccaaccgcccctcttgataaagtctgtcccattagctgtgggatatgtacaggttttggggccactgtgaatgttgctaaacccaaaaagggtcaaactgttgcagtttttggactg

SEQ ID NO: 28290 - DNA, 321 bp, Gossypium hirsutum
  unsure (1)..(321): unsure at all n locations; Clone ID: LIB3148-013-Q1-K1-E3
gatgttacagcagtcgcaaaagccgccatcttagacattagttttctccttgtaagaatgtttttaacattgtcacatttaacattattgtaagaatattacttaatttattaattatatcatagatctttcgttgaatttgaagtcnactataaaaaaaaaaaaaaaaaaaaaaaaaaaaaaaaaaaaaaaaaaaaaaaaaaaaaaaaaaaaaaaaaaaaagaaaagaaaagaagacgacacagaaacaaagaagcttgggggtggatgttattgaagtactaatttttacttcgttggtctgcccagtgtgagcttttt

SEQ ID NO: 28291 - DNA, 339 bp, Gossypium hirsutum
  Clone ID: LIB3148-013-Q1-K1-E4
gctatgcctcggttgctgtggggactgacattctgtctgccgcatcccaagttagtctccagagagctcgaagctgggatgaaggcgttacctccaatttctccactacttctgtcaatgacatcttcaagggcaagaaagttgtcatctttggactacctggagcatacacaggtgtgtgttcacaacagcatgtgcctagttacaagaagaacatcgatgagttcaaggctaaaagaatcgattcaggcatttgtgtcgccattaacgatccttatgttatgaatgcctgtgcagacaaactgcaagccaaatgatgtgattgaattttatggggac

SEQ ID NO: 28292 - DNA, 367 bp, Gossypium hirsutum
  unsure (1)..(367): unsure at all n locations; Clone ID: LIB3148-013-Q1-K1-E5
cccacgcgtccgcccacgcgtccgctcaagtcatagttatgggtgccatgttatttttctgttatggtaatttctttggtagcatggttttttgttgttttacctctttatttggattacagctgctgagtagaaggatgtttatctttatttgttgttttggaaaattttgacttgctgtttgatctttagtactaaatgaaacgggtgaagtttccaaaanaaaaaaaaaaaaaaaaaaaaaaaaaaaaaaaaaaaaaaaaaaaaaaaaaaaaaannnaaaaaaaaaaaaaaaaaaaaaaaaaaaaaaaaaaaaaaaaaaaaaaaataaaaaaataaaaattttttaaaaaaaaggggcggccct

SEQ ID NO: 28293 - DNA, 407 bp, Gossypium hirsutum
  Clone ID: LIB3148-013-Q1-K1-E6
gtcaaatacaataaaccttagagaaaaactgcatttctccatccccaatctttttcctttgtaataaaccccaacaaaccaaaatggcccgccaaattgttgttcttgctttggccatcatggccctctttgccttggtttccacctctgctgcggcccccgcccccgcacccggtggcagcccttcaagttcacctggagatgctagctcccctccttctcaggccagcgctcctagtcctagcagtggtgccgcacttgaggtctcggctattgccgcaggagcagccgccgttgctagctattttatgttctaaatacgatttatctcaagggtgtctagcaatggcttttctaggtttgatatcatcacgaaagctgccttattaattattttgtaatttgct

SEQ ID NO: 28294 - DNA, 302 bp, Gossypium hirsutum
  Clone ID: LIB3148-013-Q1-K1-E7
ctggtaatgtgtaagcttttccaatcacaacttataaactggcatatagcgaatctagagatacaagaccgctcattgtatagtaatgattttgagctattttggcagtcataaagcaccattgttaaaagacatatatagacttacgcattaacaaggttctttcttttactttttactgtttttgtatgtaacttggttaacaacattaacaaggttctttcttttactttttactgtttttgtatgtaacttggttaacaaatccagttcttgacaagtagaaatagaaacagagggtt

SEQ ID NO: 28295 - DNA, 306 bp, Gossypium hirsutum
  Clone ID: LIB3148-013-Q1-K1-E8
attgtaagcatggtagatgttatatgcggcaagattaactattatatcatatgaaggtacattggtgttgttttggtatgtattgttaatacaaaagctatgcgggagttggaatcagatgatgatggccatcttactaatatttttctcgttactatttgtctatgttagtatatttgtgcttagagcatcatttgttgttcttctaaaggtcgctgtatacttttgatagggaattagagaaattctcatcacttgaaagagtattcaaattcaaaagatttacttaacaaaaattcatttttc

SEQ ID NO: 28296 - DNA, 411 bp, Gossypium hirsutum
  Clone ID: LIB3148-013-Q1-K1-E9
cccacgcgttcgctgagacagaggagcaattcctaaaacgactacggaatgcgggagcagaaattgagcaagggaaatcttctggcatctttggtcatatattatacaatgataatctcgaggagtgctatgagaatcttaaggaactgctagggctggaatgatgtgcacaactatatgctgaccatctcccaaagggattgatctgccttcgaaccattcggtgtcaaaaatcgataacaagatcctcataaattgtgagactccggaactcgagaaagcgtcaaaaaacttgattgcattggatgtgtcgtcgctaaaaagtggggcacccggtcggacaagaggactaaatgtctatgcccttgattcattttcagatggcttaaatgaaaaactgagctgacgact

SEQ ID NO: 28297 - DNA, 361 bp, Gossypium hirsutum
  unsure (1)..(361): unsure at all n locations; Clone ID: LIB3148-013-Q1-K1-F1
ttttaatttcttttattttaatacgttttaattataataaaaatattttagttagtagcaggtaaaatagatataaaagttttgacctcattttttaatataaatttatatatattttgttgcaggtgcatggaatgaatgtgaaggcttgtcaaaatatttgtatcatctttatttttatatgcggaaaaaatgaaaaaaaaaagtaaaaaaaggggttgtatttggtgtatgatggtaatagtgtgtgatgtatttgacaagctatgaatgtaatatgatatgagaataaatttttgtcaaanaaaaaaaaaaaaaaaaaaaaaaaaaaaaaaaaaaaaaaaaaaaaaaaaaaaaaaaa

SEQ ID NO: 28298 - DNA, 407 bp, Gossypium hirsutum
  Clone ID: LIB3148-013-Q1-K1-F11
caacacaaggtctggtggaccaaattctatgtcaagggaagtacaccataacaaagtagtaccggcatcgcctcatcaaaatgcatcaatgctaccaatggatggtaaccaggttggtttgaattcttatgggaatggaatcataaagacaaatgggtttcatgaaaagggtgtaaatgatgttgaaaagccaaataagtggagaaagcataggtactgttgctttggtttcaattcagggtaggtattagcctccacccctgaagaagactgaccttagatggatgaaagtaaggcatttcattttaataagacctaatagagtggattttgtaacatcttatacaataataaatcactcctagttttttcggtgatttttagtatatggtgtaatatgttgtaat

SEQ ID NO: 28299 - DNA, 410 bp, Gossypium hirsutum
  Clone ID: LIB3148-013-Q1-K1-F12
ctttcttgggctacaaggcaatgttctaagggttcattgagccaaaaaaaattgagctgaattttgcagatattgatggactaagacgtaagctttccaacaagctttccgcgagcagggatggcaacgaaacagaatgggaggtgggagagtgtctaggcatgtggtggcgacatgatttcgaaacactgttgtgtccctacttaccacccaccgttaaaaagcccaaggagtgcaccaaactctttcttgtccggttgccggagagtcggaaatttatcgtacccgaaaacctaaaattgcttgcggttccgttgtcccaggttcatgaaaatcacaagacatatggaacggtaatatcaggagtgccgcaattgctgtccaaatactccatcaacattattgatatt

SEQ ID NO: 28300 - DNA, 337 bp, Gossypium hirsutum
  Clone ID: LIB3148-013-Q1-K1-F2
aggcagcatctgctggcacccgttataatgtaccgttaatcaactctctggtgctttacgttggaatgcaggccatccaacaactgcagtcaagggtacctcatgcacaggcaacagcaaacactgttccgatgtctgtgttcttggttagtgctgccttggatatcttccagagtctaataggggaccttgatacggaggggcgttatcttttccttaatgcaattgctaatcaattgcgatatccaaacagtcatacacattacttctccttcatcttgctatactcgtttgctgaagcaaatcaggaaattatccaagagcaaattacaagagt

SEQ ID NO: 28301 - DNA, 159 bp, Gossypium hirsutum
  unsure (1)..(159): unsure at all n locations; Clone ID: LIB3148-013-Q1-K1-F3
gactttcaaaagtttctcaacagcactctttttttttttagttttttcttgttaggattatttatattatttgttaaaagtatgttttcttttttggtatatataatttttggactttgnaaatnaaaaaaaaaaaaaaaaaaaaaaacagatcaagtc

SEQ ID NO: 28302 - DNA, 410 bp, Gossypium hirsutum
  Clone ID: LIB3148-013-Q1-K1-F4
ggaatcctgaaacctaatttacgtccaacaaccaaccaagcaactaaaacgatgaaaatgacatggattaaaactcaaccaattatgtcgagaacctcgacacgaaacttctaacaaacgaacgcctaccagaaaatcaacaaactaactcgaaatagcaggcgaaggaccaattttcttagtattcatgcctaagggaaagagatcaatgacaatttaacagaaaattcaagtgaaacagtcagagaaatcccaatttaaatacacaaatggaaaccaacagaacttcgtagaaacacaagactttatgataaaacttatacagaggtcttctaacaacgcattgaacaacttaggaccctcaattagttttggtaaccacatgtcgatcacaatcaaaaagaaaaatt

SEQ ID NO: 28303 - DNA, 302 bp, Gossypium hirsutum
  unsure (1)..(302): unsure at all n locations; Clone ID: LIB3148-013-Q1-K1-F5
agagtgcaaacaaaccaaatgcttgataaaatgcttccaaaggcgtcggtgatatgttagatgatatggggttaaaacttgtgtattctttggtagtttggactgtacatgtagttccttcatcatcagaatttgtttaccaaaaaccaaattccctttgatacaactttgggaataatattacttggtaagttgtttgatgacccaaatgttaaagttccaaaattacttaaaaaaaaaaaaaaaaaaaaaaaaaaaaaaaaaaaaaaaaaaaaaaaaaaaaaaaaaaaaaaaaaaanaaa

SEQ ID NO: 28304 - DNA, 441 bp, Gossypium hirsutum
  unsure (1)..(441): unsure at all n locations; Clone ID: LIB3148-013-Q1-K1-F6
cacgcccgtccgattggtctttggttttttggttgcgttnngtggtttgttcgaaggggttannagaagttatttagggaagggaaagagtggtttagggattgcatgggangagtanttaaggggtgggcggcacnagcagcccacccatcgggttattaccccgaacggtttgttacccgaatgaagnccgcctcggttattctggtacttgactcggagcgatggatgaaggctgaggaaagaaccgctgatctcattgcctgcattcagcccgattcaccctcggaaagtcgccgtaatgcggtcgcggattatgtacaacgcctaatcgctaaatgtttcccttgtcaggtgtttacttttgggtctgtgcccctcaagacgtatttgcctgatggggatattgacttaacagccttcagtaagaatcaaaatttg

SEQ ID NO: 28305 - DNA, 403 bp, Gossypium hirsutum
  Clone ID: LIB3148-013-Q1-K1-F7
cccaattcaagtcattgttgatgctattatcaacagtgggccacgtgaagatgctactcgaattggttctgctggtgttgtcaggcgtcaggctgttgatatttctcctcttcgtcgcgtgaatcaggccatctatcttttgaccactggtgcacgtgagtctgcattcaggaacattaaaacaattgcagagtgtttggctgatgagcttattaatgctgctaagggatcatctaacagctatgccatcaagaagaaggatgaaattgagagagttgctaaagctaatcgttgaggaattggaagaagattaaacaccatgggagtggagaattttgttgttttagtcagtactttataagccgtttttgtattctggacatgctatgaatgtctcgttttt

SEQ ID NO: 28306 - DNA, 398 bp, Gossypium hirsutum
  Clone ID: LIB3148-013-Q1-K1-F8
cccacgcgtccgcacagcttaccctgcaatgtgcgacaagctatcagatcaaagtcatattgacaacagagtagtggtggatggcaacctcattacaagcaggggccctggaacttccatggagtttgcactaggaatcgtggagaagtttttcggacgcccaaaagccttggagttagcaaaaggactgcttgttgtacgccagtagatgaactagtatgagtgtttggtcctgcccatgttaccgtatagcctgctatgagactatcaatgagaatataaaagttgagtaagcactctgcggttttatgtacgataagtttgttccttgttgataaataaatgagtgttggaacaagctgagcaaaatgaacacctttggttcatctgtgatggca

SEQ ID NO: 28307 - DNA, 372 bp, Gossypium hirsutum
  Clone ID: LIB3148-013-Q1-K1-F9
gctttgcaaagtatggaagaagaagcagaacgaatttataaagatgagcgtggattgcttcttgatgatgaagctgcgtcaacaagagatgcaatgtatgagcaggcagaaaatgtggagagggaactggagcatatgacggaacagatcaagtcgattattgagacagtaaactctagtcagggtggggaactcgaggcacttgacggaatgactcccctagatgtggtggtcaagatcttgaataatcaactaacttctttaatgtggatcgatgagaaagctgaagaattctctggtcgtattcggaagcttgcagcccagggtaatgctgcagatggagaattaattgctgctccaaaatattggatg

SEQ ID NO: 28308 - DNA, 308 bp, Gossypium hirsutum
  Clone ID: LIB3148-013-Q1-K1-G1
aaaaaaaaaaaaaaaaaaaaaaaaaaaaaataaaaaaaaagaataaaaaaatacaaaataaaaaggggtacatcaaaaaaaataaaccttaatgtctaccttaatgtgcggtttcttgtttttcgtgtaggactgtcccctgtaatggcctcctgaattatttctactgtttggttaccgaaaacatttatgtatcgcaactttttgaattgactgagtatacctatctgagcatcttgcttaataaataagaggcctaaatagctaatttttcaaaacattttcccactctgtatgcccttttggac

SEQ ID NO: 28309 - DNA, 330 bp, Gossypium hirsutum
  Clone ID: LIB3148-013-Q1-K1-G10
cccacgcgtccgcccacgcgtccggtttgtttcaaggacccaccattcccgtgggctgcattatcattttccgcagttggtttccttgcactctcttatgtgtatgcaaaaagggacaaactttttagaaacaagaggaagcagttttgatagttaatgaagcaaagtctgtatcatttaaactcagtagaacacatttattcctgtgcgagtggtaagtcccaagattgaaacttagttttactccggactttctgaaaatttagggcaaattctgttttgttgattttcctaacttcataatctctcaactcatgctatattttcctt

SEQ ID NO: 28310 - DNA, 354 bp, Gossypium hirsutum
  Clone ID: LIB3148-013-Q1-K1-G11
cccacgcgtccggagacggcaatgcaacgggttctaaaaaggcatatatcaacaggaaagccccctgatgttgctcaatggcggatagactacaatgaccgacccaatgcggaatttataatgaaatcaaagaaaaatgctgacttagtgatcaagtctattgacttcttccaaagataattaaacctgatgaaatattacattttgagtaatgggagatgaggggaaaatgtatgatttgagttggaaagatggcttcaataatagtgtcttgggacagtgttggaaattaaaattttatgtactttcactgttgtttcggtttaatgaaaacgacttgactgactatatgac

SEQ ID NO: 28311 - DNA, 129 bp, Gossypium hirsutum
  Clone ID: LIB3148-013-Q1-K1-G12
ctcaattagttaagttgtgtagtttgtagcttgatgtttcagtactcatcaaagattctgtgacgcaagtctgtcatcttactttgctcctatctttagatgttatattttgctctggttttttgtggt

SEQ ID NO: 28312 - DNA, 90 bp, Gossypium hirsutum
  unsure (1)..(90): unsure at all n locations; Clone ID: LIB3148-013-Q1-K1-G2
naaaaaaaaaaaaaaaaaaaaaaaaaaaaataaaattaaaaaaaaaaaaaaaaaaaaaaaaagaaggggaaaaaaaaaaaaaaaaaaaaa

SEQ ID NO: 28313 - DNA, 441 bp, Gossypium hirsutum
  unsure (1)..(441): unsure at all n locations; Clone ID: LIB3148-013-Q1-K1-G3
aattncngggaaaaataatattaatatttaatagacatacatataaattatccaaaataatgaaataactttaaaaaatataccttctgctgctattttctacaaacttttgaattttaatgccatcttttttccgtcatgtaaataacaggtctatgaagctcatatgatatagaatcgtgtatatgatatatgcacaatattttcatttaaaagcacatttattatctctttttttccatcattataaataattttcccctttacatcttttcgaatctccatttttttcttttgcagttgagatgtttcagttttggattcaacttcttttcctttgcttgttactacaacttcaacagctcttttaacatataaacaaatatttcgttagtgtaatttttatatatcaatattaaaattacaatataatctaaatag

SEQ ID NO: 28314 - DNA, 406 bp, Gossypium hirsutum
  Clone ID: LIB3148-013-Q1-K1-G4
ctgaatgattggttatttttataacttggattaaaaagattttaatcatcaaatccaagtgaatactaaatggaaatcttaagtgtgtaccttgtagcattgattttattagactgtaagttgcaatagtatttgctgaaattagagtaatttgaattttttatggaactttgttttgttgcttacagatttagtactttccaacaagctggttttgtatgatttggaaaatcaaaccattggattgagcacaattgtgagtatcatgttacttttcctttcacgattactttataaattttgtactaattagtataaatctcaatgtattattattgtttcttttgctttataagaggtgttatctctctacaattaccttagttagaaaatttattttatgaac

SEQ ID NO: 28315 - DNA, 71 bp, Gossypium hirsutum
  unsure (1)..(71): unsure at all n locations; Clone ID: LIB3148-013-Q1-K1-G5
acgaagtnaaaaaaaaaaaaaaaaaaaaaaaaaaaaaaaaaaaaaaaaaaaaaaaaaaaaaaaaaaaagaa

SEQ ID NO: 28316 - DNA, 175 bp, Gossypium hirsutum
  Clone ID: LIB3148-013-Q1-K1-G6
aaaacactataacagattctgaccatgctctcctaccttcttgacctgtaagtccatttccacaagctcgaccgaaaaaaaaagacgctttcgaacttttttatctcatttcttttgtatctttgtgttgtgtacataaaaatttgcagaaatgaagtgtaaaaacattattctt

SEQ ID NO: 28317 - DNA, 299 bp, Gossypium hirsutum
  Clone ID: LIB3148-013-Q1-K1-G7
cccttaccccctttcaaaacaatccagaagaccggagcccgtatcggaagctatgatgggtcatgatggaattgtttttgtttgctacaaactctggctcggggatgagaaaataatgttgtttttatgttaatgtgatactggtagcttgttattgcagtttttgaagccttgtccatatatatatattatgtcatgtgttgaacacttttgtttatttgaacacttttgtttatgatatttatatgttatatgatattcgagctttatattatattatatgaaaccctttcaatttt

SEQ ID NO: 28318 - DNA, 328 bp, Gossypium hirsutum
  Clone ID: LIB3148-013-Q1-K1-G8
gccactcctacgcagaatactatggttgatttgattgataatatcacttatatctgcagggggacttgttgaaggactaattacatgtcttccaacatatactccatatgagactcgatacgaggtgtaatgctaggttaaatgatatgctttacgaagtactatacaacggtcaatgcgacagatgtagcagataatggaattcactgatgtcttcaataatctaatccatatgcagatctgcttgttcttgtgaaagtgcatttgaaagacaattgtaataccaatcattatgtgctcctatttgatccgttaaaagggcggccgc

SEQ ID NO: 28319 - DNA, 412 bp, Gossypium hirsutum
  Clone ID: LIB3148-013-Q1-K1-G9
atcaatattcacgtattatacgttttgggtcatcatcctgccatttgtggacagtgataagttcatccacaattattttctaccccaggaatatgccatactgatccctgtgtgtgccggtgtggtgctcctttgcctcctctgtatttttattgggttcgtgctgctcaaatccaagaagaagaaggcttgaagcttgatgctactttatcatctctgcttaaaacatgccttgggtatagctttgcttgttttcttccatatatttttgcttcgagtttaagttttgagatgagaatttgtgtttaggccatcataattttgttaaagactgttgcatttgaggacaactttctttgatttttctgtctaatatacaactgctacagagaacccagtgtatttttctttc

SEQ ID NO: 28320 - DNA, 253 bp, Gossypium hirsutum
  unsure (1)..(253): unsure at all n locations; Clone ID: LIB3148-013-Q1-K1-H1
cccacgcgtccgaatagagaagatgaaatgagatgagaggatgtacttttttttttctctatgaatcttattaaaaatatttttgggaaagaagttaggagatgagaagtttttaacgtncaaaaaaaaaaaaaaaaaaaaaaaaaaaaaaaaaaaaagaaaaaaaaaaaaaaaaaaaaaaaaaaaacccacacaaaaaaaaaaaaaaaaaaaaaaaaaaataaaaacaactagggggcggccgttttaaagg

SEQ ID NO: 28321 - DNA, 408 bp, Gossypium hirsutum
  Clone ID: LIB3148-013-Q1-K1-H10
caacaattaggtgagaggggaaatcaaatgtagaatgatgagtacagaagaaaaaagttcgatgaattgcaatcgagacttgctgatacacgttcatccatctatcatattgaacttatcgacaaagtaaaacttcaagttcagcaatttcatgagattgacatgaagcgtacaatagcagacgaatctatgagagtcaatcttgacatcccagaatcagttggcttatcaacaccaatgccagtcccatcatcatcaaggctggctgatttagatactggaagacgtggtaagagaaaactttaactttttttaacatattttcttgtttatttgatttagggaaatggtgttagcacttgtatgtatagagttcctagtaaggttattttcagaaagacagcatca

SEQ ID NO: 28322 - DNA, 192 bp, Gossypium hirsutum
  Clone ID: LIB3148-013-Q1-K1-H11
ccacgcgtccggaaaatcaaggaagatagatgcttagttctttgattaatcattaaagtttctgatgtgaacaaaaaaaacaaaaaaaaacagtgtatcggtggagttcttcgtttgtttgccatggttgatttgcaggattcctgcaagggagatatattagttatcataaaaatgtttatttcaatctct

SEQ ID NO: 28323 - DNA, 427 bp, Gossypium hirsutum
  unsure (1)..(427): unsure at all n locations; Clone ID: LIB3148-013-Q1-K1-H12
tcttatcagttctcgaaccagcaggcgtaccagctttcggggtcgtaatttatcttagagacagataagcanatattagagaattaaatgaatcaacaaatgctataatggcataattcaatataatttactttgtataaaaattaactgtttatatttataatgatataattatattaattccattcttatttaataaaaaaatttctacattttaatattattcataaaatatttttcctttattcttatacattataaatttttttttgaattaactattaaatattgtaaaaattataaataaattctaatatattttccttttccttaactaattttttatttttatttaattttaattgcagaatttgatgtaattataaaatattaattaataggatttaattttataaaattatttaat

SEQ ID NO: 28324 - DNA, 425 bp, Gossypium hirsutum
  unsure (1)..(425): unsure at all n locations; Clone ID: LIB3148-013-Q1-K1-H2
cagagtcttcatgtaccccagcaatatatgagttgtgtagatcgacgactcgaatgacgctctacgatttcacttttgtttttatgaacttagtcaagattttgtgtgctttgaatcagtcattttgtttctttgggatggtgaaatataagacttatttatctttacatatttctatcaagggttttccacctattttctccttgnaaaaaaaaaaaaaaaaaagaaaaaaaaaaaaaaaaaaacaaaaaattaaaaactgacaaataatatacttggagaagttcaataaaaaaaataaaaatataaaaaaaaaaaaaaaaaaaaaaaaaaaaaaannggggggggccccttttaggggttcaaattttttttcccggggatgggaaagttttaatttttttttggggcccccaaaataaaat

SEQ ID NO: 28325 - DNA, 228 bp, Gossypium hirsutum
  unsure (1)..(228): unsure at all n locations; Clone ID: LIB3148-013-Q1-K1-H3
ctcatattattattatataaatcaaaagaaaattggtatagctttttctttcctgcagatgtcatttgcttatgaatttacattacatggcagctgctttcaaacagagccaacaaactactaagaatttacatttgcaccgcattcttttgaagatcaacattttacagatgtaacttttcataaaaagaaaaaagaaaaaaatttggaaattatgaatntaccana

SEQ ID NO: 28326 - DNA, 410 bp, Gossypium hirsutum
  Clone ID: LIB3148-013-Q1-K1-H4
gcgtacgagcaaacaatccagtcatgcattccaagtttaaacttgtggaactagacttgttctttgtaagagaaaaagtggtagatggttcgctgctagttggtcatgtttctgggcaagatcaagttgctgacatgctgacaaaacctttggctgtagggttatttgacaagtttagaaagagacttggagtggcctccatagcagaggatattatgcaaaagcaaggaacgtcgagaagcaggagccatgttaaggataagaaacagttagttcaaagcagttagtcagttagtatcagttagctgttatggttagcagttaataaatttgtatattaaatacccagttgtaagtatgcttatgatatgagaaaatcaataagaatcagtccgtatttttcagatctt

SEQ ID NO: 28327 - DNA, 393 bp, Gossypium hirsutum
  Clone ID: LIB3148-013-Q1-K1-H5
gacggttcctttgatttcgagagtagatattcgctcgtttctctctttcgtcgaactccgcgtaataatcgctcatatttctcgcagacgtgaagaatggggctgtctttcacaaagctgttcagccggctttttgccaagaaggagatgcgtatattgatggttggacttgatgctgctggtaaaaccaccattctttacaagctcaagttgggagagattgtcaccacaattccaaccattggtttcaatgtggaaactgtggaatacaagaacatcagctttactgtctgggatgttggtggccaagacaagattcgtccattgtggaggcattacttccaaaacacacaaggactcatttttgtggttgatagcaatgatcgtgatcgt

SEQ ID NO: 28328 - DNA, 376 bp, Gossypium hirsutum
  Clone ID: LIB3148-013-Q1-K1-H6
gagtgttgaacttggtcttaggatacttcaaggaatagtggaaaccaggggcggggacctaatctatcttagagacagagaaacagatatgagagaagtaagtgaagcaacaaatgctatagtggcatggttcagtatcatgtcccttggtgtctgcatcgcggtttcggttttgcagatatggtatttgaagcgttactttgtaaagaagaagctcatctagattatatacacaagtagtttgtgaagcaaagttaaaaatgtctttgaagaactagaaaaaggaaagatagaagaattcacttaattcttgctggaccaattggctttctttaaattccctgctgattttgggaatgaaagattggtgaaggtt

SEQ ID NO: 28329 - DNA, 395 bp, Gossypium hirsutum
  unsure (1)..(395): unsure at all n locations; Clone ID: LIB3148-013-Q1-K1-H7
cccacgcgtccggaaggaacaaaaattatttagctattttggccgcaagattgccatgtagttactcaaagaaggcagatgctactgaggatttgcaagaagccatggaggtatttttctttggtcaaacatggagtgataagtaaagttttcttttgttgtttcaccactacggaaaattaaggtgctgttgtttttattattagactggaaataaggaggacattgaaataaggtagccaaaattttgtcacctgtcactaatatacttgtagagttcaatcaattcaacgccgcaagaaaatggaagcgtatgtataataactgtatttgtagtactgatttttgttatataataataaaaggaatatatgttcttttcccnnnnnaaaaaa

SEQ ID NO: 28330 - DNA, 272 bp, Gossypium hirsutum
  Clone ID: LIB3148-013-Q1-K1-H8
aataaagggatcgatccttcgttgaggataggaagaagttgacatacatatgcgcgaatgtgtatgtatgtgtaggtttagggtattgacaatgaaacaatgtgggaaggtaatttaacttgtaataatagggtagtgagttgttgatctaaattatgtaaccggtacaatgcagtgtgaagatgactttcatgttgcgtaatgacccctttttcttacaactatgagactaattaattagctaatgataatttgggtgggggaagtttggt

SEQ ID NO: 28331 - DNA, 376 bp, Gossypium hirsutum
  Clone ID: LIB3148-013-Q1-K1-H9
cccacgcgtccgtgttgatttgctcgcagatccctttgactttgtctctgacgaagatctccagttcgaagagttcatccaatctaatgaaatggaaaccatagcacctcctttaccgtcaaatggtggtacgtacgagtaaataaattcttacgactctggaaatggagaattatgtgtgtgtgtcgattctacttctactacttgcatttatcgttttatcaaattacattaggctttgagaagggtgttgaagctctgatgaagaatctgagtttggtgccatctagtcctcggttttcagcagaaccagcaaaatacgtggagaagccggcgaagaatgtgaatgctaaaagtggtcgtcgttgcatccatc

SEQ ID NO: 28332 - DNA, 315 bp, Gossypium hirsutum
  Clone ID: LIB3148-014-Q1-K1-A1
cccacgcgtccggagaaccctaatgcttgttctataatgtaatcaacaaaaaaatgttgggtcctctgttgatctccatgttcttctccttgttctgtttaatggctataaaagaaagtataatctacagtgaaactgtagaattttgccattttgtatttttctttaagatgttatatataattatatctaaaataatgatatagtttcaacttatttgttcccaaaaaaaaaaaaaaaataaaaatataaattataattatataataaaaataaaaaaaaaaaaataaatatattaatattttttttttatat

SEQ ID NO: 28333 - DNA, 307 bp, Gossypium hirsutum
  Clone ID: LIB3148-014-Q1-K1-A10
gtggcacttatttaaccaatcaaaatggatgcccccacaaaataaatgacaatgcctggccaccatagcctcattttgcaaccttcaccacgaaatgttgttaaggtattcaatacatgatttgtttacaactaataaggtttgcactggtttttattgattattgtgtgggtgatttgctttaaactgtgattttatatatatacaaagtttagtagtatattggagaaaaaagcatgggaagatatttttactatcaaagcaaaatgattattgtggcccggcattgtaatttatttttgggggg

SEQ ID NO: 28334 - DNA, 112 bp, Gossypium hirsutum
  Clone ID: LIB3148-014-Q1-K1-A11
ctaaatttatgtaaatatgctttaggatgtgttctatctcagacgacgatgtttgtatataaatgatctatgatggaactatcataaatgaaaagaagtgcttgttttaatt

SEQ ID NO: 28335 - DNA, 132 bp, Gossypium hirsutum
  Clone ID: LIB3148-014-Q1-K1-A12
aatatatgtagacataagttaaaatgacattgcgaatttgaaaattagctgcacccatttactcttttgttgttttccttgccctctgaacacatacttcattaagaaatgagaaaccctttcttctatctt

SEQ ID NO: 28336 - DNA, 412 bp, Gossypium hirsutum
  Clone ID: LIB3148-014-Q1-K1-A2
cccacgcgtccgatttggtcttttgatccaacggctaagagggctctttttagaattttgcctaatacgacgactgcaatttctttttaatagaagaggaaattttcattacagcaactggtccaggccttttcgttcgtctttacaatacttccctccgtttgagcacttccagatctgaagaaaaatgcctcccgccgctcctcgatccggagatgcgatcttcgccagcgtagaacgcgtgaatgcagaactattcactttgacttatggagcaatagtgcgtcaattgcttactgacttggaggaagttgaggaggttaacaaacagcttgatcaaatgggctataatataggaattagactaattgatgagtttctagcaaaatcaaatgtgtccagatgtgttgac

SEQ ID NO: 28337 - DNA, 278 bp, Gossypium hirsutum
  Clone ID: LIB3148-014-Q1-K1-A3
agaaggcagcggagacgaagaagatgatgagtaggaaggtccgtggtggatagcataatcaatgtaggctgtgatagtgtttgatcaaaaccatatgttaatgctttcgatgtttccatgttattcttttagatgcgcatgccatctaagggagaaatgtacctctgaatcctgttggttccttttgaccttctgaaattaatagttgtagatgggataatctgcttctatatgtactttttgatttaaagttgaatggcttagataaatccttttgt

SEQ ID NO: 28338 - DNA, 317 bp, Gossypium hirsutum
  Clone ID: LIB3148-014-Q1-K1-A4
gtctggcagttgaaggaatacgacggcaagatgcttgtctctgccacaaaggaaggtttaaagctcgaggacgagacggaggaggagaaaaagaaaaaggaggaaaaaaagaagtcttttgaagatctctgtcagacaatcaaagatatcttaggtgacaaagtggagaaagttgttgtctccgacaggattgtagactcaccttgctgtctggtcaccggagagtacggatggactgctaacatggaaaggatcatgaaagcgcaagctttgatagataatagcatgagttcttacatgttcagcaagaaaacaat

SEQ ID NO: 28339 - DNA, 180 bp, Gossypium hirsutum
  Clone ID: LIB3148-014-Q1-K1-A5
ggctaaacgaaattgaccgctatgccagtgacaatgtgaacaaacttttggttgggaacaagtgtgatctaacagcaaacaaagttgtgtcatatgagacagctaaagcttttgctgatgaaattgggattcccttcttggaaacaagtgcaaaggatgccactaatgttgaagaggctt

SEQ ID NO: 28340 - DNA, 380 bp, Gossypium hirsutum
  Clone ID: LIB3148-014-Q1-K1-A6
ccacagctacaagggtttccagcagcttagcagtttggttgatgttggcggtggtcttggaatcacactcaaccttatcacttccaaatatccctctattaaaggaattaattttgacttacctcatgttataaaacatgctcctgcctaccatggtgtccaacatgtagggggagatatgtttgaaagtgttcctaaaggagatgcaatttttatgaagtggattctccatgattggagcgacgatcattgcttgaagctattgaagaattgttataatgccattccaaaagacggaaaagtaatagtggtggaagcagtggttccggttgtaccggaagctaatgcctatttgagaagcatcacacagcttgatgtgc

SEQ ID NO: 28341 - DNA, 372 bp, Gossypium hirsutum
  Clone ID: LIB3148-014-Q1-K1-A7
cccacgcgtccggtttctttgcaggatgaagagctaagttttctgctgatggatatagtttagtcgtgacagttattgggaaaaagggtgagggtattgcaaaaataggctttagtttttcttcttcttcttcttcttcttcttttttttttttttttttcttggttgtattaaaatgggcgtagctttgctttcccttgcaactttctttacctattaaattagtgaggttgcagttcatgtttcatttggtgaccgagtaaatcttgttgttgacatatcttttttttcttctttctgctacttagaaagttgtaaaattttccttggttcctgcaagttttgtgatacttgattgcaagatcaattcat

SEQ ID NO: 28342 - DNA, 355 bp, Gossypium hirsutum
  Clone ID: LIB3148-014-Q1-K1-A8
tgcagctcccccttctccaacaccacaggtctatttgggggagcaatacgtcaacaatgctacattatctgatgttactttcctagttgaaggtagacggttctatgcgcacagaatctgccttcttgcttcttcagatgcatttcgtgctatgtttgatggtggttatcgggaaaaagatgcaagggatattgaaattccaaacattagatgggaggttttcgagttgatgatgcggtattacaaattcttcgatctggatatataaacactggatttacttcattttggttattttgatcatcattttatgtaagtgacttcgtttctttgtacagatttatatacactggat

SEQ ID NO: 28343 - DNA, 416 bp, Gossypium hirsutum
  Clone ID: LIB3148-014-Q1-K1-A9
cggtggagctgaggcggccgaagacgcttcccgacctgcttccagagaggtctacttcactctcatccgatgcgaggccgccgaagttgacgaagctgctattgaacgtgacgattcaagggagcctcggagccgtgcaagtggtgatgtcaccggaaaacactgtcggtgacgtaataacggtatccgtcaggcagtactcgaaggaaggtaggcgaccgatgctgccgccaacggacgccgcgctattcgatctccattattctcaattcagcttagaaagtttgggaagggaagagaagctgatagcgttgggatcaagaaatttcttcttatgcacaaaaacggcggcatcgaaggacggccagaataaaacggcgtcgtgctcaaatgaagcggaaagtgttacaaaaagc

SEQ ID NO: 28344 - DNA, 317 bp, Gossypium hirsutum
  unsure (1)..(317): unsure at all n locations; Clone ID: LIB3148-014-Q1-K1-B1
atttttattggcagggttctatcttttttgttatanaagggtgaaaattatattaaaaaaaaaaaaaaaaaaaaaaaaaaaaaaaaaaaaaaaaaaaaaagggaggaaaaaaaagaagaacaaaaaaataaaaacaagtgcaaacaacgggggcgtgccttttttagggcccctttttttttatctcttggccgtttttttaccacgttttttcgtggcacccccttgttgtaacccttctgaattttcaagtaactcgcctttcttaaccctgctgttttcatagcaaagaggcttgcaaaaagccccttttcaaa

SEQ ID NO: 28345 - DNA, 328 bp, Gossypium hirsutum
  Clone ID: LIB3148-014-Q1-K1-B10
gttagatcatcatcagcctagagcttctcatcaaatggcaaacttgaattttagtgtagctgctgtattttgctttaagtttctttttcccttttcattgtagtcgaagacttctatcttgttttgatctttagttagaattacttttgaggtttggctgtaacttttaggcaattagtaatcgtacgctagattgtcgatcacctagagaggtggttgcgtcttttaacattctatgttttttttggcatatggatctcaagttcgtaggtaactttcaaggggtgccaatgcattataggttattgaacttcttattttatgcttt

SEQ ID NO: 28346 - DNA, 134 bp, Gossypium hirsutum
  Clone ID: LIB3148-014-Q1-K1-B11
cccacgcgtccgataaaagtcaggcaaaagcaatacatgccaaagtgtaatgcctagcagtgcagcatagatgaaccgattaatgggaacacacaatcatttatttgacataatattacaatatattcataaca

SEQ ID NO: 28347 - DNA, 350 bp, Gossypium hirsutum
  Clone ID: LIB3148-014-Q1-K1-B12
cttggcgtggcaccccggaaagtgaactttgatggagctgaaatggaaactggggctgaaaatggctgcaaatgtggagataactgcacttgcaacccttgcaattgtaaatgaggggaaaaaaaaaaccgaagcatattatggaagctgatctaaataatatatgatgtatttgggtttttattattagaataaagcagccatggttcattaggtgttttgcttcttgtatccatggttgcttggtatgtatgtgaaatgaaagtattttaactagctttgttgtgttactgccatgttatataactgatgaatgaatgaaggaaagctctatttggcttttccttttt

SEQ ID NO: 28348 - DNA, 336 bp, Gossypium hirsutum
  unsure (1)..(336): unsure at all n locations; Clone ID: LIB3148-014-Q1-K1-B3
gtgcttaggttatataatgcccatatttcagtaagcaggatacgagggaaaagcaatttgcacatatgttttagtgaaaagctgggttttaatttctacgtttaatttgcagatgaggttgttatgtagctaaataatatatgtaaattgcttctctttgtttacagattttgttttattaataaaaagtgacatttgataaanaaaaatatatttttttaaaaataaaaaaatataaaaaaaaaaaaaataaaaaaaaaaaaatataaaattaaaatttaaaaaaaaaaatatataatataattgggaaaaaaaaaaaaaaaaggggggcccttt

SEQ ID NO: 28349 - DNA, 271 bp, Gossypium hirsutum
  Clone ID: LIB3148-014-Q1-K1-B4
gagctgatttgcagaacctgatgaatgaagcggccattcttgcagccaggcgtgacctcaaggaaataagcaaagatgaaatatcagatgccctagagaggatcattgctggaccagagaagaaaaatgttgtggtctccgtgagaagaagaaattggttgcctatcatgaggctggccatgctttagttggtgcacttattcctgaatatgatcctgtggcaaagatttctattatttctcgtggtcaagctggtggccttacctttttt

SEQ ID NO: 28350 - DNA, 61 bp, Gossypium hirsutum
  Clone ID: LIB3148-014-Q1-K1-B5
ggaagtttatgggtaatttttagttgtgtattccccagagttaatcaaatttattatcgct

SEQ ID NO: 28351 - DNA, 54 bp, Gossypium hirsutum
  Clone ID: LIB3148-014-Q1-K1-B7
tttggcgtaacaccccttaaagtgtttttttatggagctgaagatgcatacttg

SEQ ID NO: 28352 - DNA, 428 bp, Gossypium hirsutum
  Clone ID: LIB3148-014-Q1-K1-B8
tggatttagtattcaagcaatacaagtagttccttcatgtctaaatgatgtggatcttaagacattgtctaagtagaacattttagggattgtttttgtttggattgattgaggtttttatagaattaatgaaaatgatgagtagctgtcctgtctctaaaaaaaaaaaataaatataaaaaaataaaaattaataaaaaataatttaaaaattttatttaatattttattttattatttttatttttttatttatattttaataattttttttttatttaaatatttatatttttattaatttttttttattaatatatattatttttttttttttgggtgtgtcgttttttaatttttttttatttttttttttgtgtgtttttattatattttttttttttaattttgttatataatttttatat

SEQ ID NO: 28353 - DNA, 421 bp, Gossypium hirsutum
  Clone ID: LIB3148-014-Q1-K1-B9
aaactttgtctgctgcaacttcttcggaaccatcgatccctccttcatctgccaatcctgaagaaactttgcagcggatgctttcttcagaccctcaaagttctgcaatggaatacttggaagcttctcaattcgataaaaaaagtcagccttgtgttgctgtcgataaaccggctgaggatggttacaactggcgtaagtatggacagaagcaaattaaaggttgtgagtatccgcggagctactataaatgtacacatccgagttgccctgtcaaaaagatagtcgagcgttctgccgagggcctaataactgaaattatatacaaaagcacacataatcatgaaaagcctccaccaaataaacaaccgaagggtggaagtgatggaaacgcaaattcgcagggtaatctggaactagg

SEQ ID NO: 28354 - DNA, 419 bp, Gossypium hirsutum
  unsure (1)..(419): unsure at all n locations; Clone ID: LIB3148-014-Q1-K1-C10
cccacgcgtccggcccattggagcagtcatggtgagccctgaagtttcagaagtcatttattctcaaagcaacaaacttggtagtttctctcatggattcacctactctgggcaccctgtatcctgtgctgttgcaattgaagcactcaagctctacaaggagagaaatattgttgagaaggtgaagagcatttcaccgaggtttcaagatggtctaaaatccttttctgacagtcctattgttggagagatcagaggtaccggcttgattcttggtactgagtttacagacaacaagtcgcctaatgatccattccctcctgaatggggggttggtacatattttggagcacaatgtgagaaacatgggttgctagtacgtgttgcaggggacaacataatgatgtctncaccattta

SEQ ID NO: 28355 - DNA, 337 bp, Gossypium hirsutum
  unsure (1)..(337): unsure at all n locations; Clone ID: LIB3148-014-Q1-K1-C11
cccacgcgtccgggtttatgtattaagttttgaattgtaaatataggttatgcaatgaaagttggctatcaaatggtatgtttgtgttaagttttaatatggtttgaatgagttgttgaatgatgatgaaatagttgtaatgaagcatgttttgagttaaaaaaaaaaaaaaaaaaaaaaataaaaaaaggaaaaaaaaaaaaaaaaaaaaaaaaaaaataatanttttatttattaaattataatttatttataatttntttttatatttttattttttttttttattattttattttaaattttttattttttttttataatattttattattat

SEQ ID NO: 28356 - DNA, 86 bp, Gossypium hirsutum
  Clone ID: LIB3148-014-Q1-K1-C12
atttccctgtatataactctgcttttgaggcaactggtgtgtcttctgttttcatggtaaaaaaaaaaagtatacttagtttttgt

SEQ ID NO: 28357 - DNA, 262 bp, Gossypium hirsutum
  Clone ID: LIB3148-014-Q1-K1-C2
gcaggtacagctgtgcatggagaaactgctcgtgggcgatagtgcgaaggcttccagaagcttcaatgtttgggccctatgagcctgctttgaaatcggctggctggaggctgttgtgaaggccactggtggttgcttgcggcgcgaggggacgttcgtgggagctgcggcgctgtttagctcggatttcaatttttggttctgaaattttgggccatttgggctagttttgggattgggccattttttggacttattttta

SEQ ID NO: 28358 - DNA, 155 bp, Gossypium hirsutum
  Clone ID: LIB3148-014-Q1-K1-C3
cttccgtttgtcctacttttggggtgggttaaataacaccgtcgtagtcttaggtggccaatatttaccagattaaagtaatcattaaaattacatttattagctttaaaattatgagatggaatacgcatggtagtattatttatattaatttg

SEQ ID NO: 28359 - DNA, 344 bp, Gossypium hirsutum
  unsure (1)..(344): unsure at all n locations; Clone ID: LIB3148-014-Q1-K1-C4
cccacgcgtccgcccggatctccagttagacggaacttcagaaaagaaggcttcgaagtccgagaaagagcatagagatgaacaacaatgtggtgaaagtcagagcacagaagacatagaggaggatgattttggggattttcaagcagcagggtagaggcttgcagtaagggtgttatgtttgtaatgggaatatgcaaatgttttgtttgtatttttatggtgatggttggaattaggtcctactgttaaatttaccattcctccggtaattactccgtttagtagaccatatacttggaacatacacgacatgagaataatctaaaattggcttntcgttt

SEQ ID NO: 28360 - DNA, 55 bp, Gossypium hirsutum
  Clone ID: LIB3148-014-Q1-K1-C6
cacattttgagcttagagttcacccttaacagagtttgcttccctggtttttatt

SEQ ID NO: 28361 - DNA, 391 bp, Gossypium hirsutum
  unsure (1)..(391): unsure at all n locations; Clone ID: LIB3148-014-Q1-K1-C7
ggaagatgagcaaggatcttgagcttgccaggctgaagaagctggccaaagagcagcaacagttgaaggagaaagaggctgagaatgagaagcccaagcttgaagccaagccattggaggaaatccttgcctaaaacttttaccctactggttattgtgttagcactgtttcgtcttccactatgttgtgttaattttatttcatttctacttttttttttgtggtgatacccgtttctatttattttctagcgagtaatgtatgtcatgtttcccacannanaangtaannaaaaaataaaaaaatataaaaaaaaaataaaaaaaaaaaaaataaataaaataaaaaaattataaaaaaaattaatatataatatattattaattaatt

SEQ ID NO: 28362 - DNA, 384 bp, Gossypium hirsutum
  Clone ID: LIB3148-014-Q1-K1-C8
gcagctcaattcagacatcgaagtttcctttattatgaccaacttactgccatctacgcaaaagatcgagccattggaaaagatgctcaaacatctgctgatatttttgaagaaataaatgttgaggatgtagctgctacaaatactcatgaagaaataaacgatttctatggatccgaagctgatgtttctttggatgacatggatctttcagctacacaacagcaatcagaatccaaccagctagaaatcaaggtgattctgtattttcaaagaagaaaaaaaggatttctgatgcaagtgatttttctacttcatttaatgatgctgccgctttattcgcggaaaatatacggaccgttggccttgaaatcagtaagagta

SEQ ID NO: 28363 - DNA, 416 bp, Gossypium hirsutum
  Clone ID: LIB3148-014-Q1-K1-C9
cccacgcgtccgtgcaaacttactcttggcaacactccacgtcggcagaccaagattgtatcaactggtcctaatccagagtggggtgaaagttttgcgtggacttttgagagtcctccaaaaggccagaagctgcacatatcttgcaagaacaagagcaaaatggggaagagttcctttggaaaagttacaatccaaattgatcgagttgtaatgcttggatcggtagctggtgagtacacgttattgcctcaaagtaaaagcgggccatcacggaatttggaaatcgaattccagtggtctaacaagtgaagaagatgagagagataattatcaccattattattattattactattattatttttcccggaaatttgatgattgatcaagtagggaacatacgttttggtttt

SEQ ID NO: 28364 - DNA, 422 bp, Gossypium hirsutum
  Clone ID: LIB3148-014-Q1-K1-D1
gccacactcacacttttgttttcttgtctatatcagtagtggggctttgagtatcccttcagaataataacctctttaaagaaaaagcaatcaagtgtttggtaatttcaagtctttgggtctcttttgtctgtgattactacgcagcagaaatagttgtcagtagaaaccccaaaaaaaattattaaaggaaacaatatatggttgtgcatgcagtaactattacctaaagagcaaactttcttgggcacatggcggttccccttgtaattaatgaaaagctaaagacatattaccctctttttttatacattttacaaaagtcatcgtgaaacgggctatggttcaagttcaacattatgaacacgcagagcaaagtccctttaggaaaaggcaaattgttttgagagaaagaaaatgca

SEQ ID NO: 28365 - DNA, 299 bp, Gossypium hirsutum
  Clone ID: LIB3148-014-Q1-K1-D10
cccacgcgtccgcggttttctactccttgtttgtcttttcttttgcaggtgtggtcagaggcgtggagggcagaaggtatgggcgatggtatgggacgcctgtttcaggtgttgtgcaccctgaggccagcacatggaggcagcggcgcaaggcttgtggagctagggttgaattgttgaaaagttttaagatagttgggttaggattttgacttgggcttgggtattgggttaatgggctgatctggtctgtattttgatttgtaaaaggacggtataaatggacattttgatttttt

SEQ ID NO: 28366 - DNA, 180 bp, Gossypium hirsutum
  Clone ID: LIB3148-014-Q1-K1-D11
accacacaccatgcgagaaaggttcatatgaatactggcggaacgtttgacctatctgaaaatatgaatactatgggatgatcagatattatatgcacgcccgatggcaaagctgaagaggctcagataaatgcgtgtgctgtactctaagtatcatgtactttcttgggaatatcacat

SEQ ID NO: 28367 - DNA, 379 bp, Gossypium hirsutum
  Clone ID: LIB3148-014-Q1-K1-D12
atccaccgatctgatgcagtgtactctggatgaagaaatgcctacaaaccggcttaattctcgttttcgtccctctactatgttgagatttgagatttcgacatagtagagagattaaaaccataatcatactgtcctcttatattagtaacaatgtccatgtcaatcgagttagaattcaattgacttttgtctgtaatatttgtacaaatttcattataaaaaaaatgttaacactatgttttgtacttatgaatagtgagagtaaacattgttcccaaaaataatgtaagtgaaaaatgtattttttatgctaattaaaaaaaaatattattattttttttattattttatttattattatatattattttttttt

SEQ ID NO: 28368 - DNA, 237 bp, Gossypium hirsutum
  Clone ID: LIB3148-014-Q1-K1-D2
attgttcgaaggatggcaacatcttagaatgggcttcttctgagctattgtttggtcggtatttgctttattttaaaaatgtcaaaatttatcacttttttaacttattaaaaatttatttaaaaatatgtgacacactatatatgagtgtggatccaaatgaatcaataaatgcatgacaatcattcaagagttgaaaaaaaaaaaaaaaatttattacaaaaaaaaaaaattaag

SEQ ID NO: 28369 - DNA, 354 bp, Gossypium hirsutum
  Clone ID: LIB3148-014-Q1-K1-D4
gtccagcttcaaggcagatatacttgacttttccagctgatagtactttcagagaagaggatgtgtcaaattatttcagcaaatatggacccgttcaagatgtgaggataccataccaacaaaagagaatgtttgggtttgttacttttatataccctgatacagtgaaaatgattttagcttaaagaaacccgcatttcggttgcgaatcttgggttttagtgaagccatacaaggagaaaggggaaatccctgacaagaagcaaccacaacaacaaaatggaaatggaaccctaactggttttgattctagagatccatttgatgttcaacttggtacaaggatgttttaca

SEQ ID NO: 28370 - DNA, 173 bp, Gossypium hirsutum
  Clone ID: LIB3148-014-Q1-K1-D5
cccacgcgtccgcaaatctgttgtgatctcattctaaatggggccaacagtagctactttctaaaaattgtggaattttatggatccacgcttggtatgtagccaagcccaagaaaaaaggaacgaggggaagaatcgacaaggaatccataacaaaaaaaaaattgtgaatg

SEQ ID NO: 28371 - DNA, 327 bp, Gossypium hirsutum
  Clone ID: LIB3148-014-Q1-K1-D6
aaaaaaaaaaaaaaaataaaaaaaggtttttttattaaaagtaaaaaaaagaaaaaaataaagaaaaaataagtttaaaaaaaaaaaaaaaaaaaaaattttaaaagaagaaaaaaaaaaataattaaaaaaattaaaaaaaaaaaaaaaaaaaaaaaaaaaaaaaataaaaaaaaaaaaaaatttttatttaaaaaaaaaaataatttaaggttattttattaaaaataaaatttttataaaatgttttgggttaaataaaaaaaaatattttttttaaaataatgttttattattaaaaaaaaataaataaatattgtgtatttt

SEQ ID NO: 28372 - DNA, 147 bp, Gossypium hirsutum
  Clone ID: LIB3148-014-Q1-K1-D8
gcagctgctaaagcgaaagcaactgtgtaatttactcagagtttaattcggttggtttattatcgtataactattcgtaaaagtttgtattaaaaaaatttggaatttataatactagtattttggtttcaatattttagggactgg

SEQ ID NO: 28373 - DNA, 273 bp, Gossypium hirsutum
  unsure (1)..(273): unsure at all n locations; Clone ID: LIB3148-014-Q1-K1-D9
caatcttcttcccaataaccacaacgaggacaaacggcgtccgtcactattcttctatatcttagattggctagagtagagatgtaattccatgcaatacgccagattatgactgtaatcttagatggtagttgtagattctatagctttccaaaaaaacttcttattttcggtctgtaataaataattgctaggctccatattngcnaaaaaaaaaaaaaaaaaaaaaaaaaaaaaaaaaaaaaaaaaaaaaaaaaaaaaaaaaagacaaaa

SEQ ID NO: 28374 - DNA, 411 bp, Gossypium hirsutum
  unsure (1)..(411): unsure at all n locations; Clone ID: LIB3148-014-Q1-K1-E1
ccaaggcgtccggacctggagaggtttttggaacttaacaaaccccggggccgttagccacaacgaaatcctcgagaatgtacaagacttacatcgaccccaacttccagtggacgaacttcacattggaagaacaagccaaggtaatcgtcgcccctcgaagcaataacgaaatggatgcatccaagttgaagaaagagttccacgagttgttaccgatcaaagaatcattgattaagtacgtcttcgaacccaacaaacgaacctaaacctatgaacccagttttctcagctatagaacccgagttttgacccctctaacttctgcatttactataattaggttgtattggaggttacttagccattccttttactaaagaaaactcnctttaggtgtatttttttttt

SEQ ID NO: 28375 - DNA, 102 bp, Gossypium hirsutum
  Clone ID: LIB3148-014-Q1-K1-E10
cgcgtccgttttaacattatttattaaattatattaattatgaaaaaaaaaaaaaaaaaaaagggaagggattaataaaaaaaaaaaaaaggggaaaaataa

SEQ ID NO: 28376 - DNA, 278 bp, Gossypium hirsutum
  Clone ID: LIB3148-014-Q1-K1-E12
cccacgcgtccgcccacgcgtccgcccacgcgtccgcccacgcgtccgcccacgcgtccgggccaagtttctgatatagtttttgacacagtacagggaaaagaaacaaaagctagataatttatggatgtatattgtatactactcttgtttcataagtaatttccaagcctgggagttccacaatggaaccctgcaacttggaaaataaacatgtttcaagacatgtttgagctccagtttcatgtttcccaaaagaaataaaatatttttttatg

SEQ ID NO: 28377 - DNA, 421 bp, Gossypium hirsutum
  unsure (1)..(421): unsure at all n locations; Clone ID: LIB3148-014-Q1-K1-E5
cccacgcgtccgctttttctttttaaaacaatgaaggcaaaattttctgggtttataacctttttgttcttagcttttcttcttctttgttcttcctcagtatctgctcgtttgctgctgcaaatcaacaaccatggtgaaaaggagcttaaagcaaacgagatgatgatgattcaagctgatagaaaagatgatttctcagagttgatgggagcagaagagtgttatgagaaagatgaagaatgtgtgaaaaggaagatgatggcagatgctcatttggattatatttatactcaaaatcataagccttagaattatgattaacgatccatanatatacaatacaaagggctaatatatatatatatatatagaaaaaagaattgtgtagttatgaagntgtatgtatgtatctagcatt

SEQ ID NO: 28378 - DNA, 248 bp, Gossypium hirsutum
  unsure (1)..(248): unsure at all n locations; Clone ID: LIB3148-014-Q1-K1-E7
ccggnttggaagacccgggccgaccgacgcgtacgcccacgcgtctcgcccattcgtgacgttcatgtcttacgcccacacgtccagtcctcgcgggggggccatgtatctgatatagcatcagacacagtccaaggtaaataaacataagctagataatttatggatgtttttcgacaactaccctttgattataagtcacatccaagccttggagttccactatgaaacccttcaacttgaaaaat

SEQ ID NO: 28379 - DNA, 283 bp, Gossypium hirsutum
  Clone ID: LIB3148-014-Q1-K1-E9
ccattttcttttcttttcttttttcaaaagaaaggaaggtttcttcaagttggtatgtggtagctattcttgctttttcattaatattttttttattttttttttttattttttttttttaatttattttatttttcctttttttatttttttttatttttttttttttttatttttttttttttttttttttatttttatttttttttttttctttttttttttttatttttttattttttttttttttttttttttttttttttttttttttttttttttt

SEQ ID NO: 28380 - DNA, 199 bp, Gossypium hirsutum
  Clone ID: LIB3148-014-Q1-K1-F1
cccacccttccgaaaaataaaaaagggggttttagccttgctttttttccatcccaaaggggtggaaatgttgaacagggattactttatccagcctatcttttttgcctagtgtcggcttcacaatcggtggacagatacttgagcttccccctgagcagtacattctaaaagttggtgaccgagagctagctcaatg

SEQ ID NO: 28381 - DNA, 428 bp, Gossypium hirsutum
  Clone ID: LIB3148-014-Q1-K1-F10
ggaagtcagctgaatcagaactaaacaaaggtaatggacgattaaagtactggttagacgaatgggtggatactcaagtcactaaaagtaaagaacttgaagatttggactcggtttggacctcgaatcgcaagcccatggaggaaaacagagctaaacatctaaggctgaagacttctccgagaccatatcattataattcggaaggattggagtctccggtagtaccagttccacgaagatcgtttcataagaagcagtgttctttgggagaagacaattcttttccaacctctcctgtagttccaccttacatggctgctacacaatcagcaagggcaaaagtaagatcattgagttcaccaaaggtaaagcctggaagttttgaaactcagtctgaaagctactcaccatataagaacaaactg

SEQ ID NO: 28382 - DNA, 161 bp, Gossypium hirsutum
  Clone ID: LIB3148-014-Q1-K1-F11
cccacgcgtccgccccaccatgaatagccttctgcatacccatatttgcacattcgcaacaaggagttcccatggggtccggatggtctgtttgagagaaaggagcatcactagggatggccggatggatgcatatctttttgtgtacggttcttttttat

SEQ ID NO: 28383 - DNA, 434 bp, Gossypium hirsutum
  Clone ID: LIB3148-014-Q1-K1-F12
gccctgatgtatcgacttacttgtacaacaggaccgaagctttggccggtgactggtattgcgttgccatgaactgtggagctcacaactacgctagccgaccaaactgctatcgatgtggtaccataaaaaccgactatggtggttacactgtgatggggtctgaaagcagtgccccacctggttggaaaactggtgactggatgtgcaccagatatgggtgtggagttcacaattacgctagcaggcttgaatgcttcaaatgcaagacaccaagggattttggtggtgcttaggaaaatcatgaataacatgttttgaaaaagtttcaatatttttcattaacatgtttctgtttttgttaacaaattttcatttttaatagattggatatgtttttattgattatccattggtttatggtctatttttac

SEQ ID NO: 28384 - DNA, 316 bp, Gossypium hirsutum
  Clone ID: LIB3148-014-Q1-K1-F4
caattttctcacaaagcagagtagcagcagcaaaacaacccaaatggccctccaagcgcccactatctccataaaaccatctaattctccacttgctcctacacccaatgctggcctgcggccaccctccgatcgttttgctttgaaatcatccttcttttcttcatcgctccatctcttgctttcctcttcccaccagcgcctttcaactaatactgcctcacctgcaccaaagttttccatgcgtgtggcctccaagcaagcttatatttgccgtgattgcgggtatatatataatgagaggactccctttgag

SEQ ID NO: 28385 - DNA, 347 bp, Gossypium hirsutum
  unsure (1)..(347): unsure at all n locations; Clone ID: LIB3148-014-Q1-K1-F5
agctgaagggcttgttcttactgcgtttattttctaaagctggaagttttatgtttagtttgttaaaaacatattatctatttcattttctgtttgtgttgtggcttggagacgaacgggaattcagcttcatttgaatgggcactaaaactatttgtgtcatggtttccgtgttcggatgttatggtatgctgtatcctatcctgtatttaacaggcaacgcttgcttgtgagctgagttacttttgtntaaataaaaaatttttaattttttatttattattttatttttttttttatatgtttattttatttttatattattttttattaatttttttttattt

SEQ ID NO: 28386 - DNA, 307 bp, Gossypium hirsutum
  unsure (1)..(307): unsure at all n locations; Clone ID: LIB3148-014-Q1-K1-F6
gttgtcccatatatcattcgactgattgtacagtaattgagttgtcatcatgtgaacttcacaataaacagtaactgttggagcagacgaatctctggacaatccggatggccattgtaattttgtgcagaatcagtgaaaatgataccctttttgcnnaaaaaaaaaaaaaaaaaaaaaaaaaaaaaaaaaaaaaaaaaanaaaaaaaaataaaaatatttaattttttanatntattnaataaaaatttattaattttattttataattttaataaaatttaaatttttttattttatanttttt

SEQ ID NO: 28387 - DNA, 382 bp, Gossypium hirsutum
  Clone ID: LIB3148-014-Q1-K1-F7
ccgattggaactcccttttttggattgctcatcctggtggtccagcaatattagatcaggtagaagccaagttagcactgaagccagagaagctacgagccacaaggcacgttctttcagagtatggtaacatgtcaagtgcttgggttctatttattttggatgagatgaggaagaaatcaagggaagatgggcttcaaaccacaagagaagggttggagtggggagtgctctttgggtttggacctggcctcactgttgagactgttgtgctccatagtgttgctgcttaaagttaaacaaacatgctttttaaagtattggtcgtgctccacttggcttgcagtttttaaaaaaaaaaaattatattaatttatatatt

SEQ ID NO: 28388 - DNA, 254 bp, Gossypium hirsutum
  Clone ID: LIB3148-014-Q1-K1-F8
gtataattgcttggttccaaatgttggttttttttagcactcgatccttagtacatgttatatagttgtagtataccactgaatatttcagccaaaaaaaaaaaaaaaaaaaaaaaaaaaaaaaaaaaaaaaaaaaaaaaaaaaaaaaaaaaaaaaaaaaaaaaaaaaaaaaaaaaaaaaaaaaaaaaaaaaaaaaaaaaaaaaaaaaaaaaaaaaaaaaaaaaaaaaaaaaaattaaaaagggggggcccttt

SEQ ID NO: 28389 - DNA, 308 bp, Gossypium hirsutum
  unsure (1)..(308): unsure at all n locations; Clone ID: LIB3148-014-Q1-K1-G1
gcggcggtcgccgaaaaacccgggccccaagcccggccggaccggccgtcggtccaaatcttggtggtagtaccaaattttcaaatgagatgaggaagaaatcaagggaagatgggcttcagaccacaggagaaggattggagtggggagtgctctttgggtttggaccttgcctcactgttgagactgttgtgctccatagtgttgctgcttaaagttaaacaaacatgccttttaagtaattggtcgtgctccacttggcttgcagntttatcttctttcttttttcccttttttagaaatcctat

SEQ ID NO: 28390 - DNA, 416 bp, Gossypium hirsutum
  Clone ID: LIB3148-014-Q1-K1-G10
gcccctacgcaaggccccctcctccaagctcgcccccttgtcttgtggtagaaaggttggtggtgtgaaggctgagctaagcgccccagtggtgataagcctaagcacaggcctctcccttttcttgggtcggttcgtgttcttcaacttccaaagagagaacgtggcgaagcaagtgcctgagcaaaacgggttgacccatttcgaagcgggtgacactcgagccaaggagtatgttagcctcctgaaatccaacgatccggtgggattcaacctggtggatgttctggcttggggatccctgggtcatattgttgcttactatatcttggccacctccagcaatggctatgatcccaagttctttagttgaacaatcttgtccttagtttatgtgtttatgttgtacaagatta

SEQ ID NO: 28391 - DNA, 54 bp, Gossypium hirsutum
  Clone ID: LIB3148-014-Q1-K1-G11
ggcagtgccttggcctgttggttaaatggtagacttacaactttagttcctttt

SEQ ID NO: 28392 - DNA, 407 bp, Gossypium hirsutum
  Clone ID: LIB3148-014-Q1-K1-G12
cccacgcgtccgatttccagccatgtcagccatcagtcaaagcttcgtcgcacaaacgacaacaatctcttctttgtcatgactggccgccatgaagtggaatactctctgcattctgatgaccaagaattcagaaagtacgcccagttagagtacatgccttttgataaccatcattctattgttggtgcttgcaatgggttgctttgtttgatggactttcagtttagtttcgatagcatcttcattttatgcaacccaattattcggaagtctattacgctaccaaaaccatgtttgtctagtttgccatataaaatatccgttgggtttggatttgattcagcgcaaaatgactataaacttctgaaaatcactaagaaaggtgtgctagacaagtatgttga

SEQ ID NO: 28393 - DNA, 367 bp, Gossypium hirsutum
  Clone ID: LIB3148-014-Q1-K1-G2
tgacttcttcagaaactatctttccctcaaaaatggttactttcaggtttcaccagtaccaagtagttggaagggctcacccaacagagagcgatgagcatcccaagatctataggatgaagctctgggccaccaatgaggttcgggccaaatccaagttctggtacttcttgaggaagctgaagaaggttaagaagagcaatggtcaggtccttgccatcaatgagatatttgagaagaaccctaccaagattaagaattatggtatatggctccgctaccaaagccgtaccggttatcataacatgtacaaggaataccgtgacactactctaaacggagctgttgaacagatgtacactgagat

SEQ ID NO: 28394 - DNA, 245 bp, Gossypium hirsutum
  Clone ID: LIB3148-014-Q1-K1-G4
cccacgcgtccgatttaatttttcattcatttttttccctgatgactgttattgttagtagacaagaggattacgaagaagagggtcttacactattgcatttaaatatgtgcttagaacatctgtttacttacaacaatttgtgcccaaatataaaaaaaaataataatataataaaaaataaataaaaaaattaaataatattttttttttttttttttattataaaaaaaaataaatatttg

SEQ ID NO: 28395 - DNA, 429 bp, Gossypium hirsutum
  Clone ID: LIB3148-014-Q1-K1-G6
gtggatatttacaggaaaaagtacaaggcaaagcaacatggatctgttggggtatcgtttaatgttatttggtttgaaccagagactaattcaactgaagacattgaagcagctcaaaaagcccaagattttcagcttggctggtttttggacccattgatgttcggagattatccaagttcgatgctaacccaagtaggaagctggttgccgaggtttactaaagctgagtctgctcttcttaagggatctttggaatttgttggcgttaatcactacactaccttttatgcaagagaaaacaaaactaatctgattggtagtatactaaatgacactgtttcggactccggggcctttacattacctttcaagcatgggaaacccataagagacaaggcaaattctatattgttatacataggaccc

SEQ ID NO: 28396 - DNA, 135 bp, Gossypium hirsutum
  Clone ID: LIB3148-014-Q1-K1-G7
cccacgcgtccgcccacgcgtccgttttaagtttaggagtagcaaagggccttaagtgggtctgattttctaagaaaaaaatgttagcacatatgccttaagttgttaatagctgctacatccctgttctggttt

SEQ ID NO: 28397 - DNA, 104 bp, Gossypium hirsutum
  Clone ID: LIB3148-014-Q1-K1-G8
cggacgcgtgggaaaaaatgaaaaacattatatatggaactcaaaacttaaaacctgaatttcataatccgaaacctgaaagaaatacatgagatttttaaggt

SEQ ID NO: 28398 - DNA, 396 bp, Gossypium hirsutum
  Clone ID: LIB3148-014-Q1-K1-G9
attttctgtgtccatcgatcatccatcatcggacggtcaaatgttgtagtggacgtttacggtgatccaagccaggagtaccatatagatggctcctatccccatcgttgctgtacaatctacaacacttctttagagagctcatcaaaggaaccaatggctgagatcaaaagaaaagtggacccctcaactcatgtgatgctgggcaaaaatgtgtttttgttgtgtcttaggccagggtttgacagtgcatttgcaatggccttagtcctcattcttgatcaaatgtttgatgatgctgatattgatgacgatgatgccaaagaggatcctactcatgttgcactggattctttctcttaactcgctttttactacttttttaaataactttaa

SEQ ID NO: 28399 - DNA, 250 bp, Gossypium hirsutum
  Clone ID: LIB3148-014-Q1-K1-H10
gtaattattgggatatggaacaaagtaacttaatacaaagaaattttacatttgattttggaaaaaaaaaaaaaaaaaaaaaaaaaaaaaaaaaaaaaaaaaaaaaaaaaaaaaaaaaaaaaaaaaaaggggcggcaaaaaaaaaagaaaaaaggtgtccgttcaagagaatgcaaaataaaggggggtgtgttgtgaaagctaaatttaatttacggggcgccgaaataaaatgaattgactgggaaaa

SEQ ID NO: 28400 - DNA, 422 bp, Gossypium hirsutum
  Clone ID: LIB3148-014-Q1-K1-H11
cggacgcgtgggcggacgcgtgggcagcagccaccagaacatgatgatttatctttgaaaaaattggctgcagatgctcctcattgtggatcatcgaatgtgtggggtgggctggttgaaggaaatgctgccaactacagtgtcaatggaagtgcctcaggtagtaaccatggaagcaatgggccaaatggaagtagcaatgcagtcaatactgtagggacaaatatggaaagtgataatggaatagctgggaaaagtggaagtggtgatgtgagcgggagcgggagcgggagcgggagtgggagcaaagcagaccagagcaagtctgctcatagggaagctgctttgaccaaatttcgccagaaaaagaaagagagatgctccaaaaaaaggttaggtaccaaagcaggaaacgactagca

SEQ ID NO: 28401 - DNA, 258 bp, Gossypium hirsutum
  Clone ID: LIB3148-014-Q1-K1-H12
tcgacgcgttcgcccacgcgtacgatttatttaggcctcatcctagcttataggcattctgctttgaatgggatcacaccggttcctagtttccactatgagagattatacaagcatgttatcaggtagagtccaatactggagtacaagactgtcttgttcattaaggcagattatttgattgcgagatatttatacaaatgcattatccaccggatgtccatctttgaaaaggtataaatgtataatctttttatt

SEQ ID NO: 28402 - DNA, 327 bp, Gossypium hirsutum
  unsure (1)..(327): unsure at all n locations; Clone ID: LIB3148-014-Q1-K1-H3
ggctcggcgattatctccccatcagggttattgattctcttcggtgtgtgtccttatttgaatgcatttcttcttgggtttttttctatacgaaaaaaagaaacatgcatcgaagcgtctccgtattactcgtatttacatggaaaaagtttgtaatggttatgttttatgatctctttgctttgtttttatgtattttgtttgatggatactatgaaagttgtggagtgaggtacttttggtttttcttcttttacatttacagtggataattctactggatttgtttaatttaattgaccttttgtttcggtttnaaaanaaaaa

SEQ ID NO: 28403 - DNA, 427 bp, Gossypium hirsutum
  Clone ID: LIB3148-014-Q1-K1-H4
tatggacccacgtataaatcgtgcggatagtattctacctgcaatggcgacaaacatggcatagcggacaacctgcttcgccaccaccacccttaccatcgacaacaaatcggctgcctcatcctcctcgtcgcaacctcaagaagccctcgtcctcgaacttcgccctaggaaaaagagagttacctggaaagaaggaaccgttgacaacgaattcatgaacaagaagagctccaagatctgctgcatttaccacaaagaaaagcccttcgatgaagacgacagtgatgatgattgccatgatcatcatcaccatccatcccacggcaacgatttctccaacgatggccgcaggctcaaccctagcaatagcacctaatttttttgttttgaatatgggtttattaccccttattattgatgtaat

SEQ ID NO: 28404 - DNA, 180 bp, Gossypium hirsutum
  Clone ID: LIB3148-014-Q1-K1-H6
ctcgctagtgccaatgagtccgttagaaagcctggcttcttcagctgttagaacagcaaattcagcaaaagcatctcttatattggtcttaaccaggggaggaagtactgcaaagcttgtggctaagtataggcctggaatgcccattttattcatggttgtccctgagatccaaactga

SEQ ID NO: 28405 - DNA, 401 bp, Gossypium hirsutum
  unsure (1)..(401): unsure at all n locations; Clone ID: LIB3148-014-Q1-K1-H8
tgttaggacaaaaaaggattgcatcccattatgtggacaaaggtgcaaattacactcaaggactaacctatgcttgagagcttgcatgacatgctgtgacagatgcaaatgtgtcccaccagggacatatggcaacagggaaatgtgtggcaaatgttatactgatatgagaacccaccgcaacaagcacaaatgtccttgaaaagcccaaccaaagcccccaaaaaacgacacttcttgagtatgtgtttttcatatttgtaatagcaaaaaagcttgcagtaataagttctgtaagaagagaagaaatggatggatttcttgtagtgtcttcgtttgtaatcctagaagctatgaacttgtcaaatagttttaattaacatataattganagataataa

SEQ ID NO: 28406 - DNA, 411 bp, Gossypium hirsutum
  unsure (1)..(411): unsure at all n locations; Clone ID: LIB3148-014-Q1-K1-H9
tcttctcaggcaaatatatactagatccaaatcaagctccgagaaagcaagtaaaaccggtcgctcgacttcagaagattctcaagttcagattgttactcgacgaggatgttcaagtcgaaacaaattcccaaaataattcaattttgtaaactagcaaactcaaaatttgtagttaaatgttgatccttaactttgaaagtaatttaatgaaattttgaaagtaatttaatgaaattcaagcttagttatgctctgaggaagagtccatatttttaagcggtggatcttgtatataaactattttagcagattgcaaattataatgcaacaaatgtaactttttagtnnnaaaaaaaaaaaataaaataaaatttttanntttttaaaaatttaaattttattttaatt

SEQ ID NO: 28407 - DNA, 352 bp, Gossypium hirsutum
  Clone ID: LIB3148-015-Q1-K1-A1
aaaaaacccaatgttcaaattttgatttggtgtgtgtctaagcaagaaatatctgtagtattgttctagtttattctaaatcatgtcgttttatctatgttcttatttctttccatctgttgcttctgtatgtgagacttgaggggacgattatgtcgaatggaaacgtgattattttagatcattggacttgcctctatggttaacaaagaggacttgacttgcaatggagggcagagttacaaaaaggcttatcttataattatagccaccacattgtttggattccttgtttctggtattttggtcattaggaccataagcttttacaaaagtgacatttacaagaaat

SEQ ID NO: 28408 - DNA, 372 bp, Gossypium hirsutum
  unsure (1)..(372): unsure at all n locations; Clone ID: LIB3148-015-Q1-K1-A11
cccacgcgtccggttatcacctgtccttggcaatcacaaactttccggtactcatacaccaatttccggaagcacacctaagggtggcctttctattcgttgtgtagggttcttagtttcatcaattcagtaataagcattgctgtctttagtatttgttgtgagaatcaggagacttggatgagcctgatgttgagctgggaccgttttaatggcaaaattctgatcaatttctttctttcttttgtcccccacatcatctccgttgcaaaaagatggcatcttctggttttggccaaaaaaaaaaaaanccccnnnaaaaaaaaaaaaaaaaaaaatttttttttntttttttattttttattattaatt

SEQ ID NO: 28409 - DNA, 292 bp, Gossypium hirsutum
  Clone ID: LIB3148-015-Q1-K1-A12
cccacgcgtccgaaaaatcatggccaaagaaagaagtttatggtgttatctgctgaaaatctataattttacactataattgttggtctgtgattcctttttacactataattttagcgaatcaacaaattttgaatcttcatcttagaagttaatacgaaatttgctcatttaaattttcatcgcttatgattttgtgtaattagggaaaacagtaagatcaaaataatgaagaatatttttctttaactcaaattatatagaaagcccttggttttcaaaaaaaaaaaaa

SEQ ID NO: 28410 - DNA, 332 bp, Gossypium hirsutum
  Clone ID: LIB3148-015-Q1-K1-A2
cccaagcgtcgcgtccaactgctgttgctgccacaaagtagtcctttgctttctccttctaaatctatggatccatgggaatataggagctgcaaatgcatagcatatggatcagtctccatgtgaataactgagtcccagtacttgtagaatgggaaatgaaaagaagaaaaaaaaaaagaagaaaaagaactgtttggttatgagaaatggcagtaactttctgtttaggtagctttatgttaaaactagcttttattcctgtttcgtcctttgtacatcataatgtcagcttcaacttctagtctaataaaagcttgtttgagggtccc

SEQ ID NO: 28411 - DNA, 87 bp, Gossypium hirsutum
  Clone ID: LIB3148-015-Q1-K1-A3
aaaaaaaaaaagaaaaaaaaaaaaaaaaaaaaaaaaaaaaaaaaaaaaaaaaaaaaaaaaaaaaaaaaaaaaaaaaaaaaaaaaaaa

SEQ ID NO: 28412 - DNA, 333 bp, Gossypium hirsutum
  Clone ID: LIB3148-015-Q1-K1-A4
atgaactggtggaccccagattggaagatcgctattccgaacatgaggtatattgcatgcttcatgctgcatcattatgcgtaaggcgagatcctcattctaggccgcgcatgtcacaggtgctccgcatactggaaggtgatgtgctcatgaacaccaattacacgtcgccagggtatgatgttggtaaccgtaatggccggttctgggcagagcaacaacggagctacagtggaccgctcacgagtgattcattagatgagttcagtggaaaagctctcctcgacggagcaaggccaaaaacaaggaggacttcatgcgaagatcatttgt

SEQ ID NO: 28413 - DNA, 303 bp, Gossypium hirsutum
  Clone ID: LIB3148-015-Q1-K1-A5
cagatgtcatcacaaaaagactactccatggcaacagcagatgtggtggatgcagaggtaagggatctagtagagactgcatacacaagggcaaagcagataatcacaactcacattgacattctccacaagcttgctcaacttctgatggagaaagaaactgttgatggagaagagttcatgagcctcttcattgatggaaaagctgagctatatgtttcttagattgtacattatatagtccccatacagtccttgtataactatgacccttaaatgttcagattcatctgtgtatgcttt

SEQ ID NO: 28414 - DNA, 408 bp, Gossypium hirsutum
  Clone ID: LIB3148-015-Q1-K1-A7
gattctgtttcggagcacaatggccattaatgtacgccatcatctccgaaatcttcggccttaaatactactccacgttgtacaacttcggttccgtggctagtcccgtcggttcttacattctgaacgttaaagtagccggacatttatacgaccaagaggctttgaaacaattgaaagctttgggtcgtacgaggaatcacggggaggacttgacttgcaatggagggcagtgttacagaaaggcttttcttataattatagccaccacattgtttggattccttgtttctggtattttggtcattaggaccagaagcttttacaaaagtgacatttacaagaaattcagggaagaagctcaggttgccgaaacagacatgggttcaagttctacttcaaaacaaa

SEQ ID NO: 28415 - DNA, 404 bp, Gossypium hirsutum
  Clone ID: LIB3148-015-Q1-K1-A8
acggtgaagggtcgcagtaatatatttgcaattggagatatcactgatgttccggaactcaaactaggtcatgcggctatacatcatgcatatttggttgctaaaaacttgaagctgttgatgggcggaggaaaagaaagcaaaatgtccgtgtacaaacctggtccggaagttgcaatggtttcgctcggaaggaaacacgctgttgcccaatttccttttgcaaccgtcggtgggcgtattcccggcttaatcaaatctggagacatgtttgtaggcagaactagaaagaatttgggtttagaaccttaagctacacacacacacatacacatatatatttgccattgtatttcctcatttccacctttaattcctttttgcttataatgtttcacattttt

SEQ ID NO: 28416 - DNA, 63 bp, Gossypium hirsutum
  Clone ID: LIB3148-015-Q1-K1-A9
cttttcttttagttccatttcccagtttaacgttcaataagttaaatatttgtcctttcttcc

SEQ ID NO: 28417 - DNA, 401 bp, Gossypium hirsutum
  Clone ID: LIB3148-015-Q1-K1-B1
ggtcgccattgttgacatggaatcagcactttcaacattaccctccgcttttactcccttctccttttctaaacccctaaaccccaaatcccctttgttctctttctctcagtctccactccttagccctgtcgccgccctttcttattcttttcctctaaggactacctcctccattcccaaacgcctacaccgccgtttggagtgcgtctcttctggtaccggcggcggatttggtggaaatgatgggagtagcggcggcggcggcgacggggaaggaacgagtggaggtgattcgaaggcgaaattgggagctggagtcgttgacgatctctctgccttgtctcccgatgttatcattcttaatgttgggggaatgatgtgcggcgggtgtgcttcga

SEQ ID NO: 28418 - DNA, 295 bp, Gossypium hirsutum
  unsure (1)..(295): unsure at all n locations; Clone ID: LIB3148-015-Q1-K1-B10
ttccaccaaagcatgttgaagtttttttttgaaggccagtgaagaagttgtgtttctggtttaaagaatatgaggtgtttgagagaagcttcttgttatatggaataaaaaacccaatgattttaccccttcttgaatgtttacatttctgcggttttgaaggtgtagtgaacaagtttaccagtttgatgttatgaagtaaaatggtgtttatacatcaatcaaattagtgctgtcgtttttttcccttttnaaaaaaaaaaaaaaaaaaaaaaaaaaaaaaaaataaatanat

SEQ ID NO: 28419 - DNA, 381 bp, Gossypium hirsutum
  unsure (1)..(381): unsure at all n locations; Clone ID: LIB3148-015-Q1-K1-B11
gcacaccgaaaaaggcaaatagccttgagaaagaaaaacagcctcaaaatgcagcagaagtcaggcttcctcatcctcttcctctccctcattttccttcctctcatcttctccgacgccagaaaggaggctcccctcggaggttggaggccgatcaaagacaccaaggacccacacgtgatggagatcgcggaattcgccgtcgaggagtataacaagcagtcaaatgggagtttaaagttggataaggtggtgaaaggcgagactcangtggtggccgggacaaattaccggctgattttgcaggcgaagaaaggggcagtcgataacacgtatcangctgtggtgtgggagaagttgtggctgaatctcaagaatctc

SEQ ID NO: 28420 - DNA, 153 bp, Gossypium hirsutum
  Clone ID: LIB3148-015-Q1-K1-B12
ttacctccggtgagtagggttgggttatataaaaaaaaaaaaaaaaaaatccaaaggggggggttaatataaattaaggtaaaattagttaataaatataatatagatatttattttattggtgagtgatgatgtaaatataatatttatttt

SEQ ID NO: 28421 - DNA, 248 bp, Gossypium hirsutum
  Clone ID: LIB3148-015-Q1-K1-B2
cacacgcgtgctcccactcgttcagacacgcatacggttcgatgcactgatggatgacatcaaggatgtctaggttcgttgtacatacatccataaacgtgtgtgttatgggatatgaacggtgacggaggaaaaacgccaactgagtatgctatgggacctgtaagtacaaaaaaaagatgattagggtaaggaggtactgaaataaatgtgtatgcctaaagctgatattacgagtcactatgaat

SEQ ID NO: 28422 - DNA, 318 bp, Gossypium hirsutum
  Clone ID: LIB3148-015-Q1-K1-B3
tggggctgaaaatggctgcaaatgtggagataactgcacttgcaacccttgcaattgtaaatgaggggaaaaaaaaaaccgaagcatattatggaagctgatctaaataatatatgatgtatttgggtttttattattagaataaagcagccatggttcattaggtgttttgcttcttgtatccatggttgcttggtatgtatagtgaaatgaaagtattttaactagctttgttgtgttactgccatgttatataactgatgaatgaatgaaagaaagctctatttggcttttgcttacaaaaaaaaaccccttttt

SEQ ID NO: 28423 - DNA, 369 bp, Gossypium hirsutum
  Clone ID: LIB3148-015-Q1-K1-B4
ggagaaatctgacttagctaatggagatctaacaacactcgaaactccaaatgattggtttagggagatgcagcgaagattaaccaaagcttaggaccatttttattattctttctttgtgcaggcctccaaaactggaggcaatttgctgttgcaatgattctctgtaaggcccgagtattttccgtccttgacaggagaatttgggttaccaagtaacttttgtaaattttgtttctaagtccaaattaattcttaccgaggaggaatgtaggcatatttccactgcccctcaaaatttaagtctgttaggttggttattctttttgtagtccatgaataaaatgcagagaaatgccttcttttttt

SEQ ID NO: 28424 - DNA, 332 bp, Gossypium hirsutum
  Clone ID: LIB3148-015-Q1-K1-B5
gtgcaagaggatcaaatcccaacagcgaatgaaacaagtactgcagctgctgctgctgccagtccatctcatgatacttcactgcattctgttaatttctgtgaaacgacaataaaaaatggaactggtgctattttgcctgaaaagccggtctcaactggccagactaataacctgatatcagctaagacttcagagacagctctgcttgatgagaggtctttgttggcttgcattgttcgcacgattccaactggtggcaaaattcggatcagttccacgctaccaaataagttggggaaaatgcttgcacctttacactggcatgatta

SEQ ID NO: 28425 - DNA, 386 bp, Gossypium hirsutum
  Clone ID: LIB3148-015-Q1-K1-B6
ggcattgagctctaaaagaatgctaaagtcagtacctgaacatcttgattgttgtgtttgggagaatgtgttctttttcttcctatatgaaatgtcagccttgtctgtactaatacctgaacagaatctcctagaatgatttatcgttgggtgtacaagaaagttgcttgttcagaattactgtctgatgctgacatgttgaatcaactttgttttagtgtcttgttagttaaaaagttgaaattgtgataaataaataaagccagtttactgttatcttttaaaaaaaaaaaaatatttaatatataataaataattattaaaaattattaattttaatattattaaaataaaattatatattaatataggggcggcccttttaa

SEQ ID NO: 28426 - DNA, 407 bp, Gossypium hirsutum
  Clone ID: LIB3148-015-Q1-K1-B7
tttttccataaccttttaaaaaacataaaagatggtaaaggttccttttgttgtgttcttattggctttggtgctttcaatccaattcgtagtgggacaggatgaggaggctatagatgaggaagtatcccgggaagccgacaatgtacttttgagttcaggggcaactaatctcgttgaaaattttaaaagctctgctggagataattcccaaagtgtggatgggccaacttctggcttagctgatgagattgcagcttctccagaatcggaagtagaagttgctactgaatctgccggtgagatgaagcgtaaaatggcataatagacccccatgatgtttagaaagaaacatcagacctaaagttttttaaagaggtggctaaagcggttaaaaataataaaaa

SEQ ID NO: 28427 - DNA, 141 bp, Gossypium hirsutum
  Clone ID: LIB3148-015-Q1-K1-B8
tttgaggaaatattgttgctatttttttttgaggggttaaaaagttagtagatactttcgttgaagttgagactaaagaaaaattaacggtatttaattacttataagcttcgctgaatgttaaaaaaacgaatcttatct

SEQ ID NO: 28428 - DNA, 135 bp, Gossypium hirsutum
  Clone ID: LIB3148-015-Q1-K1-B9
gctttggcgtctttttttcgaattaaaataaagattttcgtttggatctcacccttttagtcgttatcaaagaaaaaaaattatatgttcttcggattttctagggtttgtttctaagaattaggttgcatgatt

SEQ ID NO: 28429 - DNA, 398 bp, Gossypium hirsutum
  Clone ID: LIB3148-015-Q1-K1-C1
aattttaaggttttcaggaggaaaaacttttgcctctgaaactatggctccgttctctttacgtagccgtcttcaggcttctgcgctaagcaagaggcgtctcaaatccaaagccaagcatgggaggaaagggatgaagaacatggcggaaagcttcaaaagattgaaatctgaaatggaagaaataagcgaggaacaaaagaatatcagggaagggcaaaggcaagttaaagaaaaattcggaatcatcgaatccgagtgcgaggaattgaagagggaaactaggctcataatccagcaaagtgcgagaactcaggttaaacttgctcttatgttccgcatactgaaagcaagggaagccggcgagtttaataccgctgccactctcactgaaatgc

SEQ ID NO: 28430 - DNA, 315 bp, Gossypium hirsutum
  Clone ID: LIB3148-015-Q1-K1-C10
gtcttggagctgccatcatatacaacaaagaccatgcttgggatgaccattgggtgttctgggttggacccttcattggagctgcacttgctgcagtttaccaccagataatcattagagctattccattcaagaccagagattgaaatgattaaatctgtgtgtgtgtgtgtgttgggatcttcatctactttttgtgttcctactagtcctttgttgtgttgaactgcattttgaattatggtgttaatgtgtgtaaattatccctagagttgtgctgtattcagcttttattaatggaggattcttttatgg

SEQ ID NO: 28431 - DNA, 397 bp, Gossypium hirsutum
  Clone ID: LIB3148-015-Q1-K1-C11
ttccaatcaacaccgtgtcgttaagacccctggtgggaaattggtctatcagacaactaagaaaagagcaagtgggcctaagtgtcctgtcactggcaagagaattcagggtattcctcacttgagacctgctgaatacaaaaggtctagattgccaaggaaccgccggactgtgaatcgtgcttatggtggtgttttgtcctgcagtgctgttagagagaggataattcgagccttcttggtggaagagcagaaaattgtaaagaaggttctgaagatccagaagtccaaggaaaagcaagcttcaaagagctaagaaattagatgtcgaatcatcatttcaattctgatatgtgatcagcaaggctttggaaagtgccaccaatgacttcagaag

SEQ ID NO: 28432 - DNA, 74 bp, Gossypium hirsutum
  Clone ID: LIB3148-015-Q1-K1-C12
atgacaagaaaatttcattaaaaaaaaatatttttttaaaaaaaaaaaaaataaaaaaaaaaaaagagaaaatg

SEQ ID NO: 28433 - DNA, 196 bp, Gossypium hirsutum
  unsure (1)..(196): unsure at all n locations; Clone ID: LIB3148-015-Q1-K1-C2
aaaatttttaacggtgaggtaatttatatatcatatgcgtgactgtacaaatgttgggatggagagctgttgatgtagttgaggcctgagtttttgccctctcaatgtatgcttaatgacattttccccctaaatgcgcaattttctttgtgttnaaaaaaaaaaaaaaaaaaaaaaaaaaaaattttatttggct

SEQ ID NO: 28434 - DNA, 387 bp, Gossypium hirsutum
  unsure (1)..(387): unsure at all n locations; Clone ID: LIB3148-015-Q1-K1-C3
ctccatgcaggtctgagcgtttagccaagtacaatcagcttctgcgaattgaggaggagcttggtgcggaagctgtctatgccggagctagcttccgtgctccagttgcaccctattaagatgcttgtttagatgataatgtgctgagactggatgcgtgcggcagagcttcagtggtttgttgagaccctaaaacatatttcaataattttgatagcaattttgtacttgtgttcagaattatatcgatctccgtgttatttttgttggactttgcctgcatatatgctcgctatattcataaatacatgatgcttgaaatggaaaanaaaaaaaaaaaaaaattannaanaaaaaaaaaaatataaattaattaattttatattt

SEQ ID NO: 28435 - DNA, 365 bp, Gossypium hirsutum
  Clone ID: LIB3148-015-Q1-K1-C5
cagggccgattccgtttcacttaatagagaatctagtgtcgagcatgaaacaagatcattacgtgagcaacagcggagagattgtattttatcagacggatcccaacctgttttctcctcccaaatccgcatgagccattttatttagagatcatagagctgaaacaaacaagggccttcattcttttcgcttttagaagggactttgtatttgtttttgttttgttttgttttttttttctttttgtgtcttcaaaataattaaggttgaagttcctgtagtctcatcaaaaacatgattattgttaccaaacatatacacggtactgtaggagaatgaaatacaaattttattattatttttt

SEQ ID NO: 28436 - DNA, 404 bp, Gossypium hirsutum
  unsure (1)..(404): unsure at all n locations; Clone ID: LIB3148-015-Q1-K1-C6
gctccggcgaccggtggagtgaagaagcctcaccgtttcaggccaggaactgttgctttgagagagatccgtaagtatcagaagagcactgagctgttgatcaggaagcttcctttccagaggttggtgagggaaatcgcgcaagatttcaagaccgatctgaggttccaaagcagcgccgtcgctgctcttcaagaagcggcggaggcttatctcgtcggactgtttgaagacactaatttgtgtgcaatacatgccaagagagttacaatcatgcctaaggatatccaacttgctaggaggattagaggtgagagagcttangttgcttgtatttgctcgatcgattttaaaattcagaaagacctagatcttggatttagtttctggaatttgctttctcg

SEQ ID NO: 28437 - DNA, 392 bp, Gossypium hirsutum
  Clone ID: LIB3148-015-Q1-K1-C7
cccacgcgtccgcttccatctccaacactatcacacacacacaaacaccaaaaatgccgttcaagagatacgtcgagatcgggagagttgctctcgttaactacggcaaagactacggcaagttggtcgtcatcgttgatgtcgtcgaccagaacagggcacttgttgatgccccggatatggtaagaggccaaatgaacttcaagaggcttacattgacagatatcacaattgacattccccgtgttcccaagaagaagacattgatcgaagctatggagaaggctgatgttaagaacaaatgggaaagtagctcgtggggtagaaagttgattgtccagaagagaagagcatctctcaacgactttgataggttcaagcttatgttggct

SEQ ID NO: 28438 - DNA, 402 bp, Gossypium hirsutum
  Clone ID: LIB3148-015-Q1-K1-C8
ggatgagagctcgcattctaagcatgcaatgatttgggcactcactcatgtggctaacaagggtgatttgcttactttacttcatgttattcccccaacccaaaagacttcttattcttcttcttctttttctccttaccttgctaactctcttgggtcactttgcaaggcttgtaaacctgaggttgaagtggaagcactggtaatccaggggccaaagctggggacagtgatgagccaagtgaagaaacttgaggtttcagtgttggtactgggtcaaaaaaggcattctccatttctaagctgtgtttgtgggagcagcagcacagaggagttcgtggagcggtgcatcaacaatgcagattgtttaaccattggggttaagaggcaaagcaaaggcgt

SEQ ID NO: 28439 - DNA, 148 bp, Gossypium hirsutum
  Clone ID: LIB3148-015-Q1-K1-D1
ggaaaactcagctgttaaaccaaaaaactattgaaaaaaaaagaaaacctagacttgccagaagggcagacagagacgtgctagggtaacaaacatgcatgaaagctttttaaataataaaaaatatttaaataaatatatttattgg

SEQ ID NO: 28440 - DNA, 255 bp, Gossypium hirsutum
  Clone ID: LIB3148-015-Q1-K1-D10
tccatctgggcgcggcccaagaccggttagacttgatctcgcgcatggatggctatgaagcaggagcatactacatcagcaggattgaaggtgatgttaaagaaaaaaaaaaaaaactcaatttatattcatatggtttttttacatgatgaattcttttattgtcaagtcttatcacaaggatggaaagaatgaaaaaaaaaaagggggggtggaagctgaattagacacatgacgggttagtttacaaagaaa

SEQ ID NO: 28441 - DNA, 406 bp, Gossypium hirsutum
  Clone ID: LIB3148-015-Q1-K1-D11
gaaagcgagttgaatctatggcgtcctccaagttacaggctctgtggaaccaccctgccggacccaaaaccattcacttttgggcaccaacttttaaatggggcattagcatagcgaatgtggctgactttgctaaaccaccggaaaaactttcctaccctcagcaaatagcggttactgcaactggaattatctggtcacgctacagcactgtaatcactccgaaaaattggaatctcttcagtgtaaacattgctatggctggaacaggcatataccaactaacacgaaaaataaaacatgattacttttcggaggcagagccagccgttgcatctgaatgatgacgaaatcttctgaaatcctttgtttttaatggaacaaattatcagttatcttgccttgt

SEQ ID NO: 28442 - DNA, 356 bp, Gossypium hirsutum
  Clone ID: LIB3148-015-Q1-K1-D2
ggtaactttggcacctattgtcctcaacatgacacacagaaactttgtggaaatcatcttcgagaatcccgagaccgccattcagtcttaccacttatctggctactcattctttgccgtgggcatggacattgggaaatggagccctgagaagaggatgaactacaatcttctcgacgccgtgagcagacacaccatacaggtattccccaactcctggtcagcaattctattgacattcgacaactgcgggatgtggaacctgaggtcggagatatgggacaggcattaccttgggcaacagctttatgctagtgttatttcccctaaccgatcccttaaagatgagttcaact

SEQ ID NO: 28443 - DNA, 314 bp, Gossypium hirsutum
  unsure (1)..(314): unsure at all n locations; Clone ID: LIB3148-015-Q1-K1-D3
cccacgcgtccgatgacaagatctaatttaggttgttatgcatgggggttcttggatgatacaaagaaatggcatgatttggaaaggttgattttatcaccttgtgcggttctacgttagatttactcagttggggaagtttttaacatattttgttctctcagatacagaaattattttcttacatctctttatttgttagagtgcctcaaatatgtagtacatgaaatcaatggaaattttctccattttgctgctcanaaaaaaaaaaaaaaaaaaaaaaaaaaataaaaaaaaaataaaaaaatataaaa

SEQ ID NO: 28444 - DNA, 325 bp, Gossypium hirsutum
  unsure (1)..(325): unsure at all n locations; Clone ID: LIB3148-015-Q1-K1-D4
ccctggtaaaggagaagcgccggtccttgctaacgagaggagagtcaggaggcaatatcacgattgaaggcggcgatccgtaagctataagcatactacgtatacggtatttgataactgtatctacatgtttttttaagtagcagctccggtatatcttacattattttatccaataaggtgtaatcatttaacgaaatgattacacatccatgtataaaaaattttagctgcatagtgcatataaataaaccatacgactcccttgttttgctaaanaaaaaaaaaaaaaaaaaaaaaaaaaaaaaattaatttattaataaa

SEQ ID NO: 28445 - DNA, 225 bp, Gossypium hirsutum
  unsure (1)..(225): unsure at all n locations; Clone ID: LIB3148-015-Q1-K1-D5
aacaaacctgcttttcaaactttctgtcatgcctgattgtcatagattggtccatccttttgaatctcttgtcatttaacatggattttgtgttagttctctatttaacttgtctctagtctattgctataggcgatgagtctttagcactcctttttgcatgccagagtaataagattgttctccattcgaagcttataaaaaaaaaaaaaaatataatanatt

SEQ ID NO: 28446 - DNA, 374 bp, Gossypium hirsutum
  Clone ID: LIB3148-015-Q1-K1-D6
gctccttttgcaggctttcctcgatgatttttgggtgtaaatttaactaaaaacagattgcattttataggggtcttgatttgttgttgtctgagttcattgtgtaaatcccaatttttcctttagtattgaatgaggaacaatagtgttatagttaaaaaaaataaaaaaaaaaaaaaaaaaaaaaaaaaaaaaaaaaaaaaaaataaaataattatattatatataataaaaataattataaaaatttaattatattttaattatataatataatattttattatttattaatatttgggggcgcctttttttaaaatccaaatttattttccccgtttttacaattttatttttttttttttttttcccct

SEQ ID NO: 28447 - DNA, 409 bp, Gossypium hirsutum
  Clone ID: LIB3148-015-Q1-K1-D7
tcgcccacgcgtccgaaaaaataaaaaaatatttttataaaaaaaaaaaaaaaaaatatataggaagaataaatataaaaaaaaaaataaataatctaatttaaattaaaaaaatataaattatattttattttttttattatatatatttatgtttaaattctattctgtatcttttttttaataatattattgttttattttttttattattttatttttttttttgttatgtttattattttatttatttgttttttttattttttaattctatttctatagtttttatctattattttttttttatttttatgtatttttatttgtattaatattttatttatttttttttatttataaatattgtatattttttgatataaattgtttattatttatttgtata

SEQ ID NO: 28448 - DNA, 312 bp, Gossypium hirsutum
  Clone ID: LIB3148-015-Q1-K1-D8
cccacgcgtccggactggtgaggccatacccaaggcgtgcttttaatgatgaagagagcagtttgacactaaatgaacttgggttaacaagcaaacaagaagccctattcctggagttgatctgatcttaataacatctcattcctacacgaatatttgtagaaatttactctgaaatttatttagttttattgaaatatgaagtgctacatggagtagtggaatttcctaagggttgcttggttgcatttggttgatgaaatttcaggagagagtacaattaatatgacttgacgatggtcagtattctgc

SEQ ID NO: 28449 - DNA, 380 bp, Gossypium hirsutum
  unsure (1)..(380): unsure at all n locations; Clone ID: LIB3148-015-Q1-K1-D9
cggacgcgtgggcggacgcgtgggcggacgcgtgggtttttctgggacgcgagagtataaattattggctgacattgcttctgctattgacgaggaagatgtctcaaagtttacggaagttgtcaaggaatttgatagcatgaccccattggattcttggaagacaacccttttacttcgagtgaaagaaaagctgaaagctaaagaactggaagaagatgatcttacctaaaagagctttgcgtcgtgagagttgcctatgtttctcagttnttcattttaatggtgattgctttgttttatgtgtctgtgtgcaattatactccgtatactctcccttataacaattattttcggaaatgtttcacttgtttggcctt

SEQ ID NO: 28450 - DNA, 408 bp, Gossypium hirsutum
  Clone ID: LIB3148-015-Q1-K1-E1
cggacgcgtgggcggacgcgtgggtgcggatcattgagaattcggatgtaacattggacattgtgttcttcaactgtctagtggatgcttacggtaggatgggatgctttgcagagatgaagggggtgcttgaaatgatgaagcaaaaaggatataaacctgataagatcacatatagaaccatgattaaggcttactctatcagtggtatgactagccatgcaaaggagcttcgcaatcttgttgagtcagcggcagggtcatctttggggatgccaaagcctgatttccgacaaccagaatattacaggtcatattcctgagatctaatgtatattttcattttttcccccttatgttgtaaatgtacatcagcaccatgagtaaaatgaaatacagatcaccact

SEQ ID NO: 28451 - DNA, 193 bp, Gossypium hirsutum
  Clone ID: LIB3148-015-Q1-K1-E10
cccacgcgtccgcccacgcgtccgaagctatgaaactggtaatatctcagcagattaacctaccttctggtatgataaactaaaatggtgttctataaaactttgcagaagataataatggtaaatgtctgattacaattctgtatttcttaaagattagtaatttataagtaatgaacctcaagctctgcag

SEQ ID NO: 28452 - DNA, 320 bp, Gossypium hirsutum
  Clone ID: LIB3148-015-Q1-K1-E11
gatcttcagttcttgtgcagtggctgccatctgatttatggaaccactttgttaagtgtacagaagtatttaaagaaaaatctaaaaacccagttcctagttgactggtagaacaagctgagacccttttttttcagccaaataggctgtgtattagaagttagatcagggttctgaacttgctgatgcactggcactggctgcccaggttggctttagtaaaatttgccttctctagtggcagtttctggtcaaaatttttaagtgatatcaaactcctgagaaactctattaagccattttgggaacagtgattcccc

SEQ ID NO: 28453 - DNA, 411 bp, Gossypium hirsutum
  Clone ID: LIB3148-015-Q1-K1-E12
cccacgcgtccgatcccgagcagaatagagtgcaaagttccgaaacttgggtcattgctagtaggcttcacttggttgtttctccaattcttgccgctagtgcagtatgaaacatttgtcaagttgttcttttgatctcattcatgaattttcttttcaatggttctctgctgtttgtatgattagaagacggattccgtttgaaataaattcttattttacattacattttttttttcagatctagtgttgtaatatgcaagttcaacataatgtaaacaccatttagttttaaaaaaaatattattatttaatatataataatataattaataattatttaatattaattttttttattattatattatattaatttttttatttttataattaatttatttttttttt

SEQ ID NO: 28454 - DNA, 405 bp, Gossypium hirsutum
  Clone ID: LIB3148-015-Q1-K1-E2
ggaacgaaacgatgaccgtaaagacaaattgtcctaagtgttcaagagctatgctgctaatgggctgctagacaaggaagggctgaaagacgcttttctacatctagatgctgccatgccgtaccggcaagccgaagacgccctccgtgtcgtcggcaaaacctataacattaacgtcgaggaggaaaccgagcttaacgcccttatcgactatgcttacaataagggttacgggtcttcaatttgattagctaatttataagctaaatttctttttctttttcacttttaatcatctaatatggttttttatatatatttaaagttcgtcccaaaagacgttattatagaataaaggtttcgtggcttatgatggtgatgtagtttttgcatgtactttgcaaa

SEQ ID NO: 28455 - DNA, 378 bp, Gossypium hirsutum
  Clone ID: LIB3148-015-Q1-K1-E3
agacacgtccgaggagaccattatgtcacctatgatgaattgctcgccacatcatcttgaggcggagctgaaggcgaatatcgagtcaaatcttaacttggattatatcatgccagtttggttggctagctatatttcaagctttacacccactgaaacatcctatgaggatacatataaaatgtgtaaactattgcttgccaatatccttaccaattcactcaatgaataacaaaatgaagtttttgtgaacacaattgtcatctcaagtttcgccaaagctagatcgatttatatacatatcgcttagctgaacttgtcatgttcttgattatacatagtgttatacaaaatcgcgttgaatgtggaaataataac

SEQ ID NO: 28456 - DNA, 130 bp, Gossypium hirsutum
  Clone ID: LIB3148-015-Q1-K1-E4
aaaaaaaaaaaaaaaaaaaaaaaaaaaaattttaaaaaaaaaaaaaaaaaaaaagggcgggggactataggatccaggtgtcgtcccttcatgctccattttactctccttagttgcacctaattcaatt

SEQ ID NO: 28457 - DNA, 227 bp, Gossypium hirsutum
  unsure (1)..(227): unsure at all n locations; Clone ID: LIB3148-015-Q1-K1-E5
cccacgcgtccgatgcattaaacttcctgtttacttcacaatcagttgaagttgattacaattagaaagaaaactattggcataagtaaatgaggagtaatcgtgagtttggtcttcctggttttaactcatggattgtccaaaaaaaaaaaaataaaaaatatattgttttttnataaaaaatatttaatttttaaaaataataatttaatatatttttttataat

SEQ ID NO: 28458 - DNA, 350 bp, Gossypium hirsutum
  Clone ID: LIB3148-015-Q1-K1-E6
gccccttcagccggtggttctagtcctagctcctctcctggttccgctccagcatcaggaccggattccagcatggctgccgctaccttgcctgttcttggatcattggttggggcctccattgtttctttgttttcttacatgctacaataagctacatatatgaaaaatgaacatgtgaacgaatgttttattttattctttttgaaagaaacatgtgatgaatactgaaaaaaaaattgaataaaatggagctttgaataaaaaaaaaaaaaaaaaaaaattaaaaataattaaataaaatataaaaaaaaaaaaaaataaaaaaaaataaaatataaataatatat

SEQ ID NO: 28459 - DNA, 406 bp, Gossypium hirsutum
  Clone ID: LIB3148-015-Q1-K1-E7
cccacgcgtccgtattggtttacaggtatcatcatcatcattggatgttggggtagtcccagacggaagtacgatgacggacatatcaaacccgtacggaagagggcctgagtcaacacatcagacggtgcagctatcaccggcggacagagaagcaagggtgctgaggtacagagagaagagaaagaacaggaagttcgagaagacgatccgttacgcctccagaaaagcatacgcagagatgaggccgagaatcaaaggaaggttcgcgaagcgtacggacatagaagtcgaagtggatcgcagtaacatgtatgggtttggagttgtcccgtcgttttgaacttaacctctcctctccagtcttccccagcatggtctagtaatatgttcaattttgaacttt

SEQ ID NO: 28460 - DNA, 303 bp, Gossypium hirsutum
  Clone ID: LIB3148-015-Q1-K1-E8
ctcgagtcaatagatctgcgagataattctcttctcctcgaatgtgttcgatggtgaacttgtagtaattaaaccactgttgccatcttaataatcgtccttgtttatagtctcctgtaatattgttccttataaaaggtccaaattgtttattatccgttcggacaacaaactccttaggtagtaaatcctgaattttcctatggctttctttacagcgagccattccttttcattactgtgataatttagttcagctcctgtaaatgtacctgaggtatatctacaaagcatttcctgatt

SEQ ID NO: 28461 - DNA, 223 bp, Gossypium hirsutum
  Clone ID: LIB3148-015-Q1-K1-E9
cggacgcgtgggcggacgcgtgggcggactcgtgggcggacgcgtgggcggacgcgtgggcggacgcgtgggcttctgtcaaaaaatctcatccatttctactgttaaaaactgatcattgtacgtgaaaatgaggtacatgtggcacaccacatgtaactatctggttattctataaaccatgttagtttttaaaaatagaaatgaatgaagtttttaatag

SEQ ID NO: 28462 - DNA, 405 bp, Gossypium hirsutum
  Clone ID: LIB3148-015-Q1-K1-F1
gaaatcaacatcaagaatggttgaggactcaatggaagaacctgctgtggttggtccggagcatgcaagtccagtttctgtccttgatacctcggtttatagagatgatgaaccatctccagtaaagcagatattgaatgcctctggaggtaatggtgctgaaggtttgaacgaagatcacaaggaagagcaatggaaccctgcagataagtgcttggctaacaatgtggggtctggtcttacatccgagattaatcgcaagaaactacagaacattgagcatttggtccaaaaactgagaagacttaactccggacatgatgaagccagtacggattacattgcatccctttgtggaaatacaaatcccgatcacagatacgtttctgaggtattattagcctc

SEQ ID NO: 28463 - DNA, 195 bp, Gossypium hirsutum
  Clone ID: LIB3148-015-Q1-K1-F10
cccacgcgtccgcggtaatacattcttagcttcatttttttttttttttttggtttaaatgaccttttggggttaacctgattcctctggggctgggccctccctgtgcgagtttttccaccgtctttaatgaaaatagagatggttttcatgctttaaaaaaaaaaaaaaatataaaaaaaaaaaaaaaataaa

SEQ ID NO: 28464 - DNA, 407 bp, Gossypium hirsutum
  Clone ID: LIB3148-015-Q1-K1-F11
ctccaacagtttgcgattgagggcagagaaggtgaactggaggatgctttggaaaatggtggtgaaaaggtgctttcaggcggtgtcatcagtgtgaaatccagcaggagcgaagtccaatcgaataaaagtgggaaaaagagaggtaaagatgagcatggttcgaaatcaacaagcaagaagagaaaatcatagttatcagcataaatgataattggttgctagaatacaagttttggtagaataggcatatctggatttctgtttttgtaatcttaattttcttctttccatttttatgcctgtttaaaacgttggaatttctggccacagaaatgggggaccgcaatttattttgccctttggcaaacctttcttgaaatacctaaaaccaaatattttgttta

SEQ ID NO: 28465 - DNA, 329 bp, Gossypium hirsutum
  unsure (1)..(329): unsure at all n locations; Clone ID: LIB3148-015-Q1-K1-F12
ccaaaagaggtgtgtccgattgtttctcggtcacttcaccacatacaaggacantgttggtactattttactatgtttcctacaatgacatattttacccgagtaggcaaatagttccaagaaattttccagcatgtaattataattttttttttggtagatctaggctccatagttttttgttgaaagctttgtagtcaggatgtaaagcattaattctaggttccatactttgtaatagttattgggctttcaaactgatgatttgcagctctaaaccctaaaatcagcgtgaggttattttttcaaataggaaagcatagaatttt

SEQ ID NO: 28466 - DNA, 373 bp, Gossypium hirsutum
  Clone ID: LIB3148-015-Q1-K1-F3
cccacgcttccgtaaaaaaaaaattaatatttatattttataaataaaaaaaaataaaaaataagaaagaaatttttatttaaaaaaaaaataaaaaaaaaaattatttataaattattatttattattttttatatctcccctataaaaataaatatttatgggggggccctttttaaggtaacaaattttttttccctttttttgaaattatttttttttttttttttccccctaaatttatttcatgtgccggtttttttaaaagttttatttggaaaaacccttgtgttccccaaattatttgtttttaaaaaaatcccctttttccaatttggttttttttaaaaaaggccccccccatttccctttt

SEQ ID NO: 28467 - DNA, 404 bp, Gossypium hirsutum
  unsure (1)..(404): unsure at all n locations; Clone ID: LIB3148-015-Q1-K1-F4
gagaaggaacccaagttcttgaagaacggtgatgcaggtatggtaaagatgattcccaccaaacccatggtggttgagactttctccgaatacccaccactcggacgttttgctgtccgtgacatgcgccagaccgttgctgtcggtgtcatcaagagtgttgagaagaaggacccaactggtgctaaggtcaccaaatctgctgccaagaagaaatgagagattattgcagagataattatatcagttttcattacagctttggacaattatcttaaatttggactttaaatttactttttgtgagacttgttgatttgctttttaaacaaattctagttttatgttttaatgtttttcaaaaaaaaaanttttttttttaattttattaattaataataaaa

SEQ ID NO: 28468 - DNA, 394 bp, Gossypium hirsutum
  Clone ID: LIB3148-015-Q1-K1-F5
cctaaagatgcgaaggttaaggcagcgaagttggtgtgtgtagtaaatgttggtgtccttggaacggttaccgctgtaactctttttgcagttcataaaaacacaaggctcacttttgttggaattttatgtactgctttaaccattggcatgtacgcatcgccattgtcagccatgagcacggttgtaaagaccaagagtgtggagtatatgccatttttactctcattgtttctgttcctcaatgctggtgtttggtctgtttatgcagtgcttgtgaaggatatctatattggtgtgccaaatgcagttggattatttctaggatcagctcagttgattctctatgttatatacaagaacaagcctgtttcaacaaacccaagtgaggcaa

SEQ ID NO: 28469 - DNA, 355 bp, Gossypium hirsutum
  Clone ID: LIB3148-015-Q1-K1-F6
ctcatccatgagatcatgactgtgggacctcattttaaggaggccaacaatttcctctggcccttcaagctcaaggcacctttgggaggtctgaagaagaagagaaaccactatgttgaaggaggagacgctggcaatcgtgagaattacatcaatgagctaattcggagaatgaattagacgttggctttatttgttaattcagtatttttggtttgttttgaaggatcctgatatgatttcttttggccttttagaaacagttttgtttaaaaggatgaatatttttcacggtgtttaccatttaaaaaaaaaaaaattatttaaaaataaataaaaaaataaaaaaataata

SEQ ID NO: 28470 - DNA, 402 bp, Gossypium hirsutum
  Clone ID: LIB3148-015-Q1-K1-F7
cccacgcgtccgcccacgcgttcggagacaattatataccaactgtctcattaccggaacggtggatttcatcttcggggatgcgacgagcattttccagaactgtatgctcatcgtgaggaagccagggcctggccaaaattgcatggttactgcacagggaaggaatgatcttggaacaaactcagccattgtgcttcaaaactgcaccatctcgggcgcccctgattacatcccagtgaaggatacgaacaaggcatacttggggcgtccctggaaacaattcgctaggtctatcataatgcaatctcagatcgacgacatcattcaaccagagggttatgcccccatgacaggcaccataggaatagacacttctttcattgccgagtttggaaacag

SEQ ID NO: 28471 - DNA, 404 bp, Gossypium hirsutum
  Clone ID: LIB3148-015-Q1-K1-F8
ctgaaagtgatgaactcgtttggtggcaccttagaaaaatgtgcggcctgttctaagactgcttatccaattgtgaggggttctgtgaatggtacaatataccacaagagctgcttcaagtgtacccatggagggtgtaccattagcccatcaaactatatagcacatgaatgttaactctactgcaaacatcaccatatccaactcttcaatgagaaaggaaactacattcaactcgagaccgaacgagagaaacaagccttcaccgcctccaataaggttactgcccctgctgcatcattaaccactaccacatccactgaaaattgaactgagtcgtaattatctcaatgtgcatcactgctggcttaatgaaaaaaactttgtaaaactatccaatgtca

SEQ ID NO: 28472 - DNA, 390 bp, Gossypium hirsutum
  Clone ID: LIB3148-015-Q1-K1-F9
gtgcactggacgcagaatcagaatgcgtgctacaagaagcactcgaaaggctcatgaggggccgcacgacggtacttgtggctcaccgtctctcgacaataagaaacgtcgacagtattggagtagtacaagacgggcgaatcgtagaacaaggcagccattccgaattgattagccgaccggaaggagcttattctaggctcttgcaactgcaacaccatcacatatgaaagtttttattttttattttaattgaatcaacatgggcttgttgggtggtataattatgtttgggtccctttaacctcttatgtttttcatattttccttttttgaatgatgatagttgtagatattgttaaagtggagactgtatctttgggttctact

SEQ ID NO: 28473 - DNA, 65 bp, Gossypium hirsutum
  Clone ID: LIB3148-015-Q1-K1-G1
cccccccgtacgcagtaggaaccttcctgttttgtaatatagggttctacgtagaattttgcatt

SEQ ID NO: 28474 - DNA, 197 bp, Gossypium hirsutum
  Clone ID: LIB3148-015-Q1-K1-G10
ctaaagctgcagattcattgaaaggctttaattgctaggccctccattattatttttgagggaaaaaagagaggaaagaattgcctacaaaataagtttttttttttcatctaaaaaaaaaaaaaaaattaaaaaaaaaaaaaaaaataaaaataaaataaaaacaatttataaaaaaactattatatattaataaa

SEQ ID NO: 28475 - DNA, 228 bp, Gossypium hirsutum
  Clone ID: LIB3148-015-Q1-K1-G11
gtacccttagcatggattttgctattttagtttattccctttccttaaaaagaaccaacaaaaagaattccatataaagaatatcccctatctttaatatgctacatgtttttattaatcgtttgggtctgtgataattcacaatcattatcgaatttaacaatattttgtatgatcgtattttgtttcgaaaaaagattatataatataaacttatttatatttaaa

SEQ ID NO: 28476 - DNA, 409 bp, Gossypium hirsutum
  Clone ID: LIB3148-015-Q1-K1-G12
gaaacagccaaacatcaccattggtgtcatcgtctccattttggtgattatcctcacagttctcttcagacttcttttcggtggcaagaagcaaccaaaagtagagaagaatccggaggttgctgagacatcaaacaatcaatcaaccagtggagaaaaggctgaagaagaagaagaagaagaagagaaagaaggaaccgctgctgctcctcgcagaaggaggcgtgacacttaaaacagaggtgaatggtgataatctgtttttagtatgggaaaatttttgggctttagaagtggtcttcatagctgaaacattcatggtacctggtgatttttgtttttttttagttttacttgatgaaacattattagattgtattaattgaagagtgtaaacagagacaatttt

SEQ ID NO: 28477 - DNA, 346 bp, Gossypium hirsutum
  Clone ID: LIB3148-015-Q1-K1-G2
cccacgcgtccgcccacgcgtccgaaaagttggacgacaaatgaaagcacaagcgtacgaaaaaggttgtgtcatgtgcagtgtttgcttttcagctatggacactccatggtaagtaactagagacgttgaaaattaaaacgaggcagaaagtgttatctttgtttgtagagcaagaaaattggtatgaataatgcggagcatgttgctaaggattggaattttcttcgcaactcgtcaacctgtgcttagatctcctctgggttctttctgtctgaactgttagatgttgtcggtcattcatgtggatatgcagatattgttacttgcttggatgtaaatcttt

SEQ ID NO: 28478 - DNA, 242 bp, Gossypium hirsutum
  unsure (1)..(242): unsure at all n locations; Clone ID: LIB3148-015-Q1-K1-G3
tccgggccacaccaagaagaatggagagtctgccgctgaggaagagtaaatttaaatggaaaagaaaattatcctttattaaagtttttctagttagggctgttttactatcttctatggaatttagtgttaaatttacgctcctttagtttttatattgttgttttatgggattgttgattatatttgttagaaaagatctgaagttgtgagcttattaatatcatgaacatgtnttgagc

SEQ ID NO: 28479 - DNA, 367 bp, Gossypium hirsutum
  Clone ID: LIB3148-015-Q1-K1-G5
ccgtctgcctacaatctatttatcaagctatctaattaactgaaacttgatttaccccgcgtgcactcaacggttcatcttatctaccaacttacatatcttatttgaatgggacacacacattgaaacaaatgcttgtaatatctcaactctacacggaataaatccaacgtctcaaaactgggaattctgctgttagtcacatagacaccttgagcgctgctgtcaacatttggacccacttcccacgcatacatgtcagtcaaacgcctgatcaagctgttcttaaaatgaaaaattacttacgccttcacgcaggagagagacgctctgtgaaagatgggttatcttgtgcctaccaacgttt

SEQ ID NO: 28480 - DNA, 327 bp, Gossypium hirsutum
  Clone ID: LIB3148-015-Q1-K1-G6
gttctcttgtaatcatgatcagaataaattgctttgaggtatgttttgtggattttatgtgaaaataaatgaagttgcattaaacataaaaaaaaaaaaaaaaaaaaaaaaaaaaaaaaaaaaaaaaaaaaaaaaaaaaaaaaaaaaaaaaaaaaaaaaaaaaaaaaaaaaaaaaaaaaaaaaaaaaaaaaaaaaaaaaattaaaaaaaaaataaaaataaaaaaaaaaaaaaaaaaaaaaaaaattttaaaaaaaaaaaaaagggggggcctctttaaaaaaaaaaaaatataatcccgggggagaaaaaattaatattttttttt

SEQ ID NO: 28481 - DNA, 402 bp, Gossypium hirsutum
  Clone ID: LIB3148-015-Q1-K1-G7
aaagaaatgaaccctctgctagggtttacatttttctctgccgctgcagtcaacaagggcgtgtcacggcgtccgtcgttgccccggtctccgattacgacacagaggggaaaaagccaaccacgtcaggtaaacccttctcttcttccctctttccctttttcgttttcgttttaatagattcgtataaaaaataacaaacaaacataaaaaaacgaacaagaacacgaagagagaaaaaagttatataaagtttaaatcaaccttttttatttctgtttctgccttttgatttttctcctgtgtgtaaaaaaaaaggggatacaaaaaaattggaatctttttacactgttttcttctagtttttgtccatttctatggtggttgtttcttttgcgccct

SEQ ID NO: 28482 - DNA, 178 bp, Gossypium hirsutum
  unsure (1)..(178): unsure at all n locations; Clone ID: LIB3148-015-Q1-K1-G8
cccacgcgtccgcccacgcgtccggaacattgattatgtgtgatttatgatgaaattttgaaactcctatgaatgtttaaccttgtgctatttgtttcttgcatattttttataaagttaggtttttaaaaaaaaaaatatntntaaaaaaaaaaaaaaaaaaaaaattatatataat

SEQ ID NO: 28483 - DNA, 301 bp, Gossypium hirsutum
  Clone ID: LIB3148-015-Q1-K1-G9
atttttatacctcatggggggggggagataataatctgtttagatatagagtaagggactttgtttattagtttaaattttgttcctttcattttgttcctaattagtttaattaaggatcatcacgttgctgctaatatataacctgggaattaagagctgctttgcaatccaaaagggaatttgatttagaatctcagttcttctttgggatcaaaaaaaaaaaaatattaataaatatatattaattaaaaaattataaaaataaaaataaaaataataaattattaaaatataaatg

SEQ ID NO: 28484 - DNA, 169 bp, Gossypium hirsutum
  Clone ID: LIB3148-015-Q1-K1-H1
gttatagatcgagagcggacaaaaaaaaaaatttataataaaaataaaataaaaaaaaatattgaagggtaatttaaaaaaaaaaaagaaattaaaaaaaaataaaaattaataaattatattaaaaaaaaaaaacgagatatattaaattaataaaaaagaagcaaaa

SEQ ID NO: 28485 - DNA, 297 bp, Gossypium hirsutum
  Clone ID: LIB3148-015-Q1-K1-H10
cttttatttgttataaatgaattagaagacaatgaaacccctcgctttctctcaatgttcaagacgacaaaacaaatagatgaaatgcagatgttgagaaagccattattaaagctttagagagacaatatgctgatgttctagctccactgaaggatggccttgctcctaagataattggcaaatatgttcagaaattcaccaaaggaactgctgtcatctacgttgttccggatgagttgggagttcttttgaattccatgaaaaggatactttttgtactgcatcccaagatag

SEQ ID NO: 28486 - DNA, 291 bp, Gossypium hirsutum
  unsure (1)..(291): unsure at all n locations; Clone ID: LIB3148-015-Q1-K1-H11
acgaaacaaaatggtgaaaaacaaattgaaaaatttggcattgtcattcttggcaataacactattgctgattatattcacaccggtaaatggatataggacgattgcgggaggtaaaacgccggtggaagatgtggagaaagacaaagcaatgcaagctntaaggaggtttgcggtggaagagcacaacaaaatcaagaaaatgatggagacacatcgtatcagatagaatttctaagtgtaggggccagaacaatagttcagatcaatcttctaacatgagggtgaaat

SEQ ID NO: 28487 - DNA, 406 bp, Gossypium hirsutum
  Clone ID: LIB3148-015-Q1-K1-H2
cccacgcgtccggctagagtcttggttgccgctccatttcttgcctttgtaactactcatatattgtacctcaacttttatacctttgactatgggtggaacatgaaagtttgtgtagccattggggttgctcaacttctcatttgggcaatctgggttggtattactcaccatccttctcgctggaagttgtgggtggtggtggttggaggggggcttgcaatgcttttggagatctatgatttccctccttatcaaggattctttgatgctcatgctatttggcatgccacaactattccacttacctgcctgtggtggagcttcattagggacgacgcatagtttaggacttctatccttcttaagaaggctaattagtcccatgttaaactaacaatatttt

SEQ ID NO: 28488 - DNA, 405 bp, Gossypium hirsutum
  Clone ID: LIB3148-015-Q1-K1-H3
gggagatcatatgctggatgctcaacagaagggggaaatcaatgaggacaacgttctctacattgtcgagaatatcaatgttgccggaattgatacgacactgtggtcgatcgagtggggcattgcggagctggtgaaccaccctgaaatccaaaagaagctgcggcatgaacttgacactgttctaggacctggaaaccagattactgaacctgtcacccacaaactcccctaccttcaggctgtgatcaaagagactttaatgttacgaatggtaatttcactactcgtgccccacattaaccttgatgatgccaaattgggtggctatgatatacctgcttagagcaaaatcctgggtaattgcatggtgggtagccaacaacccttgctaacttgtaaaat

SEQ ID NO: 28489 - DNA, 152 bp, Gossypium hirsutum
  Clone ID: LIB3148-015-Q1-K1-H4
tttatatctagatagattttgaaacaacatatatttggagctatttgccctttattttgcccctgattttgagacatttgcttctgccaaataataataacataaaaataaatacaaaaaaaattaatgaaaaataattaattaacagcatc

SEQ ID NO: 28490 - DNA, 244 bp, Gossypium hirsutum
  Clone ID: LIB3148-015-Q1-K1-H5
acgaaacaaaatggtgaaaaacaaattgaaaaatttggcattgtcattcttggcaataacactattgctgattatattcacaccggtaaatggatataggacgattgtgggaggtaaaacgccggtggaagatgtggagaaagacaaagcaatgcaagctttagggacgtttgcggcggaagagcacaacaaaaaatcatgaaaatgatggagacacatcgaatcagatagaattttctcaagt

SEQ ID NO: 28491 - DNA, 339 bp, Gossypium hirsutum
  unsure (1)..(339): unsure at all n locations; Clone ID: LIB3148-015-Q1-K1-H6
acattgttaaatctagccccatctggtggaggcccaattttgagacaatgatgtatccatattgccctccccacattacaaaacccaaggagtgcacgaagccccccctcgnccacttgtctgagaaagagtattttgcagaaccgaagaatctgaaacttcttgctgtaccattgcttgagctctacgataatgtgcagagatatgggccagtcatatcaaccattcctcagcagctttctagattccagttcaacatgatcagtatatgactttggcacgggatgccaagattgtgaatctttctgctcgctttctgacagctacatcatgagagta

SEQ ID NO: 28492 - DNA, 334 bp, Gossypium hirsutum
  Clone ID: LIB3148-015-Q1-K1-H7
cccactcgtccggccaatgaagcacccagtatcccattcagttggatctttgatagagaagtgaaactttaggccatgaaatacagttaagactcctgcaatgcatttgtggaaacaaacacgaagaagctgaatgcaaacttctctttatatatccgatgtaatagtggttgtatatgtaatagggtagcacttgttttctggatgtgttgtgttcttaaaaaataatgccgatagtggcagctgtgatagttttagatgtttggtttcataatgtctgttatatcgttagacgagtaagatgtgttgtttatgttgaaacaatctttcatat

SEQ ID NO: 28493 - DNA, 259 bp, Gossypium hirsutum
  Clone ID: LIB3148-015-Q1-K1-H8
cccacgcgtccgcaaaatcttctggatgaaagtacaatgatgtgtttcactgcaaaagccatatatatattcatcaaaaatcaaatggagtttcaatatactttttcatggtaatttatatcccttgtatatatgatgttatggagttaaattaccatgtaaaaaatctttggtcatggttctcaataattttatgcaatttttttccataaaaaaaaaaaaaaaatataaaaaaaaaatatatataattaaaattaat

SEQ ID NO: 28494 - DNA, 306 bp, Gossypium hirsutum
  Clone ID: LIB3148-015-Q1-K1-H9
ccccgcgtccatgctaattgtcaatcttatcacagcacaatccgtgctgccaagacaatctgacttcagtccgggaatttttgttaacgatcacactgaaagttgtgcaaagggcacttgtaacgatgaaaacaaggaaaatctggttgatgttcttttaaggatccagaaggatggcgaatttcccttgactgacaacaacgtcaaagccgtcatcttagacattttcagtggcggaagtgagacatcagcaggagctgtagagtgggcattgtcggaaatgattaataacccaagagttatgac

SEQ ID NO: 28495 - DNA, 355 bp, Gossypium hirsutum
  Clone ID: LIB3148-016-Q1-K1-A1
cccacgcgtccgagaggagtgagcagtgatgccggcgaatggttgcgtgaacaaaggggagcgatgttgatcaatatggatgcttgtgacacagattgtgggttcgaggctagtgtcagtgacattggagttcatgaaaccggtgtggaggttggccaagtaaccgctgttggtgcttccacgagcagcaatggtaggttagctttgttgacgtcaaagttggggcattttgctggtaggaatttagtagcaggcactttgagaaggtggtctaattgtgatgataatttaaatatcaacttgtgaaatgatctaattgtagatgtttgggaaatttactctttgctttgatctc

SEQ ID NO: 28496 - DNA, 282 bp, Gossypium hirsutum
  Clone ID: LIB3148-016-Q1-K1-A10
atcaagtagtccaataaccatgggactctttaaatgtctacattgatcctttcattagctggtgcaaaatgggctaatcatgaaagaaattttcactgcatttctgtagtggttgtggttccatgatttataggtttgaactaattgaacaacattccagtggcttttctgtttgttcagctctcctcgtgcataaccacagaaatatgattctaacgagcttctaccgattattgggataacaaaagattacagattttttaagaccttgagctaagtaca

SEQ ID NO: 28497 - DNA, 317 bp, Gossypium hirsutum
  Clone ID: LIB3148-016-Q1-K1-A11
gtgatatgttacatgatatggggttaaaacttgtgtattctttggtagcttggactgtacatgtcgttccttcatcatcagaatttgtttaccaaaaaccaaattccctttgatacaactttgggaataatattacttggctagttgttcgatgacccaaatgttaaagttccaaaattacttatgatccgcttttccagacaaatatgattctaacaagcttctaccgattattgggataacaaaagattacagattttttaagaccttgagctaagtacattccaactgggtaggcagaaccaggtcaaggcaaa

SEQ ID NO: 28498 - DNA, 344 bp, Gossypium hirsutum
  Clone ID: LIB3148-016-Q1-K1-A12
cccacgcgtccgcccacgcgtccgatcacgtttaatgtgcaaactatagaatgatataatgcctgctggttgctgcaaacagcggcaatccatgaagaaaagaaagagcgaagctcagccttagacatttgttttgcactcaatgggatgtatttgttgaaagtacctaaaatcactttcgtatattgttcttgttttcatatgtatttgtaaacaatttattcccccttgaaaaacctgttttaaagtcccaattttctttgtgcattaagtacatgtctgaccctgcctaaagtgtacccaaaaaccttaatcaagttgaaatagttaaaatgttttccccc

SEQ ID NO: 28499 - DNA, 413 bp, Gossypium hirsutum
  Clone ID: LIB3148-016-Q1-K1-A2
atttttagaaataaatgttaggttaccttttctcttatataaaaaaaaaaaaaaaaaaaaagagaaaggtaaaaaaaaaggaggggggggccccccaaaacaatcaccaaacaaaacactaaaaaccaacgaaaatcatgcacccaaaaagccaattctatcgtaaaaacctgtgtctttttctaacacaatcaccccctggaagacacacttttggggcccccccccatggggccccacttttctcccccttccatcacccggctttacccttttttagggccccttaaaaaacttttcccccccctcttttctcaaaagcaaatagttgaaaccccctcgctaccccaccattaattccttggttaaaaacccctttttcccctcctcttttaattacacaaaaccccccc

SEQ ID NO: 28500 - DNA, 126 bp, Gossypium hirsutum
  Clone ID: LIB3148-016-Q1-K1-A3
tgatgggctccatttctgatggaatttgtttgcttggaaacgtgactatagttatgtttcaacgtgcaccttttttttttttggtcatctgttgctctttttcaatgctgtggttaaatgacaatg

SEQ ID NO: 28501 - DNA, 303 bp, Gossypium hirsutum
  unsure (1)..(303): unsure at all n locations; Clone ID: LIB3148-016-Q1-K1-A4
ggtttgtcaagctggtggaaggatattcttttttgcgttgagaacatttttatcaagtcggtctgttttgaaaaaaactattggttttaggagaggatggtttttgatctcatcctccaaactacggagactaattatttttgtagtagttagatcataaatggaatttcatttgaagatcaatcccccccttctgtaacagttaaaaataaggagcagatgcagatggggttatactgcttactttaaccttctgcaagctttctaatgcaatgttgagagcttttgttcggctttctttna

SEQ ID NO: 28502 - DNA, 405 bp, Gossypium hirsutum
  unsure (1)..(405): unsure at all n locations; Clone ID: LIB3148-016-Q1-K1-A5
atggtagtccaacactcaaaatgtcagcttctttttttgctttgcatgcttttcatttcttcagtgacaccaattcttgggtgtggttcatgtgggaaagcaccacacaagcatcgaaagcctaagggaaagtcccctaaaggtcccatcactttgcctccccttgtgaaacctccaatcaagttgccaccggttgttcctccaatagttaagccacccattgacctccctccggttacagtccctccaattaacctccctccagggacggttcctccagtaactaagccaccaagtgggaaaccctgcccaacaccaccaaccaaggacacttgccccattgacacactgaaattgngtgcttgtgtggatctgctgngagggtnggtgcacattggactatgt

SEQ ID NO: 28503 - DNA, 356 bp, Gossypium hirsutum
  Clone ID: LIB3148-016-Q1-K1-A6
accacgcgtaccgtaaaggttgggatttatgtattagcaccacaagcatgccattgcggcaggtgacatatactggggggtgtggaacatcaaatacttcactacactagcgtcgaaagcctaagggaaaatgctctaaaggtcccatcactttgcctacccttgtgaaacctccaatcaagttgccaccggttgttccttcaatagttaagccacccattgacctccctcctgttacagtccctacaattaacctccctccatagacggatccttcagtaactaagccaccaattgttaaaccctgcccaacaccaccaaccaaagacacttgcctcattgacacactgaaattg

SEQ ID NO: 28504 - DNA, 185 bp, Gossypium hirsutum
  Clone ID: LIB3148-016-Q1-K1-A7
gttttctttgttattaggattctatagtctaaacctgttctgtttttgcatgctatatgttgttgaagcctgttaaaaattgtagtctctttctatcttttacttagccctatgagtatattcaactgtttttctcgtatctctatactcgtgctcgaaaattatatcgaataaaggtgttagac

SEQ ID NO: 28505 - DNA, 403 bp, Gossypium hirsutum
  Clone ID: LIB3148-016-Q1-K1-A8
cccacgcgtccgttggagctggagactggtttgtggtgcttttttattttattttattatggaatattcaagggttttgaggacattaatgttcatagctattattgtacgagattttttttgaaaaattagagtcagtttgcggtccaaaaaaaaaaaaaaaaaataaaaaaaaaaaaaaaaaaaaaaaaaaaaaaaacaaaaaaaaaaaaaaaaaaataaggcatataaaaaaaaacgaagacatcattaaaaaaaaacaacctcaaaaataaaactaaataaaaaaattaatagtatattattttgagataaaaaaaaatatacctaaaggggggggcctttttaaggaacaaaaaatacaccgcttgtcggcataaaaaaatttttttttttttagccc

SEQ ID NO: 28506 - DNA, 421 bp, Gossypium hirsutum
  Clone ID: LIB3148-016-Q1-K1-A9
agccgtcaaggttgtggacatcgtcgacactttcagacttcaggagcaacctgcttttgacaagaagcagtttgtgaccttcatgaagaggtacatcaagaacttgacacccaaattagagcctgaaaagcaagagtctttcaagaagaacatcgagggggctactaaatttttgatgtcgaagcttaaagatctccaattttttgtgggtgagagcatgcatgatgatggtagcctagtgtttgcatactacaaggacggtgccaccgatccaaccttcctctactttgcctatggcttgaaagaaatcaagtgctaaatggagttttcacccgataccggaccggctttgttatacctaaagacttagttttaattctagatataaggagttcttaactatctattttagtctttttta

SEQ ID NO: 28507 - DNA, 97 bp, Gossypium hirsutum
  Clone ID: LIB3148-016-Q1-K1-B1
actacgcttgcgttaaggtagaaatgctcgttttttattactgtgtaccaatatagaacaggaaagggttattacaaataggtaatgggtaggacct

SEQ ID NO: 28508 - DNA, 297 bp, Gossypium hirsutum
  Clone ID: LIB3148-016-Q1-K1-B10
agcaaataaacctgttagtctacattaagttataaaaccttcctagtcctagcgtttgtgaggaactttaagatgctatcaggcatgagtccgaacgagtccctgtttcaaagcatgatctttttagtttgtaaagtgcattgcttgttgaacttttatggtgcgtgtttgaatgatgaaagacctcgacatattatctattgaaaaaaaaaacaaaaaaaaaaaacatgaaaaaacagattaaaagacacaattttctttgtgcattaagtacaggtctgaacctttgttctaaaa

SEQ ID NO: 28509 - DNA, 411 bp, Gossypium hirsutum
  Clone ID: LIB3148-016-Q1-K1-B11
caccatcttacttgaccggtgagttccctggtgactatggttgggacactgctggactctcagctgatcccgagacctttgctaggaaccgtgagctcgaagtcattcactgcagatgggccatgttgggagctcttgggtgtgttttccctgagctgttggctaggaacggtgtcaagttcggtgaagctgtatggttcaaggccgggtctcaaatcttcagtgagggtggacttgactacttgggtaacccaagcttgatccatgctcaaagcattttggccatctgggcttgccaagttatcttgatgggagccgtcgagggttaccgtattgccggtggaccactcggtgaagtgactgacccattgtacccaagtggtagctttgacccattgggtcttgctgatg

SEQ ID NO: 28510 - DNA, 419 bp, Gossypium hirsutum
  Clone ID: LIB3148-016-Q1-K1-B12
gaaacttaatgtaaaatagcttcaaataaatatataaatataaccattttaaaataagtcatgatagaagagtattatttaaaagtaaataaactaaatggactaagtatgaggttgaaatggaattaaaattcggggctttaattgcaaaatttacaaacaggttatagaggactgaaataagatgcgcttaaggcatgagggactgactgggcaatatccccgtcccttatgcgcgtcgttttttgcaggacccaattgaaacgggtttaaaaatgtcgcggtcaaaatataaaagggaaggacccgattgtacttcactgcagaagcgaaggggctgaacatgcaattagccccttctaacaaaacacgcaaatcctcagtaccactgggtcgggtcacgggtcaaacgccaaaac

SEQ ID NO: 28511 - DNA, 406 bp, Gossypium hirsutum
  Clone ID: LIB3148-016-Q1-K1-B2
attatgaagtgctcaatgggcaacagttttgtaagttgaatcaaatccagagttccctgcagaacaggtatgaatttcaactctctattcttggctggaattgtagataagaagaggattcatgtaattttggtttttttataaacgattttctatttataacaaaatttctgaaaaaaaatgctacgtgtggttcaagcaacctataaattatctcttatctagggctataatcaagctgagttgatctcgaataataacaagctcaaactcaagcttgattaaaaacttctggctcattatttgtgattcaaacaatgatgctagaccgaatcggcctagttggatcgggaatcgatcgattattggtttaaagaaatgtaactgaattagttggatcgagatt

SEQ ID NO: 28512 - DNA, 252 bp, Gossypium hirsutum
  Clone ID: LIB3148-016-Q1-K1-B3
attacgcatgggcgaacgcgtatgcggacttttgttcggaagcaatgacagactccttggcagacgcgtttacggacgcgtgggtgttattccctcatataaggcaccaaaagattgaacactgcctacttggctgagttataaaacaatgtacctgtatcaaaaacttaatgaaagaaaacattgccagctatcaaaacaatctatatatattatgttatgtaatggactaatgacgtttatcttgtatct

SEQ ID NO: 28513 - DNA, 178 bp, Gossypium hirsutum
  Clone ID: LIB3148-016-Q1-K1-B4
gcgaggtctatcgggtaaagccaatgattttaggcatcgggggcgcaacgccctcgacctagtctcaaactttaaataggttggacggcgccatttcttcgttgaccctggccacagagtggggggctgctcgagggccatttttgttaagcataattgtcgatacggtatggatctt

SEQ ID NO: 28514 - DNA, 240 bp, Gossypium hirsutum
  Clone ID: LIB3148-016-Q1-K1-B5
gagaaacattgcatatgcaaataaagctaaacatgttttgtacttgtattgcagagaatatgtaaattaggtaagttattgtttgggagatgcggggcattgtgttctttaagctaactataatggttttgctttgaaactagtatatgtatgtctgcttaatgccaaaaaaaaaaaaaaaaaaaaaaaaagaaaaaaacaacaaaaaaaaaataaaaaaaaaaaaggctataataaaac

SEQ ID NO: 28515 - DNA, 303 bp, Gossypium hirsutum
  Clone ID: LIB3148-016-Q1-K1-B6
cccacgcgtccggtgattacccgctgagtttaagcatatcaataagcggaggcaacagcgggggaagaggagtagaacagaaggtacaattaactccaactacagcttcagtctatgatgactatgttccagcaatttcaaaatccgccatcttagacatttgttttcttgtaacttttaacattattgtaagaatattttgaatattcatttacaatttatataatatatttttcgtaaaaaaaagggcggcctttcaagcgggcccaaaatccttgcttcatcaatcacagctcaatcttt

SEQ ID NO: 28516 - DNA, 260 bp, Gossypium hirsutum
  Clone ID: LIB3148-016-Q1-K1-B7
cccacgcgtccggattttcaggattgagttggtaaaagaaatgactaggggaagtacaatgtcattttctctttcgttttttgggtccattgtcgttcatgttccccctcccctccccccaaaactctaccgactttattcttaatcaagtgatgtaagtgtttggtgtagagacaaggaatgtgaagatgttaacttcatttttttttctttttatttcaggacccattatttataacgttatatacaagtttctttct

SEQ ID NO: 28517 - DNA, 203 bp, Gossypium hirsutum
  unsure (1)..(203): unsure at all n locations; Clone ID: LIB3148-016-Q1-K1-B8
atggagaggaagaaagggatgagacagaggttcacgagggcggattcatgganaagttccgtttcatggaggatggtgttgagtttcaagcactttaattaaattttcaactttgttcttaatttgtctgttgttttttttttaaaatttttgttgttatttgaaaataaaagtttgtactcataaaaataaattagtttatc

SEQ ID NO: 28518 - DNA, 416 bp, Gossypium hirsutum
  Clone ID: LIB3148-016-Q1-K1-B9
caattccgaaggttatttccctctgcatggagcagaattgaacctctctacagtcaagtgcctcataaacgtcatgctggtgcttgtcttgactggtgcattcacatttttaacctttttctcttccatttggtttaagatttttgtatcgttatcttgttcctatatggtttcggctacttatttaaacatccgtccagaacctatcttcaactttgtcaaaactagtctttaaacctaatttcttccaagttattattatgcaacttcgataggtattcattcacaagcagcatcaagaagtgcttgccggaaaaacttcatttgacatgacttccagcatcatcgaaatgggaaggttcatgtcgggagcttaaatagcttgtggcctaacggagaatcttcggggcgtcaaa

SEQ ID NO: 28519 - DNA, 349 bp, Gossypium hirsutum
  Clone ID: LIB3148-016-Q1-K1-C1
aaagctctttcgtaataaataatatacaatttattcaaaaaaaaaaaaaaaaaaaaaaaagggaaggaaaaaaaaggaggaaagagagaaaaaaaaaaaaaaaaaaaaaaaaaaaaaaaaaaaaaaaaaaaaaaaaaaaaaaaaaaaaaaaaaaaaaaaaaaaaaaaaaaaaaaaaaaaaaagggggggggcctttttaagggatcaaattttacttcccgttgtttgcaaaataaaaattttttattggggcccccaaaataaaatcccggggccggggtttaaaaacgcgggaacgggaaaaaccttgggtatcccaaattaaatccctttgaaacaattccccttt

SEQ ID NO: 28520 - DNA, 245 bp, Gossypium hirsutum
  Clone ID: LIB3148-016-Q1-K1-C11
cctacgcgtacgtccactcgtgcgaggaggttaaactcgctgagagatctgcccatttaggagaagaacttttgtgtcatgctggttaagattaatgaggaatttccaaactacgttaaggaagttcggtgaagaggcttattcactgctttagagtacaatagcaggagttcattccctgtttcaccatatgatatctgtctaaagatgaaagaaaggtgagtctttgcaaaacttacacatga

SEQ ID NO: 28521 - DNA, 395 bp, Gossypium hirsutum
  unsure (1)..(395): unsure at all n locations; Clone ID: LIB3148-016-Q1-K1-C2
cccacgcgtccgggcagccatgcctttgtcagcagaggaagctgagaaattggggtttgtcaattatgttgttgaccaaaatgaagtgctgaataaagctcgacaacttgcaggagcaattatgaagaacagtcaagacttggttctcaggtacaagtctgtgatcaatgatgggtacaaattggatcttcgtgagggtctcgccatggaaaaggagaggggtcataaatactacgatggaatgacaccggagcagtttaagaagatgcaagagttcatagctaggcggngttccaagaaaccatcttccaagttgtaatatgatctcttccatgcatcttctgacttggtgtttagtcactgttttataatggaaacataatggaaataaattt

SEQ ID NO: 28522 - DNA, 308 bp, Gossypium hirsutum
  unsure (1)..(308): unsure at all n locations; Clone ID: LIB3148-016-Q1-K1-C4
cccacgcgtccgcccacgcgtccgcccacgcgtccggttcctcgttaatgccggcatcgtcgagaagagaccaaatcaagattcatggtttttaaggataacccaagttgctatttatgaaaaaaaaaatcagcactgttccttttttagcttaaataaaacactagtgctgctgtctctctaatttatacacccttggtggttttaaactgtcatggaatatgggatttctttaataaaaaatgggttttttatttgctttncgaaaaaaaaacanntatnaaagacaaaattaagggaaaaagaaa

SEQ ID NO: 28523 - DNA, 353 bp, Gossypium hirsutum
  Clone ID: LIB3148-016-Q1-K1-C5
cccacgcgtccgcccacgcgtccgcccacgcgtccgccaacggctgagatccctcagaggagcttcgctgtgtatacaggatagactgcatggtgccgcccgtacagacgccctgccctttgaagtttgaaacacagaagactaggcctacttccctctgtaacgaatggaaagggtagattggtaatttcttaagtgctagtgccgggtactttaggaagataaaaataatgggaaattttttttatttattttactggatttttttattcgtttatttattttataagaaaatttgttgaatatgttttaggttcaaaacgaatttgttgattttttttttcttttcaaag

SEQ ID NO: 28524 - DNA, 391 bp, Gossypium hirsutum
  Clone ID: LIB3148-016-Q1-K1-C6
agtgactaaatcggtttcgtgtcaccagagtttgtacccgtatttactttactattgccactcggttcccaaggtccgggtctatgaagctgatattctggatccgaattcaatggagaagattaaccatggtgttgccatctgtcatttggacacatctagttggagttcgggtcatggagctttcttggctttaggttcgggtccgggtcgaatagaagtttgtcattggatatttgagaatgatatgacatggacaatagccgattcctgattagcaagaagggggttttatggttatagttcaagtttgggagggcaaattcctataaggatttcgctaccttcttaagattatcatatataatattattgaaaatgaagaataaag

SEQ ID NO: 28525 - DNA, 382 bp, Gossypium hirsutum
  Clone ID: LIB3148-016-Q1-K1-C7
cccacgcgtccgcccacgcgtccgccaaaaactacagggctggtgctgtggtagccaagtgtggtgataagagtgtatactgtgatttggaggatattggcaacacaactgggcaatgggacttgtatggatccgatgcaccttcaccgtacaacccactccagagcaagttctttgagacatttgcagctccatttaccaagagaggattgttgctcaagttcctgatcttgggaggcggttccctcggtctttacctcagtgccactgcttccgatgaccttctaccgatcaagaaaggtccgcaactcccacccaagcctgggccgcgtggcaagatctaatttagttaaactctttaagcttttcattgtatgtatct

SEQ ID NO: 28526 - DNA, 365 bp, Gossypium hirsutum
  Clone ID: LIB3148-016-Q1-K1-C8
gagagatccctataccttacaagccggatatcgatatggagaagatacactttgagagatggtcttgggaggaaactatagcagttcttcatttgaaattggagaatatgaatgactttgacttgggactcaatgcccttgactatgaggtctggctatctgaggtcagcattggatctgcagaacttgaaaaatctgcaaagataggcaaaaacggaatcagttatattgagattcctatctctttcaggcctaaggatttcggatctgctctgtgggacatgattaggggaaaaggaacaggttactctatgaaaggtcacatcaacgttgacactccgtttggagctatgaaattacccatc

SEQ ID NO: 28527 - DNA, 403 bp, Gossypium hirsutum
  Clone ID: LIB3148-016-Q1-K1-C9
cccacgcgtccggggaaaaatggacgcaatttattcagttttcgatccgctaagagagttcgctaaggatagtggtcgtcttgtcaagagatgccacaagcccgatcgaaaagaatttacgaaggtggcgtttcgtacagcgatcggattcgtggttatgggattcgtagggtttttcgtcaagctcatctttatccccattaacaacattattgttggatctggttaggaagcatgagaatcagtaccaagtttcagactgtaggcaaaagatagaagttagaactggatgcaattgactgagaggtacatcatctggtttcatggactaattcaaacttaaacatgggaaattctaagtttctttatattcaatatggttgagaatatttttggtttaaca

SEQ ID NO: 28528 - DNA, 335 bp, Gossypium hirsutum
  Clone ID: LIB3148-016-Q1-K1-D1
caatatagaatttctcgttttgctatatgatattatagtgtcttatactgtgaaaattggactattgacataagttacctgaagattagtgttcagcggcttacttaattgttgttattgcataagggcaacttatggtggattggattctttattcttgagtacaatattttgtattaacagtttcttttaacttgacagcttattttctaaaaaaaaaaaaaataaaaaagagaaaaataataaaattaaaaaaccgaaaaaggatataaaaaaaaatctacagaacaagaaagagatcggaactaccacacaaaagggggggcggttttaaa

SEQ ID NO: 28529 - DNA, 336 bp, Gossypium hirsutum
  Clone ID: LIB3148-016-Q1-K1-D10
aattggtaaaatctgttcccttggccagtgatgattaaagcttaatccctggttgcgctcgtagggtactggtagtatacatacacggttctggttgattgcgaggatgaacaatataatatataaataaagcagattaggtctccttgctatggagcattttaattcggctttgtgttggaagtaaaaaatcaataatgtgatgggtgttgtaaataaatgcagtgttctggctttggactgcctcttgaaatctggaagaattgtatgtaaagctaacaatgtacctgtatgagaactggtaaaactgaatcataatttcgtctccttgctgtt

SEQ ID NO: 28530 - DNA, 358 bp, Gossypium hirsutum
  unsure (1)..(358): unsure at all n locations; Clone ID: LIB3148-016-Q1-K1-D11
actacgcgtactgtttcgtatgaagggcttttgatggaaagataaacgctgccatcactggtggggtaatgaatagtctacatgagacaccatcctaatgtctattgccaagggatganacacatataagtactatcaagtcagagcatcataacgatctccttgctatggagcattttaattctggtttgtgttggaagtaaaaaatcaataatgtgatggatgttgtaaataaatgcagtgttctggctttggactgcctcttgaaatctggaagatttgtatgtaaagctaacaatgtacctgtatgagaactggtaaaaactgcaatcataaattcggtcttgcttgcttgtta

SEQ ID NO: 28531 - DNA, 397 bp, Gossypium hirsutum
  Clone ID: LIB3148-016-Q1-K1-D12
gaaacttaaaaagattgaattagatcctcctatcatcatttcacaagctaacctgtaaattggcttatttaaccagtgagatacaacgtaatgacactcttgtgcgaaaaaaaaaaaaaaaaaaaaaaaaaaaaaaaaaaaaaaaaaaaaaaaaaacaagaaaagaaaatgatatatacagaataagaaaagaagctctactgaaattacgcacgattcttctagcaggtgaccctcacgtaacaactgatgttgtactggtgttgatataatttgcaaaccttacttttattggtccttttaaaatagaaaatggggttttattaattagatcgtctttaattaagatactcaaaatttatggaaggaaaattgtttaaaaagttattaaattttt

SEQ ID NO: 28532 - DNA, 402 bp, Gossypium hirsutum
  unsure (1)..(402): unsure at all n locations; Clone ID: LIB3148-016-Q1-K1-D3
gtggtatgtaagagtcgtgatgcttagatttagtcagtaaatgtaaaaaagacgatctagagggatgtctttggaaccgtggtagtagactcgttttgaaccctgttgtgcttttcgacattaacgtaggttataatgggagttttgactaaaaaaaaaaaaaaaaaaaaaaaaaaaaaaaaaaaaaaaaaaaaaaaaaaaaaaaaaaaaaattaaaataaatataaaaaaaaaaaaaaaaaatttataaaaaatttaattttttaatattaatattgatattttatttttgtncnaagtacttgatggacttggctttattttagttttgggattggtgctagtgctgctcttgagacggtataatacggggcttatgaatcaaagacggagtaccgatat

SEQ ID NO: 28533 - DNA, 242 bp, Gossypium hirsutum
  Clone ID: LIB3148-016-Q1-K1-D4
cccacgcgtccggaaaaaagtgctaaagttgggctgtccttggcactcaagccctaggcagtggcggaactgtttttgttgtgtcagatggaaggtgggccttaattttgattggtttgaggactttggagaaaaataatgtactttcatggattataaaaataatgttattggcaaaaaaaaaaaaaaaaaaaaaaaaaaaaaaagataaaaataaaatgaaaaaatataaaaaaataaag

SEQ ID NO: 28534 - DNA, 405 bp, Gossypium hirsutum
  Clone ID: LIB3148-016-Q1-K1-D5
gtgtttaatttgtcaaacaatcagttttacggaactttggatttttcgctcgggatgttcaaattcattgatgtatcgggtaactatttgcaaggcatagttaatgatggtgaaaggaatgctagtgttaacatgaattgcttttatcgaccaaaccagaggagtttggatgattgtaggatcttttataacgaaagagggttacattttgataattctggggcaccaccatcaactgctgcaaaatctagttctgggagccgaagatggatatttatcttggccggagtacttggtggacttggcttcattttagttttggtattggtgctagtgctgctcttgagacggtataatacggggcttatgaatcaaagacggagtaccgatataaggcctgttcgg

SEQ ID NO: 28535 - DNA, 397 bp, Gossypium hirsutum
  Clone ID: LIB3148-016-Q1-K1-D6
cttttgaggaggaacttcagtgatactggctgctttggattcggcatccaggagcacatggatcttggaatcaagtatgacccttcgaccggtatctacggtatggatttctatgttgttcttgaacgagctgggtaccgtgttggccgtcgtcgcagatgcaagtcacgtgttggtattcagcacagagttacaaaggaggatgccatgaagtggttccatgtcaaatatgaaggtgtcatccttaacaagtcccaaaatattggagcttagaagtagcagtttgagattgtttttagttttgagtacctgattttggctagtttatatttatcagatagtattttcctgaacaaatttattttatgttttagggtggaatcctaaagttttcttt

SEQ ID NO: 28536 - DNA, 378 bp, Gossypium hirsutum
  Clone ID: LIB3148-016-Q1-K1-D7
gaatattatgtgctaaatctctacctgttgtatttcttctctcgagtactaattgaggtgtggagtaccataacatccatagagcgtatcataaaagtagacattgactcgttgtcgcttctcttgaagacccagagggcattctcgaaaaacatggacactttcttcaaccgtcgaatagcatcgaggacatctatcattgacagtaaccctcctgtatctaagattagcaaaattaagaataaaatcccatgaaatgcgccagattgtaaatgtaatttatgagggcaactgtaagctacaaagtttctttgaaaattcttttaattcggtctgcaataaataatcattatggacccgattatcaatagtttatag

SEQ ID NO: 28537 - DNA, 343 bp, Gossypium hirsutum
  Clone ID: LIB3148-016-Q1-K1-D8
cagatagcccgtatgccggtggggtgtttctagtcaccattcatttccctccggattatccatttaaaccaccgaaggttgcattcaggacaaaggtatttcaccctaatattaacagcaacggtagcatttgccttgatattttaaaggaacagtggagccctgccctcaccatatccaaggtgttgctgtcaatctgctcactcctgacggatccaaatcctgatgaccctttggtgccggagattgcccacatgtacaaaacggataggaacaagtatgagacaaccgctcggagcttgacccaaaaatatgctatgggttaaagtgctactacgtatgt

SEQ ID NO: 28538 - DNA, 417 bp, Gossypium hirsutum
  unsure (1)..(417): unsure at all n locations; Clone ID: LIB3148-016-Q1-K1-D9
ggtgttaattaagctgtcggatagggctaataaaacagtttgaatgtgatgctattaagcggatttaatgtaaggtgaactttttttttcagaaacaagcacattatgattgatcttggcatcgataataacaagattaactgggctctcaaggacaaacaggagttcagagacatcattgggactgtatatcgtgaggcatggaaaggccgtggtttgaaagattactcgaaaaagtgctgctattgagtattcttccaacatgtagttgatcagaatgtaaattgtatgtagatatgtgtgtcatttgcaatgttgggtgcatgaatgtggaggataatcaaattgagaatgaacctttganttnnanaaaaaaaaaaaaaataaataaaatanaataaaaggttttttttattt

SEQ ID NO: 28539 - DNA, 259 bp, Gossypium hirsutum
  Clone ID: LIB3148-016-Q1-K1-E1
ggaaactgggttagagggttagtccccaacatgattatgttgagaaattaaagatttaagtcgaaagaaaagtggggtatcgtgagagagaaatcaattttcctctcaactctcttgaattcccatcacttgaattgtcctgtctgtttgtaaatatgcagaatgttatctgcataaaagagctttctcttggactttaatgaaagcgtaatcctcctccgccctaagattagcaaaatttagaataaaatcccatgaa

SEQ ID NO: 28540 - DNA, 293 bp, Gossypium hirsutum
  Clone ID: LIB3148-016-Q1-K1-E10
gaaaaaaaaaataaagtatatcatcaacattatttcccttagaaagttgaaaatttgaggggaaaaaaaaaaaagagaaaaaaagaaaaaaaaaaaaaaaaaaaaaaaaaaaaaaaaaaaaaaaaaaaaaaaaaaaaaaaaaaaaacaaaagaaaggggggaagaaaaaaaaaaatcaattataaataaatttaaaatgaaaagaatttggtaaaatttataatataactaaaattaaagttaaatgtttggtatttttatatctttttcttttcgaaaccactatttttttc

SEQ ID NO: 28541 - DNA, 342 bp, Gossypium hirsutum
  unsure (1)..(342): unsure at all n locations; Clone ID: LIB3148-016-Q1-K1-E11
gnagaaaaaggtatatnagggaacatcatcttagtcctcggattgctggcaccagtgccgggattctgtcggatgtacaaagggaaatcgactganagtttccagtcactgccataccaggttgcattgttcagttgcatgctatggctgtattacgcgttgattaaaaagggtgctttccttctgatcaccatcaactcttttggatgtgttgttgagactatttatatatctatgttctgggcttatgcttcaaagaatagcangatgtcggctatgaaactttttatatcaatgaacctggggctcttctctttcattctcatcctcacacacttttct

SEQ ID NO: 28542 - DNA, 114 bp, Gossypium hirsutum
  Clone ID: LIB3148-016-Q1-K1-E12
cccacgcgtccgtgttaattatagttcataatacttgtagatatttgaaatcttagcgtaggtttttcgtttgaacatatttggatttctctccgacagctgatttgatacatc

SEQ ID NO: 28543 - DNA, 316 bp, Gossypium hirsutum
  Clone ID: LIB3148-016-Q1-K1-E2
cccacgcgtccggaatgggtgaggaaacgcttgatacaatgaacctggatttgaatctgggtcctactcctgagacagggtcaggttcagtgtctaatgaaggtttgggctgggatgcttcggttaataatcggttcaataggattagagaagctgttcggcgtcgacggtggagatggcagcaggttcaatttcctgctgcaactcagaacctatctgtggaattggatcagctcatggtgaatttggacaatgcatgtacgttacaggcaggtgagggcagcatcattccagaggaaagaacgagtgatgtgcc

SEQ ID NO: 28544 - DNA, 388 bp, Gossypium hirsutum
  Clone ID: LIB3148-016-Q1-K1-E3
aattttaactggaatggaatttgttgagcatctctcactgttggggcagaagatgggatggggcagttcttctgctgctgcttcagcaacccattaaactgcttttcgaatactttgcagagcctgctattcgccagtcaagtgcatggagtcatcatgatccgaatgggagataccatatatatgaccaagtaaaaatacagatgtgagctggttacatgagcccgtaagcacttagttgggccttgcagtcttttctcttgatattaaatccccatgctggttttaatcgagactcgaaacctttgactatttagtacggtgtccaaaaattttgacaatggataggaagcatttctatttcctaataagtttctgcagttggggt

SEQ ID NO: 28545 - DNA, 402 bp, Gossypium hirsutum
  Clone ID: LIB3148-016-Q1-K1-E4
cccacgcgtccgcccacgcgtccgattattatgacttgaaggaaagaccctttttcaatggcctgtgcgaattgctcagctgtggtcctgttcttgccatggtctgggaaggagagggggtgatcaaatacggccggaaactcatcggagcaacagatcctcaaaaatcagagcctggaaccatcagaggtgatctagccgtggttgtcggaaggaatataattcatgggagtgatggtcctgagactgccaagcatgaaatcaacttgtggttcaagccacaagagttggttaactatacaagcaacgctgagaaatgggtctatggaaacaactgatgagggcatcttttttcaagttaatcagtagtagttcaggaaaatttagtcccacatcaggtgt

SEQ ID NO: 28546 - DNA, 330 bp, Gossypium hirsutum
  Clone ID: LIB3148-016-Q1-K1-E5
ctccttttgtagagagttttaccatgtctgatatagaaactgcatgtacaaccagagcaaaggcttaaaaagggggggaaaagagaatagttgtccccatcccatcccaacatgtaaaggtttgtttagagaaggaaaagaagaagaaagtaatagaaaaatgatattgggtgctgtcgttgttgttgtcaatattataaggtagctgattcatctaatttaaaagttaatacttgggatagagttgttgtgagatttatatctctgttatttttcggacatgttcaccgtattcgtcctacgtaatctttatttgttttttttcttctt

SEQ ID NO: 28547 - DNA, 398 bp, Gossypium hirsutum
  Clone ID: LIB3148-016-Q1-K1-E6
cccacgcgtccgcccacgcgtccgatttaacttaggttgatctaggccagaagcagaccggggtcaagataacgcttgcccggtttgaaacactttggaagtgctcctgtatcagtaatgaatcagagcacaatgaatcagagcacacggaaccgtcttctttttttctgttagaaaaaaatatatatacggtagactaactgatatttctatcagttaatgaaagagcccagtgcaaaaaaaaaaatgcatgttgggtctttgaaataggccgaatcattttgataataatcagttcgatctgttttaccgagaaggtctacggttcgagtccgtatagccctatattttcgaattttctattttattaaatttaaatattcattaaatttattaaa

SEQ ID NO: 28548 - DNA, 276 bp, Gossypium hirsutum
  unsure (1)..(276): unsure at all n locations; Clone ID: LIB3148-016-Q1-K1-E7
cccacacgttcgttcactctaccgttatattttaccaaccgccangcccaacccccgcctgctttaaaagaacgcggggcctcccaaaaacactccacaacccctcctaccttataaatgtatcactacaccacaaataaaatcacactgaacctaacactttttttttgttctacaaaactctatatacagatcacaaacttatttaatcatcaaatattcaaataaacccttgctcaaaacctcatgcacaatttatatataaaatacccctca

SEQ ID NO: 28549 - DNA, 321 bp, Gossypium hirsutum
  Clone ID: LIB3148-016-Q1-K1-E8
tgccattattggtttcttgaattttaaaactattcttttctcttgatttctaagacgtaaggtatttgtttggtgatgttgggtatgattaatatttgcttaatccgattaatctgattgttgtctttaaaaaaaaaaaaaaaaaaaaaaaaaaaaaaaaaaaaatttataaaaaaaaaaaaaaaaaaaaaaaaaaaaaaaaaaaaaaaaaaataatttttaaaaaaaaaaaaaaaaataaaaaataaaatatataaattaaaataaaatataattatattaaattaaaaaaataatataatttaatttaattaaaagggg

SEQ ID NO: 28550 - DNA, 323 bp, Gossypium hirsutum
  Clone ID: LIB3148-016-Q1-K1-E9
cgaatacgaagtcgacgctgacccagatcctgctattgacgacgaaggcgggccccagaggcggagcggcatggactcagaggcttaaagaggaatacagagctctaatagcctacacccagatgaacaagtccaacgataacgattggttccgtatatcggcagccaatcccgaaggtacccgttggacaggcaagtgttggtacgtccataatctccttaagtacgagtttgatctccagtttgatatccccgttacttatcccgccactgctcccgagcttgagttgcccgaactcgatggcaagactcaaaaaatgtat

SEQ ID NO: 28551 - DNA, 363 bp, Gossypium hirsutum
  Clone ID: LIB3148-016-Q1-K1-F10
cccacgcgtccgcccacgcgtccggtaattgtagattgttgatcagtttatgttctgcagcgatttcccttttgtacttgttgttatgcttacctcatttttagttcatattctaagcttttgatttgactttggattaaaaaaaaaaaaaaaaaaaaaaaaaaaaaaaaaaaaaaaaaaaaaaaaaaaaaaaaaaaaaaaaaaaaaaaaaaaaaaaaaaaaaaaaaaaaaaaaaaaaaaaaaaaaaaaaaaaaaaaaaaaaaaaaaaaaaaaaaaaaaaagggggggggcccttttaagggaccaaattttacttcccggtgtttgcaagtaaaaaatttttttttggggcccccaaaataa

SEQ ID NO: 28552 - DNA, 337 bp, Gossypium hirsutum
  Clone ID: LIB3148-016-Q1-K1-F11
cccacgcgtccgacaagcttttcctgcatcttggaacagaagtgcaactatcctatgatgcgtggctcatgcacggataatcgggaaacacaaattataaacaagtgagcatctgaagtgttaattctactcaatagaaaaagatgataatcttgctagactgccatccgtttacaccccaatttgagtagagcttaaaaacaaagcaatacacatacgtgctaaaaccaatacctagttaagattttaggatctgctttttaattttacaccatcttagtgctatctgtgtttttttttaaaaaaatgcttgcgatagcataaattattaacaata

SEQ ID NO: 28553 - DNA, 129 bp, Gossypium hirsutum
  Clone ID: LIB3148-016-Q1-K1-F12
aatcccatgaatttgtgtgtttattgttaaatactagaggtctttgatggtgtgggcggggagcttaacgcctgttcaattcatgtatcaacttatattaaatttatggcaataataagttcctttgca

SEQ ID NO: 28554 - DNA, 255 bp, Gossypium hirsutum
  Clone ID: LIB3148-016-Q1-K1-F2
acgggccgcccttttttttttttttttttttttttttttttattttttttttttttttaattggttgggtttttaaaaaaatggggtgggaaaaaaaaaaaaaaaaaaaaaaaaaaaaaaaaaaaaaataaaaatttaaaaaaatataaataaaaaaaaaaaattattaaattttaaataaattgatataataataatattaaaaaaaaaatataataaaaaaaatataaaaaagaaagtttttttttttttaag

SEQ ID NO: 28555 - DNA, 292 bp, Gossypium hirsutum
  Clone ID: LIB3148-016-Q1-K1-F3
aaatctttagattcggtctgtaataaataactattatgatccatgctagcacattgtaatagtgtataggcactccgtactgagaaaactcccgaaggttcctctttccatacttggaaatcttcatgcttcgcttctgccaaagggatctgtaaaatctttttggcagtttccgtatgaaaagtactgttcactacaaaaaaaaaaaaaaaaaaaaaaaaaaaacaataaaaaaaaaaaaaactaacatatataaatgcaaaacaaaggggaagcgcctactaaaaggggg

SEQ ID NO: 28556 - DNA, 89 bp, Gossypium hirsutum
  Clone ID: LIB3148-016-Q1-K1-F4
acggtttctttttattgcttagtttttatctgtttaaatgcagaagaaaatcaaaaaccaagtggagtgacagttgaatgttgtgagag

SEQ ID NO: 28557 - DNA, 369 bp, Gossypium hirsutum
  Clone ID: LIB3148-016-Q1-K1-F5
tcttcatcctggttcagtcactgtcaatcttggttcttctggtttcatggcttactctctggataaacaaaacgcacttctgcccaggctctttgcagttgtggatgacattttctgcttgtttcaaggccacattgagaatgttgctgttcttaagcaacaatatgggttgaacaaaactgcaaatgagggtatcattgttattgaagcttacaggacgcttcgagacagaggtccataccctcctgaccaggttgtaagagatatccaagggaagtttgctttcattatctacgatagctcttcaaaagctacgtttatagctgcggatgctgatggaagtgtacctttttttttggggtactgatg

SEQ ID NO: 28558 - DNA, 286 bp, Gossypium hirsutum
  unsure (1)..(286): unsure at all n locations; Clone ID: LIB3148-016-Q1-K1-F6
cgcagcacgagtaagtcttcaggatttagtttaaagataccatgttatagaatcagcaacgtgtaaacagaaggcggatcatgcgatgactattacganactacattacattttatgattgttaaactcacattgacaatgttgctgttcttaaccaacaatatatgttaaacaaaactgcaaatgacggtatcattgttattgaagcttacaggacgcttagaaacagaagttcataccctcctgaccaggttgtaagagatatccaagggaagtttgctttcat

SEQ ID NO: 28559 - DNA, 389 bp, Gossypium hirsutum
  Clone ID: LIB3148-016-Q1-K1-F7
tgaaaagatgggatcggattcttttcctaatcatcctagtccgtatggtatgaaaatttccgatgaacaacaaaagccttggctgcatgatgatgatagccatacctataaggcccttaagaatgaaaacttatctagaacttcaaatttgattcgagggtacaatgagtcctcgagtactgagagaggatcatctgcaaggatgggaaaggtggagaaacttcgtggagagtggaagacaaaaaaggagtgccctgttacagtaaaaaccgatctgaaaaacaaattgagagtctccaaacaagtcaatgttcaatatcctcaacaagaatttgcagcatatgcaccacatgctagattgcctttgtgacaaatcagactaaaggatc

SEQ ID NO: 28560 - DNA, 206 bp, Gossypium hirsutum
  Clone ID: LIB3148-016-Q1-K1-F8
tgttcatccaaaattatggagaggtttcaattataaattcaagccagtggactatgtgcagattgaacgaaagcagcataataaggtgagaacattggaagagcacaaaaagttggtggagaagatcatataacgagacacataacgtagaaagaggatagaggcttctgtccttcattattgatgccgaaaaattgtgtctgatt

SEQ ID NO: 28561 - DNA, 344 bp, Gossypium hirsutum
  Clone ID: LIB3148-016-Q1-K1-F9
gtggacttgttgacacagtcaaggaaggatttacagggttccaaatgggagctttcaatgttgaatgtgatgaagtggatccgagtgatgtgattaaggtggtaaaaactgtcaagagagctcttgcaacatatgggactcaagcactgaaagaaatgatccagaattgtatggcacaagatttttcatggaagggaccatcaaggttgtgggagaagatgttgttgagcctcggggtggctggcagtgaacctggcattgaaggagaggaggttgctcctcttgccaaggaaaatgttgccacaccctgagcataatcagaaggcaactatggataaagctta

SEQ ID NO: 28562 - DNA, 398 bp, Gossypium hirsutum
  Clone ID: LIB3148-016-Q1-K1-G1
cttgattgggaggtaggaaagcatggcataattattgagtttgttgatgattataatacaaggcgaagtgccacatatttacctgaggtgccggcacatgaaggttggactagagtggaggcaattgactcacttatccggaaggcaggcttcagtggccccataaccgagtcgctcaggaagcatataaaactgacccgttaccaaagcacattatttaccatgcactacagtgactatgcctcccatgttaaggcaaccaggggggcagcgcctactattgctggcgctaagctcggaaaccactgattcttccaacagctttttaccagaaaagaaggtaaagctgcttttgctaaaatataatgacattatattaaaacaaaagaaaaatgggt

SEQ ID NO: 28563 - DNA, 142 bp, Gossypium hirsutum
  Clone ID: LIB3148-016-Q1-K1-G10
cccacgcgtccggaaattgaaggagagaaatggcatatagctgaaaggacgaatgggaagtggtggagacagggcaggttgcgtgccaatgtggatatggatcgtatcaaagctcatatggaagatggggttttgaggatca

SEQ ID NO: 28564 - DNA, 272 bp, Gossypium hirsutum
  Clone ID: LIB3148-016-Q1-K1-G11
gaaaaattccgaaggtcaaatgaagaagaaaaaatggtggacttgcatggatctcacccttatatatgtctgtgtgtgtggcagtaattgtagtacttaagaatagccattaatgtatttaggaagaggaagaagagcttaatgtgtgaacattgtttcctcttttgtttttgtttttaattgaggaaggaatgttattgtaatatatatatatataattatgtagcatatgaagtgtttttattttgagaaaatcaatagaacaataatgc

SEQ ID NO: 28565 - DNA, 430 bp, Gossypium hirsutum
  unsure (1)..(430): unsure at all n locations; Clone ID: LIB3148-016-Q1-K1-G12
cggacgcgtgggttatttttcaactactgctactagctgttacgaaccagatttcagcttggtcggctaaagctccctaaccaacctccttgaaaaggggcattacgggcagattattaagggtatttgtttcatggtcatggaaaggctgaactcaaatctgtaccttcagaactgttacataatgaaagagaatgagaggctgaagaagaaagcacaggttctcaaccaggagaatcaagcccttttatctgagctgaaacagaaactcttaaaggccaacaacaactcanagggaaaaaattcagcaaacactattcctgacctcaatctcagctccacttctaacccaaacccttttattctagcaaaacctgatccagcaggatacttatcatgacccccactttggcttttcttccttttcttt

SEQ ID NO: 28566 - DNA, 222 bp, Gossypium hirsutum
  Clone ID: LIB3148-016-Q1-K1-G2
cccacgcgtgcgcccacgcgtccgcccactcgtacgtccacgcgtacgcccacgcgtacgggcacgcgtccgcgcacgcgtgcgcgcacgcgtccgaaaaaaaaaaaaaaaaaaaaaaaaagaaaaagaaaaaaaaaaaaaaaaaaacaataaaaaatagaaaaagaaaaagcaagacaatcaagaagaatatgaaaaatgaaaaattaccggatcagcttg

SEQ ID NO: 28567 - DNA, 404 bp, Gossypium hirsutum
  Clone ID: LIB3148-016-Q1-K1-G3
cccacgcgtccgcggacgcgtggggggaaaaacccgatgaggacactatcgagaacttgatctcgagtggagaaagcgagagttttctccaaagggctattcaagaacaaggaaggggtcagattatggacaccatttctgaaatacaagaaaggcatgatgctgttaaggagatagagaagaacctgattgaactccatcagatattcttggacatggcggcactcgttgaagctcaaggtcaacaactcaacgacatcgaaagccacgttgcgcatgcgagctccttttgtagaagagggaccgaacaacttcaagaagctagggaacatcaaaagaactccaagaaatggatgtgtatagcaatacttgctgcaattttgctcattatagtcatcctcata

SEQ ID NO: 28568 - DNA, 317 bp, Gossypium hirsutum
  Clone ID: LIB3148-016-Q1-K1-G4
cccacgcgtccgtgcaatttcttcacatgtttgaggtcgacggtgacggcggcatcaacggtgacgatgaggatggggatatatcatgatcgttgaatagtagctgttcaatcagttgggcaacttaagactcttttggcagttcatcaagaatggggatcattgtggctcaatccaagcgtataaatgaccggataatagttaagttattttcagcatttgcctgtactatttagtatttatgcctgaacttgagctttcagaaatgaaagtgaaaacattagtggttgaaactaatattattagagctctttttg

SEQ ID NO: 28569 - DNA, 343 bp, Gossypium hirsutum
  unsure (1)..(343): unsure at all n locations; Clone ID: LIB3148-016-Q1-K1-G5
gtgagttttgggcaaggcaatatcttgggcttcaattttacttgagagtttatacacctgtgaactcactcagggatgaatatctcattccaaagaatgctttgctttgtggcagagcccaaggaagaagcacaaggcctctttgaaacatttccagtagccgaaattgttgagaatcaaccattagtcaattataaaatatgcctcaattcttttcattttttgtttcaccagaatctgtatttggttttgtatctaaagaaatgaaaataattgtattaaattagaacattctttttgctgaggaaataatacaaggctcaattttctgtgtnaaaataaa

SEQ ID NO: 28570 - DNA, 403 bp, Gossypium hirsutum
  Clone ID: LIB3148-016-Q1-K1-G6
gctgataatattttgaagaaaacatgacaactgctgctagaccgacatggcaacctgccgaaggtgggaatgaacagggtggcactcgcattttcggcccatctcagaagtattcgtcgagggaccttgctgctcatactactctaaagcctagaaaggatgggcaggacacccaggatgagttgcagaagagaaacctccgcaatgagcttgaagagcgtgaacggaggcatttctcatcgagggacaagtcctataatgatgacagagatcataggaagggaaaccatcttcttttagaaggggcaaaaagggaggctgaagaccgaattgttccgcgcagtgttgatgctgatgattctgatgtggaagtcaacagtgacaatgaaagtgatgacgacga

SEQ ID NO: 28571 - DNA, 244 bp, Gossypium hirsutum
  Clone ID: LIB3148-016-Q1-K1-G7
gtcctggcaatcctttgttgagcttcagcataccccgggacacttattaccaactacatgggtgactttatttttagagttgatgttgcccaactatgcacacaatcttaggccgatctcggcgtgtgtttgaacatgaaacctacgaatatgactactaccttgatgacaacatctatgtatactacaatgtgtgatgcatctataatgtagattgtacatttcttgataatcgtgagagagt

SEQ ID NO: 28572 - DNA, 383 bp, Gossypium hirsutum
  Clone ID: LIB3148-016-Q1-K1-G8
gatgaatacaggaaggtgatgaaagaattttcattgaaattggagaaactagcagagaaggtgctggacttgggctgtgagaaccttggtctagaaaaaggatatctgaaaaaggctttctatggggcaaaaggtcccacctttggcaccaaagttagcaactacccaccatgtcccaccccagacaaaatcaagggactcatagcccacacggacgccggtggcatcatattgctgttccaagacccccaagtgggcggccttcagcttcttaaagacggggaatgggtggatgttcctcccttgcgccactccatcgtggtcaacctgggagaccagctggaggtgatcaccaacgagcaatacaaaagcgtggagcacac

SEQ ID NO: 28573 - DNA, 419 bp, Gossypium hirsutum
  Clone ID: LIB3148-016-Q1-K1-G9
gtgaagggtaatgtatttaagaacaagcgtgtcttgatggaaagcatccacaagtccaaggctgagaaggcaagagagaagacactctcagatcagtttgaggccaagcgagctaagaacaaggcgagcagggagagaaagatggccagaagggaagaacgccttgcacagggacctggtgtgaaagcagcacctgcagctgcaccgcaacaggccgagggagttaagaagtcaaagaagtgaatgaagtaatgttttgtttttctctgtaggagtttgaatgcaaaactcggttttcattttgtgttttagatctttagttttatataattatagaattttgatgaaaccactgagctgttataagaaatggaagatgtttgtggtattgtttattagtataatgtactattatgttg

SEQ ID NO: 28574 - DNA, 342 bp, Gossypium hirsutum
  Clone ID: LIB3148-016-Q1-K1-H10
aaaggttcttgtcaatttattcatagaaactcatttctacttctacaaagtgaaaagagcggccgctaaatgagctctcaagagtagttgcttttcattaaatactaataataccaaccctggatttgctgtcattattagtaccgggatcaatcctaaggcaaaatcgtattaccttttcgatggttatgcccatctttcatctggtcttgcttgtggccttgccggtctttctgctggaatggctattggaattgttggtgatgccggtggcagagctaatgcacaacaaccaaaactttttgttggaatgatccttattctcatctttgcccaaacttt

SEQ ID NO: 28575 - DNA, 416 bp, Gossypium hirsutum
  unsure (1)..(416): unsure at all n locations; Clone ID: LIB3148-016-Q1-K1-H11
caagaccttcgaaactaagcccccgaagtcaagcaaccatcgaatggacaatccctccatctgcctcactaggagtttacagaataagacattttggtgctgcgaaacggcttatgggatcgattcagcatttcacgggtacatccagtgctttcgtggtagcatgatgaaatagatcaaactatatgtatatacgtatggcagcttagatgtttcatttttgttgcgctttatatgtaacgagttgccattagattataacacgtcgaatctgtaatgctgaaactcttctagctcatttgatttccacttcaaaacatgaaatttccgatgaataaaaatctgtctttgatggttcanannaaaaaaaaaaaanaaaaaaaaaaaaaaaaaaaaaaaaggggccggccgtttta

SEQ ID NO: 28576 - DNA, 377 bp, Gossypium hirsutum
  Clone ID: LIB3148-016-Q1-K1-H12
cccacgcgtccggcactgtccctcttttcggatcaattcatagttcagacactcaacgtagcattcctcgtctacctcttgggcatcaccctgaccctttgtgctcttgcggtgctagaaatcaagtggtccggcattgaactggaagagtggtggaggaatgaacagttctggttgattggaggcaccagtgctcatcttgctgcagtgctccaggggctattaaaaggtgatgccggtatcgaaatatcattcaccctgacatcaaaatccgctggtgatgatgtggataatgattttgctgatctctacatcttcaaatggccatggttcatgatcccccacctcaccatcatattggttaattggatggccat

SEQ ID NO: 28577 - DNA, 263 bp, Gossypium hirsutum
  Clone ID: LIB3148-016-Q1-K1-H2
accgtggtggccggtagcagagctctagattaaaaaaaaaacctcctactgtttcatagttcagtgtttgtttgggaaggtttcgtttcacttaaacgtagtagctacaattgaggttttagtgtttgaggccacagggccattgaagaaccagtaaatgtagtaatttttgtgctcatgtaaaagaaatggcttatatcctagaaaatatagtgttaacactgttataaaattacactatgttgagataattttattttatt

SEQ ID NO: 28578 - DNA, 383 bp, Gossypium hirsutum
  Clone ID: LIB3148-016-Q1-K1-H3
cccacgcgtccggtgaatcatatggccagcactgtttccctcaagcttgcatgtggtgtggtcttgtgcttggttgtgggtgcacccctggctgaaggggccataagttgtggccaagtcatatcagccttggcaccctgcattccttacgtgagaaacaacggtgctggtggcgtgcctgcatcttgctgcaatgggatcagatctctcaacgaggctgcccaatcaactccagagcgccaatcagcttgcaactgcgtcaaagctttagctgccagcatttctggcaataactatgaccttacgaacaaactcccaggcatgtgtggggtgcacagccttttcaagatcagccccaacactaactgcaaaagtgtcaagtg

SEQ ID NO: 28579 - DNA, 355 bp, Gossypium hirsutum
  Clone ID: LIB3148-016-Q1-K1-H4
gtgaggaactacatgtttgggattgaacaaaatggtctttggttgcaaactgaaactatcggaagtgcttgtggtaaacggattggtgttaaccagaaccagttgaccaccagaagaattcgcggaagaaccaaaaataaaggctttctggcactctggtaaaatctctctctgtgtgggtagagatatttatacggccaataagagataatatatgtgggggggtgcatatggatgcacacaacgcggggatatatttggttatggggccccacacagattatagaaactctgatattgtgaaagagcatatagtaggctctctgaaagtttaaagagagctgactctcatact

SEQ ID NO: 28580 - DNA, 176 bp, Gossypium hirsutum
  unsure (1)..(176): unsure at all n locations; Clone ID: LIB3148-016-Q1-K1-H5
gaaggcttctagttatggtctacaaatgttgttgtagttgttcggggttatggtctagttgaaaccgatgggttcatgtacaataaggatccaaagacatgtaagatgcaaatctgctgtacacaacaaagacaggtgtaaaatttttatgttttaatgcttgtaacaatacanaa

SEQ ID NO: 28581 - DNA, 140 bp, Gossypium hirsutum
  Clone ID: LIB3148-016-Q1-K1-H7
cccacgcgtccgattttttatcttttagtttcaaaatcaagctatgccattttgtttttatgtttaataaattatttacacgggaaaaaaaaaaaaaaaaaaaaaaaaaaaaaaaaaaaaaaaaaaaaaaaagggcggac

SEQ ID NO: 28582 - DNA, 153 bp, Gossypium hirsutum
  Clone ID: LIB3148-016-Q1-K1-H8
ctttagtggtcgcaatgtgggcaaacaagtggttgtaatcgccccgcaatgattttaatggaatatttgatacattgataatatataatttgatacattgaactatatttagacacattatcaataaataaattcataatatgaatttatgtt

SEQ ID NO: 28583 - DNA, 388 bp, Gossypium hirsutum
  unsure (1)..(388): unsure at all n locations; Clone ID: LIB3148-016-Q1-K1-H9
tatgcatcggatccacaagtagtgtatgttgtgaaaggaagtggtgaagtacaaattgtgggtcttcaaggcaagcttgtgttgaacactaaagttgagaccggccaattgtttgtggtgccaaaattgttcatggttgccatttctgctgatgaaaatggcttggaactgatctcaatcgtaacatctactagagctataatgggagaaatggggagtaaaaattcggttttcaatacaagtccttcaattctgcaagtgagccttaatgtgagctcagagctaaatcaacaattcattgagattatggaaactggcaccattattgttaccccatgaacttgtactangtcctatgattgtgtcattttaggggttcaataaaaat

SEQ ID NO: 28584 - DNA, 272 bp, Gossypium hirsutum
  Clone ID: LIB3148-017-Q1-K1-A1
cccacgcgtccgcccacgcgtccgcttaaatatatcataatgttgcttttctttatacccgcccccctttttttgtgtcttgcccgtgttggtagttgatagctcactgtagctctggcagctatgttatcagaatggttttatgtggagacgttcttactagggaatggtattgttttagtattaattattattccagtggagctttgagctgcagcagcatgttgggggcgttaaatattacacaaaggaaaggaaaaactgtttttatg

SEQ ID NO: 28585 - DNA, 399 bp, Gossypium hirsutum
  Clone ID: LIB3148-017-Q1-K1-A10
gatcttacatggaccgagatccagagcttgaaacctaaaatgtatagccgttttgaacaaaactctgggttagagagaaaccctgaggccaaaaacaaaggaaaactcatctcacttggtgactttttagggtttgctaaaacaaaaccagttggagttttgatcaacatagaaaatgctcgttacttggcatcgaagatgcatcttgacgttgtagatgcagtgaccaaaaccttgaaaaatgcaagcttagaaaagaagcaagtcatgattcaatcagacgacagtgcggtgctatcgaagtttaaaggtgagtctggttacaaaagattgctccggttcgaggagatcagcggggtatctaaacaggcagcggaagaggtcaagaaatacgctgat

SEQ ID NO: 28586 - DNA, 70 bp, Gossypium hirsutum
  Clone ID: LIB3148-017-Q1-K1-A12
gtttttcattaagtttatgaactgattttcatatttaaaaaaaaaaaaaaaaaaaaaaaaggggaggaaa

SEQ ID NO: 28587 - DNA, 433 bp, Gossypium hirsutum
  Clone ID: LIB3148-017-Q1-K1-A2
cccacgcgtccgaaaaacttttaaaaaatcttgtagatatcagcagtagagttgatgtagttgatgttctgtaagtagtcagtagcaagaactctataaccacttttcaccgaatactccccagacccctcatacttccacaccagtaaatcctccgttgaagtctcaaaaatcgggatggaaataatacgttgtgcctgatcttcattcacaaggctataaataagtcccttattccaggcaaccaaggatcattccaaatgtttaccataacaccgttgtcgattctctacaaaactccatcagcaatcaaatcacaagcgttgcaaatgctctgcctagtaaacgaaggaatgagaagatggttactgaaaaaccaatgagtacccgagatcactatttgcatattaatctcatggaaaaactgaaaaag

SEQ ID NO: 28588 - DNA, 326 bp, Gossypium hirsutum
  Clone ID: LIB3148-017-Q1-K1-A3
gggtgacttagggtttgtcttggtttaatattctgggcctatcgggccttgtaaatttgggtttaagttaaaattgggttttgggtcatggtttagttattggttttgggctgatggggttatgtagctgggcttgttgtttgggttttgggtcaaagcctgtaaatggactgtggttattttactatttatttatttattttatatttatatataggtttggggtttttaaaaaaaaaaagacttgtaatcaatgaatggaaagagcgaagggaaaaatacctggcacgtcagcaagttgaagcggtagattcaacatgaagcga

SEQ ID NO: 28589 - DNA, 413 bp, Gossypium hirsutum
  Clone ID: LIB3148-017-Q1-K1-A4
catgaacaacaccgtctcttttgctctgcttcactttgcattttgcttcactttagtttcattcactcctatttctgccctggaattgcatggaactggtgccaacatggtcgaaacaacttgccaaaagacacccttttacaatctatgtgtctcggctcttaaatccgaccctcgaagttccggtgcaaacgtagcggggctagcgcaaatcggaacagataaactgaaggccaaagccaccgcaacgctgcggcagatcacagcgctgcttaaagtggccaaagatccgaagctgaaaatggccttgcgtgactgtgctgattattacaacgccattgttaaatacgatatcccggtagctgtagaagctgtcacgaaaggcgacccaaagttcggtgtcgagggggcga

SEQ ID NO: 28590 - DNA, 416 bp, Gossypium hirsutum
  Clone ID: LIB3148-017-Q1-K1-A5
gttggctgaaggacgtctgatgaacttgggttgtgccactggacacccaagttttgtcatgtcctgctcgttcactaaccaggtgattgcccagctcgagctatggaaggagaaggcaactggaaaatatgagaagaaggtttacgtattgccaaagcacctcgacgagaaagttgctgcacttcacctcggcaagctcggagctaagctcactaagctcactaaagatcaagctgattacattagtgtgcctgttgaaggtccttacaagccttctcattacaggtactgagggggacagttaatgagtttttatcgagaaagaaaaagcattcggatgggaaaatgatgtgggatttggtctcttcttgtttgaagatgaccaaatggtttgaaataaaagtgttttgagggat

SEQ ID NO: 28591 - DNA, 415 bp, Gossypium hirsutum
  unsure (1)..(415): unsure at all n locations; Clone ID: LIB3148-017-Q1-K1-A6
gtaaaattaatgaaaaaaatccttttagaggcatgctccccaattagttgtttgctattgtttttcaatttttatctaggaagaagttacagcaggggagatcttatgaatgaaacattcatagtgaatcatttgcattcattcaacgagaaagatactgtacgtgaaatctctcctgcatagattttaccaagtgcaaagtctctatccttgccaagtcgaagctttagctttttcagtctcttctttcattcatgtgcatggttggaaaagaaagctgaagagtagggaactttgaaagacatgttgctgctggaagtttgttgcattgcagaccaatgctcaacacttcaaccgggaattgttagagacgatgaatgcgtcaggcanagtttttatgactcacactatagct

SEQ ID NO: 28592 - DNA, 145 bp, Gossypium hirsutum
  Clone ID: LIB3148-017-Q1-K1-A7
accggaaggccgacccacgcgtacgcccacgcgtccgcccacgcgtccggtttaaaaagttttgaataagtgatggaaatatgatatattgattgaattgtattacatctgggtattaataatacaaaaaaaaaaaattgagttc

SEQ ID NO: 28593 - DNA, 383 bp, Gossypium hirsutum
  unsure (1)..(383): unsure at all n locations; Clone ID: LIB3148-017-Q1-K1-A8
gccgaccgcgtacaatccctgctaaacttgagaatgctgatgccatactacagaacttttgattatgnccttctcttttacnagtttgatgaacaagagggatcanagtgactattagaaagaattttgcgggttgtatttctagatatggggcggcctagccctgcattggacaaacttaagcgtcagttagctgaggccgaggctgctttcgaagcacgcaagaaacctgcccctgatacaggtccccgtgttgttggcgaaggtcttgtaatcgatgaatggaaagagcgaagggaaaaatacctggcacgtcagcaagttgaagcggtagattcaacatgaagcgatgtttgatcttgctgtgaatgctttctttcttc

SEQ ID NO: 28594 - DNA, 174 bp, Gossypium hirsutum
  Clone ID: LIB3148-017-Q1-K1-A9
atatataaataatgaactccctactgacttctttctctagactgggcttgaagattgggttttgggacaaagcctgtaaatggactgtggttattttactatttatttatttattttatatttatatataggtttggggtttttaaaaaaaaaaaaaaaataatttcaaaataa

SEQ ID NO: 28595 - DNA, 359 bp, Gossypium hirsutum
  Clone ID: LIB3148-017-Q1-K1-B1
acggttatatgccgcccgatacggttgtttttattgatgtaccccacttccacttgctatatagaaattgaagtattgaaggtgagtttgccaaaaaaaaaaaaaaaaataaaaaaaaaaaaaaaaaaaaaaaaaagagaaaataaagaaaaaagaaacaaaagaaaatttgcttataaatagacgtgctaaaataaacaataagggcaattgaataaaaaagaaagtgttggacaaacacaaaaatgtgaaataggaaaaaacctgggttgaccattataaaattcccttgcctaacaaccaccctatgtgcagtttgatttaatagcaaataggcctgaaaataaacgccctttcca

SEQ ID NO: 28596 - DNA, 357 bp, Gossypium hirsutum
  Clone ID: LIB3148-017-Q1-K1-B10
gggcggacccaggcgtccgcccacgcgtccgcccacgcgtccgcccacgttttttgaaacaccgtcctgtattcaaagtatgcggggaatgacttcaagggcaatgatggtagtaactatattgctctgagagcatctgatgtaatggctgtgctctcttagttgtgtaataaggaacggtgttagatattgaggttaaaactggaacgattggatgagtctatactaaacatacaaagactgggatgacttattcgttagagaaagcgggtgtggcatttggtagcagtatgcagtgtttgatgcaaaggttcttagtaagaatccaaagggaccattaggggggacgatgaagga

SEQ ID NO: 28597 - DNA, 398 bp, Gossypium hirsutum
  Clone ID: LIB3148-017-Q1-K1-B11
cccacgcgtccgcccacgcgtccgaaactttttagttctcaactctctcaaattcaccatggctgacaagtgtggcaactgcgattgcgctgacaagagccagtgtgtgaagaaaggaaacagcttggtcattgagactgaggagagctacatcagcaccgtagtggtcgagcctctggcagagaacgatggcaagtgcaagtgcggaactagctgcagctgcacaaactgcacatgtggcagtcactaagcagacatatagaatgatgaagtttgggacctaaaaagaataaaagttgggttgaaataattgtgtcttttgttgtagttggagtgtgttttcttgtctatctgtccgatgatggtctatgtctctcattttatacaatgatggaatg

SEQ ID NO: 28598 - DNA, 362 bp, Gossypium hirsutum
  unsure (1)..(362): unsure at all n locations; Clone ID: LIB3148-017-Q1-K1-B12
cccacgcgtccggcactttggagaggtttgtttatcacattattcctataggatcagaggatggtgtttttgttagcataatttgagtcgtttctatgttgcacagtatagtgatgaaatgggtagtgagttggtactggaatcaattcttccttcgcctgtcttcggatgaaatcttcaactattccaactacctatgaattgagtattctttcaattgaaaagtgaaagtgagacttgatccgttggacgcaatattacaagtgttatattaggaattgggagatttaattnnaaaaaaaaaaaaaaaaaaaaaaaaaaaaaaaaaaaaaaataaattttaataaaataattaaaattaa

SEQ ID NO: 28599 - DNA, 430 bp, Gossypium hirsutum
  Clone ID: LIB3148-017-Q1-K1-B3
cccacgcgtccggctgaaaaggagagttccaccagctgttccaggaatcatgtttttgtctggaggacagtcggagatggaagccacattgaacttgcatgcaatgaatcagagccccaacccatggcacgtttctttctcttacgcacgtgcattgcagaacactgtgcttaagacatggcaaggacgtccagagaatgttgaagctgcacagaaggctcttttggtgcgtgcaaaggcaaactctctggctcaactcggaaaatactctgccgagggtgaaagtgaagaagccaagaaaggaatgtttgttaagggctatacctattaaggcgtaagacactgtaatatctggtttttgggcatctatggctttttgtgcgaggattattacttgctgttagataagttttttacatattattgttat

SEQ ID NO: 28600 - DNA, 365 bp, Gossypium hirsutum
  Clone ID: LIB3148-017-Q1-K1-B4
gtcatcagcaagaaaattgggaacttgtggagcaatctgacagaggccgagaaacaggtttatcaggagaaagggatgaaggatgagagatacggaactgaaatgttggaatatcgatcttcccatgattcgacacctcaatagcatctgatgagttggtcgttaggaactaaatgatggggttgtcaaccctccctcgatgtttgtttgtttgttgttgttgctcaacttttcccttgaaaactttctgtatgaacagattatctgaaccctgcccctttgctcagactttgggtgatcagatggaagatctttgtaaaatgtggttatattaatctatcagaatgctagaagcttagaacagt

SEQ ID NO: 28601 - DNA, 390 bp, Gossypium hirsutum
  Clone ID: LIB3148-017-Q1-K1-B5
cccacgcgtccggctcaggcacttcggtttgagatcaaccgggcttttgctgtcctacgggatattgcatcaggaagagaactcaagaagttcctatctgtgatcgccggcttatgggtcttgtctattgtcggaagttggtgcaacttcttaacactgttttacatagtcttcgtacttcttcacacggtacccgtgctatacgagaaatacgaggacaaggtggacccatttgctgagaaagcaatgcatgagattaagaagcagtatgcagtgtttgatgcaaaggttctaagtaagattccaaggggaccattaaaggagaaaaagaaggattagatttaccggccaagatgtgcttttgctaggtttctgacatacatttggtag

SEQ ID NO: 28602 - DNA, 275 bp, Gossypium hirsutum
  Clone ID: LIB3148-017-Q1-K1-B6
gtgaggaactagggggtcttccatgattacttatggtttaattttctactacattctgtcggttcccaaaactgagctgatgcttgggaacaattttatgtcattattttatcatttgttgttatttttgtttgtgccatgttcctgttctgaaataaactccaatgtgtgccttctagaaatggtttctcttagtatttcttggaacttgatctgaattcttgatgagtcttgatctcagctcaatattgtttaatggattcattttgtctctc

SEQ ID NO: 28603 - DNA, 285 bp, Gossypium hirsutum
  Clone ID: LIB3148-017-Q1-K1-B7
cggacgcgtgggcttttatgtatcttattattattatttacttaattctcattggttgggacacgtcacttatgagttttaagtaattttattggttaggttattatttatttattttcttagataattttaaagagttttattagggttcaattactcttgtattttgcttataaataggcttgctttctacacattgagggggtggaataaaaagagagtatttgttttcttccaaatttgtgtgaggcaaattttttatagtagagtgattcttctcttgct

SEQ ID NO: 28604 - DNA, 189 bp, Gossypium hirsutum
  unsure (1)..(189): unsure at all n locations; Clone ID: LIB3148-017-Q1-K1-B8
acttgcatggatctcacccttatatatgtctgtgtgtgtggcagtaattgtagtacttaagaatagccattaatgtatttaggaagaggaagaanagcttaatgtgtgatcattgtttcctcttttgtttttgtttttaattgaggaaggaatgttattgtaatatatatatatataattatgtagccc

SEQ ID NO: 28605 - DNA, 264 bp, Gossypium hirsutum
  Clone ID: LIB3148-017-Q1-K1-B9
acccacccgttcgggctgttgccatcttttcaaacgataaagatagttttcatcttaactgcccctttctattcaccgcggaattttttgtgcggcttgtacatttcaaaaccaagaatccctccatggggggtattgtattatttgatctgcccaatggcctggacaggttatggattgaacaccttccaatatggacattaccagcgctccataaaaataccaggggttaaacctgacccttctattaaatggtacttaaaa

SEQ ID NO: 28606 - DNA, 429 bp, Gossypium hirsutum
  unsure (1)..(429): unsure at all n locations; Clone ID: LIB3148-017-Q1-K1-C1
cccacgcgtccggcaaaagaaagagacgatgggagtgacgaaggaacaagttgagtcttcgttgacttcaaaattgaagccttctcatctggaagtaatcgatacatctggagggtgcggtgcaagttttgttattgagattgtatcggagcaatttgaagggaagagactcctggaaaggcaccgaattgtgaatgctgctctcgaggaggagatgaagcaaatccatgccctgtctataaagaaagctctgaccccggagcagtggaaacaacagcaagaggctgaaaaatctaaaccagatgcttagagagacactcaaaactataatttagacatttgaataagagttcatgagaactcagctggaatactaagccatcatttcacctttagcatacattntagaaccatacttcgtaattactg

SEQ ID NO: 28607 - DNA, 514 bp, Gossypium hirsutum
  unsure (1)..(514): unsure at all n locations; Clone ID: LIB3148-017-Q1-K1-C10
cccacccgtccgaacacgtttaactccctttataatgcaacaagatagttgcgaccccaataaaanggccactcgtattttctaaactgagagggtggccatccaaaanactaacctatataactaaaatcttattatataacaaattttccaatcatagcaaccggagaatttttttttttttttttttttagaatttcttaaaatatatattttttctttaatactttttatatattatatttttcctatattctaacaccttttttattattttattctatacttttattattcatttatttaacatattttctaatttattataatcaattatattttttttttttttctttcacatattattttttttctattttttctaaatttacaatattattttttatttctttctttttattattttttttttctcttcattaatactctacttcattatttttaattattattttttattctttatattatatctcattttttctattatttt

SEQ ID NO: 28608 - DNA, 421 bp, Gossypium hirsutum
  Clone ID: LIB3148-017-Q1-K1-C11
gtccggttgggaaaagagggtccttgctatatggtcttcttggaactggtaaatccagtttggttgccgccatggctaattatctcaaatttgatatatatgatttggggctcaccagtgtacgctctgatgctgagttaaggcggacactgctatccactaccaatcgctctatactgttgattgaagacatagattgcagttctgaggttcttgaacgacaaatgagaaacaaaaacaaaaagctaccagatagaactgggcagttgacactatctggtatattgaactgcatcgatggcctgtggtcaagctgtggggatgagagaatcattgtgtttacaaccaactataaggatcggatagaccctgctctgttacggcctggtcgaatggacttgcacatcaacatgtcctattg

SEQ ID NO: 28609 - DNA, 418 bp, Gossypium hirsutum
  Clone ID: LIB3148-017-Q1-K1-C2
gccacgcgtccggctggaacaaacataattgcactgctgagtgttgctgatggatgaccgcatgttggtggacactatgagacatggaatacagggatcctacgtccagatgcactgcatgacttgaccaacgcaaatgggacctgtgcaggcaaaaatggacttaccagggtggtcttaaaggagaggccatggatctggtctcaccaaatggattttgctcaactgagtggatgacggcatcattggttgcacaaaaaccagagccattaagatggcataaggcttattttaatgcacctgacggtgatgagccgatagctatggacatggagagcatgggaaaaggtcaaatctggattaatgggcagagcataagcagatattggacagcatatgctcatggtgactgcaatgg

SEQ ID NO: 28610 - DNA, 424 bp, Gossypium hirsutum
  Clone ID: LIB3148-017-Q1-K1-C3
aaaaaagtctgcattgctcattcgtccctttattgaaaacccaagacacaatcggaaaatgtggttggtatcttcttctccttgatggcatctcatgcagtgatcctcgatcgtcactcttctcagctttggattagaaaaagtgggcatgtaattccatgaaattttccacactgtaattttgattttcgagggcatgtttaggcgccacaatttcctgtaaaagtttttagtctcggcctgtgcgtaattactaggattcattgtagtatcctgtaatagtttataggtacttcttactgaaaagttcccagatggctctcctctccacacctgaaagtcttcatgggtagactttgttagcggaatttacagtattttcctagcaatatctgtaggaaatgtacggactatcaaatcactt

SEQ ID NO: 28611 - DNA, 235 bp, Gossypium hirsutum
  Clone ID: LIB3148-017-Q1-K1-C4
aattaaaaaagaaaaaaaagaaacaaaaagcaaaagcaaagtctctccagagagaaaacaccagagagtagccaagaaagcgaagttccttgataaaaagcttttatttctatcagaaccatcaaagtctttgtactttgaagtaaaaacccagactcagtaatctaatgggggaggaagagaaaaaaccagttgaagagaaaaaaatggaagagaaaaaggttgaagatgatgg

SEQ ID NO: 28612 - DNA, 407 bp, Gossypium hirsutum
  Clone ID: LIB3148-017-Q1-K1-C6
cccacgcgtccgaaaaggcattccagtattttgtgttatagtagtggttgggtattgttcgacaccaaaaaaagaaaaaaagaaaaaaaaaaaaaaaaaaaaaaaaaaaaaaaaaaaaaaaaaaaaaaaaaaaaaaaaaaaaaaaaaaaaaaaaaaaaaaaaaaaaaaaaaaaaaaaaaaaaaaaaaaaaagggggggccgtttaaaagaatcaaatttaacttacccttgaatgcaaaaaaaaatttttttaatagggccaccaaaataaaattaactggccgggttttaaaaactttgtaattggaaaaaccctgggttaaccaaattaaatcgctttgaaaaaaatcccctttttccaagttggggaaaaaaaaaaaaggcccgaaccaatcgcctttccaaaa

SEQ ID NO: 28613 - DNA, 425 bp, Gossypium hirsutum
  Clone ID: LIB3148-017-Q1-K1-C7
gagaaatgtgtatttcccgatgcagcctggactttatggatgtgttggtagcatccttgaagcctgtaagggctcatgacaaattttaggattgaaagatatcaaggtccctctggaaacttaagcacggagtgaagtagaaccacaagcatttctaattctttgtgaaccacaggccattaagtgaagaaagtttttccaagttaaagggttggaatttgtagaaatttaacgttttgaaggtacatatccatttggaggctgcagcactgtattttgaggtcagtcgagagcctattcaattcatgttatcagaacttgtacatgcattttctcaccattgcccattcatttgactcaatgtcagttgtgttgaattgaaaggggagcatttccacttcatgaaatctgatagcagttaggag

SEQ ID NO: 28614 - DNA, 423 bp, Gossypium hirsutum
  Clone ID: LIB3148-017-Q1-K1-C8
cggacgcgtccgcccacgcgtccgcgcatatttttttgctgctttactaactaaaaagaagaacctttctttgtttagcgcttaagattcctttaacaacaatggctccctcaatgtctactctaatggttgttctcgtcgctgtatgcgctctcatgggttccgccattgccgccgacgctccggctccgagccccacctctggtgccagctctatctcgccgccatttgtctctgtttccgtcgccgctgccgctatggctctgcttttcggatctagacttcggatctgaatgatgctatctctggtgttcagatgatgctctggttttcttttatatatgtattttttttctttttgatttgattttgaatttggtttgcaattttagtagctgtggtagtggatctagggagtgatta

SEQ ID NO: 28615 - DNA, 387 bp, Gossypium hirsutum
  Clone ID: LIB3148-017-Q1-K1-C9
attgttattatattattgaacgtattactgtattatctttttcttaaatttaatatgaatgagaagatctataagaaagtctcttgcgttaaaaaaaaaaaaaaaaaaaaaaaaaaaaaaaaaaaaaaaaaaaaaaaaaaaaaaaaaaaaaaaaaaaaaaaaaaaaaaaaataaaataaaaaaaaaaaaaaaaaaaaaaaaaataattaaattaaaaaaaaatttattggggggggtctcttctaaaaaaaaaagggggaaaaaccccggcctttccccctgggggggggctttccaaaggggtttttttttgtaaaaaaaaaaaatctttcacctttaaaaaaaacatttatttaaaaaaaaaaaaaaaaatcccttattttgtgg

SEQ ID NO: 28616 - DNA, 179 bp, Gossypium hirsutum
  Clone ID: LIB3148-017-Q1-K1-D10
gcaacatcccaatgtttgaatgtcaagcctataattagtggcaaattaaacccgattccatgttgcggccctatgccaaaaagcccgtagcgccaccgcttaaagcataccaacaaattcaatgcaattgtaattaatatatttattcatattatataaaaataattatttttcatttt

SEQ ID NO: 28617 - DNA, 417 bp, Gossypium hirsutum
  Clone ID: LIB3148-017-Q1-K1-D12
acggcttgcaagtttacagaatctggtgcttataatgtttgaggacgatacagttttgataccaaaagaaacagcctggttcagttattttccagacggtgctttcgaacctgtattgcctgtacaagcggtaaacatatacataactgttctataagcaaagtaaaactaaaacctttcgttttggtattgtccggatttgtttgcttttctgcaggccaagctctataaggaagattggatcggtttgaaaactttggatgaagctggaaaagttaaattcgtaaatgtctcgggtaatcacctacaaatctcaacaagcgacatgaagaagtacatggtaccatatttggagtaccaaacacctgcaccaacagggcagacaccgacagaagcttcatcgtatcaatggttttc

SEQ ID NO: 28618 - DNA, 418 bp, Gossypium hirsutum
  Clone ID: LIB3148-017-Q1-K1-D2
cccacgcgtccggcttgcctggttccattgtggtcaccgccactaacttctgcccacccggtggctggtgtgaccctcctaaccaccactttgacctctctcagcctattttccagcacattgctcagtacaaagctggaattgtccctgttatttacagaagggtaagatgcaggagaagtgggggaataagattcaccattaatggccattcttacttcaatttggtgcttataaccaatgttggaggtgccggtgatgtccattcagtcgccgttaaaggttcaaggaccagatggcaacagatgtccagaaactggggacaaaactggcaaagcaatgcttacctcaatggccaaagcctatcctttctcgttacaaccagtgatggccgcagtgtcctctcttacaacgttgc

SEQ ID NO: 28619 - DNA, 343 bp, Gossypium hirsutum
  Clone ID: LIB3148-017-Q1-K1-D3
gccacgcgtcgccacgcgtcggctaaacccaaagggtcaaactgtgcatttttggactggtgccgtggtcttgccccctaagtcagggtttggggctttcggatcatcgtgtgatggaaccccaaagatttgaagaagctaaagttgggattacagaattggaatcaaaagactacatagccgtcaagaggtgattgggagatgaccggcgagagggatcgaggtgagtgacaggggcgtcaaccatgatttcgtttgatgctcatgatgtggggttggtgctggggtggccaagaagacatgcatcaaactatcatgatctactagggagacctaagggctt

SEQ ID NO: 28620 - DNA, 166 bp, Gossypium hirsutum
  Clone ID: LIB3148-017-Q1-K1-D4
cccacgcgtccggattcagtgtattattattcaaatgattgtgccatttttatgtctgccgtcataaaacatttgtcaggttatcggttccccatttcgggtgtgaatggttctatggttgatgtaaacgctatatgataatttgtaataataacagacatttgag

SEQ ID NO: 28621 - DNA, 327 bp, Gossypium hirsutum
  Clone ID: LIB3148-017-Q1-K1-D6
aactcttgcatcgcaatatgaatgattttttaatttttgattcatgtaatgtatgtatgacaatataattaagagtattagggggtatagcaatggattctcatttcattggtttagttttttagtttttacattgtatgaaccggccaaggaaggttcaaaattacaaccaaatgttgctgttattcttacgttgtaactttctttattcttctgaatggatagtttcaagtttggaatcttttttaaaaaaaaaaaaaaaaaaaaaaaaaaaaaaaaaaaaaaaaaaaaaaaaaaaaaaaaaaaaaaaaaaaaaaaaaatataaa

SEQ ID NO: 28622 - DNA, 383 bp, Gossypium hirsutum
  Clone ID: LIB3148-017-Q1-K1-D8
ctcaaagagattttctctactggcattgtgcttggaggttatttagcactaatgaccgtgttattcttctgggccatgaaagacactgatttcttctctgacaagtttcatgttaggtcactgagggatcgtcctgaacaaatgatggcagctttataccttcaagttagtatagtaagtcaggccctcatttttgtcacacggtctcgcagctggtcctttgtcgaacgtcctggacttctattagtcactgcatttattgctgctcagctggtggccactttgatagctgtctacgcttaatggcgttttgcaaagatacaaggcatgggttggggatgggctgctgtaatctggctttacagtttggtcacttatattcc

SEQ ID NO: 28623 - DNA, 429 bp, Gossypium hirsutum
  Clone ID: LIB3148-017-Q1-K1-D9
gtaaaattaagatgccaaactataatgctaaaatttgattgaatgcaaaattaagagaacagttctgttaaaaaaaaagggaggaagaaaaaaaaaacaaaaaaaaaaaaaaaaaaaaaaaaaaaaaaaaaaaaaaaaaaaaaaaaaaaaaaaaaaaaaaaaaaaaaaaaaaaaaaaaaaaaaaaaaaaaaaaaaaaaaaaaaaaaaaaaaaaaaaaaaaaaaaaaaaaaaaaaaaaaaaaaaaaaaaaaaatggggggggggcctttaaagaaaaaaaaatttttgaacccgggggtggaaagtaaattttttttttttggggccacaaaaaaaaaaaaaggggggggggtttaaaaaacgtggaaaggggaaaaacagggggaacaccaaaaaaaaaagggatggaaaaaaaaccctttttcaaaag

SEQ ID NO: 28624 - DNA, 68 bp, Gossypium hirsutum
  unsure (1)..(68): unsure at all n locations; Clone ID: LIB3148-017-Q1-K1-E10
cccgcgtccggtgctttattagttggtattgggattcagangtaacatcaggtacccagcannnatat

SEQ ID NO: 28625 - DNA, 125 bp, Gossypium hirsutum
  unsure (1)..(125): unsure at all n locations; Clone ID: LIB3148-017-Q1-K1-E11
cggaagtaagaacggnataataataaaaaataaataattaccaacaaccaaaccaaaaaaacgggccgcattaaaaagaagggaaggccgcccaaaccaaaacaaacaaaaacaaacccaaaaac

SEQ ID NO: 28626 - DNA, 369 bp, Gossypium hirsutum
  unsure (1)..(369): unsure at all n locations; Clone ID: LIB3148-017-Q1-K1-E12
cccacgcgtccgcccacgcgtccgcttgattccatcgatgaacttcatatataccttattcgggattttggttttgctcaatagtgcctcctttgtgttcttgctgcacctcttgtattcattgttccttacgagaatgggaatgaaaacttcattgagattgccaagatggttcaagaaagctatataatggtgatctacgtttactcggacttttcgttaacatgcctgtatttgcttcatatttgaacatgtgtataagaatatgattattcaaatatatagaaaaagaacaaatgtacttgagaggttcttctattatagggaattgataaaattagtctctctattattaaatggatcnnanna

SEQ ID NO: 28627 - DNA, 338 bp, Gossypium hirsutum
  unsure (1)..(338): unsure at all n locations; Clone ID: LIB3148-017-Q1-K1-E2
gtttaataaagtttttttttttactttttcttttggttgtgtatagaggcattacgtttggcccttcacatcacattcttttcaactgttccccctctaataccactgtggtatagtggggtttgatacagagaatttacagaaaagaatagccttctttagcagcnnaaaaaaaaaaaaaaaaaaaaaaaaaaaaaaaaaaaaaaaaaaaaaaaaaaaaaaaaaaaaaaaaaaaaaaaaaaaaaaaaaaaagggnggnggntttaaaggataaaaaattaaaaacgcgtgcttgcaaaggaataaattttttttagttgtccttaaattaaattaaa

SEQ ID NO: 28628 - DNA, 414 bp, Gossypium hirsutum
  Clone ID: LIB3148-017-Q1-K1-E3
cccacgcgtccggttttcttcactcattagggagatggcccaactacagtgacgggcaacgtttctggtcttaagcctggcctccatgggttccatgttcatgccctaggggacacaacaaatggttgcatgtcaacaggacctcacttcaatcctgctggaaaagagcatggtgctcctgaagatgtgaatcgccatgctggtgatctaggaaatgtcactgttggtgctgatggctctgcgagtttctctattgtcgacaaacagattcctctctccgggccacactccattattggaagagcggtcgttgtccatgctgatccggatgaccttggcaagggggggcacgagcttagcaaaagcaccggaaatgctggtggtagagtagcttgctgtattattggtctgcaa

SEQ ID NO: 28629 - DNA, 192 bp, Gossypium hirsutum
  Clone ID: LIB3148-017-Q1-K1-E4
gtccaagatgcctgcatactgggtttcaaattcagtgatatttggtccactgccggagacggccacaggtaagattcagaagcatgtgctaagagcgaaggcaaaagagttgggacccgtcaggatgagtaagttataacttggaagttccaaaactaaattatcaggcatctaaatattgctgttattaac

SEQ ID NO: 28630 - DNA, 412 bp, Gossypium hirsutum
  Clone ID: LIB3148-017-Q1-K1-E6
caaatagttctactttagaacttgctaccattgatgatgacaatggcccggtaacaagtgtgagttgggctcctgatggtcggcatattgccattggcttgaacaattctaaagtacagttacggtattctgcttcaaataggcagttgcgcactctgagaggttgtcaccgaccaagagtgggttcaatggtatggaacagtcacattcttacaactggaggaatggatggtatgatagttaacaatgatgtaaggaattagatcccatgttgttaaaacctacagaggacattaataagaagtttgtgggctgaaatggtcagcttctggacaacaactggccagtggaggtaatgataatcttgttcacatatgggatatgtccaaggcatcttcaaattcaccaacac

SEQ ID NO: 28631 - DNA, 395 bp, Gossypium hirsutum
  Clone ID: LIB3148-017-Q1-K1-E7
aaataacaacaaagatccagctctgcttggttatggttcaaagggacacaaaattcactattctggtcctttattagtcccatcaggcaacatggatcagatgctcaaggatcatgatcgccaaatccaagaagctgttcggcgagcacgtgttgacaaggcaaagatgagaaaaaatctgttagaagggaaccaaatatcaaccaaatcattatttgtctccggtcgttgaggtaaactctgtaagcagcaaatcagtatgaacattgtcaagatgatcccacaagcaaatcagtagagtggattttcttgtataggttgatgcttttaggaaaatggctagtgggggcatattttagctaagcttatggttttattgagaaatcattctatga

SEQ ID NO: 28632 - DNA, 419 bp, Gossypium hirsutum
  unsure (1)..(419): unsure at all n locations; Clone ID: LIB3148-017-Q1-K1-E8
cccacgcgtccgcccacgcgtccgcccacgtttccgcccacgcgtccggtcttttaaaggaatgggatacctggatgatggtccagttgcagcacattattcttgctcaatccgttgaatccattcctgagtgggcagcttgtatacgttacgcagttactgggaaaggaaagcatggaacacgagtaccccttctgagacaacagattttgaattgcttggtgacacctttacctncagctgtaactactacagtagttgcaaagcggtatgcttttatttctgctgcacttatagaactatccccacaaaaaatgcctgtgcctgagatacagctgcacagtaaacttctggatgagttgctgggtaatatgtgccactcttcagcccaagtaagggaagctattggggttgcccta

SEQ ID NO: 28633 - DNA, 213 bp, Gossypium hirsutum
  unsure (1)..(213): unsure at all n locations; Clone ID: LIB3148-017-Q1-K1-E9
aaaaaacatatacataccctaatttacacaacaaaaatttgtatttcaacantacctcacttcaatccacacctaaaatatcttcgcacacaaaaacataaaaaaaaccaaccaaaaaagcctctttttttaaaataaccctacttaccacccttctatttacacaaaaaactcctaataaaagccccctaaataaacctcactcccctcttt

SEQ ID NO: 28634 - DNA, 266 bp, Gossypium hirsutum
  Clone ID: LIB3148-017-Q1-K1-F10
gcccggacggaccgggccgaccgacgcgtccgattgctacaaccctgcattttttgtggtggtacattcaattattccgaagttgatcaggggtggactccaattggtgacagcttgtgttctttatttgaaagattcaattcattacttaatggagtaaaaaaatgctaaaaaaaaaaaaaaaaaaaaaaaaaaaaaataataccaaaaaaaaaaaaaaaaaaaaaaaaaattaaaaaaattaatagatataatataaataaaaa

SEQ ID NO: 28635 - DNA, 319 bp, Gossypium hirsutum
  unsure (1)..(319): unsure at all n locations; Clone ID: LIB3148-017-Q1-K1-F11
gccaagcccaagaaaaaaaggaacgaggggatagaatcgacaaggaatccatatccnanaaggagagaaaaaaaaagaggggaggagggaaaaaaaaaaaaaaaaaaaaaaaaaaaaaaaaaaaaaaaaaaaaaaaaaaaaaaaaaaaaaaaaaaaaaaaaaaaaaaataaaataatattaaaaaaaaaaaaaaaaaaaataaaataaaaaaaattaaaaaaaaaaaaaaattaagggggggggcctctttaaaaaattaaaaattacttccccgttccctaaaaaaaaaattttttttaaaaggccccaaaaaataaa

SEQ ID NO: 28636 - DNA, 349 bp, Gossypium hirsutum
  unsure (1)..(349): unsure at all n locations; Clone ID: LIB3148-017-Q1-K1-F12
cgtccgcccacgcgtgcgcccactcgtccgcccacgtcttttctcacgcgtccggttgactttcttggttgcagaancatgtctaatagcgggtgcaactaggaatgcttatcacaccaagtatcgtggaatgatttatgcccagaatttctcctgtgaaactttgaggaaaggtgtctttattgcaggagcagtgtttgtggttgccacaatgattctcaacgtatactactacatgtatttcgccaaagcaaccaccacaatgccggctcacatggcaaatcgaacgaattcaactgttgggatgactggttatgcttaaggttaaattactcaattaatgaagcca

SEQ ID NO: 28637 - DNA, 417 bp, Gossypium hirsutum
  Clone ID: LIB3148-017-Q1-K1-F2
caatgttgcatcacaatgtggcttgaccaattccaactacactgagctaagtaaattgtatgagcaatataaagatcaaggttttgagattcttgcattcccatgtaaccagtttggaggacaggagccagggaacaatgagcaaatcttagagtttgcttgcactcgctttaaagctgaataccccatatttgataaggttgatgtgaatggtgagaaggctgctcccgtatacaaattcctcaagtctagtaaaggtggactttttggggacagcatcaagtggaatttttccaagttcttggtcgataaggagggccatgtcttcgatcgttatgctcccactacttctcctcttagcattgagaaggatattaagaaactgctggcttgaatttgatgagtggaagagattag

SEQ ID NO: 28638 - DNA, 287 bp, Gossypium hirsutum
  Clone ID: LIB3148-017-Q1-K1-F3
gattaggcttgtgtgtgatgtatttaaggtgactttgaatatttatatatgggtgtgttgtaatggtaatctttgtttgtttttagttagcattcgatgaatgctcaactgatttagaaaaagggaaataccctataaaaacaaaacaggtttgtaactaaaatgcactcttacatttctcatgttcaactattgtatctctttgttttagtttcttttcaagttttatgtaactcgaacttgcatactgtaattagtctacaatacacccttcagtagttccttgg

SEQ ID NO: 28639 - DNA, 91 bp, Gossypium hirsutum
  Clone ID: LIB3148-017-Q1-K1-F4
gggatggtgatgtaataaaatgtttgaatgtatgagtgtcaatgctactaagttggtaaggatttaatgtccaaaatctgaatcctgttct

SEQ ID NO: 28640 - DNA, 129 bp, Gossypium hirsutum
  Clone ID: LIB3148-017-Q1-K1-F5
cccacgcgtccgcccacgcgtccgtctacttgtccgcccacgcgtccggttgaccattggggactggcattaggggttccttgatcgactttgaccgacgattaatagaagttaatcctcttaactttt

SEQ ID NO: 28641 - DNA, 413 bp, Gossypium hirsutum
  Clone ID: LIB3148-017-Q1-K1-F6
cggagattggtagggagcaaggtggtttttatatccttgaaccgtcttgacagactagtgtggctttgactccgtgtgttgcatctgttacattcgttggaccatctttttttggcacactagacttggccatacttctatttcaagattgaataagatgcttaatcttccctgcacagttttgaatagtgatagcatacaacaatgtcctatgtgtcctcttgctaaacaaactagactttcatttcccataagtacgtctcgtgttgatattggtttttccctttttcatatagatttgtgagggccctatcgagtttctactcatagtggccataggtattttttttaaccattggtgatgattactctaggatgacataggtgcatatgttatgatataaaagtgatgc

SEQ ID NO: 28642 - DNA, 439 bp, Gossypium hirsutum
  Clone ID: LIB3148-017-Q1-K1-F7
ggggccgaccgacgcgtccgaagaaaacgaaaaaagaaaaatcaatagctggttgggacccccgaaaacccgatttcgaaacccgaatcggatctcccaaatagcttcgaagcagaagaaagaagatgacgggagtaaccaatcaggaggaagacaagaaacccgctgatcaaacggctcacatcaatctcaaagttaaaggccaggatgggaatgaagtgttctttaggattaaaagaagtactcaactaaagaaacttatgaatgcttattgtgatcggcaatcggtggagttcaactctattgccttccttttcgacggtcgccgtctgcggggcgagcagactccggatgagttggaaatggaggatggggatgagatagatgcaatgctgcatcaaactggtggtaccatggcctaactagcttctttataggt

SEQ ID NO: 28643 - DNA, 214 bp, Gossypium hirsutum
  Clone ID: LIB3148-017-Q1-K1-F8
tgaaaacccggggccgacccacccgtccggttttttgttttttctaatcatcttttaggtcatgatggtagtggtaggttcaatgtgatgtgatgatgaagtggggcgtctgatatgttaatggacaatagctcatgtctggtatagtctgtttaaatgtgtttttgcttaatcgaaagttgctttgccacacagtagtggcttttggttgttt

SEQ ID NO: 28644 - DNA, 332 bp, Gossypium hirsutum
  unsure (1)..(332): unsure at all n locations; Clone ID: LIB3148-017-Q1-K1-F9
catttttctttaggcatccttgttcaatcatttgtatttgattaatattcgaacatgagtattgagtatgagcatagcatgttttactgttnaaaaaaaaaaaaaaaaaaaaaaaaaaaaaaaaaaaaaaaaaaaaaaaaaaaaaaaaaaaaaaaaaaaaaaaaaaaaaaaaaaaaaaaaagggggaaaaaaaaaaaaaaaccaagngaaangaagaaaaacattaaaaaagattgttttaacattttttttaaccaaaattaaatcaaatcccccaaggatttgacaactgtggtgatgggaaaaacgtggggggaacaaaattaaattcc

SEQ ID NO: 28645 - DNA, 399 bp, Gossypium hirsutum
  Clone ID: LIB3148-017-Q1-K1-G1
cggacgcgtggggcggcatcatcttccaacgatccaccgacctcactgagtctgtctttaccgggggtggagtcatgtgaggtggtgtcaacccagccaataacggagtcaactcagaatcggagtgaagaaaggggaggtggggtgatgggtttcagtgcggagtttatggcggtgatgcaagaaatgataagggttgaggggaggaattacatgacgcaaatgcaacaacagcagcagcagcaaaacggcgcagttccgggaggagcgggaatggggatgtgtttggatggggggttcaagaatcttatggctgggaaccgagtcgggatgagtaagatccagtgaaaaagcctaaaaatgacacgttaaagaaaaaaaaggccaatttttttaatt

SEQ ID NO: 28646 - DNA, 419 bp, Gossypium hirsutum
  Clone ID: LIB3148-017-Q1-K1-G10
aaaagatagcattcttgtcaacttcggtgaatgttgtctagcttcttcgctcagatctttgcaagttaaatatgtcaattcaattacaaagctgtgtattatcagagcttcaagagatgaatacaaaaaaatttggtattcaattagcatggttagaagtattgggaactgtcttgtgctatttaatttgttggatcttagtggtagtataaaagcatgtaaaactgctgccttgaagtgcgatgagttaaaattcgagcaatacaagcttatggttggagcacggctctcggttgatgttattcggcacatgcaaaattgtattgagaagatcaaaattttagaacactaagactccgtttgtttgtcagtaaaatatttttcggaaaatgatttacttttctagatatattaataaa

SEQ ID NO: 28647 - DNA, 367 bp, Gossypium hirsutum
  Clone ID: LIB3148-017-Q1-K1-G11
gcgaacttccatgctatatctcaagaggattaattttagattgcattttggtttatgtcgatgggcttggatctcggaaagttgactctttaaccatattttgttctttaactgagttttttcctttcttgaaggtagtatatatgtttgatctgaagttgtgaacagcatattgcaaaagcctgcagggttgcttggttggagttctatttgtgtgtttctggtacgattttgccggtatgattgtcagctttttcgaacaaactgactttagcttctcagacgaaaagatcaaattgggcggatgagggttcttttggccaatcataaattcgcttccccatctctaattccaccggagctagat

SEQ ID NO: 28648 - DNA, 186 bp, Gossypium hirsutum
  Clone ID: LIB3148-017-Q1-K1-G12
cccacgcgttcgcccacgcgttcgaaaaaatcagtttcgcttgccctcttctttgccctggacgtgttcttttgttctgtggtcagggctatccgttcttgcccttcccccaacccaaaaccaaagcctacttcttccccatccccctcaggcaaatgcccccaaaatacccttaagttaagtgtc

SEQ ID NO: 28649 - DNA, 338 bp, Gossypium hirsutum
  Clone ID: LIB3148-017-Q1-K1-G4
gcgtccgcccacgcgtccgcccacgcgtccgcccacgtttcctgttcacgcgtccggttgactttcttggttgcagaatcatgtctaatagcgggtgcaactaggaatgcttatcacaccaagtatcgtggaatgatttatgcccagaatttctcctgtgaaactttgaggaaaggtgtctttattgcaggagcagtgtttgtggttgccacaatgattctcaacgtatactactacatgtatttcgccaaagcaaccaccacaatggccggctacagggcaaatcgaacgaattcaactgtttgggatgacttgtttatgcttaaaggttaaaatta

SEQ ID NO: 28650 - DNA, 301 bp, Gossypium hirsutum
  Clone ID: LIB3148-017-Q1-K1-G5
ctttctctttggtcagtattgtagatcattaagatggagaagaaaggttttgtcagattgatgctactttttctgggtttttcttatcttcttctttcctgtgctgctgttcccagtactagaagcctcaaatcaaacaaggaactcccttcttctgtccaagatttacttgctcaggatgtaatggaattgagttatggagaattaaatgttgtaaattagattaacatgaaatggtattttgcctggattagctggatcttcattacttgataatttgaggttctaaacacacttaaac

SEQ ID NO: 28651 - DNA, 273 bp, Gossypium hirsutum
  Clone ID: LIB3148-017-Q1-K1-G6
atttatttttttatttatttttttttcggattgttttttttgtaggggggcgagcccacccaatttttactccacttcttttaaaattaatacaattctcaaatcattcttttaactccctttttctgaacaatatttacttacacaaaatataataaaattgatttatgtttaattaaattattgaaattagactaacattgaaatcttatttaacctcaattatctaaatcttcattacttaatttatatacgtactaaacacacttaaac

SEQ ID NO: 28652 - DNA, 278 bp, Gossypium hirsutum
  unsure (1)..(278): unsure at all n locations; Clone ID: LIB3148-017-Q1-K1-G7
gcatgactgagcaatgcttcctttacagatctggtaggcttctttcagctgtccatcatgggttgcatctggtgctaggaatttgattaaccgtattcttgatccaagccctcttacccgtataactattcctgaaattctacaagatgaatggttcaagaaaaggtacaagccaccaaaatttgagcaagatgaggatgtaaatcttgatgataatatcttatattttacatggttatgatttaagtccttatttcattgatntcttnnnnnaaaaa

SEQ ID NO: 28653 - DNA, 110 bp, Gossypium hirsutum
  Clone ID: LIB3148-017-Q1-K1-G8
gggttggttggtattttgtgaggttattaatggtgttacctaattccatattcatttttcttggccatccaggtggggtggggatttcaaggtcctggccatggaattcc

SEQ ID NO: 28654 - DNA, 226 bp, Gossypium hirsutum
  unsure (1)..(226): unsure at all n locations; Clone ID: LIB3148-017-Q1-K1-G9
cccacgcgtccggtttagcctttttcttgatatgtgtcctccaatagttctttatctcattgtcagttcttcctggtaagcttcttgcaatggttgaccaccttaaaaattttgttcaaatacgaatattaaatacgaatacttcaagaaagtttaatccgaacaaatttatatattaaaatcattacctgtttccccaannaaaaaaaaaaaaaatatatatttt

SEQ ID NO: 28655 - DNA, 396 bp, Gossypium hirsutum
  Clone ID: LIB3148-017-Q1-K1-H1
gaagaatgccaagcgaccacatgaagcatctggggacgattccaacgttgattctgcaatcgatatgtcaagagacgaggctatgaaagagaggacatcagcatccaacgaaattagtgattctgcgtataacatgttcagaaatgatgctttgaaggattctttcgagacaagcctagttttctttattggtcaattgaagagttttgcagaagcatctgtgaagatgtacacagaacttgacagggatattcgacaagccaaacataattatgaaatctctgtcaaaggagtcgaggttgccaatgaagaaaataacgctgagagcaacaaccaaagtggcagcgatcaacaaccgaagccgcaagtgtaaaaccatgtggagaagatgttggt

SEQ ID NO: 28656 - DNA, 150 bp, Gossypium hirsutum
  unsure (1)..(150): unsure at all n locations; Clone ID: LIB3148-017-Q1-K1-H10
ccggcccgaccgacgcgtccgttaattacctcaactttcttgaaatggtcttaacattgagttatttaatttttactatggcgatgaaagggatgactatgcgttggacctagccctgngtgatgaataagctgcttacattacattagt

SEQ ID NO: 28657 - DNA, 317 bp, Gossypium hirsutum
  Clone ID: LIB3148-017-Q1-K1-H11
aattagaaggcccgacccaacccacccgtccgaggacgcgtgggaaaaaaagaaattttatatttaaaaaaaaataacaaaaagacaaacgatgggataaaaaccaaagttacgtacgcatacatacaaaataaataactcttctataaagtaaacctaaattcaatgccctgccctttaatttacaacagtttcactcggaaaactccgacgttacccatctttaatagggttgcataacataaattttttgccaggtggtttaaaacttaagaagccggaaaccctcgcccttcccaaaattaactccttttaaa

SEQ ID NO: 28658 - DNA, 351 bp, Gossypium hirsutum
  unsure (1)..(351): unsure at all n locations; Clone ID: LIB3148-017-Q1-K1-H12
cgaccgacgcgtccgaaagaaaagaaaaatggttctggctagagaatctttgggatgatgtanntggccggacctcagccggaacgtgcgcttggccggctgangaagatcacaaccaccccacccttgtccaccaaagatgaggcttcattaatggcgatgccgacgagtccgacgacacctgggacaccgtcgacgccggtgtcggctcgtagggacaacgtgtggaggagcgtgttcaatcccaggtagcaccttgcaaccaaaggtatgggcgctgaaagtttcgacaagcctcaacctaactctcctactggttatgactggctttacagcggggagacccggagc

SEQ ID NO: 28659 - DNA, 392 bp, Gossypium hirsutum
  Clone ID: LIB3148-017-Q1-K1-H2
ctctgccctccggtctcgtacaataattttttatgccgatttgtacctgtttgcatcaaaagatgcatcaaaaagtattatgtcctgcattctctcattcatttgtctctgtattttgacagtcttccaggtatgtttttcctttcccacttctttaagttcagctaaataagtctgtattttctgtactagatccctttctgatacaaactttctttcatgcaccatttgatttcgcgagttccacatcacccataaggcacagcaaaacacctgacattgttccttggttcctttttcgaagacccaaggtattgctggaagacatggagactgttctcttccccggagccacaacgagggcatctcacatttgtggttaatagtttgca

SEQ ID NO: 28660 - DNA, 190 bp, Gossypium hirsutum
  unsure (1)..(190): unsure at all n locations; Clone ID: LIB3148-017-Q1-K1-H4
ccggactcggaaggcccggcccaggcgtccgcccacgcgttcgcccacgcgtncgaaaaagtacagcatcgcttgccctcttctttgccctgaacgtgctcttcttttctctagtcagtgcttgcggttcttgcccttcccccaacccaaaaccaaagcctactccttccccatccccctcaggcaaatg

SEQ ID NO: 28661 - DNA, 278 bp, Gossypium hirsutum
  unsure (1)..(278): unsure at all n locations; Clone ID: LIB3148-017-Q1-K1-H5
tggaattaaaggcccgacccaggcgtncggtncagggcttagcctggatcagcgaggttttatgttcatccgggtgacctgcacccttagccatgtatggcacgagagatacgaccaaactactttcattccatacctctcaccatatcatgatctctaacatgcatagcaattgtgtgaaatgcggatggactattaacaaaggacctttgatggactttacctgacgtactaagattgatcttgggtgtgctgcgcatgctgatgtactccattta

SEQ ID NO: 28662 - DNA, 162 bp, Gossypium hirsutum
  unsure (1)..(162): unsure at all n locations; Clone ID: LIB3148-017-Q1-K1-H6
acgnggaaccccatttggacaagacataaccggcgtaatttatctgcaccaacattagcagctgtagagaaatcaaatgaaaactcaagggctaccatttctgcaattcctggaaagctcgtaaacaagcatgaacttgacacggaaggagtcccacttttt

SEQ ID NO: 28663 - DNA, 376 bp, Gossypium hirsutum
  unsure (1)..(376): unsure at all n locations; Clone ID: LIB3148-017-Q1-K1-H8
gcgcgggcgnncaagaactgataaagtatggcaaccattttagctttctcatcaatcaccattgcanctggtcttgcgtacaagccatggtactcgggctcacctccccaattgccattgggttgccaacaatggcgaagaaagggaaagtgatgtgttctatgaaggaggaggaaaagaatagctctagcgntggcatgagtgctgcatcgctgttagctgcagcagtcatgtcaagctcaccagctatggctctggtggatgagagaatgttcaccgaaagaactggacttccctttgggttgagcaacaacctttttgggtggatcttggttggtgtattcggcttgatatgggctctttacttcgtttacac

SEQ ID NO: 28664 - DNA, 156 bp, Gossypium hirsutum
  Clone ID: LIB3148-017-Q1-K1-H9
acccacgcgttctgttagtagtttataggcagttgttgcttgattaatatgggtatttgcagttttattttgtggaacatgttgaattgagtttgtgggacatttcgatggactaactaaaaagctctttcgtaataaataatatacaatttattc

SEQ ID NO: 28665 - DNA, 311 bp, Gossypium hirsutum
  Clone ID: LIB3148-018-Q1-K1-A1
cccacgcgttcgtccacgcgtgcgcgcgaagctagtgggtcaatgaagccgccggtccttgaacgagcgtgcttgaagcttggaaggcttgattcatgttcttgaagtgatcatgagcctaacagcattcacaacaccaactgtcaatctttcgtaatgtgcttaccttgataggtcatatacaacatgtatctaggtcattaagaagtattgtggcgctttagtgacgttttcaacatggcttacatgttttggatgattgtaagattacatatctgatggaaccgataggttacatacaacatgtatct

SEQ ID NO: 28666 - DNA, 435 bp, Gossypium hirsutum
  Clone ID: LIB3148-018-Q1-K1-A10
cccacgcgtccggcgactgagaactatcactgattttttctgggcaattatcaatttcattggagtgttcttctcgaccatgttctcgatggaaaagtccgatgcctacagaaaaggctttggttcaagcaagaaatgggatgatggtccaggaggacctggaagtggaccatatggtggaggtggtggcccacgacgaccaccacggggaatggacaatgttcggggaattgaccatagttcccttcctgcctgtggctcctgctgcggtggctaaatgctgcaagcatacatcttgtgcatgtacactgttatatagctaaagtcctcttattataagtaaggatgttccacatgtttttaatgtcaatagattgcctgtgaaacaggcaactttgaacctctataaaaccagagatgcttttatgtactttc

SEQ ID NO: 28667 - DNA, 420 bp, Gossypium hirsutum
  Clone ID: LIB3148-018-Q1-K1-A11
atgcttatgaaaagaagaggtgttcattctggtttagtagtgaagggtgaagaaggtgccctctcggtgacaactaggttgctatcagcaagcacatcaaaaggacttcctgtgaaccattgttctggttttcgttcggtaggcatggaatcagcttgtgaagtggatggtgtataacgtccgagtttcaggcttgaggttaatgcaatggactatggttttgaaccaactgatactcccaagaaccaatagatcggtatcgaagaatatcgagttgggtttggcagctctttgaggtgaaaaagggccggcatatgaccggattgttttgaatgctggaattgtggatcatttactaggatgtgatggggcagaagacgttccttagctttggaaagagccaaagaagccattgacagt

SEQ ID NO: 28668 - DNA, 429 bp, Gossypium hirsutum
  Clone ID: LIB3148-018-Q1-K1-A12
cccatacgaaaccatgttaacgtccgcttccattagccactcaacccccgacacaacgactgtcgccattctggagctggcacgggaaaaacgcctcttgacttttgccttacaggggtctctcaacccatcagcagtcatgggagtgagcttggaaagacagaaggcgataatggtaccatacatggaagcacatgtcccaaattaccacctctggatgcaagaccctgctctgcttcaagccaccggatcagagcccctctccctccaacaggaatacgatgtgcagttttgctggaaccaagaccctctcaagaaaactttcattattttggataatgagatggtccgagaaaagaatgttcatgtcaatcctcatgtcgaagccatggtcggagatgtgaatatctacatgaatgatttggatga

SEQ ID NO: 28669 - DNA, 434 bp, Gossypium hirsutum
  Clone ID: LIB3148-018-Q1-K1-A2
ccggaccggaagggccgagccgagcgacccgtccgactgtgaacgtaacgcatactatggctccatcggggagtacatgtcacatgaaaatgcgtgaggggtgatcaacggactagattgccacagggatagcatgttggactatgaagatttcttgaagctaatgaaaatagaaaagcgggatgatgatgatgatgatgatgacctgaagaaagcgttcgagatgttcgagttggagaaaggctcgggttgcataactcccaaagggttgcaaaagatgttgaatcgccttggggatgcaaagtcttatgatgaatgtgtcgctatgattcaggtttatgatattgatggtaatggggtgcttgattttcatgagttccaccaaatgatggcttaatttgataggacactcgtacctttaatttgtgcttaag

SEQ ID NO: 28670 - DNA, 430 bp, Gossypium hirsutum
  Clone ID: LIB3148-018-Q1-K1-A3
cttgttgacaatggctacacatattgtgttgttgcagatgaatcagctggaagccaagtaccgagtggttttttggagcgtgtcagggaggactttgtgtcaaaatatggtagtggaaaggctgctactgctcctgccaacagcctgaacaaggaatttgggccaaaactaaaagaacatatgcagtactgtgttgagcatcctgaagaaataagcaagcttgctaagatcaaatctcaggtttctgaagtcaaaggtgttatgatggagaacatagagaaagtgttgataagagggaaaagatagagctgctagtggataaaacagagaatctttatcagcaggctcaagacttccggaatactgggacgaaaatccgtagaaaaatgtggctcaaaacatgaaatcaagctgattgtctaggatactg

SEQ ID NO: 28671 - DNA, 370 bp, Gossypium hirsutum
  Clone ID: LIB3148-018-Q1-K1-A5
cccacgcgtccgacataataagtcctaacgtgctagataaaatttaaaattagcggtactctttcggtcgttcaaactgaggccgtgggtgtgattggtttggatgataaatagaggtgagaaaaatagctcattatgtgcaaaaaaaaaaaaaaaaaaaaaaaaaaaaaaaaaaaaatttattataaaaaaaaaaaaaaaaaaaaaaaaaaataaaaaaaaaaaattaaaaaaataaaaatattttaaataataaattataaaaatatataaaaaaaaaaagggggggggccctttaaagggttcaaagtttttttcccgttgtttagaaattaaaattttttttataggggaccaaaaaaaaaataaa

SEQ ID NO: 28672 - DNA, 262 bp, Gossypium hirsutum
  Clone ID: LIB3148-018-Q1-K1-A6
agtacttgaagaagcacaatgtccgggattggcttcgagtgattgcttccaacaaggacagatctgtgggcgaactccgctacttcaatattgccgagaatgaaggggaggaggaagaatgaagaatcagttccacattttttttctagtttactgctttattatttcttaggaacgtcttttatctatttaaggtgtcatgttctgcttttttccttcagaccttactctaatttgcaatgaaattttgattgctgatagt

SEQ ID NO: 28673 - DNA, 437 bp, Gossypium hirsutum
  Clone ID: LIB3148-018-Q1-K1-A7
actgtgtttgggacttgccccatggcttgctgcagagattccgattctcgtcgattccgggatgatcaagcataaggatgatgcagccacatcgaatgagtcttagcatgtcgattctgggatgatcaagtataaggattatgcagcctcatcgaacaagtcttagcattttggatgttaaaggggaaggttgagtttttcataaataagcgcacaggcaataattatacaatttcattgacaaattattctgtcttgtgatgaattgataatgtcgaaacctcttgatttcttacttttgaaatgcaaataggatctaatactgttattgaatacttattgtcaaagattgaactgaatgtgcctatcaaagattagctctcttcctaagtggtgggtggcttctccactccttgaaatttgaatcaaatttcgca

SEQ ID NO: 28674 - DNA, 444 bp, Gossypium hirsutum
  Clone ID: LIB3148-018-Q1-K1-A8
cccacgcgtccgctacttggctggtgatagttctggtggaaatatagctcaccatgtagccgtgagagcggccgaagctgatgtcgaggtattaggtaacattcttcttcatccgacgtttggtgggcagaaaagaacggaatccgaaaaacgattggatgggaagtattttgtcacgctgcacgaccgcgactggtattggagagcgtatctaccagaaggggaagatagagaccatccagcttgtaatccatttggttcccggggtcgaaacctcgaagggcttaagttccccaaaagtcttgttgtcgtggccggtttggacctcattcaagattggcaattggcatatgttgaagggcttaaaaaatccgggcaagaggtgaaacttctcttcctagagaaggctacgatcgggttctacttcttgccgaacaacaatca

SEQ ID NO: 28675 - DNA, 416 bp, Gossypium hirsutum
  Clone ID: LIB3148-018-Q1-K1-A9
tccattttgtacacctaaactctttagcgccagcatcggttttgggctagtttggatcggatgggcagttaaccaattgagagacacggttgtacaaatcagcaaaatactagcaagtctggtctgaaggaagaggagatggttgagagagtggagaaaagtgttaatcagatatatttcagagccgcgacattgatggctatagcagtgctgagatttgcatgaactctgaagatctagacagtcgaaagttagactcaattatattgatctgggatgtcaatatctgaagaacagagaggggttctgagggcaacaatggaactctgacttactatgctatatccatggggggtcctatgatgggcttgagagcacatactctggtgcttttgtatgtataacaatcgtaaaca

SEQ ID NO: 28676 - DNA, 156 bp, Gossypium hirsutum
  Clone ID: LIB3148-018-Q1-K1-B1
tgttgatagaaaaaattgctcttgaaaagtgatttaagtatagacacccaagtattttatccaggctggtaattatttagattagaagaatttttattgcattaatttaaattgagtcatgttttaaaaaaaaaaaagcaagataaaagaatagct

SEQ ID NO: 28677 - DNA, 208 bp, Gossypium hirsutum
  Clone ID: LIB3148-018-Q1-K1-B10
cggacgcgtccgtgaagcagaagtgtatcctactgatgattttagggggttaaatgactttggtatgattataaaaaagagaaagaaaagagaaaaaaaaaaaaaaagggcggacgaaaaaaaaagaaaaaaagcaaaaaaacacaagcatgcaaagacaaagctcttctatagagaaacctaaaattaaattcactggcgcgcgtaa

SEQ ID NO: 28678 - DNA, 450 bp, Gossypium hirsutum
  Clone ID: LIB3148-018-Q1-K1-B11
cgagaatctgagcagcgtcgaagttgagtcggttctgtacaatcacccggcaatcaatgaagcggcggtagtggctcgaccagatgagtattggggagagactccttgcgcgtttgtgagtttgaaaaatgagttgactcagaaaccgagtgagcaggacataatacagtattgcagagctaagttgccacactacatggtgcccaaaacggtggtgtttaaggaagaattgcccaagacgtcgacggggaagattcagaagtttgctcttagagatatggcgaaggcgctgggtccttcgtcatcttcctcacggctgagtcggatgtaagctcccttgtactcactatctgcatggtcaacatcggattgccgtaattatgaaatagtagtgtaaagacttattcttagtgcctcgactgcattattacaatatattaaaaattaagt

SEQ ID NO: 28679 - DNA, 162 bp, Gossypium hirsutum
  unsure (1)..(162): unsure at all n locations; Clone ID: LIB3148-018-Q1-K1-B2
cccacgcgtccgaaaaaaaagatcttatttgtagcccatttcttaaatcttgaatttaaaaaaaaaatgacaaaaaggaaattaaagaattaaactaaaataaaaaaaaagaaagaaaattcaatttcaattttgtagttttatttttgagcacgtaangct

SEQ ID NO: 28680 - DNA, 428 bp, Gossypium hirsutum
  Clone ID: LIB3148-018-Q1-K1-B3
cccacgcgtccgaccttggcatgcttgatgacacattcctcgcaccagaaagtgaagagtgtgtgaggaaggtgaatcaggttgctgacaaatattgggatctctattcaagtgagtcacttgagcgagacttgcctggacacctactccgctaccccatcggtgtttctagtgatggatctgtcactgaattgcctggcatcgagttcttccctgacacaaaggctcgtgttcttggtgccaaatctgattatctgccacctatcctcactacttaggggatctttactttgttcttaagcaataataacttgtctagtttggtgttactggctttggtagtaacaataaaacttgtttttgtgcttgtgtcatagtctgcagagctgcagtgttgtgttggtattgcttttccgtcagctgtgata

SEQ ID NO: 28681 - DNA, 335 bp, Gossypium hirsutum
  unsure (1)..(335): unsure at all n locations; Clone ID: LIB3148-018-Q1-K1-B4
gattgatggagtgatagttgattttgtccaagatatctcgcatgcagtggatgacatgattgtcaggccgttaaatgagggattaagagaaggggaccacnagactgagaccaagtcaaagctgcagttctcacagcaggagctctcttttctcttaaagctaattccagagttgatacaccactaacttgtccctaccactatagttttttgtttttttaccaactttacctctctttttcttttttttttaaatattttggggctgccttgctggattccttctaagaagtcaaggtgacatttttatatataaagtacataattaatccatt

SEQ ID NO: 28682 - DNA, 450 bp, Gossypium hirsutum
  Clone ID: LIB3148-018-Q1-K1-B5
gaaacaaatatgtttctgtttgggtttgtggacttaattgaaggctcggttagtgagacgattaagagggtgacgaaattacaggatgcacgtatacaagttgcgtatgagaagttgtttaccgatactgcgatcgagcaatacatctcaatggacttgggtagggaggttgacctcaatatgctaaagaaaatgtccaccgaatatgaagtggcgaagagaaaagccattgaagaggctggaaaggtggtggatgtccagaacataaagcatatatcagaaaacgaggaacctctaagcgaaatagttgaaaagatagatgcgagctggaaaaaccaaagagaagcattttatcagcggaccggattgacccctcaaaatcctgcagaaccacagcagctgcagttacaactgaaggaaggcgatgcagagaacaacgatgccgatgaa

SEQ ID NO: 28683 - DNA, 438 bp, Gossypium hirsutum
  Clone ID: LIB3148-018-Q1-K1-B6
gcttggctcaagaggatccagtgttgtggtgcctcggtacttcagattgctggaggagcttgagcgtggagaaaaaggtattggagatggtactgtcagctatggaatggatgacggagatgacatttacatgcgctcttggactggcaccattattggtcctcataatactgtacatgaaggtcgaatctatcagctgaagctgttctgtgataaagattatccagagaagccaccaagcgtccgttttcattcaagaatcaacatgacttgtgttaaccacgaaactggagtggtggaaccaaagaagtttggacttcttgcaaattggcagaaggagtataccatggaggatttactgacacagctgaaaaaggagatggcggcaccacataaccgaaagctggttcaacctcccgagggtacctacttctagtc

SEQ ID NO: 28684 - DNA, 318 bp, Gossypium hirsutum
  unsure (1)..(318): unsure at all n locations; Clone ID: LIB3148-018-Q1-K1-B7
atattgttgacgaatttgacaagatcaactgaaacagcagtgaatttttctacacagacggtttgcttcaatggatggaggtgttgaggcaatagctagtcctaaaagaaagaaacctcgtactgggaaataggctttgtttttagatagctctttatcttggttttggtttggaattgacaagtcgatggtgttatcgtttcaaataaaaataataaatatttaatatatgaaaaataaaattaattaaattggacttatttttaaaatttaattattgaaaaaaataatatattaaangggggcggccgttttaga

SEQ ID NO: 28685 - DNA, 371 bp, Gossypium hirsutum
  unsure (1)..(371): unsure at all n locations; Clone ID: LIB3148-018-Q1-K1-B8
aatggcttgattataatgttaaagttagtttatgtggctatgacttaaacttattttggaagtatcaaatgtggtataatgtgtgctggatgattgtataatatggcttggtgatgaggtaaaatgatggatatgtatttggttgtaaattggctttataggttcggatccaaacggctagaaataatgcttatgattacatagatttgatcatgatatatgttcatgtggggaattaagtttcatggtacttatatgaggtgtgttggctatatgaatcaatttggaaactatttataaagtgttgtgtattcggttnaaaaaaataaaaaattatttaaaaaaaaaattttntttttttttttttataa

SEQ ID NO: 28686 - DNA, 262 bp, Gossypium hirsutum
  unsure (1)..(262): unsure at all n locations; Clone ID: LIB3148-018-Q1-K1-C1
ggtgttttagcttgtgtggtcggcatggtttttctgacccctttcacaccattcgttttttatgtaaagagtgtaaatttaggtgtcatcctattctataggcatttttcttagatgggattattccagttcagggttcccactacgtaagattatacagctatgttattaggtatagtccaatacgagactctttcgttaaggcccanaanaaaaaagaacaaacacaaactaaaaaacaagtataactgcacaaaaaata

SEQ ID NO: 28687 - DNA, 318 bp, Gossypium hirsutum
  Clone ID: LIB3148-018-Q1-K1-C10
cggacgcgtgggcggacgcgtgggcggactcgttgtcggacgcgtgggcggacgcttgggcggacgcggtttttggtaagcacaggaggcatcctggaggtcgtggaaacgccggaggcatgcaccaccacaggatcctctttgacaaatatcaccctgggtatttcggtaaagtctttatgaggtacttccacaagctccgcaacaagttttactgccccattgtcaacatcgacaagctctggtctctcgttccacaagacgtgaaggcaaaagccaacaaggacgcctcgccgatgatcgacgtgacctatttcg

SEQ ID NO: 28688 - DNA, 447 bp, Gossypium hirsutum
  Clone ID: LIB3148-018-Q1-K1-C11
ctagattcaaagggggcacttttatatcatcaaaatctgtggcgggaacacctgagtggatggctgcagaattccttcgtggagagccttcaaatgaaaaatctgatgtttacagtttcggagtaatcctatgggaacttattaccatgcaacaaccatggaatggactcagtcctgcccaggtggttggtgctgtagctttccagaataggaagcttgccattcctccgaacacctcccccaaattggtttccctcatggaatcttgttgggccgatgatcccgctcaacggccgtcttttggtaatatagtaatagcactaaagaagttgctgaaatctccattgtagcgatgcagaaaggaaaacagtaacaatgggtgtcgtttgaataacctgaaagcagctgattttggagattccactaactttttgtttttggttccag

SEQ ID NO: 28689 - DNA, 110 bp, Gossypium hirsutum
  Clone ID: LIB3148-018-Q1-K1-C12
ctttcttgctgatttcatgcttttgccgtccagtccaaatagaccttgggtctatttttctggtagagtcctcttccttttatcatttaagttatttaatcatttcttat

SEQ ID NO: 28690 - DNA, 104 bp, Gossypium hirsutum
  Clone ID: LIB3148-018-Q1-K1-C2
ggaaccggcgacccactccgcactcgaaggtttttccacacctgaaaaaagctgtctgtaaggaactttaaattttttacgctgttgagaaaggtattgtgatc

SEQ ID NO: 28691 - DNA, 394 bp, Gossypium hirsutum
  Clone ID: LIB3148-018-Q1-K1-C4
ccaacgcgtccgccaacgcgtccgttctaattcctaataaaaaagttggctaattaaaaccttcaaggggaaaaaaaaaagggaggagggaagaaaaaaaaaaaaaaaaaaaaaaaaaaaaaaaaaaaaaaaaaaaaaaaaaaaaaaaaaaaaaaaaaaaaaaaaaaaaaaaaaaaaaaaaaaaaaaaaaaaaaaaaaaaaaaaaaaaaaaaaaaaaaaaaaaaaaaaaggggggcgtttaaaaaaaaaaaaaattaaaaaaccggggaattaaaaaaaaaatttttttaaaaggggaaaaaaaaaaaaaaaaaggggccggttttaaaaaaaatggaaagggaaaaaaactgggggaaaaaaaaaaaaaatctttgaaaaaaaaacccttttt

SEQ ID NO: 28692 - DNA, 154 bp, Gossypium hirsutum
  unsure (1)..(154): unsure at all n locations; Clone ID: LIB3148-018-Q1-K1-C5
gcgaggctagccgataaatgccagaaagagaagagtatttctctgaggatccaagtgataatattggggggggtttgacttaaaagtggatacaattgtnaagattttcaatctatattttacaatcgttatataaataaaatttaattaaata

SEQ ID NO: 28693 - DNA, 442 bp, Gossypium hirsutum
  unsure (1)..(442): unsure at all n locations; Clone ID: LIB3148-018-Q1-K1-C6
cccacgcgtncgcttntgatagactgtggcgaggtagcccgctgagagcttacagtgatagaaatgactggttatcaaaggaaatgcagcagaatattccaggcggctacaatatggattctttatggctaattgaggctaatcaaaagaatcacccatatcttctagattggtactatacctctcgagcgcaacagatgcctagttatagaagagacactgcagcaaggccatttgaaccagctgaggagcagcataagaattactggggtccgatcaacacaacgcatgatgaagcaagagataaagaataccggccacaccattttgatgatgggtccctgtcgcatcttgaagcttcaacatcagctcctttcttccatgagagtgtacttcagcatcatgatacaaatgtatcggtgcaccatacacnggagctgtg

SEQ ID NO: 28694 - DNA, 443 bp, Gossypium hirsutum
  Clone ID: LIB3148-018-Q1-K1-C7
cttaacccttcgtcctcccaacttccacacccatacgaaaatgacaacccgcttcaagaagaaccgcaagaagcgcggtcacgtcagcgctggtcacggacgtattggtaagcacaggaagcatcctggaggtcgtggaaacgccggaggcatgcaccaccacaggatcctctttgacaaatatcaccctgggtatttcggtaaagtcggtatgaggtacttccacaagctccgcaacaagttttactgccccattgtcaacatcgacaagctctggtctctcgtcccacaagacgtgaaggcaaaagccaacaaggacgccgcgccgatgatcgacgtgacccagttcgggtactttaaggtccttggaaagggtgttttgcccgaggaccaaccgatcgtggttaaggctaagttggtgtccaagacagctgaaaagaaga

SEQ ID NO: 28695 - DNA, 361 bp, Gossypium hirsutum
  unsure (1)..(361): unsure at all n locations; Clone ID: LIB3148-018-Q1-K1-C8
ttttgagtggcaatatgagtgatcacacgtacggccacccctatcctcctccaggtggttataggtataatcaagggccacctccaccagtaatggcacctcctcagtattatggtgccccaccaccgccacccaggagagaaccaggttttcttgagggattccttgcagctttatgttgttgctgtctcttggatgattgctgctgcgacccgtctgtgataattgtggactagggatcttacatcaccttactgtttatctaaagctttgacaacagtatgatttcatcacatgtatttatattttgcagatggagttgacaaatccatttatgtattgtaatatgtgaagcttagnt

SEQ ID NO: 28696 - DNA, 57 bp, Gossypium hirsutum
  Clone ID: LIB3148-018-Q1-K1-C9
cccacgcgtccgcttcttgctctgtgagtctcgtagcatgtaagatgctatgtcaaa

SEQ ID NO: 28697 - DNA, 336 bp, Gossypium hirsutum
  Clone ID: LIB3148-018-Q1-K1-D1
atcaaaggtttggagggcttctagtctggatgttcatttcaaattcacatgcagtaccgggtctgttcgtggaagattattcattggtggctaatttgaaccaagagttaattgtatgaatcccctattggtttacgtggtgcagagctcaacttaatgttgaagaactactgttagttgttgaagttggtcatacgaggtacatgtctaccgcgtaacaagatcctttacataacgaaaattttcagcggactacggtcctgcgggttgttcccttgaaatatcatgggggtcttcacgtacattctgttgtcttgatatacattcatattgcac

SEQ ID NO: 28698 - DNA, 506 bp, Gossypium hirsutum
  Clone ID: LIB3148-018-Q1-K1-D10
gcctgtctccactgctgtcgagtgttcttgtgattcgtgatctgccttcttattttctgcggcttgtgtttatctgagtggctgggtgtctcttaaaacttttcattgtcttactgatccttcaaattgttatttaatattatctttcttttgatttttttcaatattatctatatttttttttttatcttataaaacttttaaatctaatacatttcttattttctaaatatgaatatttatttttctatatttttttcttttcttttttatatttttattcactttttttttttattaaattttatttccttttttaattttttactcttcatatttctatatattatttttttatatttttttttttatttttctatatattattttttattatttattattcttttttctaaattttttttttttttttaatcttattttattataccttttttaaattcttttttatatatcttttattttttctatttaattatcttttc

SEQ ID NO: 28699 - DNA, 308 bp, Gossypium hirsutum
  Clone ID: LIB3148-018-Q1-K1-D11
cgggcgacccacgcgtccgcataaccataatggacaagcatctccaatttacttccacaatggttattaaacactatcattgatgtttttttttaaaagaaaagggagcaaaaaaaaaaaaaaaaatattaataattttataaaaaaatataaaattaaaaaaaaaaatattattaaattaattataaaaaaaacttttttttttttaatattatattataaataaaatttttttttctccttaattttattattaattctattttattcatatatcataaaatatataataaataattcttattttt

SEQ ID NO: 28700 - DNA, 408 bp, Gossypium hirsutum
  Clone ID: LIB3148-018-Q1-K1-D12
tgctatggcatccaatgaatctattatcaggaaggatttaagataccctgaaattgaagaaaaagcactgcaatttattcttgacaattgtgaatcaagcatatcaaagtattctaaattcttgaaggaaagtggctccatggatttggatataacatctcaagaactacagaatcgaggagtgtttctgaaacagctagcagtagatttatgcataagtgagcagaaaatactacatcgtgctcaatatatactgaagaggagattgagggatatgagaagtggtgaactgagagcttaatcttttgatggctacaaccttttccccctctaccttcgccagtgacgaaacttgaacttagaaatgcattattggaccgtctctttggcgtctttggaggacttagt

SEQ ID NO: 28701 - DNA, 375 bp, Gossypium hirsutum
  unsure (1)..(375): unsure at all n locations; Clone ID: LIB3148-018-Q1-K1-D2
cccacgcgtncgataattttgtcacggttgttcttctcatctatccattcctttggttgaatctggacctgcatttatttaagcagcgacggtcaaaacttggtaagcaacaccacaagaagaagaaaatttgaaggtcggaggttccgatttcaaaccaataattgtggaattcaaattacaactactttgatattccatgatactatgttgatggacttcattaatttccagtgtatttcttatgtaaccagcaacatgtacttcttgggatgatatgtgcccttattttaagattaaatattcaaacacatgatcatatcacagcgttctgttgtttgaactcaaaatgaatatatttttgaaggatttttg

SEQ ID NO: 28702 - DNA, 247 bp, Gossypium hirsutum
  unsure (1)..(247): unsure at all n locations; Clone ID: LIB3148-018-Q1-K1-D3
gatttacacatgaacattggttcttttgcaaacagggacccccccaaaaattgagaaatttcatggatgtttactcgtgtttcgagtacacattcggattcattgttatgccattgctttttttggcccaaatatcagctgttgtttgttcaagtactggtgatgattatgatacttgaaataatgatatacttatagattgncnnancaaaacaaaaaaaaaaaaaacaacaaaacaaataatatt

SEQ ID NO: 28703 - DNA, 114 bp, Gossypium hirsutum
  Clone ID: LIB3148-018-Q1-K1-D5
gcgcatgcatgtacatggtggagatgttggcatgattaatgttcagacaatataaactacaataaaatagaatggccatgtaagaaacgagagaataaagattagcccttatac

SEQ ID NO: 28704 - DNA, 379 bp, Gossypium hirsutum
  Clone ID: LIB3148-018-Q1-K1-D7
cgatgattggatggacccagttggagctatcattctggctctatacactatccggacatggtcgatgacagtactagagaacgtgaattcattagtcggaaaatcagcagctccggaataccttcagaaactaacatacctgtgttggaaccaccacaaggccataagacatatcgataccgtccgagcctacaccttcgggtctcactactttgtggaagtcgacattgtactcccagcaaacatggcattgcaagaagctcatgacattggggaatcattgcaagaaaagctggagttgctgcctgagattgagcgtgcctttgttcatctggattatgaattcagtcacaaacctgaacatgcacaagcacatgct

SEQ ID NO: 28705 - DNA, 243 bp, Gossypium hirsutum
  Clone ID: LIB3148-018-Q1-K1-D8
aagaaatcaccagttctgagctctcgagttgtgaattatgattcttgtggtctagttgtcttctgatgaatttgcctttgaacaatttaaagcgcctttacagtttcctttttctttttttcttatcttaccgccttcgatgaaaactggagaatttcattaaagccatgggaggtatttaggtctggtataatttgatattgggttgtcatttttagactaataagcatgacaattcgagcc

SEQ ID NO: 28706 - DNA, 410 bp, Gossypium hirsutum
  unsure (1)..(410): unsure at all n locations; Clone ID: LIB3148-018-Q1-K1-D9
ccgtccgcctcacgccgnttccgcccacgccgnntccggttgctcatatgtgtgacctttngnnctttcnnatatctcananntcgcgcctagtacntnnttcaaaggattgtgtggtgagtaannnagaagaaacccctttttcngnagttcccgagcattatcntnncgattcnncgattgggtgaggggattgatttctntnncagtgtcnnaatgggnngattttacctnnccgtctcnngtggtaatacccccctgttcaatcaaatagcttcnntccgtcgggaccaacacnnctcgagttagcaaggggtcactgtggaaaggatcanccaatgtcntggttcttgaaacccatctcccgatgtggaaaaaaganaagaagctcctcgaacctggttccgaga

SEQ ID NO: 28707 - DNA, 395 bp, Gossypium hirsutum
  Clone ID: LIB3148-018-Q1-K1-E10
gtccaagttcttggctggatttgtgttgccatctctgtatccgtctttgcagcacccttaaacattatggcacgagttatacgaacaaagagcgttgagttcatgcctttcaccttatcatttttcctcacattgagtgcagtaatgtggtttgcttatggactatttattaaggacctctgtgtagctctccctaacgtactaggcttcatcttggggatgctccagatgcttctctacgccatttacagacacagtgaaaaggttaacatagaggaaaagaagctaccagctgaacaaatgaaaagcatcaatgtcgtccttaccacattaggtgcctctgaagttcaccccgtagttttggatattcacactgatgatacaaaggaagaaga

SEQ ID NO: 28708 - DNA, 175 bp, Gossypium hirsutum
  Clone ID: LIB3148-018-Q1-K1-E11
cccacgcgtccgattgatcttgaaacacatttgttttttattataattaaatgttatagtgaaaatgtgtacctgaaaaagaaaattgtgtattaaaatattatataatatattgtggagtgtatcttgtatttttcgatcaaatcaaaattaaagcagagacgatattacgatt

SEQ ID NO: 28709 - DNA, 443 bp, Gossypium hirsutum
  Clone ID: LIB3148-018-Q1-K1-E12
cccacgcgtccggctcgattgacacagtttaaatacttggcaagtgactgcttcaccttggccgacctgcatcacattcccaacattcaatgcttgttggctacacctgccaagaagctgattgattctcgtccgcatgtttgtgcttgggtgaaggagatcactgctaggcctgcttggtctaaggtcctcgctatgcaaaaacagtgaaaggtttcggcgatttggcgcccacccgagctgatatcagtagtccaatgttgaataagtccttcgcatgtttatttcggtgtttaaagtctaattcgcatagactttttttgagtgtggtctgcattcttggggccctcttcttatgttttttggccttttatgtgtcgattgactttgtgcttgtggttggttcatcgctcatctacgactaatatactacaataatttac

SEQ ID NO: 28710 - DNA, 316 bp, Gossypium hirsutum
  Clone ID: LIB3148-018-Q1-K1-E2
gaatctatcacttgaggcaccactcaccactttctcctctccccctgaaaacaacagcaaaaaaagccccttttattatccttttatattcttccatatctttcagatcatggagatcacggaaaagctgctaaagttgaagtaccccataatcgtaatactcactctttcgcttaccctttcagccctcatcatttttgcaccttcttttctcaccattttagcctacttttggcctcttttgctttccactgccctcttcctagttgctgtcatcttctttgggaaaacgtctgctcataccgccgcgtctgac

SEQ ID NO: 28711 - DNA, 337 bp, Gossypium hirsutum
  Clone ID: LIB3148-018-Q1-K1-E3
gttcgtttatcgtttgcattaattcgtcgaccggcttgtttgctctgctttttcttttagtagtctgggtttttatttttcttatatttggtttttgtttttgtttttgttttttttgctttctattcttggtgcctttgaaacctttagaacaatttgcaagattccaatgtttttttttgcttttaaaaaaaaaaacaaaaaaaataaaaaaaaaaaaaaactaatttaaaactattatagatatacactgacctattactaaaagactgacatctactttgggaaaaacatttgctcataccgtcatgtatgactccgatccggctgataaggt

SEQ ID NO: 28712 - DNA, 397 bp, Gossypium hirsutum
  Clone ID: LIB3148-018-Q1-K1-E4
ccacgcgtccgaaaaaaaaaaaaaaaaaaaaataaaaaaaaaaaatatttttaaaaaaaaaaaaaaaaaaaaaaaaaggagaggaaaaatatgggaggggaggggaggaaaaaaaaaaaaaaaaaaaaaaaaaaaaaaaaaaaaaaaaaaaaaaaaaaaaaaaaaaaaaaaggggggggcccttttaaaaaaacaaaattttatttccccttgtttgaaaaaaaaaattttttttttggggccccaaaaataaaataaatggcccgggttttaaaaacggggaaatggaaaaaacctggggttaccaaaaataaaaccttttaaaaaaaatccctttttacaaatttgggaaaataaaaaaaaggccccaacaaatcccctttcaaaaaatttgcca

SEQ ID NO: 28713 - DNA, 451 bp, Gossypium hirsutum
  Clone ID: LIB3148-018-Q1-K1-E5
aaggtattaaacgggcaagcacttgagcaaggacagtgtcagcaacagcatcaaaagatgatgaggatgggaggggatgaaatcaacgggggattgcttgatcaaacggtgcaggttgagttatcaaatatgcatagtagatcagataatggttttggagcgttggattggcaagggaacgaagatcaagggttgtttgatcttccgaacgatgttgataagacatattggagtcaaactcagtggactgatcaagatcaccatggcctctatctcccgtaaattacctctgacccttttttatcccacttaaattatttattaactacaaaattgaaatagagattaaaaaaatctcataaaatcaaagcttaaggcaggatttaactgttattttcgttattaattatgataatttcgtccaagtgtgtactttatacagttatatggg

SEQ ID NO: 28714 - DNA, 308 bp, Gossypium hirsutum
  unsure (1)..(308): unsure at all n locations; Clone ID: LIB3148-018-Q1-K1-E6
cggaanntaccgggacgacgccacgcgtcgcggtanaaagatannaacattaggattcaaggctagcgannnatgnnaatgtgtttataggcgcccttctgaccctgagggactggcgcctgaatgcgttcgtgtcgtgcacgaccnntgaaagtnncagcatgnnaatattcagggggattttcgaccgccctatgtccgnngctgaaaggtnattggttgannttagcatcannatccattgnntttaattctgggtcctcaaatgccttgaaaagggattctttttttccttnctcccaacctat

SEQ ID NO: 28715 - DNA, 341 bp, Gossypium hirsutum
  Clone ID: LIB3148-018-Q1-K1-E7
aaaaaaaaaaaaaaaaaaaaaaaaaaaaattatgttataaaataaaaaaaaaaaaaaaattaaggaggggtgaataagaagggggggaatggtatataatataaaaataaaaaaaattaaatgagacaaagggggggaacgttttaaatggtaaaacttttggagtttttcaatttaataactttgtattttattcgggtttccaaaattaaatgtattggcgaatatttaaaaactgatggactttaaaaacatttgcgtagcctaaattattaattttacaaacaattctccttttcattaagggcttaagatgaagaggttacgcgcaaattgacctt

SEQ ID NO: 28716 - DNA, 347 bp, Gossypium hirsutum
  Clone ID: LIB3148-018-Q1-K1-E8
gagatgaggaagaaatcaagggaagatggacttcagacaacaggagaaggactggagtggggagtgctctttgggttcggacctggcctcactgttgagactgttgtgctccatagtgttgctgcttaaagttaaacaaacatgccttttaagtaattggtcgtgctccacttggcttgcagttttatcttcttcttttttccttttttagattatttaaatcctatgaatttgtgtgtttattgttaaagactagaacactttgatggtgtgggcgggaagcttaacgcctattcaattcatgtaccaacttatattaaatttatggcaataataagttcctttgc

SEQ ID NO: 28717 - DNA, 388 bp, Gossypium hirsutum
  Clone ID: LIB3148-018-Q1-K1-E9
ggaaatgaatatttatgtgactttgggctaaattaaaaaaaaaaaaaaaaaaaaaaaaaaaagaagggaaaaaaaaaaaagaaaaaaaagaaaaaaaaaaaaaaaaaaaaaaaaaaaaaaaaaaaaaaaaaaaaaaccaaaaaaaaaaaaaaaaaaaaaaaaaaaaaaaaaaaaaaagggggggcccttttaaaaaaacaaatttttttctccctttgattgaaaaaaaaattttttttttttgggcccaaaaataaaaaaaacgggcccgttttttaaaaaggtgtaaatggaaaaacccctggtttaccaaaattaaatgctttgaaaaaaaacccctttttcacagttgggtttaaaaaaaaaaagcccaaacccattccctttt

SEQ ID NO: 28718 - DNA, 148 bp, Gossypium hirsutum
  unsure (1)..(148): unsure at all n locations; Clone ID: LIB3148-018-Q1-K1-F1
cccacgcgtgcgtntatattaatctatgtgaatccaataatcgctaactgttcgatcctagagtgagcaggttcgcttacctggagcgagaggcctgtgacaagcttctttatgactcattcccatacatggaaatcgagaatgggat

SEQ ID NO: 28719 - DNA, 93 bp, Gossypium hirsutum
  Clone ID: LIB3148-018-Q1-K1-F10
cggacgcgtgggcggacgcgtgggcggacgcgtgggcggacgcgtgggttaaggctccatagttggttgtcaaagtatttcagttcattttgt

SEQ ID NO: 28720 - DNA, 369 bp, Gossypium hirsutum
  unsure (1)..(369): unsure at all n locations; Clone ID: LIB3148-018-Q1-K1-F11
gaggagaatagtaacacagtgaattgcactaacttgtgggattttgacaagttggtaaacatgctggtcatccacaagagagattttgcatggaatttggttcttggtgtcaaaaaaggcttttataaatctggctattactttgttgtccacaattgcaaattagaatatttgaattcagtttgtttcatagattcatctgcttcatgttttttttttttacgggctatggagactaaattttttgaggtccatagttgtccctctcaatgatattacttttagagttttttctctcctaaaaaaaaactnantanaaaaaaataattaaaaaatataatttatataaaaataataaaaaagggcggc

SEQ ID NO: 28721 - DNA, 105 bp, Gossypium hirsutum
  unsure (1)..(105): unsure at all n locations; Clone ID: LIB3148-018-Q1-K1-F12
aattacccgggtgcgacgccgagcgcgtccgnngaagcatgtcggcacaaggtaccataggaagtatgtctctttctaactgnngttggcccaattgaaaatcat

SEQ ID NO: 28722 - DNA, 148 bp, Gossypium hirsutum
  Clone ID: LIB3148-018-Q1-K1-F2
gccacgcgtgtgtctatattaatctatgtgaaccgaatagtatctacctgttcgctcctagagtgagcatgttcgtttacgaggagctcgcctccggtgacgagcttctttctgactcattcccctacaaagtaatcgagaatgggat

SEQ ID NO: 28723 - DNA, 444 bp, Gossypium hirsutum
  unsure (1)..(444): unsure at all n locations; Clone ID: LIB3148-018-Q1-K1-F3
caaatttgcaatccgctatgttcttagtggaaaggcttgggataaccttttggagaacaagactggcttgactacnaagaaagattacggaaaagaggaaagggaagcacaatgggcagctgcgcagaggactctgcatggccttcaaccacctgaaaccacaagcattttcaatgaaaggagcagttacagggaactttcagaaatcgcagagcaggccaagcgcanggctgaggttgcaaggctgagggagctgaatacactgaaggggcatgttgaatcagtggttaagctcaaggggcttgatatcgataacatccagcagcattacaccgtttaaagatggatgctatttcccgtccaagaaaaaaagtagttataatgacgaacaatcacccccgatattaatattaatattggtatcaatcggcttatagtagtagt

SEQ ID NO: 28724 - DNA, 313 bp, Gossypium hirsutum
  Clone ID: LIB3148-018-Q1-K1-F4
cccacgcgtccgcacctatacaagtttctttctttctttctatctaaaataatgtataaacatcagagtatgatatcaatagctattatcacagtcattcattatatgaaaaaaaaaaaaaaaaaaaaaaaaaaaaaaaaaaaaaaaaaaaaaaaaaaaaaaaaaaaaaaaaaaaaaaaaaaaaaaaaaaaaaggggaaggggttaaaaaaaaaaaaaaaaaatggggggtgggtgggcggggaaaaaaatttttttgggtggaaaaaaaaaaaaaattagtggagttagttgaataggataaaaatgggaaa

SEQ ID NO: 28725 - DNA, 305 bp, Gossypium hirsutum
  Clone ID: LIB3148-018-Q1-K1-F5
gcatgtatcaacttgcattaggtaactgtttgttgacttatcggcagtataaaacaagttgggagggttgacaaatacggggagtgaagcaagatttgagctgggacaatgcagctgagaagtatgaggaagtgcttgttgcagccaaatatcagtggtgagagctctgtttgatctgatttaacctttttatcacctttttaccacaaattttgggtcttgttatcaaatgttgttttaaatgttgtattcttatttcttttgctctcttttattttgattgtttgtgttttttttttttaatt

SEQ ID NO: 28726 - DNA, 438 bp, Gossypium hirsutum
  unsure (1)..(438): unsure at all n locations; Clone ID: LIB3148-018-Q1-K1-F6
ncgttctagatctgttgtatttgggctacttctttttcttttctttttaataatctttttgtttgaagtcggctctgatgtgtgtggatgatttgagagatttatcttgaaagaattatatgttgttattattggatctctgttattcaatttcgatttgattaaaaaaaagttggggtttgtttcaaaaaaaaaaaaaaaggtcggtctttttctttctttttccgtaccctgtgggctatacttttttcgtgctatctttttccttttcttcttatattttctttttcattttttcttttttttttttttttcttttttctctttttttcttttcttttttttcatctttttcattttgtttttcttttttagtttctttttctttctttttctttctcctattttttttttttcttttcttttctttattttttt

SEQ ID NO: 28727 - DNA, 411 bp, Gossypium hirsutum
  Clone ID: LIB3148-018-Q1-K1-F7
ccaaggagggagatacttttggatacacaatacaggtcctgttgggtgtttaccatatgtaatggagcgtatcccggtcttagcaggtcaaattgatgactatggatgcgcctctccattcaatgaagttgctcagtttttcaaccgtggattgaaaaagattgtggaacagttacgcaaaaatttgccccatgctgcaatcacttacgttgatgtctactcagtgaaatactccctaattagccaaggtagcaagcatgggttcaagcaccctcttagaacatgctgtggccatggtgggaagtacaattataacaagaacttggggtgtggagcaaaggttaacaaacatgggaaagaagtgttggtgggagctccttgcaaagatccttggacttacgtaaactggga

SEQ ID NO: 28728 - DNA, 372 bp, Gossypium hirsutum
  unsure (1)..(372): unsure at all n locations; Clone ID: LIB3148-018-Q1-K1-F8
caangttgaccagaacctcatacatgatcttcctctccgtcaaatcagtaagattatttgtgcggtgtttttcacagaagaagaggctcaacatgtttacattaactgcgctgtttcattcaataaatatttttacaacattcaaccaactatttaaaaatattctgtaacagtttcttttaaattttccccatgctgcaatcacttactttgatttctacttatttaaatactccctaattagccaatgtatcaagcatgtgttcaagcacccttttaaaacattctgttgccattgttggaagtacaattataacatagatctttgtgttttttatccaaatgttaacaatacattttaaataattgttt

SEQ ID NO: 28729 - DNA, 394 bp, Gossypium hirsutum
  Clone ID: LIB3148-018-Q1-K1-F9
gtggggaaatgcagtaaaccggaagtggaagtatgagtaaagcacgtgacatgcacggaggatgctgctgcctttgtggcattggcagcggctatggatctaagcatggatgcttgtcagtccttctctcaaaagttaaggaaagagctgagacagcaaagtcagacctttgtagattaagggtttttgtcgatttagttgtttttggattgggatttgggattctttcggcagattagctaacagcagtttttgagctgaatgtaaggattagttttgtacagtgcggaatgacgaggcatgaacctttttttatttattttaaaaaactttgtgattagtgaatttgttgattgtttaattccttgtactttctcctcatagatatatgtgc

SEQ ID NO: 28730 - DNA, 63 bp, Gossypium hirsutum
  unsure (1)..(63): unsure at all n locations; Clone ID: LIB3148-018-Q1-K1-G1
cccacgcgtgcgtntatattaacgtatgtggatccaataaangataccggatcaatcccagag

SEQ ID NO: 28731 - DNA, 431 bp, Gossypium hirsutum
  Clone ID: LIB3148-018-Q1-K1-G10
ggatgggataggaatgaatgatggcagttaatatccttataaaaaaaaggaaaatatagaggagagctgtttttactgaagaagcgcatgccatctcaagatcttatatgcggcattagcggatttataggtggaaaccgttcaacttatttaagtacatggacaatagttcatataatttcttttttatatttacattatagtcttttcttcattcgaatgtgctacatgatgatttatttttatgtttctatacttttacaatttgttgcctttttttatattttacattttttgactttcttttcttagattaatttttttgttgtataattaactatatttatcatatttttgactcttttactactttgcctgtttatcttcaatttttttagaaaaatttttttgaatttaccaatttttttttt

SEQ ID NO: 28732 - DNA, 231 bp, Gossypium hirsutum
  Clone ID: LIB3148-018-Q1-K1-G11
gttgtgccgaacacctgtccagttattgttgatgtgttaagtttgttatgtttgtgggtcgtatgctgatgtgagctggccactaggcaggggaagcttacaagtaaaaataattgctttttataaacgcttttagttgttttttaggtttgaataagttcgtttttgcattcaagtttctctcttgttcgaatttacatgaaggtgctaataatctattattaagttatt

SEQ ID NO: 28733 - DNA, 405 bp, Gossypium hirsutum
  Clone ID: LIB3148-018-Q1-K1-G12
aacaaaaggaagtgaaaaaaaccagagtttgcatccatggcgacgttggctactgtgggaagtagtgcagttctggggttcaacaaaacagagcctctgaagacgaacccatcttcaccatttcttggtttcgttacttcccaactcagcggcatcaaaatctcttgcaacctccctgtcgtggtggcgcctttaaaacccatatcttcccctttcactcctgctctccagcctgttgctcgtaggatatgccctttcaccggcaagaaagcgaacaaagccaacaaagtttcgttctcaaatcacaagacgaagaaattacagtttgtcaacctccaatacaagaaggtttggtgggaagccggtaaacgctatgtaaaattgcgtttatcgaccaaggcgttg

SEQ ID NO: 28734 - DNA, 63 bp, Gossypium hirsutum
  Clone ID: LIB3148-018-Q1-K1-G3
cccacccgtgtgtctatattaacttatgtgaacccattttaacctacctgttcatacctagag

SEQ ID NO: 28735 - DNA, 154 bp, Gossypium hirsutum
  Clone ID: LIB3148-018-Q1-K1-G4
cccacgcgtgcgtttatattaacctctgtgagctcaattttatctaactgatccatcctagagtgagcatggtcgattacctgtagcgagccgcctgtgacaagcttctttatgactcattcccctacatggacatccagaacgggatactttt

SEQ ID NO: 28736 - DNA, 446 bp, Gossypium hirsutum
  Clone ID: LIB3148-018-Q1-K1-G6
cccacgcgtccgcttccatgtatctctgcactcttcttgcgatatctattcccgtcgactccttgctttcgtgaaagtatttattcttggaagaccagatcatcaacaaagcataacaaaaaagtcgacagtgttcatcggaaccactcgtaaacactcaggttagccattcccatatattttgactcatataagtaatgacccaagagagccgtaaatttatccagacctctattgatatagggtatgtaaagcccaaaatctgcccgggctcataccagcaaacccctccacttgcccacttgtgccgttgccccatgtgcgcaaccactcaacctcgcacgcctctgctccgcgccagcctctacgcatgcccatcaccgtctgcaccccatgcctctgtcacctccatcgtgcccatcccatgcaaagaaacaaaacagaaa

SEQ ID NO: 28737 - DNA, 321 bp, Gossypium hirsutum
  unsure (1)..(321): unsure at all n locations; Clone ID: LIB3148-018-Q1-K1-G8
acccacgcgnccgccaactcttaagatcataatttgaagcctaaataatcaaccgacgaaaattaaatacacggtttgttttttttgagagaggagttggggctaataaaaaaataaataaaaaataacataatttttcttattatattatattcacttaaatttaacttttttatattaatataatttttttttatctattattattataaaaaataaattttaattttttttaattatataataattttttatattattttatatttataaaatttattttattattattataattttttttaaatttttttaatttta

SEQ ID NO: 28738 - DNA, 300 bp, Gossypium hirsutum
  Clone ID: LIB3148-018-Q1-K1-G9
gttttgaaatcataaaagctgtccatcttgacctaatgccgttcgacatggaacgagacctgctggctccaacatataagaagaagaggccccagttgcttaaatattatcagagtgtaatcgatgagatgtacaagagtgcaaacaaaccaaatgcttgataaaatgcttccaaaggcgtcggtgatatgttagatgatatggggttaaaacttgtgtattctttggtagtttggactgtacatgtagttccttcatcatcagaatttgtttaccaaaaaccaaattccctttgataca

SEQ ID NO: 28739 - DNA, 337 bp, Gossypium hirsutum
  unsure (1)..(337): unsure at all n locations; Clone ID: LIB3148-018-Q1-K1-H12
acgcgtcacgcgtacgcgtgacattcacgcggtacgcccattcgtttcgaccagcgcgttcagttgaccctgtgagctgtggtaaagcaaggtggcgcagggcacttggccatacagaccatagtatttagtaggaccagcaaaaagaaaccagagtaagaaagaagggagccaaagaaaggaagggtgaagcccaaaaatagaagatgaacacaaagaaagaagcgtgatacccatagaagggaagattgaacaaactgaaagatganatgccttaaaaacaaaaaataactggaaaaaacccttactttaacccaactaaataaatattgggcgg

SEQ ID NO: 28740 - DNA, 72 bp, Gossypium hirsutum
  Clone ID: LIB3148-018-Q1-K1-H2
gtccgataaaacaaaggaaaaaaaaaaaaataaaaaaatttttttataaaaaaaaaaaaaaaaaaacaaaat

SEQ ID NO: 28741 - DNA, 58 bp, Gossypium hirsutum
  Clone ID: LIB3148-018-Q1-K1-H3
cccacccgtgggtctatattaacttatgtgaacccattttaccctacctgttcattcc

SEQ ID NO: 28742 - DNA, 433 bp, Gossypium hirsutum
  unsure (1)..(433): unsure at all n locations; Clone ID: LIB3148-018-Q1-K1-H4
aggccattacatcattgcttctgactggaagtttttcgttcacatgacagaagatatgttttgtggtgaagtccacctggttgatctgcgagtcatgganaattgcttgaaagtttccaaaggagtggaccatgtcttcaacctcgctgccgatatgggtgggatgggtttcattcagtcaaaccactctgtcattatgtacaacaacactatgatcagtttcaacatgcttgaggctgctaggattagtggagttaagaggtttttctatgcctcgagtgcttgtatctaccctgaatttaagcagttggacactaatgtgagcctaaaagaatcccatgcctggcctgctgagcctcaagatgcttatggcttggaaaagcttgcaactgatgagttgtgcaagcactacaccaaagattttggaatcgag

SEQ ID NO: 28743 - DNA, 408 bp, Gossypium hirsutum
  Clone ID: LIB3148-018-Q1-K1-H5
cccacgcgtccgacaaaagcaaaccctacccttttttttagagatctgagatcagaggtttcagagggagggaagacagagaagaatagaacattggagatcagtgatgggatctggggctggaagtttccttaaggttctatttaggaactttgatgttcttgctgggccagttattagtctgctgtaccctctatatgcctcggttagggcaattgaatcggagtctcgtgccgatgacaggcaatggcttacatattgggttctctattccatgatgacattgctggaactcacttttgccaaagtcattgaatggattcctatctggtcctatgcaaagctgattttcacttgctggctggtcattccgtacttctctggcgctgcctatgtttacgagcacta

SEQ ID NO: 28744 - DNA, 109 bp, Gossypium hirsutum
  Clone ID: LIB3148-018-Q1-K1-H6
cccacgcgtccgcggagattcccgaataggtcaacctttcgaactgctgctgaatccatgggcagacaagagacaacctggcgaactgaaacatcttagtagccggagg

SEQ ID NO: 28745 - DNA, 265 bp, Gossypium hirsutum
  Clone ID: LIB3148-018-Q1-K1-H7
ggggcgacgcacgcgtccggggaattgtcaatttgtggttttagttattaatttaaactgtatggcgtgaatcctttattgtttgtttgttttcaatcgagctgaggcttatgttgtaaaaaaactttgttgattttttaattttagatcatgtattggatggaaaaaaaaaaaaaaaaaaaaaaaaaaaaatttttattatataaaaaaaaaaaaaaaaaaaaaaaaatttaaataatatattaaaaataaaaaatattataaa

SEQ ID NO: 28746 - DNA, 317 bp, Gossypium hirsutum
  unsure (1)..(317): unsure at all n locations; Clone ID: LIB3148-018-Q1-K1-H8
tacgagaatgtactcaaattgttaagaccataaatgaaggaatgattgaggaaggcatatttggttgtattcttagtgttgggttacaggcttcacattgtaccatacgaagatcatataatttttctgctatcttattgttttgcactcagtggtgaaatagctnaaaaaaaaattttttaaaaaaaaaaatataaaaaaaaaaataaaaaattaaaatattatattaaatattaattttttttataattaaaaattatttaataatttattnttttttttattatttaaaatttttttttttttttttatatttt

SEQ ID NO: 28747 - DNA, 400 bp, Gossypium hirsutum
  Clone ID: LIB3148-018-Q1-K1-H9
cccacgcgtccgccaaacctgacctaatcaagggactcagggctcacactgatgctggtggaatcgtcttactcttccaagatgacaaggtcagcggccttcagcttctcaaggatggtcagtggattgatgttcctcctatgaaacactctattgtcatcaaccttggtgaccaacttgaggtaatcacaaatggtaaatataagagtgtgatgcaccgtgtgattgctcaaacagatgggaccagaatgtccattgcttccttctacaacccgggcagtgatgctgttatatatccagcaccagctttgctagagaaagaagctgacaaatctcaagtgtaccccaaatttgtgtttgaggactacatgaatctctatgctgacctcaagttccaagc

SEQ ID NO: 28748 - DNA, 402 bp, Gossypium hirsutum
  Clone ID: LIB3148-019-Q1-K1-A1
aattttcttgtatatttctattgtattagtaacattattgtctgtaatatgttgaccgatgagagtcttgtacccactctgaatggtatattcgctagttttgtcgcaagcccatatgagtctatcatcctccaccaatcgagagaggcacgcatatgatttctgtagtatcttcccttgagaaaacattgcccgttttggaagccatcaatctatcgatactgagatttcagatccagagccgactcttcaatcgactccatcttccagcatctttctagccgcaaatgtaacaatctgtttttagtcaaatcagaacagcagttttagaaccataaattcgaggttgaaatatttattttattattaatttgaagtctacaacatgatagtatgattgtg

SEQ ID NO: 28749 - DNA, 293 bp, Gossypium hirsutum
  unsure (1)..(293): unsure at all n locations; Clone ID: LIB3148-019-Q1-K1-A10
cccacgcgtccgggaccaagctaggtcggcctaagctaatcgttgcgcccatggttgataagtcggagcttccgtttcgaatgctttgtanaaaatatggggctgaggctgcttatacccccatgttacattcacgtatttttaacgagaacccaaagtaccgttctgaagaattcaccacttgcaaggaggaccgtccattatttgttcaattttgtgccaatgatcctgatatattacttgaagcttgcaggagagtggaatctcattgtgattatgtcgatattaatttg

SEQ ID NO: 28750 - DNA, 405 bp, Gossypium hirsutum
  Clone ID: LIB3148-019-Q1-K1-A11
aaaaactgtcaagagagctcttgcaacatatgggactcaagcactgaaagaaatgatccagaattgtatggcacaagatttttcatggaagggaccatcaaggttgtgggagaagatgttgttgagcctcggggtggctggcagtgaacctggcattgaaggagaggaggttgctcctcttgccaaggaaaatgttgccacaccctgagcataatcagaaggcaactatggataaagcttagtaacctgttttcttagacaaccaagtccaagtacctgtctactctcgatagccattggcttgaccggcggaaaacaaactgacctgccatacgtgaagtcagtagtgctatttttgagggtgaaaagtcaggagatagtatgatatatatccatagttatagc

SEQ ID NO: 28751 - DNA, 307 bp, Gossypium hirsutum
  Clone ID: LIB3148-019-Q1-K1-A12
aagcaagaaggatgttttatgccagccttttgtatcttcctgtatttatgtctggcctccgatttcatcgtctctcagacaatccgcagtgccttgcggaaaatcccaacagtattgttgagcttccatcattccccgaagctgttactgagagtgaagaagatgatcagaagaagaaagggagggatgccactgctggtccacaaagacccccacctgtggcataagcatccattgctgcatttgcctttcatcctgttccctcctaaggtgagcaatgacatatcgaactggcatctattttttg

SEQ ID NO: 28752 - DNA, 331 bp, Gossypium hirsutum
  Clone ID: LIB3148-019-Q1-K1-A2
gtgctgggaaattttctggagaggtatacagtttggacacagacacattggtgtggaagaagtgggaggattagcggggtgtagaaactcatcccgggcctcgtggatggtgtgctttttccagcggcgtaagggatggccaacttgggcttctagtttacggtggcaactccgctagcaatgataggcttgatgacattttcatttttacgccatccgtagcatagcaaagaaactgaaaactgagcaggggttaatggtgattcagtattaggattacaaagataatgtgtggctgtgtctagtaagtaatcttggaagtgctttatgt

SEQ ID NO: 28753 - DNA, 290 bp, Gossypium hirsutum
  Clone ID: LIB3148-019-Q1-K1-A3
ttctaattcttttatttgttataaatgaatttgatgttcacaaaacaaaaaaaaaaaaaaggaaagggaaaaagaaaaggggaaaaagaaaaaaaaaaaaaaaaaaaaaaaaaaaaaaaaaaaaaaaaaaaaaaagaaaaaaacaaaaaaaaaaaaaaaggaaaacaaaaagaaaataaattaacaaaaaaaagacaaaaaaacaaaataagggggggcgccttacaaaaaataaaaaaaaaactgcaaactgtacaatttttaatttttatttagggataagaaaacaa

SEQ ID NO: 28754 - DNA, 371 bp, Gossypium hirsutum
  unsure (1)..(371): unsure at all n locations; Clone ID: LIB3148-019-Q1-K1-A4
gtgagaaccctgaagctatggaggaagatgttgaggatgaagtggcagaaatcaagcctgcgcattttgaggaatcaatgaagtttgctcgtangagtgtgagcgatgctgacatccgcaaataccaagcatttgctcaaacattgcagcagtcgaggggatttggaagtgaatttaggttcgctgaaactggttccaggactgcagcctctgatccttttgctgctgctgctggaggagctgatgaagatgacctttacagttaaaattacctgtcatctatgttttccctaattcatgatttgacaattatcttctatctaaatacgtagtaagtaattaagttgactgtatgatttaaaacagtaaaa

SEQ ID NO: 28755 - DNA, 321 bp, Gossypium hirsutum
  Clone ID: LIB3148-019-Q1-K1-A5
aaaaaaaaaaaaaaaaaattaaaaataaaatttaaaaaaaaaaaaaaaaaaaaaaaaaaaaaagaaaaaaaaaaaaggaaaaaaggaaaaaaaaaaaaaaaaaaaaaaaaaaaaaaaaaaaaaaaaaaaaaaaaaaaaaaaaaaaaaaaaaaaaaaaaaaaaaaaaaaaaaaaaataaaggggggggaaaaaaaaaaaaaaatttttataaaagggtgtttttagtataaaatttttttttatgtaaataaaaatattattaaaaaaaatttgtgttaaaaaaaatatttaaaatgaaaaataggtttaaataaaaatatt

SEQ ID NO: 28756 - DNA, 331 bp, Gossypium hirsutum
  Clone ID: LIB3148-019-Q1-K1-A6
tcaaactgaggaagataaagaatgatcagctcaaggcagaggccaaggcaaagggtgaggtgattagcacaaagaggcagcctgagggcccaaaacctggtttcatggtcgagggtgcgatgttggaaacggttactcccattccatatgatgttgttaatgatctcaagggtggctactagatctactctgttttttggtttattcttggcataacttaagtaagctttgttagttattttggatgtgttgtttacgttttgtagtttattttgaagagttactgcttctgcaaagattttaatcttatcaatcattttattttagagat

SEQ ID NO: 28757 - DNA, 409 bp, Gossypium hirsutum
  Clone ID: LIB3148-019-Q1-K1-A7
gtgggctaggaattgcaaaacataccggatatctacttgcatgttcagacaaacaacgaagatgccatcaacttgtataaggaatttggatttgaaatcacagagacaatcaagaagtattacacaaatattgaccctcccagactgctttgttctcacaagcgaagaaataacaattaaaagctggtaatgttatctagaggaattggttattgttatcttagtgaatttgatcaattcctacacttttgggaattattttgacgataaggatgctgtgatgcatgaatgacatgagatatggcgttaatgatgccagttatgattggtttttatcttttgagctgaaattttgttagtcttgttcaacactttcgttggtcaatgtgaccattgccagttaatgtca

SEQ ID NO: 28758 - DNA, 377 bp, Gossypium hirsutum
  unsure (1)..(377): unsure at all n locations; Clone ID: LIB3148-019-Q1-K1-A8
gaacgaggggtgtacatttggtcatgtgctgaagatgtcgcaactgatccatccttgcaattggattactctctgccaggaaaattttcctcactttgttgttgttctagctgtttgcgggcataatactcagcagaaggtagcttgttcttcaacttgaagtttctttccaaagaggtaagttttgttacggaagggcacttcctcaatagtacgcataaccaagcgcgaagatggtttggctaagtgagagagatacaagtacatgataattcttttgcaacaatagaattagtaatagcatctttgtaactgattgtttctacttgaaaagaaaggtatattcttttaatgaaatgttttcctgtnnnanaaaa

SEQ ID NO: 28759 - DNA, 408 bp, Gossypium hirsutum
  Clone ID: LIB3148-019-Q1-K1-A9
cggacgcgtgggttttaccacatgccgaactggaccagccaagtggtcagctttgtctcggttcagaggagttcaaaattggcggcgacttaaatgaggctatttctcaggaacgctacaaggatgctgctgatttgagagacaaacttgataagttctgggcagcaaggaacttgaggaaattcaagtgacagttgtttatgctagagttttcaagtgtaaacagcagttattgttgaagctgacatctatcgatccggcggcaagcgattgatactcatccttttttattaattcatatcaatttatatgaaataggaaagtcccgtgaatatatatgtatataaataatttttgtacagatatagttagaatattggtaacaattattattattattattattat

SEQ ID NO: 28760 - DNA, 422 bp, Gossypium hirsutum
  Clone ID: LIB3148-019-Q1-K1-B1
aaaaaaaaaaaaaaaaaaataaaaaaaaaattatataaaaaaaaaaaaaaaaaaaaaaaaaaagagaaagaaaaaaaggaaaagaggaaaaaaaaaaaaaaaaaaaaaaaaaaaaaaaaaaaaaaaaaaaaaaaaaaaaaaaaaaaaaaaaaaaaaaaaaaaaaaaaagggggggggcctttttaagggaccaatttttttttccccggttttggaaaaaattatttttttttttgggccccaaaaataaaattcttggcccccgttttaaaaactccggaatgggaaaaaccttgggttccccaaataaattccctttgaaaaaaaccccttttttcccagttgggaaaaaaaaaaaaagcccccccccaatccccttcccaaaaatttcccccctttaattggaatttggaccccccctt

SEQ ID NO: 28761 - DNA, 305 bp, Gossypium hirsutum
  unsure (1)..(305): unsure at all n locations; Clone ID: LIB3148-019-Q1-K1-B10
agacttatagnagatcttatttaaccgaatttaacnacccgcccggggcacccaacacaaggttaattttataagccatcaggccatttaaaacacactttaaaaccacatattcttctaaaccaatattaatatcctatctatcaccttttatttataaaacaatttcttaccatatatcttggttaacaacaaaattttttttcattcccatcccctatcatcattatcattaattccaaattttttcaattacatgcccttaaaaaatggtatattaatcactcactctaattcacttcttt

SEQ ID NO: 28762 - DNA, 329 bp, Gossypium hirsutum
  Clone ID: LIB3148-019-Q1-K1-B11
agaagggaatggatcagaccctactgccaagaaaaaggctggtgggttgttgcaaaagaaagggaagtggaagtcggtttcggttggaatgatggagaagaatatgttgaaaatatgcacttattagagtttgcagtttgagtagaagaatgagtagcatttttcttgattgaactctttaagttggagagatttgttaggtcaaaagtacaattggatacggtggttgtaattttcagtctgaattgggaatcatgggcttatgatgatatcttggtatgcactctagaatcttttattcctgttaatatatagaatagttccctttt

SEQ ID NO: 28763 - DNA, 71 bp, Gossypium hirsutum
  Clone ID: LIB3148-019-Q1-K1-B12
aaacctttaatttttcttttaccaatcataaatttcatgtttgagtttgagtttaattatttattgaattt

SEQ ID NO: 28764 - DNA, 239 bp, Gossypium hirsutum
  Clone ID: LIB3148-019-Q1-K1-B4
gaagaaactaagagcatgcaaacaccggaggttgggattgcggacgatgatggttccgcacggccccttgttccgcaggttggcccaacttgatggatcattcaggttagtttgattttgtacatttgggccaataaattgttacctttttactcgaatctctattaatgaccatgtcttggctgctttttaacattgtatcatttgtacatgattttaagttgtcaacaatagttgtt

SEQ ID NO: 28765 - DNA, 331 bp, Gossypium hirsutum
  unsure (1)..(331): unsure at all n locations; Clone ID: LIB3148-019-Q1-K1-B5
agtgagtatcgctgcaaaacccggggtgaatttggagattcctgatggagctgtagttgaggagaatgaaattgatgtcccggaanacatctgagagaggcctgtctaccagcttaagtttccccgattttggtgtgttgcagtagataacgaacgcatcttttatataaataggaagtaaaataaaataaaaaaacctggaacagaagtagtatttgcgttttatatcacatatatatgttgtatgtcttgcgggagtttcccttgaattactatttttcgaggtatgatgaaaaacagtgttctgaatgttgtatctactttttacacc

SEQ ID NO: 28766 - DNA, 403 bp, Gossypium hirsutum
  Clone ID: LIB3148-019-Q1-K1-B6
cccacgcgtccgtgaagggtctccttggtacaaagagctcccaaaaaccaacatggggttggagactggtcactgccaagtcttcacggaatcagagaatgtgggaagaaccctagatctttcagttctcagatcatatgaagagctgcacggcaagctagccaacatgtttggcgtagaaagttcagatatgctgagcaatgtgttctaccacgatgctgctgcttctgttaagcacacaggagatgagcccttcagtgagtttttgaagacagcaaggaggctgaccgttcttacagattcaggcagtgacaacatgggaagatagagattgcctattttcgctaattgtacagtttcaaacccttggttttgattttcatttcatttcatttctttttgg

SEQ ID NO: 28767 - DNA, 405 bp, Gossypium hirsutum
  Clone ID: LIB3148-019-Q1-K1-B7
cccacgcgtccgcccacgcgtccgctttgcatcaaggctatttttcgaagtttacagttggtgcgttgttctatgtattttacagcatgccaaaagacgaagcccaattatatgctgcaaatgaactttataatagaggctggttttaccacaaggagttccgattctggttcatgagggtccccaatgtggagccactagttaagacaaacacatacgagagaggttcataccactattttgatcccaactcatttgaaataatccgcaaggataattttgtcgtccattatgagttgttggaaaagagaccgtcgctacctcaacattaatatttttccccctcatttacactgtaaagcacaagcatgtaactcattcctttataacatcagtttgcagcgt

SEQ ID NO: 28768 - DNA, 268 bp, Gossypium hirsutum
  unsure (1)..(268): unsure at all n locations; Clone ID: LIB3148-019-Q1-K1-B8
cacctccacccgagaaggtgtccatattgggtatcccacttctcgcagaagagaaaagcgaggtgatcttgttgaaattcttgagggcaanagatttcaaggtgaaggacgcattcactatgatcaaaaacactgtcagctggcgaaaagaattcggaatcgaaaccttgctcgatgaagatctagggaacgaactagaaaaggttgtttttatgcaggggttcgataaagaaggtcatcccgtctgttacaacgtctatggagaatt

SEQ ID NO: 28769 - DNA, 333 bp, Gossypium hirsutum
  Clone ID: LIB3148-019-Q1-K1-B9
attgaagttgttttgggaagcaaaatctgctaaactagcgaatggagatgtaaaacatatgctggcagcatatgaagcagcccaagccttgaaagactccagagttccactcactgctataaactaaaagtgagatggaaaggaacaaacatatttaagaaaacaaaggccgagtatagtatagtgttaagaacaaaaggtgtgtacagattcagaaccattccactctttttttttttctttcttgtatttcattaattgtttgtttgcttgttggattcagcaaattatcacatttacatactaaatcagattttcttctcttcttttctc

SEQ ID NO: 28770 - DNA, 358 bp, Gossypium hirsutum
  Clone ID: LIB3148-019-Q1-K1-C10
cccactttcactgctgaaggatttgaacttattgcggcgactaatcacctcggtcacttccggtctatcgcggttgttgctcgatgataagaaacaatccgattatccatcgaaacgcctcatcaacgtcggtgtccataacaggaaacacaaatacatgggccggtaatgtacctcctaaagcaaaccttgtggatctaagaagacttacatgttgactaaatggactgaacagctcttccatgatagatagaagagattgggatggtgcctaagcgtacaaagactgcatactctgccatatgctcactatgcaagatattcataggcgcttacatgaagtaactggcattacatt

SEQ ID NO: 28771 - DNA, 186 bp, Gossypium hirsutum
  unsure (1)..(186): unsure at all n locations; Clone ID: LIB3148-019-Q1-K1-C11
cggagcataagtatgagtcattttcagcaaatgtctgacgatcccatgaagcaagtttcccaggggttctagaagtcactgcaggatgtaaaacacaacanccgttataaaaatccagatgctgatagacaagttcgagatatctcgagtcgagaacacatcgctcaattcttgctctgagcacgc

SEQ ID NO: 28772 - DNA, 218 bp, Gossypium hirsutum
  Clone ID: LIB3148-019-Q1-K1-C12
ttctgcgatataccaccactactacgagtttttaatataggggaatggttgcgggccttggtgaaaaataataataagagtaatgttgaaataagagattaaatataatgtgtgtatgttcctttatatttgttgtgatcgttgttgtttgtttgaaccatgtgttttaatacctgtatgggaaaatgttgtttaactaaaatgtacaatatttattc

SEQ ID NO: 28773 - DNA, 405 bp, Gossypium hirsutum
  Clone ID: LIB3148-019-Q1-K1-C3
agtatttattctatcattaaagacaatgatttacacactaagaagaccgccaaagcattttgaggactttgttactggtcattttcgcaaccgtgcacaagacatccttgtggcatgtcaagcatataaagagggtgctatagtaggctctgttgcggttaaagaaggtgttccagatgctaacaaaattgtaaagggtagctctgaggaatttaaaggaacgattccaaagatgatcaatgcggtggctaaagaatttgtgaaaaacgggtcaacgaactgtgagcagtttcagagttgcagaagctgattacggttaagaagagttggttagatctaaagtgtaggatgggatgtgttaagccattatagaagctaatgtagtgccgtttagtatgaatgatt

SEQ ID NO: 28774 - DNA, 354 bp, Gossypium hirsutum
  Clone ID: LIB3148-019-Q1-K1-C4
ctggactcaaagccgatgctcgtgtcctcatcaacagggctcggatcgaatgtcaaagccagaggctgactgttgaagatccggttaccgttgagtatattactcgttacattgcgggtcttcagcagaagtatactcaaagtggaggtgttagaccatttggtctctcaactctgatcgttggctttgatccatatagcggtgtaccggcactatatcaaactgatccatcagggacattttcagcttggaaagctaatgcaactgggagaaactcgaactcgatacgagagtttctagagaagaactataaggaaacttctgggcaagaaaccattaagcttgcaattcgtg

SEQ ID NO: 28775 - DNA, 238 bp, Gossypium hirsutum
  unsure (1)..(238): unsure at all n locations; Clone ID: LIB3148-019-Q1-K1-C5
tagttctagatctcgagctgccactcttttttttttttnntgnnnnnncatttgggggtgttttttttgaaaagaagggtcgggaccacaacacaaaaacaatccttntttaaaaatcaaacatataaaaaaggtgctatattttactcccttgcggccaaaaaaagttttttatattcttacaaaatataaaaaaataactctgaccaaattaaaagaaccattccaaaaaaaatca

SEQ ID NO: 28776 - DNA, 258 bp, Gossypium hirsutum
  Clone ID: LIB3148-019-Q1-K1-C6
cgagaagttcaatacagactatggcagtcaaatactccgatgatggcatgctgctgcaaatggacttttaaattgttagttagtaacttccccagattttatattgatcagaattctattcagtttttactttgcattgtccgtttatggaaacttgtatatccatgttttttttttcgaagtgttctcagcaaagtctattaaccatacaagcattgaattgttttgaaatttatataagaattattactaatgtgt

SEQ ID NO: 28777 - DNA, 380 bp, Gossypium hirsutum
  Clone ID: LIB3148-019-Q1-K1-C7
ctacatcaggagcattaccatctgaggcatctcttgacacaagtctgaaaataactccgaagatcactgtctgtgctgtgccacccctggagtttgcggagggttcccgaagttcttcctgaccaaggtctcatagctcaactttagacagacgaggatgtgagatacatatggcgaaactttctatatggcctcacttcgcatttgatatatacgttttttgtatgaaggaattgagatgttgcagtggtctttgattcaccgttttttcaattgtttaacactttactacgatcttccccatcttgattgatatatagggggttaccattgtgtattttaagccctttgagacttgatgagttgatggtctatttctg

SEQ ID NO: 28778 - DNA, 288 bp, Gossypium hirsutum
  Clone ID: LIB3148-019-Q1-K1-C8
gttgccgaattgttcctttccctttcccgttttcggcctgcaccgccgccaaaagtgccagggttacaccaaattggttcccattttccctcttactcttgattccagttctacacaagccaaaaaaccctttggtcattggatcgagccacgggaaccattctgcttctaacttcttcgaactttgagaagactatgagtcaaccgcggtgacagaggagttggtggaggcaaacagtatgggcgatatgacaagtgtggctagggggtttctcttttcttttcttt

SEQ ID NO: 28779 - DNA, 395 bp, Gossypium hirsutum
  Clone ID: LIB3148-019-Q1-K1-C9
cccacgcgtccgcccacgcgtccgcccacgtttccgcattaatggtgttccaacagtttggggggatcaatggaggaagcttgtatgcaagtcaaacttttgcattagctgggctttcctcagcaaaagctggaaccgttgcatatgcttgtgttcaggtccctataacttttttgggagcaatgctaatggacaaatcaggaagaagaccactcataatggtttcttccgctggcacatttcttggctgttttctagctggtacttcattttatttcaaggaacatgatcttttgcccgaatggagaccaatattagctgttgctggtgtcctgatttatgttggttctttctcaattggattgggagcagctccttgggtgataatgtctgag

SEQ ID NO: 28780 - DNA, 411 bp, Gossypium hirsutum
  Clone ID: LIB3148-019-Q1-K1-D1
aaaattcataacattgaacaacaatatggtacaatcaaagaaattcagaggtgtcaggcaacgacagtggggcacttgggtctcagagatccgccaccctttgctgaaaagaagggtttggcttgggacattcgaaacagccgaagaggcagctcgagcttatgacgaggcagccattttgatgagcggacgtagcgccaaaacaaacttcccagtgcccaaaaaccaaacaggagatgagaataccacgacttgcaatgccctttcttcaatcctcagtgaaaagcttcgcaaatgttgcaaaatcccatctcctccttcccttacctgtttaaggcttgacactgagaattctcacatcggggtgtggcaaaggagagcagggagccgatcagattcatgctgggtaat

SEQ ID NO: 28781 - DNA, 400 bp, Gossypium hirsutum
  Clone ID: LIB3148-019-Q1-K1-D10
gttacaccacctgcagaagtaccagctataagtgttcttaaatctgcaattgctgggggtggttcatgtggattatcttcagctctaatgtatccaatcgatactgtgaagactcagttgcaagcgtcaaccaccctgacattcctggaacttatgtcaaacattccgcaaatcggattacgggggctttataagggttccatccctgcaattcttggacagttttcaagcaatggattgcggacaggaatatctgaagtaagcaagcttgtattgatcaatgttgctccgaacctccctgacatccaggttaaatccatggcatcattcctcggtacagttctaggaacaatggcgcgtttacctagtgaggtactgaagcagcgtttgcaggctaatc

SEQ ID NO: 28782 - DNA, 387 bp, Gossypium hirsutum
  Clone ID: LIB3148-019-Q1-K1-D11
cgaagaaatcaaagcagaaactgcttccttcctcttgaattttagccttatctttatcttggtccccagccaacgctttacttcgcaagttttcagacaagaaaagcaacaatttcaatggctcctgaacttgttgtaaggcgtagtagcattaggcaaagggttgaggaaagtcaaatccccattggtggtctggggagcataggctgattcttgagaaccagggttgtatatcaacccgtttacccgccggtgaatcagacccagttcgccatggcttattacggcattaactattccaagctccgtctttgggagttcgtcgagtacagtaaaatgctatacctggacggcgacatacaattatatgacaacatcgatcactta

SEQ ID NO: 28783 - DNA, 110 bp, Gossypium hirsutum
  Clone ID: LIB3148-019-Q1-K1-D12
gcttgttttgatttatgtgtctttttatcatcgtcggtgttgcaaaactgagtgagaattgtgcttatattgatggcattggaattaacaagctgcaacattattaagtt

SEQ ID NO: 28784 - DNA, 223 bp, Gossypium hirsutum
  unsure (1)..(223): unsure at all n locations; Clone ID: LIB3148-019-Q1-K1-D3
aatcaatagtattgtgaagggggctcgttcttatgtgtcaaatgttgtcaatgctnatnaagttgagttcaatggtcctgtggatggcgcaaatacaaagcaccatggtattcggttttgttcnaggattgatctcaaatttttttttttgggtggggagcggatatttttttttgtttaatagggacaatttttttttttttatttttaaattcttatttta

SEQ ID NO: 28785 - DNA, 328 bp, Gossypium hirsutum
  Clone ID: LIB3148-019-Q1-K1-D4
cccacgcgtccgcacagttgtgatgaagaactttcttaaggccgtgatcatgcctcggtgagaaaattgaaagcttaattaggcaatgtatatatgtatttttactttaatagtacttttgacatgttttgagtgtttaatcatgtatttcaagcacgccattttcaactatttaatcaatcacttttatttttaatgcttcaaaaaaaaaaaaaaaaaaaaaaaaaaaaaaaaaaaaaaaaaaaaaaaaaaaaaaaaaaaaaaaaaaaaaaaaaaaaaaaaaaaaaaaaaaaaaaaaaaaaaaaataaaaaggggcggccgttttaa

SEQ ID NO: 28786 - DNA, 391 bp, Gossypium hirsutum
  unsure (1)..(391): unsure at all n locations; Clone ID: LIB3148-019-Q1-K1-D5
agaaactaaaggagaaatttatgaatcctatttcaaagaacgtngcattggctttagctggggtcattttccaggctgtctggggcattataaatactgctgttaccaatcccttactcactgaaacctgtcaaaaggtaaagaacaaggatctttgcaccttaagccttggggccgaacatgccacccaagacgcaaaagatgtagctcgccctcgcattgatagctatcaancgtgcttccatccatgggcgtaactctttcatttacattaagaatcaatatcttttctggtttaattttggtacacttttccttcctttttctttttatgttttttttcgttatcaatttcttctttcttatttttttctgttttttatcttttttt

SEQ ID NO: 28787 - DNA, 415 bp, Gossypium hirsutum
  Clone ID: LIB3148-019-Q1-K1-D6
cccacgcgtccggttatgctcgaaacttgatttttgagccagatcaagctagcctcagggaagctagcaatgaaggacagtgaggggagtatctgcagagctcgaagctgtcgggggtggacccgaagaagaagagcttattgttcgaggcgttagattctcgtttttttttcattatttatcctgaggattaaacgtctaatctatatgtagtctttattgttttcatgagactaatctttgatatttcaattttcatagtctaatattttctttttttttttttttttctttttttacttatttatttttttttgtttggtttcttttatttaatttattaataatttttttttattaattttctaattaattctttttttttattatatcattttaatttaatttttttatt

SEQ ID NO: 28788 - DNA, 352 bp, Gossypium hirsutum
  Clone ID: LIB3148-019-Q1-K1-D8
atcaaatgtaatatgatatttatgtattgttagagcaaaaatggaaaggctgtttggcctgagtatatagcaatgtcatctttgtatactgtattttatccatttatgtaccccatctttgattaaatcttagattttgagggtatcaaatataattaaatttattttttcttaaaactttaaaaatataataattttatttattataaatattatttttttttttatatttaatttttatttggtctgcctctttatattttctaagtttatcattttctttcttttcttactttttatctttttttttttggtctacccttattttcattttttttcttcctttactttt

SEQ ID NO: 28789 - DNA, 371 bp, Gossypium hirsutum
  unsure (1)..(371): unsure at all n locations; Clone ID: LIB3148-019-Q1-K1-D9
cccacgcgtccgaatacataaccagaaattctcagagctatccggaaacgacatatttaagggtgatgttcctcggggttctgctgaaaaaccactcagtgtagcgaaactgcgagagatgagcggtagcaacatctttgctgaagggaaggtagagtctcgagtcagtagcggacgcaaaccccctggcggggaaagcaccattgctttggtttaacttcataggtctaacactgtttccgattaccgtgtttttctgttatcttcagtgggggtgtgtgattatgggttctgggaattatgttttaggtttaacatgtcaacttgacctaagagcgtatatgctaattacttgtttcattttnnaaaaa

SEQ ID NO: 28790 - DNA, 397 bp, Gossypium hirsutum
  Clone ID: LIB3148-019-Q1-K1-E1
cccacgcgtccgcggacgcgtgggcgcgagtggctgcccttttttttttttttttttttttggtttggttttttgtttagtgtgtttggttttttttttttttttttttttttttttttttttttttttttttttttttttttttttttttaaaaaaagtttgttaaattttgattggaaaaggaaaaaaaaattttttgggaaaaaaaaaaattttggaaaaaaaagggaaaagttcaaaaaaaaaaagttccatgtaaaaaaacaattaaattgtaaaaaaaaatatgccaaaaaaaaaaaaaaggtgaattcctttttttaaaaagcaccggaaaaaaaagttggcttgaaaaaaaacaaaagtttaatttaaaattttgaaaacctttttttt

SEQ ID NO: 28791 - DNA, 233 bp, Gossypium hirsutum
  Clone ID: LIB3148-019-Q1-K1-E10
cccacgcgtccgcccacgcgtccgcccacgcgtccgtgccttttaagtaattggtcgtgctgcacttggcttgcagttttatcttcttcttttttccttttttagaatcctatgaatttgtgtgtttattgttaaagactagaagcctttgatggtgtgggcgggaagcttaacgcctattcagttcatgtatcaacttatattaaatttatggcaataataagttactttgc

SEQ ID NO: 28792 - DNA, 204 bp, Gossypium hirsutum
  Clone ID: LIB3148-019-Q1-K1-E11
cccacgcgtccgcatattataagctcctgttattcttccgtgaaggagtgaagtacggagctggaattggacccggtgtctgtgacatccactctcccagaataccatcaaccgaacagattgctgacataattaacaagatgcttaccttgctctagaccaacatctggttgtttaaccttgactgtaggcctaaaactatca

SEQ ID NO: 28793 - DNA, 361 bp, Gossypium hirsutum
  unsure (1)..(361): unsure at all n locations; Clone ID: LIB3148-019-Q1-K1-E12
cccacgcgtccggttctttgggtgattgcatggatttttctgttcatctatttttttgccgacatgtttaaccactttgatgaggtcaagaagatatttccgttggggttctacagcttgctcactgtacctccggtgctggggttgatgaatgtggtatggttttggaagatcgtgaagggattgattaaaacaatttcaaaagcaagacacagagaataataacaatccgaattaatatttgttttctgtgtaatgttaaaaattgaagaaaatccaattaatatttgtctnanaaaaaaaaaaaaataaaaaaaaaaaaaaaaaatattttgaaaaaaaaaaaaaaaaataaaaatgg

SEQ ID NO: 28794 - DNA, 347 bp, Gossypium hirsutum
  unsure (1)..(347): unsure at all n locations; Clone ID: LIB3148-019-Q1-K1-E2
cccacgcgtccgagtacgtttagaagaagatcatgcttcatggctggttactgtgggttgtggatgcaattatgactgaagagcaaaagcangtattctttctagcatagacaaatacattgaaatcacaaaacaaaaaagtcaaaaagtatttcctcagtttgtaaactagttagatgaaacagaaaaagcaagcttagaaacacatgtagcacttgcaagataatatggatacgcattgtcacctaattttccttcaggaattagctattaggctgccatattgtccctgaatccattatccaacaaatacaacctattggtcgatgctttttcttttcttatat

SEQ ID NO: 28795 - DNA, 208 bp, Gossypium hirsutum
  unsure (1)..(208): unsure at all n locations; Clone ID: LIB3148-019-Q1-K1-E3
ggccgacccacgcggccgnnnaaagngaagnnncaaattnaacagcaatttaactaccccacacccaccgccccaacaaagggaaggggtcaaaagaaagaaaggacccgcccaaaaaaaaaaaacaaaattaaaaattaacaaccaacacctaaacaacaacaaaaaaaaaaatatttatttttttttttttatatttttttttttt

SEQ ID NO: 28796 - DNA, 154 bp, Gossypium hirsutum
  unsure (1)..(154): unsure at all n locations; Clone ID: LIB3148-019-Q1-K1-E4
aaacaaaaaaaaacaaaanggggaaggttaaaaagaaaaagagggcccggaaaaaaaaaaaaatcntaaaaacaaaaaacaaaaacaaaaaaaacacaaaatcaaaaacaaaaaatcaaaaacaaacaaccaaattatataattaacaacaatt

SEQ ID NO: 28797 - DNA, 158 bp, Gossypium hirsutum
  unsure (1)..(158): unsure at all n locations; Clone ID: LIB3148-019-Q1-K1-E5
cccacgcgtccgctcctacttaggatagcattagctngccgagacaactannaaggncggggtatatattaggttaagagggaaatcaacacnanaagatcatcactcgtatatatgggatcatttaataagaataacnaggnnnnncgaagggggag

SEQ ID NO: 28798 - DNA, 396 bp, Gossypium hirsutum
  Clone ID: LIB3148-019-Q1-K1-E6
agctgccaaagcaagtggagagctctgcttaaaatatatatttgcatttggagcatttaatcgggcacttttaaacagtgcatctgagtggaaagtgccaaccacttttatatatggggctgaagattggatgaactaccaaggagcccaagaagctcgcgagcaaatgaaggtcccatgtgaaattatcagggttcctcaggccgggcattttgtgtttcttgaaaatagagatggattccattcagctgtgttgtatgcctgtaggagatttctttcacctaaccctgataaagaaccctttcctgaagatttagtatcagcatagaagaagcaaagtattttttaatttctttccacatgttgtatgacgcattacaccgagtttcattggtc

SEQ ID NO: 28799 - DNA, 344 bp, Gossypium hirsutum
  Clone ID: LIB3148-019-Q1-K1-E8
gatgagatgaaacttccagccaggatggggttatgggtcaagacctagcaaaatcctagagacgagaaatcacagggtttgagggtaagggggaattggtatttgtgggtttccatgagattttgctttttctttttgcctcatttctatttttacacaaaatgtaatcggaagcctgatttagaatgcagaaaaaaccagttaaaaaaatattactctttggttatacttttttgtccttcaccccttctgcatatacgtgtgtcctgtctgtaagaactcaaaatggctaaaatatctgcacattttgttaggggataaaggaacttctcaaagaattcagc

SEQ ID NO: 28800 - DNA, 288 bp, Gossypium hirsutum
  Clone ID: LIB3148-019-Q1-K1-E9
acttgaaagctcaaaggaagttcaagagcataacataatcagagtctcaacccccccaaatgcaatcatctaaaaatcaaaggcgatatagtacctgacatattagagacagtacatctaatgaaatacatatccccggtccattactttttcttatgggctttaatgtgtgtacaagaacagaaattaatatgtactatagcaaggtgtttttttactgccaaaaaaaaaaaaaaaaaaaaaaataaaaaccatttaaataaaaaaaaaaaaaaaaaaaattaaaaa

SEQ ID NO: 28801 - DNA, 132 bp, Gossypium hirsutum
  Clone ID: LIB3148-019-Q1-K1-F1
accacgcgtacgcccacgcttgcgaaaaattttatctgtgaaatatggttttgttgtaaaaagcattggctttttgtagggctggctgttatttgcagagcttaaatggaaatttaatcatattttgaattt

SEQ ID NO: 28802 - DNA, 403 bp, Gossypium hirsutum
  Clone ID: LIB3148-019-Q1-K1-F10
gtttcgacattgatgcaaatggtatcttgaacgtgtctgctgaagataagactgcaggtgggaagaacaagatgacaattacgaatgataagggaagattgagcaaggaagagattgaaagaatggtacaagaagcagagaggtataaagcagaggatgaggaagtgaagaagaaggtggaagctaagaatgggcttgagaattatgcttacaatatgaggaacactgtgaaagatgacaagtttgctgggaaactcgaccctgcagagaagcagaagattgagaaagcgattgacgatacaattgaatggcttgatgggaaccagctggctgaagttgatgaatttgaggacaagttgaaggaattggaaggtatttgcaatcccatcattgcaaagatgta

SEQ ID NO: 28803 - DNA, 324 bp, Gossypium hirsutum
  Clone ID: LIB3148-019-Q1-K1-F11
cagagttcgtgacgggaacctccatatttatgaagatggatttgcaagggattgctgaaggagtgggtgcgtgcttaggcgcagtgacttgtgctgcggcttttgcttggttatcgagtgctcggaacaaagtgggtcggatcttcaccgtcggttgcaactcgtttattgattcggtgatagaccaaatcgtggatggattgttctatgaaactgatggtactagtgactggtctgatgatatttgaaagtagggaatggtaaattatatattgatgtttatatatagataggatggtctccctttgagagaaatgataataa

SEQ ID NO: 28804 - DNA, 403 bp, Gossypium hirsutum
  Clone ID: LIB3148-019-Q1-K1-F12
atgatgctcgccacttgacggtcattcttgaaccttattttcctctttcaattgaaggtggtagcaaattgcgtagcctttcaatcttttctgccttaggaacccgagttgttacagacaagtctctgcatcaattgtttgaaaaatctccgtgcctaagggtgctagatttgggcatgaataattcatgtgatgatttgattcccgagatttcaagcaaaataggtgatttgatacatttaaggcatctcaacttattttgttgcaagatgatacatagattacctgatacaatctgccaattgcatgatttgttatccttggatcttcatggatgcagtcgtcttggaaaactaccggatggtctggggaacttgatcaatttgaggtatctttgtactac

SEQ ID NO: 28805 - DNA, 402 bp, Gossypium hirsutum
  Clone ID: LIB3148-019-Q1-K1-F2
gaaatattgaagagggttcaaaatggtgaggtcaagtgcatgaggaggaacacgtctggggtcgacgacaaagcatgcctagagatgagtcactcattcaacgtggaaacagctacaggcacgggtgaaaggattgccgaaaacacacctttatcacctgttgccgaatctccgattaagaacgagtcccgggatacctttacttatgacaaagttattccgatggttgacaagggtattgatgcttgctggcctaaattgatggcagatgaaagttttgccatattgaaagatagttaccatatgaaggatgatgggaaggttgttactacaggaatgggcaacaatgttttcggaggaatcatggcatttgttatgggaatcatgactatgcttcgactg

SEQ ID NO: 28806 - DNA, 314 bp, Gossypium hirsutum
  unsure (1)..(314): unsure at all n locations; Clone ID: LIB3148-019-Q1-K1-F3
cccactcgtccgannccatataaccaaaatctatatttcccgaggaggaacacatctangcgcgacgtcttaagagcctagggatcagccaaacattcaaccccaaaacaactacatgcactgttgaaattattgcctaaaacacacctttatcacctgtttccaaatcttcttttaataactattccctctatacctttacttatgacaaatttattccttttgtatacaaatttatttaaactaacattcctaaatatatttcatatcaaaatttctcccatatttataagatttttaccataattaatttt

SEQ ID NO: 28807 - DNA, 431 bp, Gossypium hirsutum
  Clone ID: LIB3148-019-Q1-K1-F4
ggggcgagccacgcgcgcgggaaaaagagaaagagaaagagaaaaaaaaatcctattaatctaatctcctcattcatgaggggcgccgcttcagccccccattcatccggtctaaactccaactacggcggagtgaaccaggatgcggcgtttccacctctaaggtacggcgtacagagttggggacgtggcatgtacggcggcgaaggcgcgcgcgtacgaaggctcgtcatgtgcggagagagagcgaggggacgtcactgctgcgacgctgggaacccttgctgctagggtttctgaatctttttctgttttgggctgtatgatagttgggctagatgttgggttaaaagtaatttgggccacattgggcccatgtacttggactgttcttatattggatttttaaaattattattatttatttgggt

SEQ ID NO: 28808 - DNA, 356 bp, Gossypium hirsutum
  Clone ID: LIB3148-019-Q1-K1-F5
cccacgcgtccgtaccgatcagatctacacttaactatttgagttggtcaagttgatgagagaatctatcgtgactatggacgatgaatacttgaacgcaatacaaggagaaaaagggtttaaaatcataggtgagtacattaatcagcttgaaaccatgttttccattgaaaagccagatgtcttttcctcaacaagttgggtcaacatcaagtattacgaactcgatttcggatggggcaacccgcaatgggttgctccgttcggggaagccgtttctgagttcaataacattgtggttttcattgaaacatagtgttgcttatgcaattaatcttggataacattgtattaaa

SEQ ID NO: 28809 - DNA, 253 bp, Gossypium hirsutum
  Clone ID: LIB3148-019-Q1-K1-F6
cccacgcgtccgatttcattggaaagtccatgtttttgtgacaaaagttttatactgagctccttgccttttatcataatagtgaactcatgtcagatattgtggaaacctttgatgataaaaaagtttgtccttgaagaaactgattgctgctgtgtatgaatatcaatgaacatatttatagcgtgattaagaccagaagtacaaaaaatggtgatgactggcaaaaaaaataaattataataaaataaaa

SEQ ID NO: 28810 - DNA, 359 bp, Gossypium hirsutum
  Clone ID: LIB3148-019-Q1-K1-F7
tccggatagctccaacttcaatatgtattctttaacggagcaataactgtgcacggccgggacagtgcaagttagctgttatatcatctcaaacaaaacaaaacaaaacaaaccccatatgcaagctgcatttactctattaatactacatatatgggataatttctgactttggccataatgatcatattgaggcatgggtatatattaggttattttttttaacttttttatgcttcctgttgctgctagagtggtaaaaactggtatgtcttaatggttttggtgattccttgtaaaatattttttgatgcatacagcgataggattatttattatgaactattattagctattat

SEQ ID NO: 28811 - DNA, 413 bp, Gossypium hirsutum
  unsure (1)..(413): unsure at all n locations; Clone ID: LIB3148-019-Q1-K1-F8
cccacgcgtccggttctggtcccactattggtgtctgntacattgtttgctcatccgtgtgggtcattttcaacggggtctagtcttgncttaatgacaaaattgcaattctggttcaggtttgagtctcatatgcgggttcttgtttaggtgaattctgatcttttattttaaatccgttgactatgactacatcttattatattttttctagtttttatattcttgtttatttattttttttttatttttttgtttttttattttatttatttttttttttatatctgtttttttttctttcttttttttattttcctatttttcatgatttcttatttttttttttcttattttttttatattattaattttaatttattatttttttttttttaatacttaagtttctt

SEQ ID NO: 28812 - DNA, 321 bp, Gossypium hirsutum
  Clone ID: LIB3148-019-Q1-K1-F9
cctactcgttcgggatgttatgccttttgtttaccccgagcccgaaaggcccagaatcacggtggatgaggcatttcatatgtggtcaaaattatcaaaatggctatacaaagatccctctattaatttccttggtgttggaagaccttattaaatactaacggaagtttttagcttttggtgattagaactcactagattcaccttttaacacattggagattaatgaaaaaacatctacatttgtttttttaaaaacttttttttttcaaattcaaattatattttaaaaaatttattttatttttaaagttttttttg

SEQ ID NO: 28813 - DNA, 243 bp, Gossypium hirsutum
  unsure (1)..(243): unsure at all n locations; Clone ID: LIB3148-019-Q1-K1-G1
cccacgcgtccggcaagtgtggagacaactgtacttgcaacccttgcaattgtaaataagagggggggaaaatgaacaacaaagagaagcagagaggcctttgtctttttaactaaataaattctattactttagtatgtatcagcaaatcttcatgaggatttggttcttaattatgtgtaatgtgggcttttctgctatgtcagaatgtattatgatatttaagaaagtttgttttctnna

SEQ ID NO: 28814 - DNA, 347 bp, Gossypium hirsutum
  unsure (1)..(347): unsure at all n locations; Clone ID: LIB3148-019-Q1-K1-G10
cccacgccgacggggaagcgaacctagagtttgctcgacgncgatgggaacaccgacgagggccaccttccggttctatctatttccaagttgggtttatcaacaagaagctcgacgttgaccagttccagaccgtccattcttgccgtgatggggttactggctcttgtaaatattcttggaaatcagttcttcagcttccgatgccaacgaacgatattcagatgctaattactgagtagctgccagccacagagtactgttgctgtatgtgaaaccgataggagtaagcttttatctatcactcgtgtataaaaagaatgggagtgaagtacttgatggttgca

SEQ ID NO: 28815 - DNA, 303 bp, Gossypium hirsutum
  Clone ID: LIB3148-019-Q1-K1-G11
cccacgcgtccgatgttgtttcttgtttcggattttgttttacttctgtttgttattgggaggcaaaaacaaaagatcatgaaaaacccggatgattgtttttaacaagtttaaggttgggatttagcagaaaaatgttgctgtaatttgtgtgcatctatattgtatttgatttttactgttggtaaagcttatattgaagtgcaaaaccttttcatatctggaacaaaaagaagtaaatacctaaaaaaaaatttccaacaatttttctttgaatattggaagtccattggggaaaacttt

SEQ ID NO: 28816 - DNA, 363 bp, Gossypium hirsutum
  unsure (1)..(363): unsure at all n locations; Clone ID: LIB3148-019-Q1-K1-G12
cccacgcgtccgattttgttgcntaaaaaaaaaaaaaaaaaaaaaagaaaaaaaaaaaaagggaaaaaaaaaaaaggaaaaagggaaaaaaaaaaaaaaaaaaaaaaaaaaaaaaaaaaaaaaaaaaaaaaaaaaaaaaaaaaaaaaaaaaaaaaaaaaaaaaaaaaaaaaaaaaaaaaaaaagggggggggcctttataaaaaaaaaaattttattaccccgggttgggaagaaaaaattttttttaagggggaccaaaaaaaaaaaaaagggggggcgttttaaaaaaatggaaagggaaaaaaaacggggtgaccaaaaaaaaattcctttggaaaaaaacccttttttgcagatgggat

SEQ ID NO: 28817 - DNA, 232 bp, Gossypium hirsutum
  Clone ID: LIB3148-019-Q1-K1-G3
cccacgcgtccgcccacgcgtccgtccacgcttccgttcacgcgtccgagtaggtacaagacaaacgtagtgtatggtggaagaagggtataataaatttctgcttcacgctttgttcattatctaataatgataatcagaaggacagtctggtttacgtatgttaaagaagtaatattagtgcaacatgttgatgcgtaacaacttcaaaacagttagcagttgttgggtt

SEQ ID NO: 28818 - DNA, 410 bp, Gossypium hirsutum
  Clone ID: LIB3148-019-Q1-K1-G4
aaatatcaggagctgtcttctgcacttgagaagatgttcagctgttttaccataggtcagtgtggatctcatggaacctcgggcagggagctgttgagcgaaagcaagctcaaggatctacttcatggatcagaatatgttcttacttacgaggataaagatggtgactggatgcttgtgggtgatgttccatgggagatgttcactgacacctgcaaaaggttgaggatcatgaaaagctctgatgccattggactcgctccgagggccatggaaaaatgcaggaaccggaactagctaccatcatacatgatcttttcccacacaccgaagattattatttctgaaagagatgacatgatgctggagtgggtaggagatcatcatgtaagcctgtttttgttctactg

SEQ ID NO: 28819 - DNA, 358 bp, Gossypium hirsutum
  Clone ID: LIB3148-019-Q1-K1-G5
attcctttttgcattaatgtagacaaacttgttttttaaaaaaaaaaaaaaaaaaaaaaaaggaaaaaataaaaagaaaaaaagaaaaaaaaaaaaaaaaaaaaaaaaaaaaaaaaaaaaaaaaaaaaaaaaaaaaaaaaaaaaaaaaaaaaaaaaaaaaaaaaaaaaaaaataatttaaaaaaaaaaaaaatgggggggccccttaaaaaaaaaaaaatttattaacccgtggattccaattaaaaatttttttaatagggaaccaaaaaaaaaaaaaaagggccgggtttaaaaaacgtttaatcggaaaaaaccggggtgttacaaaaaaaaaactcctgaaaaaaaaccccttt

SEQ ID NO: 28820 - DNA, 405 bp, Gossypium hirsutum
  Clone ID: LIB3148-019-Q1-K1-G6
cccacgcgtccggtactcccccatgcgccgttcgaagaaccagccgctcagagaccttccgacctctcgcccaactccgatggtagcggagtgaccgacagttcggcaatcaggtacctcatttccctctaatctcttattttttataaatatatatacttatatatgtattaataacaaaaacaaagaacaagaggaagaagaacgattggaaaaagaacagaatcacaaagagagaaaaaagaaaacctttgttgtattgcttttcttttttctttacaatctgtgtatgtgtttttgtattgaatcccccatttacagattctcgaaaatggctttatatagccaagataaaacaaacaaacattacaatgaaatatgtatttttatttgctgttggttttt

SEQ ID NO: 28821 - DNA, 285 bp, Gossypium hirsutum
  Clone ID: LIB3148-019-Q1-K1-G7
gaacggttctcctttccagacttgaatatcttcatggtccgtctctgtaagtgggatctgggaaattttcttcggaatttctgctgaaaaggtattgtaaatcaaatccgtcttccactttttgttcggaatgttaatgagatccgaaactaactatagctcctcaaaaaaaaaaaaaaaaaaaaaaaaaaaaaaaaaaataaaaaaaaaaaaaaaaaaacaaaaatataaaaaaaaaaaaaaaacaaaaaatcttaaataataaaaaaaatactaaataaataa

SEQ ID NO: 28822 - DNA, 348 bp, Gossypium hirsutum
  Clone ID: LIB3148-019-Q1-K1-G8
gagccaagaagataattattggaacatggaggatatatggtccatgcagatacttaatgggaattaaataaatatcaatgttagtccaaattaattgagattaatttggttgattaatgttagggttttgtgaacttatataatattttggattaagtatggcttgtaataggaaacgttgtagtactataatatatatatatatatatatatagccttctacattatatatatgagagttttcaatgctaattagctattgtacataccctttgagatgtggataaataagcaatatcttttttataacacgagtttaattaataaagctaaaattgtactttgctc

SEQ ID NO: 28823 - DNA, 395 bp, Gossypium hirsutum
  Clone ID: LIB3148-019-Q1-K1-G9
gaaaatctttccagtttcaattttctcacatcaaaactgaaaatgtcttgctgttcatgaaaatgtggctgcggcgcttattgcaagtgtggcaatggctgtaacggatgcagtatgttccctgacataatagagaagactacaactgagactattgttcttggtgtggcaactcagaaaatgcactatgagggatctgagatgggagttgaggtttagggcggatgcccgtgtggagacaactgcaaatgcaacccttgcacttgctggaagtgaacaacaaatagaagcagagtggcctttgtcattttaactaaagtaattctattacttgagtatgtatcagcaaatcttcatgaggatttggttcttaattatgtgtaatgtggcttttc

SEQ ID NO: 28824 - DNA, 407 bp, Gossypium hirsutum
  Clone ID: LIB3148-019-Q1-K1-H1
cccacgcgtccgctgacgagaacttcatcaagaagcacactggtcccggtattctctcaatggctaacgctggaccgggaactaacggatctcagttcttcatttgcacggctaagactgagtggctcgacggaaagcacgttgtgtttggacaagttgttgaaggcatggatgtggtgaaagccattgagaaagttgggtctagcagtggaagaacttccaagcccgttgttgtcgctgactgcggacagctctcttagagaagaaaaagagaactatgtgttaagctgggatgttgtctaatgtctagaaatattaatgtctgtcatttagactcttttatgggtgctgttttatcgtcactgggtttggtggttttcaagaacttgctttatgtaagttttatg

SEQ ID NO: 28825 - DNA, 382 bp, Gossypium hirsutum
  Clone ID: LIB3148-019-Q1-K1-H10
aaaaaactaaagaacccttatggtcctcatttccgcttagtaaccaggccattcaaaggcggttaaaccttcgcgcaactccgattgcggcggaatggaagaagatccggccaccaggtatggctagctgtaggaggtgcacacgcgtagaggcgcagcacgcgcgggggaggccctgggttcgactgcggcgctgctggctgctgaaggctagagttcgggtttgggtattttgggctagagttcgggtttaggtattgtattgggtattagattaaaaacgaattggggcatggtgggcccattgatttggactttggactttttaaaggttatttgggttaataataccggcccgaaaaataatggggcctaccataat

SEQ ID NO: 28826 - DNA, 403 bp, Gossypium hirsutum
  Clone ID: LIB3148-019-Q1-K1-H11
gccaaggcaacctttgaggaaaatggaaaggaggtcctctgtttaccgaatgtgaaagttgagttttcagaagatctcaagttgattagcaacgagcaagttcatgcaaggggacaacttgccctctgttcattggagtatggacaacattcattcaaattaccgccatcaagtccctatgacaagttcttgaaagcagctggatgctaaaaaggaagtggagttttcagaagatctgaagttaattagtaagcaacattttttcaggttactaccatcaagcccatatgataagttccttgaaagcagctggatgctagaagttggagacgtttcatacatgcatatacacatattatatgtaataatccagacaattgtcaattccttcaatttttttttt

SEQ ID NO: 28827 - DNA, 250 bp, Gossypium hirsutum
  Clone ID: LIB3148-019-Q1-K1-H12
cggacgcgtggggccagaaaccctcgttattaatcggcggaagcagatagcctctagccatgactttcaagcgtaggaatggtggccgcaacaagcatggccgtggccatgtcaaattcatccgctgttctaactgtggcaaatgctgccccaaggataagtcaattaagaggtttcttgtgaggaacattgtggaacaagctgctgttagagatgtccaagaagcctgcgtttatgacacttatacttt

SEQ ID NO: 28828 - DNA, 412 bp, Gossypium hirsutum
  Clone ID: LIB3148-019-Q1-K1-H2
atccgatccgactagcgccaattcggacacaaagggcttggctatgatcatggtgggagtcggaatggctaatgccacggccacatcgaccctcttatcatcccaattacttactaccaaaaatgacacaatcatgaggaaagtattgaaagaatgctctgacaagtatgctcacgctgccgatgctcttcaagattccgttcaagatttcgactcggagttatatgattatgtctacatgcatataatggcagctgcggactatccaaatgcttgccataacgcgtttagaaggtacccgagattggtttatccgcaacaaattgcacgtagagaagatggtttgaagcatatttgtgatgtgatattaggcatttgtgatcatcttgcttcttaaacttttgggtttctc

SEQ ID NO: 28829 - DNA, 290 bp, Gossypium hirsutum
  Clone ID: LIB3148-019-Q1-K1-H3
cccacgcgtacgcttttggcaattccaatatttactgtcgcttctgaatcggcttttaccatgggcaagaaagtgatcacacgtttgaggagttcacttaagccaaaaacggttcaagccgttgtacgcttggatgataggatgcgagctaatgaattttcatcagaaattgtgtgcaaaaatgacgatgacgatgatgatgacgatgaggatgatgtctcttctgttgctttttaagatactctctttctaaatgtttaaaatttaatttagcttacaatttatatttt

SEQ ID NO: 28830 - DNA, 412 bp, Gossypium hirsutum
  Clone ID: LIB3148-019-Q1-K1-H4
aagcgcatgtgcgaaaaatcaatgatcaaaaagcgttacatgtatctaacggaagagattttgaaagagaaccccaatgtatgtgaatacatggcaccatcactagatgcaagacaagatatggtggtagttgaggtaccaaagctaggtaaagaagccgccacaaaggctattaaggaatggggtcagcccaaatccaagatcacccacctcgtgttttgcaccaccagtggtgtcgacatgcccggtgccgattaccagctcactaagcttttgggccttcgcccgtcggttaagcgtctcatgatgtatcaacaaggttgtttcgctgggggtactgtgctccgtgtggccaaggacttggctgagaacaacaagggcgctcgcgtgcttgttgtttgctcggaaatca

SEQ ID NO: 28831 - DNA, 284 bp, Gossypium hirsutum
  Clone ID: LIB3148-019-Q1-K1-H5
ctctcatcagttctggatgtcttgcagaaaatgcttatgaatcaagtaaaattcttgtttgtccttaaactaagacttggcggtcagtgtccctagattcgagccaagttgttgctaaacagtttgatgtgtgttgtgtgtatatatatactaatactagaagacatggtttcaattagtaaaatggttattcgtttcatgtaattgagcataaaggccatctccatttgaagttgtcctattgctcatttcttatatgtaacttttcaaagataattttgttt

SEQ ID NO: 28832 - DNA, 313 bp, Gossypium hirsutum
  unsure (1)..(313): unsure at all n locations; Clone ID: LIB3148-019-Q1-K1-H6
gcttcaaactccatagatgatccgttcaatgtagctgccaacttcacctctcaggtgatcatgataaaccaccctggccaaattggaaatggttatgccccagtcctcgactgccacacctctcacattgctgtcaaattttccgaactgttgaccaagattgacagacgatctggcaaggaactcgagaaggaacccaagttcttgaagaacggtgatgcangtatggtaaagatgattcccaccaaacccatggttgttgagactttctctgaatacccaccactttggacgtttttgctgtcccgtgaca

SEQ ID NO: 28833 - DNA, 303 bp, Gossypium hirsutum
  Clone ID: LIB3148-019-Q1-K1-H7
gttggatagcatttcagggtaactctgtcttaaccctggcaagtaggagaatcgaatttcatgttggagtgctagaccatggctaaaatatagatatagtagccaagattatataaagtttatatggtatgaaattgtcaaacgaccatgagatgtcataggtacagtaagtgaggaagaaaggaattgaaatgtagaatttaggataaggatataatattgtactctgggatgatgtcaaaatccattcatccttatccatctcatgttctccattgtcttgtaatctgaggatttctttgt

SEQ ID NO: 28834 - DNA, 337 bp, Gossypium hirsutum
  Clone ID: LIB3148-019-Q1-K1-H9
ggcattttcacgatgatattactgttattgtgttattctttaatcacgatcttatatccagaggtgccgtccaagaccctccagtatcgattcggagtgcactagaacactgatgatttataaaccaaatagatttctgcttcctctggtttttgctctggggattcgaaatcgaacttgaacctttagtttggcaaactgccgtaaaatgttaaaaagagagtaagcaggccaagatttagtgcaaattctatgtaatgctctacttaattcagcaaaaacattttgtgacagtgctttataagatgaaacatgaatataagtgtttgatttattc

SEQ ID NO: 28835 - DNA, 265 bp, Gossypium hirsutum
  Clone ID: LIB3148-020-Q1-K1-A1
cccacgcgttcgaccacgcgtacgctttttttttttttttttttttttttttttttattgtgttttggtttttttttttatggttttattattttttttaatttttttttttataattttttttaaatttaatttttttatattattattattatgttttttttttattttttggtttttaaaaaaaaaaaaaattatttttaaaaaaaaatggtgattgaaatgtggaaataaatactttaataaaaacaaaaaattttttttt

SEQ ID NO: 28836 - DNA, 96 bp, Gossypium hirsutum
  Clone ID: LIB3148-020-Q1-K1-A10
ttcctttccaacctcgattttgacgaagcgtaacaaaattcgtggctctttctttaggtagaatttcttttctttttcttttttgttttctaatgc

SEQ ID NO: 28837 - DNA, 219 bp, Gossypium hirsutum
  Clone ID: LIB3148-020-Q1-K1-A11
cccacgcgtccggctgtttgggatattttctggagggaggatgtacccaagttaatggagtgcttacagaagcatgacatagaattctatcacatcagtaatcttcccgtgaattttgttattcatcctattcatgtgctgactctccatcttaccgaaagacataaaatgcagctgaaggaggagttcaatgttgaaccttggacgttcgagcaacat

SEQ ID NO: 28838 - DNA, 254 bp, Gossypium hirsutum
  unsure (1)..(254): unsure at all n locations; Clone ID: LIB3148-020-Q1-K1-A12
ctgaattggacacttctccgtttttctaaatttaaaaaaaaaagaacccaaannaaaagagaggggacattaacagggcgagggggggctaccaaaacaaaaaaacaaccaaaaaaaacgcgtaaaacatactaatcaaaatcacaactaataatctcactccaacgacataaaaaagggccgcccgttttaaaaaaccgaggttccctcccccgggctacccccttttaactttttttttgggcccccctaat

SEQ ID NO: 28839 - DNA, 163 bp, Gossypium hirsutum
  unsure (1)..(163): unsure at all n locations; Clone ID: LIB3148-020-Q1-K1-A2
cccacgcgtccgcccacgcgtccgcccacgcgtncgatgaagtgtttttattttgagaaaatcaatagaacaataatgctaaagttggaggccccannaaaaaaaaaaagaagaaaaagaaggacaaaaaaaaaaaaaaaaaaaaacaaacaaggaaagggcg

SEQ ID NO: 28840 - DNA, 166 bp, Gossypium hirsutum
  unsure (1)..(166): unsure at all n locations; Clone ID: LIB3148-020-Q1-K1-A3
cttttcgatgaatcgcagtattagtatgtatgtcgatattgnccaagnaaaaaaaaaagaggaaggagaaaaaaaaaaaaggaaaaaggaaaaaaaaaaaaaaaaaaaaaaaaaaaaaaaaaaaaaaaaaaaatattaacacgaaaaaaaaaaaaaggggggccgc

SEQ ID NO: 28841 - DNA, 347 bp, Gossypium hirsutum
  Clone ID: LIB3148-020-Q1-K1-A5
acggcaccaccgaccctgcaaaagctgtatcagctgctgtggcaagcaacatgaaaggtgggttggcatcccagggacttatcaatcctgcacaatttgcttctccacaatccactggaaagtcacatcagctggtaccaggcttcccatgtgttcatgctgtcccttcggctgttcaggtaaaaccagcagaacagaaacaacctgctggtgagtaaaattctccccttttttgcttcaatattgcttcccccgtatagtgaacaagaagaagaaggtacggaatgaaaaccgaatcaatgatatcggggggcgggggggaccaaatcatgaaagataaactggtt

SEQ ID NO: 28842 - DNA, 405 bp, Gossypium hirsutum
  Clone ID: LIB3148-020-Q1-K1-A7
caaccgatttagagccccacgtaacattgcagctaaagaggtttgcaagagggaatatgcaactgaacaagagtggaagaactgggattggagatcagagggtgatttgatgttgaacggtgccattttcacacaatcaggagacccgagggccgccaagaaattcggaggcgacaagatgatagcatataagccggctcacatggtgccactcctggtgaggtggtcaggaacactcgagtgccgccaaaacaagccttgttagaccactcgcaattaactctcatcatgtaactgcttttcaacttcaagaaatgagcgagatgcttggggatattgaggaaatgtttctttctttattgtattcattctccttgcaaggagtcttaatcatttaatattgat

SEQ ID NO: 28843 - DNA, 256 bp, Gossypium hirsutum
  Clone ID: LIB3148-020-Q1-K1-A8
ggaaaccccaacacatcattttcttggtggataacacccccattagagtcttcaaaaatgctgaatccattggtgtaccattccccaagagccaacccatgaggatttactctagtttatggaatgctgatgattgggccacaaggggtggattagtgaaaactgattgggcaaaagcacctttcacagcttattacaggaacttcaatgccaatgcttgtgtctggtcaggaacaagttcatcatgtggctaaac

SEQ ID NO: 28844 - DNA, 380 bp, Gossypium hirsutum
  unsure (1)..(380): unsure at all n locations; Clone ID: LIB3148-020-Q1-K1-A9
gtcttcactgtctgttttggcaagtgggatctgtaaaattttttgcgcaatgtccatttgagaggttcgatccttggaatccaccaatcantccaaatagatatgttgttacctttctcaactcttcaacatatcccttgaatgagaagtccctttgcagcccagatactcttccaggggcaaaaacgcgagaaatcgagaagaaaagacagacgaaacaagaaaacctaaaaacttgctagaggcggcagacacaagcgtgctaaggtagcagactattcaaagtttcacttttttttattttggtgattatttatcttaataaatgattcatcctttttgtttgtcagacatatattaaaattttaaaattatgacac

SEQ ID NO: 28845 - DNA, 379 bp, Gossypium hirsutum
  Clone ID: LIB3148-020-Q1-K1-B1
gttgtctggctcgaggccatcaactagatctatggatttctttttcatatatcaaaatttgagagatgatgatgatttaatcattaatcataggttaatgacgtcggaccaggcttcattccccccaattatttgcttccaattttgattatgttctcttggtcttttgttggtaaaacaagaagtggtgggtggtggatgataaggatgctggagctatgtaatctccaccatttatgttttgtttttatgcttgcttttatctctgcttaactttggtacttactaatactatacatgctgttactggtttagatctgtagtatcctttgcaagtttcaaggttaaatacatggaattcactccctggattggaagt

SEQ ID NO: 28846 - DNA, 411 bp, Gossypium hirsutum
  Clone ID: LIB3148-020-Q1-K1-B10
cccacgcgtccgctttgaaaaacgagattcgccttttatttctctgtttcaaaaggattacaatggttcgtgctattctattaggtaaatccctataccttcttttttgtttctctttgcttctaaaaactctctttttttgattccctattattcttctctctgcttttgtgtgggtgtatttctgctatcgagtctctccctccgtgtgtgtccttttttacagaataaaaagaaggctttatagcctcgactactacaatttttggaaagaaatctttgatttctttccgtatttgcttcgcatgtctgctgtgattttctttccttttcttgcaggtacttgcaaaaaaatctggcaatagcaaaggcttgacgatggtccactggtggcgttgatctcagcgtgag

SEQ ID NO: 28847 - DNA, 375 bp, Gossypium hirsutum
  Clone ID: LIB3148-020-Q1-K1-B11
gagaaacccactcttggcggtacgcggattaagacccgcaaacggaatattgctgcacccctggacccttcagcatttgctgatgcagtagtccagatctatttggataatgctggtgacctggaacttgttgccaggagcattgaatcttcagatcttaacttctcaagatacggtgacaccttctttgaggttgtttttgctggaggccgcacacaacctggcacacttaaacctgatgaaggggagtgccacccttactctatcatagagtgtgaggctaaacgtgatgccattttactatctgtgatttacattcagaaaatcttgcgccgaagaccttttctgattaagaaatcttgaaatgttatgcga

SEQ ID NO: 28848 - DNA, 308 bp, Gossypium hirsutum
  Clone ID: LIB3148-020-Q1-K1-B12
ttctttacctcgtccacctacccacccagcaatgcatggaaagtttctgttatttgagagcaggtaggttctaagccacgggacgctacccaagtaaaccaaaatttaatcaaatatgttgtctagcttcttatagtgttgtgactaagtaagaaaatggcagacacgatgctattccaaccttacttgttaatatcacattattctcctttccccttaaaattgttaatcgtagaaatgattttttgtgaaatgctgaactttctttaaaaaaaaaaaagataaaaaaaaaacaaaaataacaatat

SEQ ID NO: 28849 - DNA, 63 bp, Gossypium hirsutum
  Clone ID: LIB3148-020-Q1-K1-B2
gggatggtgatgtaataaaatgtttgaatgtatgagtgtcaatgctactaagttggtaagtgg

SEQ ID NO: 28850 - DNA, 223 bp, Gossypium hirsutum
  unsure (1)..(223): unsure at all n locations; Clone ID: LIB3148-020-Q1-K1-B3
aattggaattttaccatcataatgaagatttaaaaggctctgcgttgtgcctttaattcgtgtcgtctgttaggaaacttatattgagttcgatcanaacttgtgtcatttgtagaatgttgaaatttcataaacgatttgtctctttaatggaaaaaacaggatattaataaagaaaaaattatattagtgccaaaattttaaaaggtatgggctaaaaata

SEQ ID NO: 28851 - DNA, 247 bp, Gossypium hirsutum
  Clone ID: LIB3148-020-Q1-K1-B4
caaaataaaaaatggctctttcaatttctttcttatcatcatccctttcttcgctttcattggcgtctcatatttcccggagtccaagcattatctcaattgcccaacgaccgaaaaacttgcacatttccctgtcctctaaacacactcgttccctttcaattttcgctacggtggctgctccggttgagactgaacctgatgagaactcgaagaagtatgtaaactccagccttcttggtacgct

SEQ ID NO: 28852 - DNA, 404 bp, Gossypium hirsutum
  Clone ID: LIB3148-020-Q1-K1-B5
atgacaacggagcaaaagaagaaattgctgtgggggagcaagaaaagcactcctgcagaagagtctggtcatcgctgggatactgcactatttggtgatcgtgagcgacaagagaagttcaataaactcatgtctgaggttgccttggtacctatggccgattgtagggtgtaaaaggagatgtgaaggtggagcataaagccgacaatcaagatgcagagaagcagcgggagctccagctggatttggagaagcagtacacagccggacttagacgaagggatggtcgcactgttggattaggtctttaagcatcagaattggaaacttatggtgctgcggggaacttttttgtgacatttctgttctactatcttattctgtactcctcgaattatgcattt

SEQ ID NO: 28853 - DNA, 307 bp, Gossypium hirsutum
  Clone ID: LIB3148-020-Q1-K1-B6
cccacgcgtccgcccacgcgtccggtatggatctaaggtggcaactacttatatatgtagggtctttgctgcagctctctctggttcttccaagaatttattggacttaactgttcctaacacgctaccatgggcacaagttttttctgatgtccaaaatactgtgaatgtaaagattagaaatatattttcttgcggaaaatttacagttgtaagagaactggatgctgttgatgcatgcgtcaaggaattgtcaactttgctccaagatggggtgggaacaagtgaaagggagtcattcaagaat

SEQ ID NO: 28854 - DNA, 347 bp, Gossypium hirsutum
  Clone ID: LIB3148-020-Q1-K1-B7
cccacgcgtccgtatggcttgcgcaaataatgacagagcagcagttattgagatgtcacagagacttggattcttgacaggaaaggaatcagaggtaatgttggaggctcacgttcaagctggttttgttgtgggattgccattctcaaagtctggtggctatgatttccgctcaactaatattactcaaagcatttcaaacctcggggcaacaatgctgaggcaccgccttacaccacccccagacgaggcctacagtcttcatcggaaattgtcaggtgctttcttggcttgcattaagctaagggcttgtgtaccatgcagggaatttgtgcttgatgtctatg

SEQ ID NO: 28855 - DNA, 214 bp, Gossypium hirsutum
  Clone ID: LIB3148-020-Q1-K1-B8
cccacgcgtccggcaggatgggaagaccattaaacttcaaatttgggacactgctggacaagaaagatttaggacaatcactagcagctactaccgtggggcccatggcataataattgtttatgatgtgacagaccaagaaagcttcaataacgttaggcaatggcttagtgaaattgatcgctatgctagtgataatgttaacaaaatactg

SEQ ID NO: 28856 - DNA, 374 bp, Gossypium hirsutum
  Clone ID: LIB3148-020-Q1-K1-B9
aaaaaaaaaaaaaaaaaaaaaaaaaaaaaaaaaaaaaaaaaaaaaaaaaaaaaaaagaaaaaaggaaaaaaaaaaaaagaaaaaagaaaaaaaaaaaaaaaaaaaaaaaaaaaaaaaaaaaggggggggcgaataaaaaaaagggaggtttagtaaagggggactggaaaaactaatcatttgaaaaagggaaaaaaaatgtaaaaagtgggcccgaaataaaaaaaaagggggaagggaaaaaaaccttgtaaaaaaaaaaaaatggcgattgaccaaataaaattgcgcaaaaaaggagcaatttaaaaaaggggcgcgttaagaaaaaaaaacaaaaatgggcaactttaaaaagacaaagggaaaccccc

SEQ ID NO: 28857 - DNA, 393 bp, Gossypium hirsutum
  unsure (1)..(393): unsure at all n locations; Clone ID: LIB3148-020-Q1-K1-C1
cccacgcgtccgctcaggtgagaatccgtattaggaaactctgcaaggcattggaagaggatgcgtttaggccagtcttgcaccactatgatggccccaagtttcgtctcgagctctcagttcctgagacgttggatctattagacctttgtgaacaagcaggttctccataaggcaaaagttatctgagtgcaaatgtgctagggttaagggcttaaggctgcctgcttttcgcagattttccatagagcgcaagctgtgggttaaagaccagttggtgaatcaactcangaaaagtgggaaatggcgttagccagctgaataaaattgcgtttgtgtcttgtgaaagatacttttttaaacttttgcattatatttntatgtattaaaaat

SEQ ID NO: 28858 - DNA, 411 bp, Gossypium hirsutum
  Clone ID: LIB3148-020-Q1-K1-C11
gactatgtgttgggttattggccttccttcttattctcctacttggcggacagtgcttcgatgatcgagtggggaggtgaggttgtgaattcaaaaccagatggacatcacacttccactcaaatgggcagtggccgtttccccgaagaaggttttggcaaatctagttatttcaggaacatacaggttgttgatgactacaataatctcaaggctcccaaagggcttggcacctttacagaacaatcaaactgctatgatgtacaaacagggagcaacggggattggggccattacttttattatgggggccctggtaaaaaccccaattgtccttaagagcaagaaggaaaagcacctttttctttttggcgttgagttttctacctttgttcccgagtatcattcaaa

SEQ ID NO: 28859 - DNA, 423 bp, Gossypium hirsutum
  Clone ID: LIB3148-020-Q1-K1-C12
cccacgcgtccgcccacgcgtccggcagttcattctccttgtacaatgacagctcaccccgagcaattggagggaggaggaactgaaagtgttgctagctctattggaccaactaaaaagcgaaaactgctcgatgacggtaatgattacctgccgttgcttacagacgctgctagttcagtaaatcctagcagatgttctgagtatgtggatgatgcagattctagctgtgccaatatggaatcctcttcaagtaataagagactgagaatcgaaaaaattcatgagaccgtgagtgttctacgaagcttaattccaagtggggaaggcaaagatgcaatcatggttcttgatgaagctattgattacttgaaatcccttaaactcaagccaaaaacctgggacttaatgctctatgatgtt

SEQ ID NO: 28860 - DNA, 305 bp, Gossypium hirsutum
  unsure (1)..(305): unsure at all n locations; Clone ID: LIB3148-020-Q1-K1-C2
cggacgcgtgggcgtacacttgatccccgttcagaccaaagaaaatgcctccaaagggggcacataccaaagcgttggtttgtcataactctcccttctagacatggcacatacaggggaagcatgagattattgaattgaacaacacagacccgaagatgaagagcatgatcgcgagtatttccacatgaataaatgaagatcatctggaattctatgttctgtatgaagattgaattttgagtttgtctcgttgatttcatttatttctgttttgaaattttctttgntatctcttatttctc

SEQ ID NO: 28861 - DNA, 222 bp, Gossypium hirsutum
  unsure (1)..(222): unsure at all n locations; Clone ID: LIB3148-020-Q1-K1-C3
gtgaaactctgcatatacattgccttgccatattatcattctgtatacagatttggacttgtatcatcatgactaatagcatcaatttatttcttgatttcttaaaaaaaaaaaaaaaaaaaaataaaaaaaaaaaaatataaaaaatttnnaaaaaaaaaaaaaagacatatggtaaaaaattataaagggttaaaatgttttaaatttaaaaatcttaaa

SEQ ID NO: 28862 - DNA, 82 bp, Gossypium hirsutum
  unsure (1)..(82): unsure at all n locations; Clone ID: LIB3148-020-Q1-K1-C6
cccacgcgtncgcagaaagatggtcgaaacaaattgcttatacatgatcattaagttggggctgaatgaacttatgattgag

SEQ ID NO: 28863 - DNA, 229 bp, Gossypium hirsutum
  unsure (1)..(229): unsure at all n locations; Clone ID: LIB3148-020-Q1-K1-C7
tttccgagttcgaatagagttcagttgaaggtagcagaaggtaggttgctcgtcgtgtatgtaaaccaactccctttatctaattcacatccgactgtaattttataagccaaatcccctacagttaataaaatgttatacaagtagatatgctgttaagaaaagtattcaaacgagttatattttttataaataatgtttttgaagttaaaaaaaaaaccanannant

SEQ ID NO: 28864 - DNA, 162 bp, Gossypium hirsutum
  Clone ID: LIB3148-020-Q1-K1-C8
cccacgcgtccgatctgctcgtttgctgttgcaaataaacaaccatggtgaaaaggagcgtaaaccaaacaagatgatgaggatcaaacctgttaaaaaaaataattcttaaaagttattggaaccaaagaatggtattaagaaagatgaaaaatgtttaaa

SEQ ID NO: 28865 - DNA, 274 bp, Gossypium hirsutum
  Clone ID: LIB3148-020-Q1-K1-C9
cccacgcgtcctaaaaaaaaaaaatttttttttaaaaaaaaaaaaataaaaaaatagtgaaagatttttttttaaaacaaaaaaagataaaaatcattctttaaaaaatatcccagttacttttcccttataactaacctctactgtattcctaatattacctttattttatatatcttgcctttccttttccagaatacccacttttatttttccaccttaacctatcttttttttttttaccataacctttttctttcttctctctttttaa

SEQ ID NO: 28866 - DNA, 244 bp, Gossypium hirsutum
  Clone ID: LIB3148-020-Q1-K1-D1
aagcgtgtgttactattttaatgtatatgacccacaaactattcaaatttacaaacaatttaacctccataagccatacgttaaacaaagacaacatttttttaaaaaatatttcccccataaaaactaagaaaactaatgttttccaaccaaactatttctcctctcatttcaatgtaagacatcccaattcatgaaaggccatttataaccaaacccatcccttcaaaaaccataaaaatct

SEQ ID NO: 28867 - DNA, 86 bp, Gossypium hirsutum
  Clone ID: LIB3148-020-Q1-K1-D10
aaaaaaaaaaaaaaaaaataaaaaaataaaattaaaaaaaaaaaaaaaaaaaaaaaaagaaagggaaaaaaaaaaaaaaaaaaaag

SEQ ID NO: 28868 - DNA, 124 bp, Gossypium hirsutum
  Clone ID: LIB3148-020-Q1-K1-D11
tatctctgtttcttcactttgtgatgatgaacaaagatatatatatatattccagtaataaacccttttctttggctattggattaattggcatttgaagttgattttcagtaagtttggaatt

SEQ ID NO: 28869 - DNA, 383 bp, Gossypium hirsutum
  Clone ID: LIB3148-020-Q1-K1-D12
ctggagttttataggaaacttgtcgttgcttctgcttggagaaaacaaatgcccaaactcggcgtttcgcttggcctcggcgatcagatgcctgacatgattgaagaattgatcagcaagggacagcagcttgatgcagttcattttacttatgaagttggccttggacaagttcccccctgtgcccctgctgaaatctttcttgagggatgcaaagaaggctgcatcttctattttagatgatcccaataatactggccgggctgcgcaacttgctgcacgcaaagagcaatcagcacttcgggctgtcatcaagtgcattgaagagtacaaactcgaggctgagtttccacctgaaaacctcaagaaacgccttgagcagc

SEQ ID NO: 28870 - DNA, 405 bp, Gossypium hirsutum
  Clone ID: LIB3148-020-Q1-K1-D2
ctcagtggcaaaaatatacgatcgtggtcctatatatgcaatatatatacacatatatattatctgcaaactgcaatatagtattgaaaaagctacaaactggggaccaagtttggagtgtaggtgtagaaggcaaagcaaaaaccaaactcccagagcacagtaagctcatcttgtgaatggtcagtgaaactgccgaggtggccccaattccgtgtttgaaatgactaaacaatgagccaactccgagtaatgcatgtttccccacattgttgttcttgttgttttgccccatgtctcagttcttttatccttttttttttccctcagttttattattatttgcttccctttgcttatcttaattaatcgttatataagttgaaattttctctctcctttttt

SEQ ID NO: 28871 - DNA, 390 bp, Gossypium hirsutum
  unsure (1)..(390): unsure at all n locations; Clone ID: LIB3148-020-Q1-K1-D3
tttcattgcaacttctcccaaattgtaattgatgattttattaatgtttcctgtattaaacactggaaaactataggaaagattattaccaagaaggtagtcatgtttacgaggaattgaatgttcttgaggctttccggaaagcattgacaacatggtctagatggattgatgccaacgtaaatccgatgaagactatggtgttcttccgtggctattccgcttctcatttcagtggagggcagtggaattcaggaggggcatgtgataacgaaaccaatccgatcaagaacgagaaatatctaacgccatatccgtcaaagatgttggtgttagaatncgtgctaaaggggatgaaaacgcatgttacctacctaaacgttactcgac

SEQ ID NO: 28872 - DNA, 280 bp, Gossypium hirsutum
  Clone ID: LIB3148-020-Q1-K1-D4
cccacgcgtccgcccacgcgtccggtcgataccatcgaaatggaacccaagcaaagaggtggagttcccaggtcaagtgctgaggtatgaggacaacttcgacaccaccagcaatttgagcgtcatgatcactcccaccgacaagaagtccatcaccgactacggttcccctgaggagttcctctcttcggtggattatcttcttggaaaacaagcttactttggtaaaaccgattctgagggtggttttaactccggtgcggtggcgaccgcaaactta

SEQ ID NO: 28873 - DNA, 229 bp, Gossypium hirsutum
  Clone ID: LIB3148-020-Q1-K1-D5
cccacgcgtacgcccacgcgtccgcttggtcccaaaggatcagaaccacataaggcagctggtatctgtgacaccagtggggaccctctaaaggatacatccggaccatcactgaacatgctcatcaagctaatggctggtgaatcacttgtctttgcacccttcttctctacacacggtggactgcttttcaagatattttaatgaaaagaacacaaatacggttaca

SEQ ID NO: 28874 - DNA, 339 bp, Gossypium hirsutum
  Clone ID: LIB3148-020-Q1-K1-D8
aaaaaaaaaaaaaaaacataaaaattttctatacaaaaacaacaatccaaaaaaaagaggtccggtcttatcttacctcaagctgctaacaaccaaacttacccactactttcacctaaaatcaccccactcccccacccttccatccaccctttcccgactacccctttcttttccacacccaatctttctttccactcatcctttttcaaaaccccctcacccccaccctaactcttcttttcgaaaccccttcccaacatctttacccaccccatacatataagttccctctcttttcttcatcctttcacccccaacctattttttttacccccc

SEQ ID NO: 28875 - DNA, 414 bp, Gossypium hirsutum
  Clone ID: LIB3148-020-Q1-K1-D9
cccacgcgtccgggcttttgcgagagctttaagtccacattctcacctttcatgggttctaccatcacgggcatctcaatgggtcttggaccagatggtgaactccggtatccctcacaccacaagcctgccaagagtggcacgattactggagtcggggagttccaatgttatgacacaaacatgcttaaccttcttaagcaatatgctgaagcaaatggaaacccattatggggtctaggtggtccacatgatgcccctacttatgatcaggcaccgaactcaaatagtttcttcaaggatcacggtgggtcgtgggaaagtccttatggtgacttcttcctttcctggtactcaagcgagcttgtatctcacggcaatcgtctcctctctcttgtctcgtccatttttggg

SEQ ID NO: 28876 - DNA, 344 bp, Gossypium hirsutum
  Clone ID: LIB3148-020-Q1-K1-E1
ctttttacttgctttctttccgtttcgaagatggatattaagaaacgattactccttccatttgtatgctattttctttcagtttcccagtttttccacgtctgccatggtgatgttgggactgctgcccagtacagccctccatatttacctacggcgtgctttggggaagatcaaacccagttcccatcaagcaatctgttcgcagcagcaggagatgggatatgggacaatggagcatcatgcggaaggcaatacctggtgagatgcataagtgcttcccagccagggacttgtgtccccgaccaaactatccaggtcaagatcgttgattatgctcctac

SEQ ID NO: 28877 - DNA, 425 bp, Gossypium hirsutum
  Clone ID: LIB3148-020-Q1-K1-E10
gtttgcttccttgctcgaacaatacgaggtgaggcttcgttcaggatcaaagacagactcggaaccgtcgacaaactactcaatgtctcaagattttctgagttccgagctagttttcgcaagaaggaataactgaaaagtcataacaaacatacatactgtcatccttaaacccttagtttgctcttgttttccggttttcgttttttcgtcatacagctttttgatggagaaagacatcctgattctcaccctctttttcctccgaaaatcatcggagaagctcattcattgcttcttacctatggataatctcacatggggcatatttcaaatctcatgtaatcctccatggttttaaaagtgtcttaaaaagtgcagtatttgtttttgaagcactttgagacactatttgcagtgaaaaa

SEQ ID NO: 28878 - DNA, 411 bp, Gossypium hirsutum
  Clone ID: LIB3148-020-Q1-K1-E11
gtacctgaaaatctagatagtgtagccgagtttgaggctccagcgtctccaacttccagttacagtcaggcatttccaacggaggaagatttcgcaaaggagcctgctgtagttccatcccagctacatttaactgtcctcggtacagatgaccaagatggagcatcatcctcgaagcctcaacatgttgtacttaaccatcttttcatagagaagggatgggcatcacagtctgttgttgccctcggatacacccataggtttgagtccaaatatgtgactgttgtactctataagccactcaaaaggtaacatgtgcttttcccatgcttgactctgtaaagaaatcaaagtgactttcatattcgtttgtgaaggtacacctctgttttatagatgatgcttcgacac

SEQ ID NO: 28879 - DNA, 417 bp, Gossypium hirsutum
  Clone ID: LIB3148-020-Q1-K1-E12
ctttcctctctccttcttgtactatcaccactccctttgtttctgtcggaggtgaaaccgagaagaacccatctccggcaggtgcattggcatcggtctcccctcgttgtcctctaaaaagaatggacgctgctgagttgaagagagtgttccaattgttcgacaagaacggagatgggtccatctccaagaaagagttgaacgattcgttggagaatatgggtatctgcatccctgatcctgaattaacccaaatgatcgaaaagattgatgtcaacggcgataagtgcatcgatatcgacgagttcagtgagctgtaccgatccattatggataataaggatgaagaagaagatatgaaggaagctttcaatgttttcgatcaaaacggtgacggatacatttccgtggaggagt

SEQ ID NO: 28880 - DNA, 327 bp, Gossypium hirsutum
  unsure (1)..(327): unsure at all n locations; Clone ID: LIB3148-020-Q1-K1-E2
cccacgcgtccgcccacgcgtccggcttgctgccggaactggatcatttataaaaattttagctgatttttctggatctcagaattataatagttatatgactcattctatggctaaaggttaccaggtagggaaagttttgtttcgaccgtatgaagatgttttggggataggacactccatgggttggtctagtattcttattccaggatccggggaacccaactttgattcttgggtggcaaacccattcgaaacatctaaacagaggcgagagaaggaagtgcactctctgctcgacaagcttncacccgaaacaataatgtt

SEQ ID NO: 28881 - DNA, 161 bp, Gossypium hirsutum
  Clone ID: LIB3148-020-Q1-K1-E3
attttatggatccacgcttggtatgtagcctagcccaagaaaaaaggaacgaggggaagaatcgacaaggaatccatttccgaaaaaaaaaaattaaaaaaaataatattatagataaagggaatcaaagtaaagaaaaaattttaaaaaaaaaaataaaa

SEQ ID NO: 28882 - DNA, 363 bp, Gossypium hirsutum
  Clone ID: LIB3148-020-Q1-K1-E4
cccacgcgtccgcaaggaaatttccaacaccatttcatttgcaccaatcggccttcttgacatgtgcaacagcagcggtgccgtggagaagttcgaagtacaaatgacatccaatgagaaactgcagttctttgatggcgaggtttcctcggagttgacaacttcactcagcaacaaccggaatccaacagcagcgatcagtctcaaagtccggggttgtgggaggtttggtgcatactcatctcagcatccgttgaagtgttgtgtggacaatgccgacactcacttcaactatgactcatccaccggattggtgacacttacattgccagtgccatcggaggagatgtacagatggcacgt

SEQ ID NO: 28883 - DNA, 171 bp, Gossypium hirsutum
  Clone ID: LIB3148-020-Q1-K1-E5
cccacgcgtccgcccacgcgtccgaataagtgtgttcatctgcaatttatacatacaacttgagcaagttgatatgaactagtttcaattttttttttaaaaattcaaaggaatgttacgtaaaaaaaaaaaaaaacagcaaattataaaaaaaaaaaggcgtgctgtatt

SEQ ID NO: 28884 - DNA, 204 bp, Gossypium hirsutum
  Clone ID: LIB3148-020-Q1-K1-E6
gacaatttgggtcaattcccaatagttcatcaggattcagctaatgcactcacacatgaatcaagcaattcaattacgggcagattttgccaaaaaaaaaaaaaaaaaaaaaaaaaaaaaaaaaaaaaaaaaaaaaaaaaaaaaaaaaagaaaaaaaaacgagtgcatacaaaaaaaaaaaaaaaaaaataaagggggggggac

SEQ ID NO: 28885 - DNA, 191 bp, Gossypium hirsutum
  Clone ID: LIB3148-020-Q1-K1-E8
ggaaagttgatctcaaaatctatttctgctacaaagatctctcctcggcactcgaaaaggtgttcatttgcttcacaatcggtcagtttggttctaaatgagattctagcggtgattgaatgactttgagcctgttcaattatctggttaacagtactgtatactttgtttccttttatgatatggacgga

SEQ ID NO: 28886 - DNA, 368 bp, Gossypium hirsutum
  Clone ID: LIB3148-020-Q1-K1-E9
cccacgcgtccggttttctgcatttttttctcattaccatttttatctttctgaatgtatggataatgtgcaatctcttacagataaaccgacttcctccagaggttgtaaaatactttacagatccaaatgcagttgatccaccagatatggaactactatacccatttgtagagtcagcattgcccctggcatatggtgttttgggtgttcttttatttcatgaacttgggcattttctggctgcttttccaaagaaagtaaaactaatcatttccttttttatttcgaacatcacttttggaagctctggagctattactcaattcaaatctattcttcctggccgtagtacctaagttgacatt

SEQ ID NO: 28887 - DNA, 400 bp, Gossypium hirsutum
  Clone ID: LIB3148-020-Q1-K1-F1
cggacgcgtgggcagaagtctacaggcgaatgggacacggttcgtcatatggtgttggcgtcaaactaggactagtaagagctgagtatgctgttgaccataacaacggaactggtgcagtcttcttccgatttggagaaagatattaaaatgtgattttgggtctaattctgctaaggtgggccgttacaggttccggttatggttgagctgttcttgatcttagaaaatcctgttgagaagtatggaactaggcatattcttgtgtcaaataaattttgtttcaattttgtgctatataattttatcttgatctgtaaaaccaaggatttataagggaattgttggtgttggattacatacttttttatgttctcaaagaataaaaacagaaccgaat

SEQ ID NO: 28888 - DNA, 69 bp, Gossypium hirsutum
  Clone ID: LIB3148-020-Q1-K1-F10
aaaaaaaaaaaaaaaaattaaaaaattaaattttaaaaaaaaaaaaaaaaattttttctagagggctac

SEQ ID NO: 28889 - DNA, 410 bp, Gossypium hirsutum
  Clone ID: LIB3148-020-Q1-K1-F11
gaaaaaattgagcttttggtggataaatcagaaaatcttcgctcccaggcacaagatttcaggcagcaggggacccagatgaggagaaagatgtggttacagaacatgaaaataaagctgatcgtgctcgggattctgatcgccttgattctcatcatcgtactgtctgtctgtcatggcttcaactgttgatgaatcactcagttgctatattctattcatttgcccactcattgatcggtgttgtagctgtcaccagtaatattgatgctcctcatagttagtagttacagttttctttaattccacgtccttttctgctgtagcctaatatcagaagactctctgcatatatactgagattcgaactatggaaattgaattttgaaatatataaaaatatcaaataa

SEQ ID NO: 28890 - DNA, 342 bp, Gossypium hirsutum
  Clone ID: LIB3148-020-Q1-K1-F12
cagaattggttgaagatcccgaaaccgcaaactatgatgtagctgttataggtcctgaaattgctaattgcgaaaaggaactgattaacgcaaaggttcaagcacctcgactccttgctgggaatcgatttgtgaaatattatgtctaaatgggatatgaaataacttcaccttctagccttgaaattccaaatgagttttaggcaaaaaattaagggaatatgtatagatagtaatgtgtgaatttgttatctagattgataaaatataatattgagggcataggtgtgttgccattgttgttgttggagacactataaattaattaaaaataattagttg

SEQ ID NO: 28891 - DNA, 298 bp, Gossypium hirsutum
  Clone ID: LIB3148-020-Q1-K1-F2
cccacgcgtccggctcgaaagccatcttatatccaagggattacttaggagatacaaatccctccatatatccaagctccagtatctggctattgtgatagaaagcgaagattgccgaacttcgaatgttattgagcttttgcaatggctggcagatcttggtgtcaaacatgtttgcctttatgatatggaaggaatactgaagaaatcaaaggacttcatcttggagaagttcgatggtgcaacattatttcaggaaaatgatgtgctactagatcaaccacttatgactctggag

SEQ ID NO: 28892 - DNA, 357 bp, Gossypium hirsutum
  unsure (1)..(357): unsure at all n locations; Clone ID: LIB3148-020-Q1-K1-F3
accaagcataccagtcccttgactctccatgtgttgggaaacgcgaaaggggcggtggctgtggttatatcgatcttgatattcaaaaatccagtatcaattaccgggatgcttggatactcactcacagtggcaggggttattctttatactgaagctaaaaaacgcagtatgtaagtaaagggaccattaagcaatagggataatatatatgtgggcacaaattcaacaaatattatgtgttttttagtgtgggattaggctgttgagtgaaacaaaattgaaggaagaattttgtaatttttgttgaaccaatgtcttcttttagggagaatttggaaaaaatttgattttnat

SEQ ID NO: 28893 - DNA, 208 bp, Gossypium hirsutum
  Clone ID: LIB3148-020-Q1-K1-F4
cgagattgaacttccgccagtggcttaaagccaatgataactgttatgatagtcatctatttgatatttggagcatgttaagtgtcttagattttgtagtttttaagtttggcacctaaaatgaacttatgctggatgcttttttctgaattttccttttgtgtttctcaaattttgttatacttaaaacttattacttgataatttt

SEQ ID NO: 28894 - DNA, 263 bp, Gossypium hirsutum
  Clone ID: LIB3148-020-Q1-K1-F5
atagaaagcactcttggtatgaactgtttacattatttttctgctggtagttctcccttgtttgtgtatttaattcaattctgtgtgctgatgattgccttttgaattcaatcttcatcttcaacattttatagttctcaatttgatctgttggtttgtagttcctttatttagcaagctctgtctatgtcttcattcttctcaaacatatttgtcctatactggaatttaaagaacatctttctgatttattggctaaggtt

SEQ ID NO: 28895 - DNA, 272 bp, Gossypium hirsutum
  Clone ID: LIB3148-020-Q1-K1-F7
agattcttatatccgatccaggatagaagttcctgctatcttcctcaaaaactgcagtggagaccttgtttatgatatgtgtgtactgccacctgttatgatggccaagctctgctgactgcagatccattatagaagaagctgctaagcttgtagaggctggtatgcatacttggcgaataggttctatatatcatttttaagaaatgtttaagctttcaaatggcatgcttattaactcgctataattcgtggggtagcttaaaatgaca

SEQ ID NO: 28896 - DNA, 202 bp, Gossypium hirsutum
  Clone ID: LIB3148-020-Q1-K1-F8
ataaaattataatctaacatccttttttttctaaaaacccttcctgaaaaaccgcgagcgttacttttttaatcagataggcctactcccatcttaaatgttagcaacccactccataaagtaatccccccagccacgctacagctaatctcagcacggaagccacttaaactagtactacaccttccccacaccattttcc

SEQ ID NO: 28897 - DNA, 191 bp, Gossypium hirsutum
  Clone ID: LIB3148-020-Q1-K1-G1
gcaccgggaaacctcctctttccagtgtcatatcggtgcccgacacggacacaccaccgagacggctggatacgtatcagagcaaaaaaaaaaaaaaaaaaaaaaaaaaaaaagaaaaaaaaaaaaaaaaaaaaaaaaaaaaaaaaaaaaaaataaaaataaaatgaaaaaaacaaatggggggggtcatt

SEQ ID NO: 28898 - DNA, 318 bp, Gossypium hirsutum
  unsure (1)..(318): unsure at all n locations; Clone ID: LIB3148-020-Q1-K1-G10
ttcgtgatgctgtgacttataccgagcacgccaggaggaagaccgttaccgccatggatgttgtttatgccttgaaaaggcagggcaggactctctatggttttggtggttaagtttaggatcattcttaagttcttaactgtaatgcctttagatcttgactctagatctatatcgttatgtacttgtttgtgtactcgagtgatgttataatgatttgtaaccttaagattgatcgaataattttcatttgcaaaanaaaaaaaaaaaaaaaataaaacatataaaaaaaaaaaaacaaaaaaaaaaaaaataaaa

SEQ ID NO: 28899 - DNA, 187 bp, Gossypium hirsutum
  Clone ID: LIB3148-020-Q1-K1-G11
aaaaaaaaaaaaaaaaaaaaaaaaataaaattaaaaaaaaaaaaaaaaaaaaaaaaaaaaaaaaaaaaaaaaaaaaaaaaaaaaggaaaaaaaaaaaaaaaaaaaaaaaaaaaaaaaaaaaaaaaaataaaaaatattatattttaattaaatttattaaaaaaatggattttaatttttttaattg

SEQ ID NO: 28900 - DNA, 314 bp, Gossypium hirsutum
  unsure (1)..(314): unsure at all n locations; Clone ID: LIB3148-020-Q1-K1-G12
atttcctcagagaagcttattagcgaaaggttcagctttaagtatgggatcgaggaaatcgacgaccaaaccgtggaatatttgaagtctaaggggctgctcaagtgaagcgctctgacgcttccccaatgattatggtgtttgattgttgtgttattgtgataatattcgaataacttcatgttctacaaatgaaggcaaaaccgtgtggcgtttgtcatccattttgattatgaatttctatcacctcatgtccttcnnnnnaaaaaaaaaaaaaaaaaaaaaaaataaaaaaaaaaaaaaattaaattaaa

SEQ ID NO: 28901 - DNA, 338 bp, Gossypium hirsutum
  Clone ID: LIB3148-020-Q1-K1-G2
gcggcataagagttttaaggaaaatgcagatcttcgtgaaaaccctaactgggaagaccataaccctagaggttgaatccagcgacactatcgacaatgttaaggctaagatccaggacaaggaaggtatcccgccggaccagcagaggttgatcttcgccggaaagcagcttgaggatggtcgtacacttgccgactacaatatccagaaagaatcaacattgcatctggttctgaggcttcgtggtggcattatcgagccatctttgatggcattggctaggaaatacaaccaggacaagatgatctgccgcaagtgctatgctcgtctacaccca

SEQ ID NO: 28902 - DNA, 358 bp, Gossypium hirsutum
  Clone ID: LIB3148-020-Q1-K1-G3
cccacgcgttcggattcaaatcccttttggtatcaattgaaaacaagcagccaacatggggaagacacgaggtatgggagctggacgtaagctgaggacccaccgaaggaggcaaaggtgggccgataagtcatacaaaaaatccaaccttggtaatgaatggaagaagccatttgctggttcttctcatgccaaaggcattgtccttgaaaagataggtattgaagctaagcaacctaactctgctatcagaaagtgtgctcgagttcaattgatcaagaatggaaaaaagattgccgcattcgttccaaacgacagttgtttaaattacatcgaataaaatgatgaggtgttgatt

SEQ ID NO: 28903 - DNA, 144 bp, Gossypium hirsutum
  unsure (1)..(144): unsure at all n locations; Clone ID: LIB3148-020-Q1-K1-G4
ctnccgcttacttaatgcagtgctggtcctgttgctgaagacatgtttcattggcaggccacaatcatgggtccaccagacagtccctattctgggggtgttttcctagtgactattcattttcctccggattattcctttaag

SEQ ID NO: 28904 - DNA, 388 bp, Gossypium hirsutum
  unsure (1)..(388): unsure at all n locations; Clone ID: LIB3148-020-Q1-K1-G5
cccacgcgtccgcagagggtcaatggacacctgaggatttgttagagttgctgcagagtcgtcctttccgtcaacaagtagattcatttacctatgtacttcgaaccggacagatagatttgtttcagttcggtattgatccaagtaaatataagttcaccgttttatctttccttgaggcacttgaagattctgtttccaaaacttccggagaaacacaagatgaaaaagatgtaagacctcaatcctgtaatcgtaatgaccccatggatgagagcaagtgacggagataatttcatctggtatcgntcccatcaccctcgtttatcataggagagaatggtcatccctgtttaaattaatctttctggttgagtggggtgtctgg

SEQ ID NO: 28905 - DNA, 399 bp, Gossypium hirsutum
  unsure (1)..(399): unsure at all n locations; Clone ID: LIB3148-020-Q1-K1-G6
cccacgcgtccgattatgttataaactctatattaggtgatccttttcttccatggttttcgtgcaattgattgcagggtctctttcatcccgatgaccggggttttccacagacggtgcatctagtcagttctctaaggcaaacttgtgttaccggttactactcaaacggaatatttttctcattttccgatggttgtagacttcactgtgtgtaaagcactgtatgcatgtacaaattatatattagcctctgttggaatttgcaattctaaaatacaatttaactctgttgtttggagacttaactatgcccattagttcaattaatgaataaaaaatagaaaaaacaaaattggtggttggcattgaaaaaatatatttnnataaaaaaaacaa

SEQ ID NO: 28906 - DNA, 397 bp, Gossypium hirsutum
  Clone ID: LIB3148-020-Q1-K1-G7
gctgtgcaaaatgcgacaaatcctaccagagatttggaatctgactttgaagttggtcaagaaggaaaaatacgagaaattgttatggataacactgactcagagcacatgaaatccaaaggtgaggagactagtgagctcattatagcaacactaaaggcagagaaggaagaactagaatcatcactcaacaaggataaattgcagtctctccagctgaaggaagaactaacccaagctgagactcgaaacacggatctgtacaaggagctccaatccatacgtggtcaacttgctgccgagcagtcgagatgtttcaaattagaagttgatgttgccgagctgcgacagaagcttcagactatggaaacactacaaaaagaactcgaactcctgc

SEQ ID NO: 28907 - DNA, 382 bp, Gossypium hirsutum
  Clone ID: LIB3148-020-Q1-K1-G8
gatgctctcaaggttttgaggcttcagaaaggacacaagtattgtttgttgggcaagctctcgtcagaggtcggatggaaccactatgacactatcaaggagcttgaaaggaagaggaaggaaagagctcaagtggcatacgagagaaggaagcaactcactaagctcagggttaaagccgagaaggtggccgaggagaagcttggcacgcagttggaagttatttctccgatcaagtattgattcatctgggtttaagtttaatgcatctttttgagtagctcggaatttttgtggtctaatcttttgaagtagatgttaatgcttacatgcatttggaggagactttttttttttccctttgaaaaacatgtccttttac

SEQ ID NO: 28908 - DNA, 161 bp, Gossypium hirsutum
  Clone ID: LIB3148-020-Q1-K1-G9
tcgcccacgcgtccgcgggaaataagattgtccttaatgttatttaactatggttgtggacacatttttgttcgcggtcacatttatagtggttgcggatgtaatgcatgctattactggcaattgtggtaaatatcggttgttaaatccatctcttttgg

SEQ ID NO: 28909 - DNA, 358 bp, Gossypium hirsutum
  unsure (1)..(358): unsure at all n locations; Clone ID: LIB3148-020-Q1-K1-H1
cccacgcgttcgnggactctttggcggacgttttgtctagaattgtgggaagccatctcaggcgagtgtatcatgtacctcggtcatggttgaaaccaagtggcaacattcttgtattgttcgaggaaatgggtggcgatccgacacagcttgcttttgcaaccagaaagatgggaagtttgtgctcgcatgtatctgactctcacccattacccatggatatgtggggtttggattcaaaaacaagaagggcttcaaaccctacgctatccctcagttgcccatttccgaatcaagttatttctgcaatcaaatttgccagctttggaactcctcttggcacttgcggcagttttag

SEQ ID NO: 28910 - DNA, 435 bp, Gossypium hirsutum
  Clone ID: LIB3148-020-Q1-K1-H10
ggtttacaggagaagctatccagggagatgagcttgatatagatgacgatgaagaagatgacgatgatgatgatgaggaggaggaagaggatgatgaggaagaggatgaggatgaggatgctgatgatgaggatgctgacgaaggaagtaagaccaaaaagaagtctgctcataagaagagtggtaaagcagtaggggatgggcagcaaggtgagaggcctccggaatgcaagcagcagtagaaattaattgctgccgttgagtgtggtttataagattttgattggaagaagcgggagaaagggagggtttgcagttttggtggttatttatttctacagttttatgttattgctatgagtatgattggtttctacagtcgttttatcctttttggtctgttggattggtaggatggtctggtaatggtactct

SEQ ID NO: 28911 - DNA, 408 bp, Gossypium hirsutum
  unsure (1)..(408): unsure at all n locations; Clone ID: LIB3148-020-Q1-K1-H11
cccacgcgtccgcacaaacagagaagagatataattgaaagaaaagaaaaatggttctgctagagaaactttgggatgatgtagtggccggtcctcaaccggaacgtggccttggccggctgaggaagatcaccaccaccccacccttgtccaccaaagatgaggcttcatcaatggcgatgccgacgagtccgacgacacctgggacaccatcgacgccggtgtcggctcgtagggacaacgtgtggaggagcgtgttcaatccaggtagcaaccttgcaaccaaaggtattggcgctgaagttttcgacaagcctcaacctaactctcctactgtttatgactggctttacagcggggagacccggagcaagcatcaccgttgattangcggtggctgacggcggc

SEQ ID NO: 28912 - DNA, 258 bp, Gossypium hirsutum
  unsure (1)..(258): unsure at all n locations; Clone ID: LIB3148-020-Q1-K1-H2
gcaaagctgagagggaagaagtgaggagggtcttgtcgttaatcaaacagaagttgaatgtggtgtccagttcttgagtcctaaaaaatggtgatgtaaataaatgcgctctactgttactatggctcgcatgtaataacagcgtcttcgatgttatctgaagactgactatgactatgactgatgaaatgaagtgtgttcttgactgttgcaagggnaaaaaaaaaaaaataattaaaaaacaaaaaattaattaaa

SEQ ID NO: 28913 - DNA, 330 bp, Gossypium hirsutum
  Clone ID: LIB3148-020-Q1-K1-H3
gaaaaagttaagtgaaaaaaaaaaaaaaattttaattttataaacaaacaaaacaaaaaaaggggagaccaaatatgtgagtacgaaaaaataaacacaaaaaaccaaacgcgcgccccttttaaatatccctagcttatttccacatcctttcacctggttatccttttttataagtccacctatttctaattcaatgccccgtgtttttcactgttgaaattggaaaaaccatggctttacccaaattaatttcctataaacacatccccctttccccagattggcaaataacaaaaaagcccccacctatctcccttcccaaaattt

SEQ ID NO: 28914 - DNA, 332 bp, Gossypium hirsutum
  unsure (1)..(332): unsure at all n locations; Clone ID: LIB3148-020-Q1-K1-H4
cccacgcgtncgcgaaggttgtgtaagacataagcagtcagttcaaaaattaggtgatgtatctgttttacacttaagtttgtatcccccctccttttaaaatagaatttgaggtttcatgatgggattttatcgaacctggaaatgtgataacttgatagctctagcatttgtataatttggagactttacgctgtcattttgaaatatacagtttattgtgcctggaatttctattaattgctgctgtatgaacatgatatttgaaaatggagttcaaagttgggggtgggggtggtttgatttcaaaaaaaaaaaannnnnnnnaanna

SEQ ID NO: 28915 - DNA, 246 bp, Gossypium hirsutum
  Clone ID: LIB3148-020-Q1-K1-H5
cccacgcgtccgtaataatttttgtatttttgcttagagaagaaattcaaagtctagtgctgtagggttttgcttatgggttctggatttcttctactaggctactttttggtattattattgttatttcttggaaatattcaatgcaattatgaaacatcaaatttttagcttccaaaagaaaacaaaagaactgtaatcttgaaatatacacattattaagcctgaaaactattttaattgcag

SEQ ID NO: 28916 - DNA, 311 bp, Gossypium hirsutum
  Clone ID: LIB3148-020-Q1-K1-H6
tgaagaaaatatggaagtgtcaactacaattaaagccaaaaataagaaacaagctgagcctgatattgatttcacaaaagccttggataatgaaatgcctgacatctttgctcctccccaaaatcttaagtcattgcttctaccttcaaacagagcaccttgtaatacaaagcttcctgaagattgtcactatcaacctgaagaccttgtcaaattgtttcttatgcccaacaagatagtaatgtttaccaccagtttgctactaaacattatagccggatctggaacagttacattagttttgttaaaaa

SEQ ID NO: 28917 - DNA, 272 bp, Gossypium hirsutum
  Clone ID: LIB3148-020-Q1-K1-H7
gatacattggtcactattagttcacaaaaatcttagcagagtgagcttctccattggtgagtcttttttatatacatatattttctttttctgacgatccttgtttctcagtgtgtacattgatggaataagtaggatgttagatgattgacatgtttggcaagcaagaaatatcttattgaagtaaatgatgatcgaacggttgatttttcaaaagttaagtttaacaaggttgtgtttgacagtatgaggtctatcacctcattcattta

SEQ ID NO: 28918 - DNA, 250 bp, Gossypium hirsutum
  Clone ID: LIB3148-020-Q1-K1-H8
cccacgcgtccggtgaggaatgtggaagatatacacaaaaatctcttacatgaactggaatccctgaaagaagatccatatggattagttgataatggaggggattatgataccctgatcgggtatcaaaatggaggtcctcgtatatttgctttacgcctgcagccaaaccatcctagccttcacagtggcggaggctccgatctcaccacctatcccttgcttgattaaaatatctatctcgcgatga

SEQ ID NO: 28919 - DNA, 104 bp, Gossypium hirsutum
  Clone ID: LIB3148-020-Q1-K1-H9
aaaaaaaaaaaaaaaaaaaaaaaaatttaatttaaaaaaaaaaaaaaaaaaaaaaaaaaaaaggaacggccccttgggcggccgcgtggggttttaaatcgcaa

SEQ ID NO: 28920 - DNA, 452 bp, Gossypium hirsutum
  unsure (1)..(452): unsure at all n locations; Clone ID: LIB3148-021-Q1-K1-A1
cccacgcgtccgcccacgcgttcggaaacatgaagaggttttcccttattgttttgtgcgtggtgactctagtggtggtgttgttttcggatgcagaggcagcgccagcgccgaaatgtgataaccccttggagtatagctcatgcttgaacgcgtataagaagccacctccatcagctggttgttgccagaagatgaaggaacaagcaccatgctattgcgagtacatgaagatagaagatgtcaaacgtgtttttgacagagttgagattgcgaaaatggctaaattgtgtggagtttcatattcttccacctgctagaatcccgtttggtttcatttgactatctctggctgggataacttggcatttcaataaatgaatttttattttgaaaactatttttttactcataattcgactataatgtacttgnggtctttttttttttgg

SEQ ID NO: 28921 - DNA, 177 bp, Gossypium hirsutum
  Clone ID: LIB3148-021-Q1-K1-A10
atttaaaattagactttataatacttttattataatttaaaaaaaaaaaaaaaaaaaaaaaaggaaaggggaaaaaaaaaggggggaagaggaggccaaacactataaaaggacacaagcaaacgaacccgtgcatgcgacggcatagcccatcaaaagggccacctaaatccaatt

SEQ ID NO: 28922 - DNA, 363 bp, Gossypium hirsutum
  Clone ID: LIB3148-021-Q1-K1-A11
gcgcccacgcgtccgaaactgtatgaaatctctaaataatgtttgccatttcgcacattttatagaagcagcaatcaacgcccatttgtttgaaaaaaaaaaaaaaaaaaaaaaaaaaaaaaaaaaaaaaaaaaaaaaaaaaaaaaaaaaaaaaaaaaaaaaaaaaaaaaagggcgggctttttaaaagaaacaagctaagtttcgcgtgcctgggagggcaaaaaaatttaattgtgtggcctaaattaaattaactggccggcgggaaaaaacgtggggaatggaaaaacaatggctttacgcaaaaaaatttgttttgcaggaaatccaaattttgacagggggcgaaataattaaaagg

SEQ ID NO: 28923 - DNA, 396 bp, Gossypium hirsutum
  Clone ID: LIB3148-021-Q1-K1-A12
gatcttgagtagttatattgcttgctagcattgtgccatatacactaaaatgaggaacctaaaactttttcttgtcactgcagctgtgatttttcttgtaagcaaccatccatttgaagcttctggccgggttctaaatgaatatgatcttatcctacagtctgtccagaagggagtaccaactcctggtggacacaatagctgcaccaatattcctggcaggaatgacccgccatgcatcaaccagaggggattcgcaggccgtgttatggctcctccacggctgcaaccgaacaaaaggattccgttcaatacagcagcctaatgtcaaaagaatccatttcgttccagctaggaaccgattagtactttattgatttagcttgtaatagtatg

SEQ ID NO: 28924 - DNA, 220 bp, Gossypium hirsutum
  Clone ID: LIB3148-021-Q1-K1-A2
gttatattcatatattgaatctatctttgtgtatcctagttccaattatgctttagagtatatcaggacggctatatatcgatatcgatgcctcgtgtatgtagtttttcaatttttttcatttgtttcagtgactacatatgggaatatatgatccttggaatgttgggcagtatctttagttgattaatgaaaggtctttcatttgtttgtgaattaa

SEQ ID NO: 28925 - DNA, 361 bp, Gossypium hirsutum
  Clone ID: LIB3148-021-Q1-K1-A3
gtataattgcttggttccaaatgttggttttttttagcactcgatccttagtacatgttatataggggcaggataccactgaatatgggggccaaaaaaaaaaaaaaaaaaaaaaaaaaaaaaaaaaaaaagatactaaaaaaaagaaaaaaaaaaaacgaaaaaacaactgcaagaaaaacaaaatagaacaaagaaacaagcagactagtgaaaaagaaaaaaaataataaaaaaaagcgggcctgcctttaaaaaaaaaaaaggtttgaagaccagcctaaccactgtttaaccaaatacaagctgatgtagaaatggaaataaatggggatgggcataaaaatcaagaagtgaaaaa

SEQ ID NO: 28926 - DNA, 75 bp, Gossypium hirsutum
  Clone ID: LIB3148-021-Q1-K1-A4
atttaaaattagactttataatacttttattattttttaaaaaaaaaaaaaaaaaaaaaaaaaaaaggaaggatt

SEQ ID NO: 28927 - DNA, 259 bp, Gossypium hirsutum
  Clone ID: LIB3148-021-Q1-K1-A5
acgatggcaagtgcaagtgcggaactagctgcatctgcacaaactgcacatgtggcagtcactaagcagacatatagaatgatgaagtttgggacctaaaaagaataaaagttgggttgaataatttgtgtcttttgttgtagtttgagtgtgttttcttgtctatctgtccgatgattgtctatgtctctcattttatacaatgatggaatgaccatgtcaatggcctttgtctgattaatgaactattattagtttt

SEQ ID NO: 28928 - DNA, 445 bp, Gossypium hirsutum
  Clone ID: LIB3148-021-Q1-K1-A7
aaaaaaagaggaaagaaaatggggtgtttctcggggtgtttctcgggcttcgacggaggaaacaaagaagagcgacaggagcaagacagattggcctctgccgaagctcgtgccaaagccgccgaggctgctcagaaaaggcaagagcagtttgaacagtcagctgcaggaagagctgctcgtgcccaggtgcaagcggctgcgaagcagtcagcaaattctaataaaggcgaacctgttttgaagtggcagctgggttgaagatttgcctagtctctgttcagccaaaactgctaatgtagatatggaaataaattttgatgtacatagtttccaagttgtgaattcctcgccattaagcaagtgatacggtacaagtgcaccagcagtcaaatcttttttctccattttcagttgtaatgtgtataataaatccaagatgaag

SEQ ID NO: 28929 - DNA, 142 bp, Gossypium hirsutum
  Clone ID: LIB3148-021-Q1-K1-A8
ggtaaatgaaaaaaattgtcaataaattggaaattatatgatgttgaatgcatagtttctagtttgcttgtaaagatgtaactgttgttatatgtaatacattataccgtcaatgaaagttcttgtttattttttcttctca

SEQ ID NO: 28930 - DNA, 413 bp, Gossypium hirsutum
  unsure (1)..(413): unsure at all n locations; Clone ID: LIB3148-021-Q1-K1-A9
ccacgcgtncgcttttggctaacactgttatcaacttttttaacaacggatatttccagggacccggggacgcgccgttggaggcgggttcagcttgcacggggattttcgggtcgggttcgtacccgggttatccgggtaaactgttggtggagaagagcaccggagcgagctacaatgccaacggcattaacggccggaaatacttgttgccggcgatgtgggatccgcagacgtcgaggtgcaaggcgctagtttgacggggacaggtggcggaaatcagtggtgaaatggggatgtaatgtagatattagggtatgggtatttatggttgatcacgtgacgggtaaaatttgtttttggtactgggggagaaaaggaattgtaggttgggggtaaaagaaaagaaaata

SEQ ID NO: 28931 - DNA, 433 bp, Gossypium hirsutum
  unsure (1)..(433): unsure at all n locations; Clone ID: LIB3148-021-Q1-K1-B1
cccacgcgtccgcattagggtttcagcgctgcatctttcatcccctagggccgactcttgggtttcaccagcacataatgtgcctccgccaccgccgagacccaaagcccccttttttggttccgtttccatgcccaagggaccccgatgacggaaccgatgatgtaatcaggtaaactcttcccttttcttattttcttctgctaaaacacattcaaacctcgaagaagaggatctattcaaaaaaagaaaaggaaaatggaactcgaaatcacctctcgaaaatttcggcttgatttttttgtattttgtatttccgtgtgcttaatatgcgttcgtttgtattgcttgtgtccaaaaagagatttacagtcgaaaatcaacagctntatagccgaataatcaaaaaataaagaaaaatataattttttct

SEQ ID NO: 28932 - DNA, 288 bp, Gossypium hirsutum
  unsure (1)..(288): unsure at all n locations; Clone ID: LIB3148-021-Q1-K1-B10
cggaannnccgggctcgaatataagagactacatataaaacgggctgctggaaagccaaaacattgctgctacaaagtgtttctttgatctgcaaccgggaaaaccggaaactgcatcagaggtaaaaacttgtattcatttttactatccattgttttttgtttttggtggtattattgtgagaagcttatctaatgttgtacatctgttatactgtcattgtttcttcagttctgttggaaagccccaattagatttagtaaaaaaattgaataaatttgttctac

SEQ ID NO: 28933 - DNA, 280 bp, Gossypium hirsutum
  unsure (1)..(280): unsure at all n locations; Clone ID: LIB3148-021-Q1-K1-B11
cccacgcgtccggtggtggctattatccttaaaagtactctatcaccattgcaattcaccaagagcattaatattgtcactactagtactaaaagaaataagtgtaatttggttacaaaaaccaaaaccttgaaagatatggcaagaaactttggaatcgaaatggatggtcttaaaagttgtatcatatgatattcgaatgaatccatcgtttcctaatgatttacatgtaacactttgttcataagcattttatcaatctaaatttatttataacnna

SEQ ID NO: 28934 - DNA, 316 bp, Gossypium hirsutum
  Clone ID: LIB3148-021-Q1-K1-B12
ggctcggcgattatctccccatcagggttattgattctcttcggtgtgtgtccttatttgaatgcatttcttcttgggtttttttctatacgaaaaaaagaaacatgcatcgaagcgtctccgtattactcgtatttacatggaaaaagtttgtaatggttatgttttatgatctctttgctttgtttttatgtattttgtttgatggatactatgaaggttgtggagtgaggtacttttggtttttcttcttttacatttacagtggataattctactggatttgtttaatttaattgaccttttgtttcggttt

SEQ ID NO: 28935 - DNA, 392 bp, Gossypium hirsutum
  Clone ID: LIB3148-021-Q1-K1-B2
aaaaaaaaaaaaaaaaaaaaaaaaaaaaaaaaaaaaaaaaaaaaaaaaaaaaataaaaaaaaaaaaagaggaaggaaaaaaaaaaaaaaaaagaagaaaaaaaaaaaaaaaaaaaaaaaaaaaaaaaaaaaaaaaaaaaaaaaaaaaaaaaaaaaaaaaaaaaaaaaaaaaaaaaaaaaaagggggggggcccttttaagaaacaaaaattattttcccggataaaaacgggggagaattttaaataagggaaacaaaaaaaaatacacgggcccggggaaaaaaaaattgagaaggggaaaaacatgggtgtccccaaaaaaaatccctaggaaaaaaatgccaaaaaccaagtgggttgaaaaagaaaagaggcccaaaaaatacaactt

SEQ ID NO: 28936 - DNA, 442 bp, Gossypium hirsutum
  Clone ID: LIB3148-021-Q1-K1-B3
tgctcctcatctcatgtaggatcatccaatggagaagcatcatcatcaatgagctcaacaagattattcaagctaccaagattggctgaaggtaatcattcggctagaaatcaagatcatgatgactcagagtcgggatcaacggctatcatcagctctttaaaaagactgcaaaaacacatgatcaccaatgatgatgatgcatcaactataatcagtgggatctgcaggttgagccgagatcagagccgttagatttcacttacctctaattctctcattatatatcctaacttgcacaatacaaaaaaattttcccctttttcttttggaaaatgtttcaattttatgacagaaaataatttattttccttctttgggttgtggtgcctatttcttcattgttgaaatttatggaattttaatataataattattttat

SEQ ID NO: 28937 - DNA, 376 bp, Gossypium hirsutum
  unsure (1)..(376): unsure at all n locations; Clone ID: LIB3148-021-Q1-K1-B4
caaagaaagaagaagtcattgttgaggcaaaaacaatggttgaagctgaaaagcaaaagaaaaaggaagaagaagaagaagaagaagatgagattattgttttggctgaaaagaaaagtgaaggagctaagaaagaagaacccattgtaaaagaagtgaaaactgaggcacccattgtttgatcatagggaaatgtaagggaaagtttatatatatatgtatgtgagaactaaggataaagaagaaaaacaggaggaggaagaagcaaaggaaactagcaacatatgtaatcataaactcacaatattttatgttgtttgattttatgtttatttgggaaatggagggaaaatgtgtttattttttgaaaaanaaa

SEQ ID NO: 28938 - DNA, 365 bp, Gossypium hirsutum
  Clone ID: LIB3148-021-Q1-K1-B5
cgcaaatgaaataattcattatcaagccttaaatttacgatgccacagctcagcaacacgggagggcgcaacaataaaggacgaagaggaccataccattctaactgaaaaccataacgactcaactaacaaacaaaatcctatcactaaacacttttaaacaactacaccaactcttctattccacacaattgttaaccacacctactctatatacaaacgtaacagctaaccatccacacaacagacagaattcacaacactcaactgcttttcttatcttttctaaccatgccaacacaatacaaaaataccctcccttatatctcaaaccattcaattgaatgacaccacacaaataattt

SEQ ID NO: 28939 - DNA, 289 bp, Gossypium hirsutum
  unsure (1)..(289): unsure at all n locations; Clone ID: LIB3148-021-Q1-K1-B6
gggnccacccacgcgtccgaaaaaacgaacaaattaagcatcaaaccatggatttcaaaccccatttttaatccccaccggcgcggcgaaaataaaaagggtgacaggacccaaccagcctaaaagaaaacagaaccaactcagcaaaaagaacccaccgccaaagaaaacaaaacccaggaacccaatggttgatcatagggaaacgcaagagaaagaataaataaaccacataccgacaaccaaccataacaaacaaacaccagaggaggaagaagccaagcaaact

SEQ ID NO: 28940 - DNA, 329 bp, Gossypium hirsutum
  Clone ID: LIB3148-021-Q1-K1-B7
cttcggaaagtcctgatgcaagccaacaaagtttaaggttcttcaatcctgagcaccggcaatgacgacggaaatggtacacaaagttcactcctttaacctttcatccccggcttaatgtgctcgatttcatgttggatttgcctagatagtttcagatctaatcaaatagcttttattagaaattctcttcaacaacatcactctaaaaataagaaatatagatttacatacatgcacagtgcaaaaaactagattaagatcaagttattgcatatcttaaaaacacaaaaaaaaaaaaaaaaaaaaaaaaaaaaaaaaaaggggcg

SEQ ID NO: 28941 - DNA, 447 bp, Gossypium hirsutum
  Clone ID: LIB3148-021-Q1-K1-B8
cttgtgaataaattgatttctggagaagcatattcaccataacgcgtaacagaatagtagacatgggcccttgtcgctcctcttgaagacccaggacattctcggaagacgtggaggctaccttcaaccgcagaactgcatcgaggacatatgtcatttgaaacaactctcctgattctgaggttaacaaagtttggtaaaaaatcccaagagatccgccagattgtaaatgcaatttttgatggcatctgtaggttccacagtttcttgtaaaattcttttatttcggtttgtaataaatagtaactaggatccgagttagcaatttgtaatagtttataggcactacagactgagaacccaccaaataattctcctttccaaacctgaaaattttcatgctcaatctctacaaggggaatttgaagaattttccgagcaatgtcc

SEQ ID NO: 28942 - DNA, 333 bp, Gossypium hirsutum
  Clone ID: LIB3148-021-Q1-K1-B9
cccacgcgtccgcccacgcgtccgcttgttctctccaccatttgttgtcttttaaacctaccaaataaaaatggccaaaaccatttttgcattatcaatcttgcttggattcaactatcttgctacgaccgtgaatgcctacgcggcttctggctggactaaagctcatgccaccttttacggaggcagtgatgcctcgggaactatggggggagcttgtggatatgggaacttgtatgcgactggctatggaacaatgacagctgctttaagtaccgccttgttcgatgatggagctttatgtggacaatgctacaacatcaaatgcgatta

SEQ ID NO: 28943 - DNA, 366 bp, Gossypium hirsutum
  unsure (1)..(366): unsure at all n locations; Clone ID: LIB3148-021-Q1-K1-C1
cccacgcgtccggctcaaggggcttgatatcgattacattcagcagcattacaccgtttaaagatggatgggatttcccctccaagaaaaaaaggagttataatgacgaacaatcaccccggatattaatattaatattgttatcaatcggcttatagtagtagtatagatttaggataattttcctttttcctaaatgtcggaatttgtgttcattgtgattacctctttgggatgcagaaaggttaattaataacatcatctaatccaaggctctttgtttgctcaaacnaaaaaaaaaaaaaaaaaaaaaaaaaaaaaaaaaaaaaaaattaaaaaaaaaaaaaaaaaaacaaatattataat

SEQ ID NO: 28944 - DNA, 287 bp, Gossypium hirsutum
  Clone ID: LIB3148-021-Q1-K1-C10
cttaaataaaacactagtgctgctgtctctctaatttatacacccttggtggttttaaactgtcatggaatatgggatttctttaatgaaaaatgggttttatatttgctctacaaaaaataaagatgagtcaaaaaaaaaacaaaaaaaaaaaaaaaaaaaaaaaaaaaaaaaaaaaaaaaaaaaaaaaaaaaaaaaaaaaaaaaaaaaaaataaaaaaaaaaaaggggcggccctttaaaagaatcaaagtttacttccccgtgcttgcaacgaaaaattttttt

SEQ ID NO: 28945 - DNA, 328 bp, Gossypium hirsutum
  Clone ID: LIB3148-021-Q1-K1-C11
ggaatcgggcgacccacgcgtcgttgtgcaaatgcacgagctcctcatttgggtgaaagggaaaatatttggatcggtcactggcattagcacctggaggtcatatgaagagaacagaatgtgtaacaagtttgtggatgattggacgaatgcccttagttcgactgtatgaagctgggatagccgctacagtggtttgggatcctgaatgcaccattaacaggcttacttcacttattattgctcaatccgcagttgagatcattgcacactgttcaatatcctgagttgtataatatataaattttgtgtacgctaaatgtgtttt

SEQ ID NO: 28946 - DNA, 396 bp, Gossypium hirsutum
  unsure (1)..(396): unsure at all n locations; Clone ID: LIB3148-021-Q1-K1-C12
aaaaaattgaatcaccttctgatttctttgatttctggtactggaattttgtagtgggcgtagtgtatattctgtgtgcctaaaaaaatttgcaggtacatcaatggcttttatagccagattcacaagataaataaaaataaaaaatatataaaaaatcctattttcctactgtcatctgctatgaattctgttattggctccttctggtgtgttcttttgcaggctcggttgtacagtggagcggagagacgtgcgaaggaggccatgtgaggagtcactcgtgggagccctaactctctggcttattctggcacgttccagaagcttccaatgctgctgaaatatttttgggtgtattggngcctgggtaatggggtatttgggctattttat

SEQ ID NO: 28947 - DNA, 424 bp, Gossypium hirsutum
  Clone ID: LIB3148-021-Q1-K1-C3
gtggccctcaagcttgcatgtggtgtggtcttgtgcttggttgtgggtgcacccctggctgaaggggccataagttgtggccaagtcatatcagccttggcaccctgcattccttacgtgagaaacaacggtgctggtggcgtgcctgcatcttgctgcaatgggatcagatctctcaacgaggctgcccaatcaactccagagcgccaatcagcttgcaactgcgtcaaagctttagctgccagcatttctggcatcaactatgaccttacgaacaaactcccaggcatgtgtggggtgcacagccctttcaagatcagccccagcactaactgcaaaagtgtcaagtgaagtaggccatggaagctcgtcagcaaatgggaaaagaaataatgatatatagctacataaataaaatgggatg

SEQ ID NO: 28948 - DNA, 340 bp, Gossypium hirsutum
  Clone ID: LIB3148-021-Q1-K1-C4
cttgaaaacccatgccattcacggaagacatggttactttcttcaacctccaaacaacatcgggggcgtcgagtcattagaaatgaccctcctgtacctaagattagcaaaatttggtataaagtcccatgatatccggcagactgtaaatgtaatttttgagggcaattgtaggctccaaagtttcttgtaaatttcttttaattcggactgtattaaataatcattaggaacccgattagcctcttgtaatgatttataggcaccgctgaccgaaaacttaccagatagttcttctttgcacacctgtttcttgataataatcatttttatctgaaaa

SEQ ID NO: 28949 - DNA, 388 bp, Gossypium hirsutum
  unsure (1)..(388): unsure at all n locations; Clone ID: LIB3148-021-Q1-K1-C6
tgaggatgcaaaattgatgaagctgtttcccgagattgtgagatctctctatgatcaggatgtccttgcagaagataccattcttcattggttccgcaaaggaaccaacccgaagggcaggcaaacctttgtgaaggccctggagccatttgtgaattggctggaagaagcagaagaagaggaataagctggccaataataatagtatggtcagcaatctatagaaatggtgataaaccttgtacttgttccttgtttttattagctatctgttggtgagacaatcaactcatagttaaccagatccttaagactcatggtgtggctgttaaaatatgagatgctgaaattgatggattaattaataaaaatatgatggttcantnna

SEQ ID NO: 28950 - DNA, 387 bp, Gossypium hirsutum
  Clone ID: LIB3148-021-Q1-K1-C7
cgggcccccacgcgtcgtggtaaaaaatcacagatgctgctgttggcattctgtcaaatgcttaaacagcaccgcggcgacagactggttgctatcacacattcattaagactgaatatgaggagggtagatcgtttggatttttatgccggtaaacggcaatgcgctcaagagctacactcagagaaatgaagactactactatcgaaagggaactcggttgtcggcagagaaatgaatacttgggttgaaagatcatatactgcaactgtgtaatacacacactaagtattagcttaaaatagaacaattttttttaaaaaagaaggattacagttatgtacatattatatagtactaaaattgctatgcaagaaatatcttatg

SEQ ID NO: 28951 - DNA, 386 bp, Gossypium hirsutum
  Clone ID: LIB3148-021-Q1-K1-C8
caaccaacagcctgtacggtaaaacatcttttttgttcgacatacatacgtatatgaacatgtcttgtcttgttgttcatataacaatgcgaaaataaacagtcggggtttgcttccttagaaaaatgaccatgtagttgtatttgagtgcattgttggactaaacgaaagttttaggttttatagctttttggttcgtattgtttgctctttttatcattgaacacattgttatggcagttttgtttgctaaaaagttcttcatcagacaacagctgaacttaaaattttctgtgtgttacattttcttgctgctaagtatttttagatgagacctggtatgctggatgtaggaaacatggtaatctgaattctgagttgtcaat

SEQ ID NO: 28952 - DNA, 336 bp, Gossypium hirsutum
  Clone ID: LIB3148-021-Q1-K1-D1
ctggttttgagaaaagcagtcccgacgcttcagagcaggaaccagctgtgttggtggatagtgaaatacccggtggagctaaactgctagagaagttgcagggaagcatttcagttgatgaaaaggtgttcttggcagcggcggatgctgtaaaaacagcaatgtgcaatttgttaattaagaagcaatattctgatgagaaacgagagttcagaaagcgaacaagaaatgataggaaaagcaagcagtgattcagtgtattgattgacaatgttggtacatgtaacattagttatatgggaatctcccaatctatttaaggcattgcaaaaactt

SEQ ID NO: 28953 - DNA, 293 bp, Gossypium hirsutum
  Clone ID: LIB3148-021-Q1-K1-D10
gaaaggcatgggaggttcttgatcatattatggctaaatatatatgccaaaaaaggaaagatttgaaccaagggatgatatcagaaactgtggatggtggtgtggatatcttaacatcatacattcttgaagagaagtcatgtgatgataaattcttgagagataccattttgaatatgatgcttgcagggagggacaccaccagctctgctcttacttggttcatttggcttgtttcgaggcatccgatagtggaaaacaagatcattgaagagctccaatcgataatacct

SEQ ID NO: 28954 - DNA, 296 bp, Gossypium hirsutum
  Clone ID: LIB3148-021-Q1-K1-D11
cccacgcgtccgcctatttgttttatgtatagcttaagacatgacaggataaaaggcaagtctttgaatctgggtttcctccaatatttcgctagaatttcctctcttttaaggtttgttgtttggatagtgggaaaactatgatggaaggtttggactgtactttacagtttacagacaaaacctggtgggtattgttcataaaattagataatgttaaaaagatgtctttttaagttactatgtaagggtcggtgatattttcattgataaataaaattattaattagtttatt

SEQ ID NO: 28955 - DNA, 95 bp, Gossypium hirsutum
  Clone ID: LIB3148-021-Q1-K1-D12
gtactcagtaacggagatttcagtttcaaagactgtatcaagacttttgactttgtggttttaagtcataattgaaatcttttgggtttagaatg

SEQ ID NO: 28956 - DNA, 400 bp, Gossypium hirsutum
  Clone ID: LIB3148-021-Q1-K1-D2
ctgcattggacggtttcctgtattgcaagcaccatttcgctcaattgtttaaggaaaaaggcagtggcagtcatctaactaagacatcttcgatgaagagaagcccctcgggcgggaaattcgatgctgaatccgattcggaaccgaaattggaagataacaaaaccggaacggaagctcaacctgatcaatgaaggaaatatactttgatttgaaccttcatgggacaatatttgtggtttaaaatctcagtatatttttggtgtttgatatttatatatagatatatgcatgtgtcttgatttagtcccatgaagatgttcaatgtggggactaaaggtgttgtttgatattttattaaacattaattgttgttttaaattatgtgaaaaattttatc

SEQ ID NO: 28957 - DNA, 429 bp, Gossypium hirsutum
  Clone ID: LIB3148-021-Q1-K1-D3
tcttaccggaaagaccattactttggaggttgagagttcagataccattgacaatgtcaaggccaagatccaagacaaggaaggaatccccccagaccagcagaggttgatcttcgcagggaagcaacttgaagatggaaggaccttggcagactacaacatccagaaggaatcgactctgcaccttgtcctccgccttcgcggtggtttccgaatggtcttttgaagaagtgtcttttatgatggggttcaacattatgtttctagttttatgtttgtctaattaagcctgctgtgatgcagtggctaaatgctacaagttgtaatttataaacccttttttagttctctgcttatgtttaaggtttcatggctgccagcactttggtcattgaaataatttatcatataaagtttctaagctaaaaa

SEQ ID NO: 28958 - DNA, 443 bp, Gossypium hirsutum
  Clone ID: LIB3148-021-Q1-K1-D4
gctgaacaaatgaaaagcatcaatgtcgtccttaccacattaggtgcctctgaagttcaccccgtagttttggatattcacactgatgatacaaaggaagaagataataaaaacaatgaacccacaggggagcctgataaacaaactgatgtgaaaatggaagactcgaatgaaagtccagtctgaatcgacacaacacaagagttctatgatttgttgagaaattaagatccagctctgatatgccatggatgcctggcctgaaaccccaccaccatacaccttctgagcctttgtgcaaaggaagaaacgagccaggacctagtaaaagaacatgactacatatataatatgttatagatgaataatattgtatttcagtttttaaccatgttgaataatcatgtacgtcattgatccaggaaatgtagtttattattttg

SEQ ID NO: 28959 - DNA, 447 bp, Gossypium hirsutum
  Clone ID: LIB3148-021-Q1-K1-D5
cggacgcgtgggtagaatagttcaatagtttcattttcttggtttttattactgtactatgcagctcctttgattctaattgctattggtgtaaatgtgtgacatatttgtgcataaatttgacactgttagcctagtggttgtgccgcagtaatcccaaggtttgtcattgtgatactgctgcgcctgaatattacatttggagtatacaaagattatccaaagatgatgctcttaaatacactgtaaatgagtgtaaggttgagttaaagcctccttattctgcttttgggtagaggccttttgcgatgacaactttgaggtcatttctaatgttctctgtttgagttgaggtcatgtgctactaatgtttcatatatgtatgatttgagacacaatggcatttgtaattgagcttgagatctttggttgtgaatgaaagatgca

SEQ ID NO: 28960 - DNA, 451 bp, Gossypium hirsutum
  Clone ID: LIB3148-021-Q1-K1-D6
gatccttcttccaaggaagtagatgatatgacaatgagaagatttctaagaggtcgtgatttagatgtggagaaagcatcgagcatgttcctcaagtacctgaaatggagacgaagctttgttcctaatggtttcatttctccatcagaactcacacatgaaatccaacagaacaagatgtttttgcaaggttccgacaagaaaggacgacctatttctgttcttcttgctgcaagacatttccagcataatggcggcctcgacgaattcaagcgttttatagtctacattttcgacaaaatactgaccaggatgcttccaggacaagataaatttattgtgatcggagatcttgaaggttggggatatgcaaattgcgacatccgggcatacctttctgctctctctctcctgcaggattactacccagaaagattaggaaagatgttcg

SEQ ID NO: 28961 - DNA, 195 bp, Gossypium hirsutum
  Clone ID: LIB3148-021-Q1-K1-D7
cccacgcgtccgcccacgcgtacgaccacgcgtttgcccacgcgtccgaaaaaaaaaaaaaagaaggggaataaaaaaaatgaaaagaggggcgcccactatactaaattcatggcctacgtacgcattgcattccacagctttagttcttctgtagcgtcacctaaaatcaaatgactggcggtcctatgacaa

SEQ ID NO: 28962 - DNA, 235 bp, Gossypium hirsutum
  Clone ID: LIB3148-021-Q1-K1-D8
agggataggaggtggagctggtggtggaaaaggtggaggcataggagcaggtggtggtgccggtggtggcgctggaggcggtgctggtggtggttttggaggtggaaaaggtggagggataggaggtggagctggtggtggcgctggaggcggtgctggtggtgtttttggaggaaaattaatagaaaaagcatatgactgatttatgtctgctatatttggatatgtggatgta

SEQ ID NO: 28963 - DNA, 322 bp, Gossypium hirsutum
  Clone ID: LIB3148-021-Q1-K1-D9
caaaacagaacttccaaagctttcagacaagactagtgattcgtgttcaaagaaccaaacaagccaagtacatggttgatttggacgttcagatccctacaactttcgatccattcgccgaggctggggaatttgatggcactggaaccaaggagtatgttcatatacggattcaacaaaggaacgggaagaaaagcttgacgacggttcaaggcctgaggcatgacctgagctacgagaaaatcctcaagagtctcaagaaggacttttgttgcaacggcaacgttgttaaagacaaagagctcggcaagatcattcaact

SEQ ID NO: 28964 - DNA, 417 bp, Gossypium hirsutum
  Clone ID: LIB3148-021-Q1-K1-E1
cggacgcgtgggcatgggttgaagaaagctgctgttactaatgctccaagacctaatgctgaactcatgatctcaaaacttgggctcaaggatttctttgatgttgttattgttggaagcgagtgtgagcatgccaaaccatacccagacccttacttgaaggcacttgaactactcaaggtgtcaaaggatcacacatttatatgtgaggactctgcatcagggataagagcaggagttgcagctggaatgcctgttgtggggttgacaaccagaaatcctgaaaatgtacttatggaagccaatcctactatgcttgtaaaggattatgaggatccgaagttatggtcggccttagaggagcttgataagaaaggagattctttgaaaacagcaacttgagcgtgaattccaaag

SEQ ID NO: 28965 - DNA, 407 bp, Gossypium hirsutum
  unsure (1)..(407): unsure at all n locations; Clone ID: LIB3148-021-Q1-K1-E10
aaaaaaaaaaaattataaaataaaaataaaaaatatttaaaaaaaaaaaaaatataaaaataatagttaaaaaaaaaaaaaattttattaatattntttaaaaaaattttatttatataaaatantaatataataatataaataaatagtaaataaaaaataaaaaaaaattatataatattatatataaataataaataaaattaaataatattaaataaaaatttaaaatgtaaaattattaaaaataataatataaaaattatattattttaaaaaaaaataaaaaaaataatattagaatatataataaaaataaaaaattattaatattatattatatataaataaatatatataatatttataaatatttatataataaataaataaaaatatttaaatat

SEQ ID NO: 28966 - DNA, 101 bp, Gossypium hirsutum
  Clone ID: LIB3148-021-Q1-K1-E11
gttcatttggtagtctcatttttagcttttaatataatattctggaaaattggtcaatgctgtgttttctttgtaatggtaaatgaatctttagtgctcgt

SEQ ID NO: 28967 - DNA, 408 bp, Gossypium hirsutum
  Clone ID: LIB3148-021-Q1-K1-E12
agaactgttatttatatttaacatcattgtttcaggtcaagtgtgtagaagttttcaaagggttctgtgaaacaaaaacaaaacacagaaagcttacatggatatactcacagcggtatcgttttgtatttttgcattctcataatttaactgtatattgtttttctggatatcattttgatgattacttttgtgtggcaatagctcttttatgttttgactggtggcaaatggaataggaaaaaccaactacactagattgcggtccaagaacaatttgcaggaggcacataatgactagctcctacctctacgaacgcttgtgggaggcattgcagcagcgaataaagatgataacatgcaattgacaccgtatgtgctatgaatccgaaatcaagtgtgactttt

SEQ ID NO: 28968 - DNA, 411 bp, Gossypium hirsutum
  unsure (1)..(411): unsure at all n locations; Clone ID: LIB3148-021-Q1-K1-E2
ggaccgttaaagaggaacattattccaaaggtaccacataaggagaattcggacgacgatggggctggaatgaaggagttcaatgatgcaaactattggaaggttgatcaagaggtcgctgttttagagtaatggtggttgagtcgaaagtaagatcgacatcacagttttgttcgctctgagggctgaagcagcaaaactcacatgtacattataatttttttttctttccactgttatttactgttttatgttcctttaattgttagcgttaactcctctttattgttgttttaatgttttcattatttgaaggtatttggttcttctcgttgccctgatttaaggtaagggcttctcaatattatgttagtctttatggaattttaatgcaatcatatntggttgtaa

SEQ ID NO: 28969 - DNA, 292 bp, Gossypium hirsutum
  Clone ID: LIB3148-021-Q1-K1-E3
tgcagtttaccggaagcttgctgggaaggatgttgtgtttgagttccctgttacagaggcatagataagtccttttacaagtgttgtgacatctttctgatcttatttcatttcttgttttcccttagaaaatctgcatttttgttatttaaaattcgacattattgagttgcctgaacaagcagagatatataagtatcatgatggattttattttattttctttgataatgcggtatgacatttaatgtagggatattatgattttattaaaatgttttttgttggctcc

SEQ ID NO: 28970 - DNA, 453 bp, Gossypium hirsutum
  Clone ID: LIB3148-021-Q1-K1-E4
agaaaacctacgaattacccgacggtcagatgattaccattggtgccgaacgttttagatgccctgaagtgcttttccaaccatctttgatcggtatggaagctgcaggcattcacgagacaacatacaactccataatgaagtgcgacgtggatattaggaaagacttgtacggtaacatcgtcctcagtggtggtacaaccatgtttcccggtatctccgataggatgaccaaggagatctcctcattagcacccagcagcatgaagatcaaggttgttgcaccacctgagaggaagtacagtgtctggatcggtggctcgatcttggcttccctaagcaccttccaacaaatgtggattgccaaggcggagtacgacgaatccggtccgtcaatcgttcaccgcagatgtttctaaacagttcaatgggagaaaatgatcagaaagagaa

SEQ ID NO: 28971 - DNA, 299 bp, Gossypium hirsutum
  Clone ID: LIB3148-021-Q1-K1-E5
ggctggcaagatataatatatttacatatatattgttacatgggcgtaaattgttgaaggaagtaaataaatgatgaaattttatttttaaaaaaaaaaaaaaaaaaaaaaaaaaaaaaaaaaaaaaaaaaaaaaaaaaaaaaaaaaaaaagaagaaaataaaaaagaataaaaaaataaaaaaagaaaaaaaaaaaaaaaaaaacaaattaaaaagagtaaataaaataaaatgaaacagggagatattttaaaaaagtattaactgggaaaaccatgaaggtactttaatttacttg

SEQ ID NO: 28972 - DNA, 448 bp, Gossypium hirsutum
  Clone ID: LIB3148-021-Q1-K1-E6
cccacgcgtccggcgcagtacaacggagagttgtatgctgcgttcgggaaggatgaatcgctcccgaaaaggaatctattgattctctcccaattggttggaccgtaggtgcgatgatttacttcacgggcgaggtctctggttcaagtccaggatggcccagctgcgccaaggaaaagaatagaagaagcatctgactccttcatgcatgctccacttggctcgggggatatagctcagttggtagagctccgctcttgcaattgggtcgttgcgattacgggttgggtgtctaattgtccaggcggtaatgatagtatcttgtacctgcaatcatcaaagctaggaaactctcaagtgcactatctgctgctagtgctgcatgtgatcacatacgtgattgggtccttggaactccagagggcacatgggtttccatgggggtgta

SEQ ID NO: 28973 - DNA, 138 bp, Gossypium hirsutum
  Clone ID: LIB3148-021-Q1-K1-E7
tctgactgaaaattccccagaatgttctcctcgccagacttgaaaatcatcatgttcatcttctgccaaaggaatttgtagaatcttctatggtatgtccacttgaaaggtactaactattagatcaatctttcattt

SEQ ID NO: 28974 - DNA, 441 bp, Gossypium hirsutum
  Clone ID: LIB3148-021-Q1-K1-E8
cccacgcgtccgatcgttatagacggcaaggtatatgatgttacttcttatttggatgagcatccaggaggtgatgatgtagtcctcgagtcgacagggaaagatgcaaccgatgattttgaagatgctggacacagcaaaagtgcaaaggagctcctgcaaagcttttgcattggtgaacttgacacatcctcccctatcatcccagaacttgaaatttcctctaagagggaagccgttaagtactctgagaagctcatggacttgacaaagcaatattggaccatccccgtggcaattgttggcatctctgtgttggttggtttcttatacctgcataagaagtaaaccagtataatgttttcccctattggctgctgaatggaaattgctaccccaatttttgaataattaaattgataatgattaagaacagttacc

SEQ ID NO: 28975 - DNA, 315 bp, Gossypium hirsutum
  Clone ID: LIB3148-021-Q1-K1-E9
cccacgcgtccgcccacgcgtccgaaaaattttataatttaaaaaaaaaaaaaaaaaaaaaaaggaaagaggaaaataaaaagggggaaaaggaaaaggtcggcccctctttttaatccatccttacttacgcttccatgcttcctcctacttttttttttttttcacctaccttaatttatttggccggccgtttacaaccaactgcctggctgaaccatccctttccccacctaatttgccttcgcttgacatacctttttcttttgctggcctttttactaataggcccgcccggattcgtcttccttacaa

SEQ ID NO: 28976 - DNA, 294 bp, Gossypium hirsutum
  Clone ID: LIB3148-021-Q1-K1-F1
cccatactttctttaataatttccctttctagtttttattattacgaacgcaaccaatactaatacgggacggcacactattgagaacaaaatacacatactttaacacaatcttcatgcatacttttatattatctctatctctaagactatcaaaataacagaccacaacaataccctatttcctgatgccttaggacactacatgacccaattcattcactttacaaactctgtagcacttaaaataacaataaatttatatgccgatacacatgatcaactaaccaccaa

SEQ ID NO: 28977 - DNA, 423 bp, Gossypium hirsutum
  Clone ID: LIB3148-021-Q1-K1-F11
gtgaacgagaagagaaagagaagaaagagaaggaggttcgtgaaggaggagaaagaggctaaaaaacgtcaacgtctagccgatgatttcactagactattacatacgtataaggagataaccgcttcttctgactgggaagaatcgaaaccactttttgaagaaagccaagaatacagatcaattgcggaagaaagctttaggagagagatctttgaggaatacattacacacttacaggagaaagctaaagaaaaggagcgtaaacgagaggaggaaaaggctaaaaaggagaaagatagagaagagaaagataaacggaaagagaaggagaaggagagaaaggagaagggaagagaacgggagagggaaaaaggtaagaccgaagtaaaaaagatgaaacagatagtgagaaattagata

SEQ ID NO: 28978 - DNA, 419 bp, Gossypium hirsutum
  Clone ID: LIB3148-021-Q1-K1-F12
cccacgcgtccggaaccattcccggatgcctggaacaatcttgttttactatttgaaagaaacaggtcatgtgatttgccatctctttcgagtgaggaacaatttgatttcttacaaccatttgaaagaagtgattcccaggtaatttttgtaactacagaagagtagaattagttcatttaagatgcaaatatgtttaaggcttcatatgctaatttgtctcatccgtatcatgtctgcttttcatgcttgtaaattaccatagggcatagcatatggagtatatgaagaattgacttttgagttgcaaaaacatacttatgatgatccaataaaataagtttgtctttgaaatcaccacagctagatgttttctgattgctttctatcaatttgaatgctgccaatcttactcgata

SEQ ID NO: 28979 - DNA, 371 bp, Gossypium hirsutum
  Clone ID: LIB3148-021-Q1-K1-F2
cccacgcgtccgcgatctgttagggttttggagaaacaaatagatattgaagagaatgagaacgaggaagaagaaaaagaagaagaggaagagaagacgggggaggaggaagaagaagagagtgaagatgaagggactaaaaatgtcaaaggtagtagtagaaaggggagttctaggaaatctggtcgagattcggctgagaagaaagaacacaagacatgattgatgaaactggtcctaattcgtatttgtatgaagcttggctttgatttttatcacataatgatgaactttgttgttagaaaaagaaaggagaactgaaaccggttgtgtacatataaatacttaagaagtgaaacaaaataatgttt

SEQ ID NO: 28980 - DNA, 435 bp, Gossypium hirsutum
  unsure (1)..(435): unsure at all n locations; Clone ID: LIB3148-021-Q1-K1-F3
ggcctcactgttgagactgttgtgctccatagtgttgctgcttaaagttaaacaaacatgccttttaagtaattggtcgtgctccacttggcttgcagttttatcttcttcttttttccttttttagattatttaaatcctatgaatttgtgtgtttattgttaaagactagaacactttgatggtgtgggcgggaagcttaacgcctattcaattcatgtaccaacttatattaaatttatggcaataataagttcctttgcnaaaaaaaaaagcaaaaaaaaaaaaaaaaaaattatatttagctaacaataaagaaaacaataaataagggatggaagttcgacctttgaaattttaaaaattaaaaacctttttttgttcctccaaaaatttttaataaagagaaatttttggggggtcctttttgaaggg

SEQ ID NO: 28981 - DNA, 198 bp, Gossypium hirsutum
  Clone ID: LIB3148-021-Q1-K1-F4
cccacgcgtccgacgatttcaaactattaatcaatcgaataatatgagaaatacgttgaatatttggcggaaaacatgaaagaaaaaggaattaaaataaaaaaggaaatgaaatcatagcaaaaagatgtggtattgggtcatttgtcctatatgcgcaaatcaaaatcgggcggatctttactcggagtagagcat

SEQ ID NO: 28982 - DNA, 452 bp, Gossypium hirsutum
  Clone ID: LIB3148-021-Q1-K1-F5
cccacgcgtccgcccacgcgtccggaaaaaatataagaagccttggagtttgctcaagaggagctagcacctaggggagaagaaaatcaaagctttttagaagagttggagaggaccgtttcactcttggttttcaaagacgtttcgaactgtcccgtaagagagcttttggatatttcacagcgccttaagacagcaaacgaggtcaatgcagccattcttactagccagagtcatgaaaaagacccaaagcttcatagcttgctaaagatgctgatatgggcacaaaatcaactagacgaaaaagctacttatcctcggataaaagattttttgaaagccacacttgaaaatcccgctgtttgaaaggttagcaaaatcattataacctcttcattgtgattatagctccaaatttattggatgtcattgattaagacatggtttctttt

SEQ ID NO: 28983 - DNA, 340 bp, Gossypium hirsutum
  Clone ID: LIB3148-021-Q1-K1-F6
aagtcttggtgtcatggttacttaaatatgggattttcggattcagggaaatgaaaaaaagctgccctggcctattagtagtataccgtctcagtcaacctgaaggtattaattttcttttcgacacgaagtttataacattacaggtattgtgtgataaaaatgcaaaagaatcaaaggaaaacttgtaaatgactcttgtaatcaatttcatatatattatgtaaagtattttttattaaaaaaaaaaaaaaaaaaaaaaaaaaaaaaaaaaaaataaagaaacaaaaaaaaaaaaaaaaaaaaagatatataaaatcaaaaaaaaaaataaaaaggg

SEQ ID NO: 28984 - DNA, 450 bp, Gossypium hirsutum
  Clone ID: LIB3148-021-Q1-K1-F7
cccacgcgtccgctgatatagcagagtgctgtgtgtttggcttaccggataaggattatggagaagctgtatctgcaatagtagtgctggattcggaacaaaaaaggaaacaagaagagtcaaactctgctttcagtttggaagagctttgcaactgggctaaagacaaacttgctccatacaagcttccaacgagattaatgttgtgggattctcttcctcgtaacgcgatgggaaaggtgaacaagaaagagctgaagagacagttgggcagtgaaaagtaagcaatctttattctgagctacatgatagaacacaataattagggattgaatatcagacttgaaattttagaactgagaagcttatgtcatgctcagaaatatcaaataagagaattttttacaattttttttggggagtgaaatgaaccgtttttcttctggtacg

SEQ ID NO: 28985 - DNA, 440 bp, Gossypium hirsutum
  unsure (1)..(440): unsure at all n locations; Clone ID: LIB3148-021-Q1-K1-F8
accacgcgtccgaagatgtaccagatgtgatgtatgatatgaagatgggaacaaatatgggaacatgtccggacataaattcccagataatctatgggacaatagggggtccatttggttttaaaaaaaaaaaaaaaaaaaaaaaaaaaaaaaaaaaaaaaaaaaaaaaaaaaaaaataaaaaaaaaataacaaagacataaacgatgctacatcatcttctcnttaaaggggggggaagttgggggggcccctttttaggttccaggttaaggcaccgggaaatcccatatataggttctcttaaagggaacccaaagcccaattttttgccccgtttttaaaaggaaaaccctgggaaaacccatgttattccccagctaaaacacctcccttaaaaccccttttgtcaaagcggggaggccagaaaaaaggcccttt

SEQ ID NO: 28986 - DNA, 83 bp, Gossypium hirsutum
  Clone ID: LIB3148-021-Q1-K1-F9
cccacgcgtccgtttcatttatagaagttactggattatgtgaaacatataaatttatccttattccgtgtttttaagttatt

SEQ ID NO: 28987 - DNA, 190 bp, Gossypium hirsutum
  Clone ID: LIB3148-021-Q1-K1-G1
gctacaactaatcgcccatcataactagatgaattcatatttatgcgtttcccccaggctttagagattggactacctgaccgcagggagcggtgttgagattataaatgtgatatccaagggagataatattttattaagcctctacatactttacttatccagttaatgtgaatttactttattttac

SEQ ID NO: 28988 - DNA, 106 bp, Gossypium hirsutum
  Clone ID: LIB3148-021-Q1-K1-G10
attgaaaatcgtggatagaacaaaacaaacaaattagatgccacattatcatgtatcagatttaagaaatcaagataatgagaaagtaagccaataagcttgtttc

SEQ ID NO: 28989 - DNA, 60 bp, Gossypium hirsutum
  Clone ID: LIB3148-021-Q1-K1-G11
aaaaaaaaaaaaaaaaaaaaaaaaaaaaaaaataaaaaataaaaaaaaaaaaaaaaaaaa

SEQ ID NO: 28990 - DNA, 196 bp, Gossypium hirsutum
  Clone ID: LIB3148-021-Q1-K1-G12
cggacgcgtgggagaacctatccgattattatttaatcatacttgccaagaatcctttttttgccttgcagagcaatctacaataaattatctcaaaaacttgggaaaaaaaaaaaaaaatattaaaggtatttgattaatggtaatagaaaaggatgaactcaaatatgtaccttaaaaaactgaaacataatgg

SEQ ID NO: 28991 - DNA, 440 bp, Gossypium hirsutum
  Clone ID: LIB3148-021-Q1-K1-G2
cccacgcgtccgtgaaaacattcctaacctctttaagaaaataaagggtggcatatatactcttccaagccatttatctcctggtgctagagatttaatcccacggatgcttgtagttgatccaatgaagagaatgaccattcctgagattcgccagcacccatggtttcaagcgcatcttccaagatatttagctgtccccccaccagattcaatgcaacaagcgaaaaagattgatgaggagatccttcaggaagtgattaggatgggattcgaccggaaccatttggtcgaatctcttcggaacagaattcaaaatgagggaactgttgcttactacttactattggacaatctgttccgggtctccagtggctatcttggagctgagtttcaagaaactatgtctcgtgcccaccctcgtgaaatcatgacagaag

SEQ ID NO: 28992 - DNA, 347 bp, Gossypium hirsutum
  Clone ID: LIB3148-021-Q1-K1-G3
gatgtttcgtacctaatttgcttgcattgaacctaatatattatctttttgttggcttaaaaaaaaaaaagaaaaaaaaaaaaaaaaaaaaaaaaaaaaaaaaaaaaaaaaaaaaaaaaaataaaaaaaaaaaaaaaaaaaaaaaaaaaaaaaaagaaagaaataaaaaaaaaaaaaagcataaaaaaaaataaaaaaaatttagaaaaaacaaatttgggtgcgccattttaaaaattttaaaatcttacccccttttttgggaaataaagattttatttttcccgcctctaaaagtaataatagccccccaataaaaaacacttgagtgggaaaaaattttattt

SEQ ID NO: 28993 - DNA, 109 bp, Gossypium hirsutum
  Clone ID: LIB3148-021-Q1-K1-G4
gcgccttgtcagtgaccattaatgtagtatccgtatgtggcctaaaaattctaaaaacttaaatgaagagatgttctgaaatgatctcaaatcattttcagaatttccc

SEQ ID NO: 28994 - DNA, 100 bp, Gossypium hirsutum
  unsure (1)..(100): unsure at all n locations; Clone ID: LIB3148-021-Q1-K1-G5
ctcaaaatttgtagttaaatgttgatccttaactttgaaagtaatttaatgaaattttgaaagtaagtttaatgaaattcaagcttagttatgctcanna

SEQ ID NO: 28995 - DNA, 351 bp, Gossypium hirsutum
  Clone ID: LIB3148-021-Q1-K1-G6
gaatgagggaggagctgcttcatcaagccaagctgaatgagcgtctcgcgtaaattctgcgttggtgtcgttgctgtttctttcttcttcttttttcccaactattttaagcccgatttgttttaattagactcaagtggaactgtggttgaaaaccataatattgcctttgatgatgagctggataaccccatgacatgccatggacgaattgttgtttctttctgcttcataaatgccatcactacctgtttgaaaaaaaaaaaaaaaaaaaaaaaaaaaaaaaaaaaaaaataaaaaaaaaatataaaaaaaaaagaacagaaaaaaacaaaattatattagacaaaa

SEQ ID NO: 28996 - DNA, 405 bp, Gossypium hirsutum
  Clone ID: LIB3148-021-Q1-K1-G7
gctgcaagagctctcaaatcggttttacaaggaattttgctttcttctgaaggagagaaactgaattccatgaacctcctcctttacatggctccaatagccgttgtatttctacttcctgcaacgctctttatggaagaaaacgtggttggtattaccctcgcccttgctcgagatgacgtcaagatcatttggtatctcttattcaattcagcactagcatattttgtgaacctgaccaactttttggtcacgaaacacaccagcgccctcactttgcaggttctaggaaacgcaaaaggagccgtagctgtggtggtttcaattttaatttttagaaacccggtgtctgttaccggtatgcttggttatacactcacagtctttggagttatactttacagt

SEQ ID NO: 28997 - DNA, 309 bp, Gossypium hirsutum
  Clone ID: LIB3148-021-Q1-K1-G8
cggttataattgaagtggtcaactatcgattctgttgttttattatgtatccatggttccaggtgcttgcatgcataatggttattttgtttgcgttttcttttttcaccttggttctactgttctgagtttttgacatgggtactcaacgattttacatactgcgcctgcgaccttatgatcattagctcatataagtctgctgcatttactatgtggttggcaatgtagggtcccttcctaacaactatggaagctgccagtctatgtcccattgtcgcaaccaatgtgtgtaaacccatttgtgac

SEQ ID NO: 28998 - DNA, 354 bp, Gossypium hirsutum
  unsure (1)..(354): unsure at all n locations; Clone ID: LIB3148-021-Q1-K1-G9
gcgnaacaaaaaaaaaaaaaaaaaaaaaaaaaaaataaaatttaaaaaaaaaaaaaaaaaaaaaaaggaaagggaaaaaaaaaaagggagaaagggaaaaaaaaaaaaaaaaaaaaaaaaaaaaaaaaaaaaaaaaaaaaaaaaaaaaaaaaaaaaaaaaaaaaaaaagaaaaaaaaaaaagggggggggccccttaaaaaaaaaaaaaaatatataagcagcgaaaaaagaaaaaggttttataaaatgagaaaaaaaaaaaaaaaaaagggggggtttttaaaaaaaggaggggaagaaaaaaagggggggaaaaaaaaagaaataagagaagaaaaaaaaaatattttaag

SEQ ID NO: 28999 - DNA, 329 bp, Gossypium hirsutum
  Clone ID: LIB3148-021-Q1-K1-H1
ataaaacatgggttgtgttacaaccaagtgattggatttgcttcttactactgacgttgcttgataatgaaatgtgagctgattgtgattttgttcaaaaaaaaaaaaaaaaaataaaaaaaaatataaaaaagaagtaatgaaaagaaaggtgatagcaagtagaagagtcaatgtttacaaacaagaaaggcataaaaggtactgtggttgaacgtcattaaagtacaaatgatggccaacgaaaacctattttttaagaaaaaaaaacgactcttattacattcgaagatttttgtcatgctatagagaaagccgcttagggagtc

SEQ ID NO: 29000 - DNA, 331 bp, Gossypium hirsutum
  Clone ID: LIB3148-021-Q1-K1-H10
ccgagaccagttcaatctgtttttgattgttataaatcgtgtatgttggagagtcggtcaatagagaccgatcaaatcttttatcggtttgttataaactatgtagcctgcgggagaatgtttcaacctctcttgtttttcatggttcccgtcatggaattaaacaacttcatgagctgccaagctatcaagatatgctatttactgtttaaaaaaaaaaaacaagatctaaaccagaaaaaataaagcccttttataatgaaatgaaacagaaactcttaaaggccaacaacaaactcaaagggaaaaaaaatcagcaaacactattcct

SEQ ID NO: 29001 - DNA, 411 bp, Gossypium hirsutum
  unsure (1)..(411): unsure at all n locations; Clone ID: LIB3148-021-Q1-K1-H11
gacgttttgaagagtaactgccaaaattcgatggtaagttgattctgtgcgggcacacagtgtattgaaaatataatttatgagattattgaggtccaaggaattaaaaattagatagctgcatgtgtatagccaagctgaatgagctttcatatgtaccaacaaaagaaaagtaggaattgaactttagactacaaatggatcaaaaaagaatataaaatgggcccctgagagcttcttttatctgatatacatttcttgcttgaatgtacataatatgaatttcattagccgaattggttgtaggtctcttccgaatccatgaaatcaatgggcaaatacttttctctatttgaatatacatggntatgtagcttgtnnaananaaaaaaaannaaaataaaataaaaa

SEQ ID NO: 29002 - DNA, 151 bp, Gossypium hirsutum
  Clone ID: LIB3148-021-Q1-K1-H12
ctttaagatttcatattttttttcccttaacctttttactattgttatttgtgttattgaatgtctgtgatgtgctcttgaaatttggaaaagaagaatgttcgtttgagtgaataaatctttgggtgaataaatttgattatatctttct

SEQ ID NO: 29003 - DNA, 422 bp, Gossypium hirsutum
  Clone ID: LIB3148-021-Q1-K1-H2
tggagaactggtactatgacatagtgctggttatgaaggaaaccaatgggtgcatagaggttttaatgttagaacgtgtggatggcttcaattctgttttcagggttcaagcaaaagggggatctaatgttgcagccgaaatctcttgggtggatcagctaaggttttcgcatcaaattccatttttcgagctaaccgaagagagaaatggcagcctaagaggttgctgggaacttgatcctgcagcattgccggtacattatttttcttaatttaagaagtaccaactagtaaagactagaattctaatgtttgtcttcatggaaccaactctgggtgaaagtctcaattacttagctgcaactgaaatgcttttcttcatgtttctgattcatattttcgatgtaaaatataagttgttt

SEQ ID NO: 29004 - DNA, 370 bp, Gossypium hirsutum
  Clone ID: LIB3148-021-Q1-K1-H3
cccacgcgtccgcttggattggttttatgttttatacgtgatccttcaatttttggtgatattaagttcggcccatcaaaaattggatttttgagtataacttggaatgattggaaagttgggtttttgaaaggagcagtgccacaaattccactgtctgtattgaactcagttattgcagtttgtaagttgtctggtgatttgtttccaaacagagagctgtctgctgccaaggtttcagttagtgtaggggttatgaatttggtggggtgttggtttggggcaatgccagtgtgtcatggtgcgggtgggttagctggtcagtataagtttggggcaaggagtggatggtcggtggtatatttgggga

SEQ ID NO: 29005 - DNA, 358 bp, Gossypium hirsutum
  Clone ID: LIB3148-021-Q1-K1-H4
gtctcactgctataaatccagggagttaattatgttcattagacgaagctatagtgcttcgtcatgtaagggcctttgcagacggcgagctgagattttataagtcaatgggggctttcatcggtttgaatcatctgtcaactgcgttattctggtctttgggcgttatatccacaacatataacattgcatgtatgattttcaggtaggtatgatgctacgagatcaatgtatcagaaacgtttgtattattattaacattgtcctgccaataccatattagagaaatccattaattgcttaacaaaaaggtgaacttgtaagaaccaagtctgggtcaaagaattaataaactcat

SEQ ID NO: 29006 - DNA, 427 bp, Gossypium hirsutum
  Clone ID: LIB3148-021-Q1-K1-H5
gcatggaggaactcctgccaattttctggatgtatgtggaaatgcttctgaaggccaggtggttgaggcatttaagattttgacttctgatgataaagtgaaagccattttggtgaatatatttggaggaataatgaaatgtgatgtgatagcaagtgggatcgtcaatgctgccaaacaggtggccctaaaagttcctgtggtggtccgtcttgaaggtaccaatgttgaccaaggaaagcggattttgaaggaaagtggaatgacactaattacagcagaagatttggatgatgctgcagagaaagccgttaaggcagccaaatgagaaatttaagatacgagtccttttttcttattgtttctcatctttcacagcattgatgagtttttcctttatttttcttttcatcaagcccatagaatc

SEQ ID NO: 29007 - DNA, 380 bp, Gossypium hirsutum
  unsure (1)..(380): unsure at all n locations; Clone ID: LIB3148-021-Q1-K1-H6
agacagtgcaaggttgcttgttctgcggctacacacacgatgggtagtagctgctggtggcttcttaacacattcagtgccattatatgcaactggtgtggaggtatcaccgctttgttcgtacactggagaaaacttggagtccatatgccgtggaagaacatttcatgcaccctgtgaaattgcattttagttcaactttgtgacgtagccacacattctttttgatttgtgcagtgtgtttgggttgatgatgtaagatccattgtacggcatggatgtaattcgatggagtggatggagagtgggtgaaaaatgcaaaatgttggatttaaggatttttgcaataatgttcacccttgtgactgttaaaaaanaaa

SEQ ID NO: 29008 - DNA, 418 bp, Gossypium hirsutum
  Clone ID: LIB3148-021-Q1-K1-H7
atttttgttattactttcgttcttgttattccttcttttctgagatcatgttgcaatactgagattagtttgaatttcaaggtcccagtgcagctgcatctagacctactagcattgctgctagtgaggctcatgaatctgaagctaatgttgatcttgtacattcatcggaggtatgattttgtgtatatcaactactgtattctacttagcatcactgaagctgttattactaaatggttttggtaaaatatagcaatgtttggcatctcctgtgaatgttgctttgattctttattttgcttgaagtatttctgtttggcatctatgttctaaacatatttagacatggatgtgaagatatgaacttccaaggatcctcgaaaataaaagaaaaaacatacctgtgtcagacaca

SEQ ID NO: 29009 - DNA, 446 bp, Gossypium hirsutum
  Clone ID: LIB3148-021-Q1-K1-H8
atgagaatcaagtttggcctcaagagaagctccattataatggaacaggttcggattatgatgcagtcatctctgatgaacctgagttggaagagatgctttcagactgaacagaatgagttccttcttgaaattcctcgccctttctcttggccatctgaggcagtcataattttgcgatgataatgcaaaccctgtctattaaaaccccaggttatcaatggttgcgtgtgggtgtgtttgtttacttgagttttagatttgaggagcattcaactgataatgaggcatacaatagacagcaggtcaaaagatggaactttctcccctttaggttatgtttcatagcataacaaagggtcctcaatccaaataccatggcatgggaaaagaaaaggttgaaatgcagctgtggttgtactgatactggtttggttttgcatttt

SEQ ID NO: 29010 - DNA, 172 bp, Gossypium hirsutum
  Clone ID: LIB3148-021-Q1-K1-H9
atgggcccatcaaacaggatcttttgaattgttagttacccatgtgttaagagttttgtatgtggagcgaattttctgctgtggtttggggttggaatcttagagttgtgattttgagaaaaaaaaaaaaaaaaaaaaaaaaaaaaaaaaaatttttttttattatatattt

SEQ ID NO: 29011 - DNA, 338 bp, Gossypium hirsutum
  Clone ID: LIB3148-022-Q1-K1-A1
aaaaaaaaaaaaaaaaataaaaaaaaaatataatttttttaaaaaaaaaaaaaaaaaaaaaagaaaattttaaaatattaaaaggtttttagttgtttgggaattattttaaggggggcggccgtcttaggggttccatgtttttttttttcttttttgcggctttatatttttttttttttggcgcctattttattttcacggcccgttgttttccacccttatttcctggaaaacccttggctttaccaactttattgtcttcgaaataaattccttttcccactgtgggttttattattttgggctcttttcctttttttttttttccaattttt

SEQ ID NO: 29012 - DNA, 345 bp, Gossypium hirsutum
  Clone ID: LIB3148-022-Q1-K1-A10
cccacgcgtccggtcgttagggcacaaaagttcggggaatccagccgccatcctttcttctctcatgaacaaaagagaaaagcttcaagacgagctcgcaatatcgaaaagcaggtttttgagttagaaactaattatttgcaagattcgagccatttcgggcatgttttgaaaggattcgaagggtttctttcttcatccaagaacacggcaaacttgaagaggtctaggaaatttcagcctgaagatagattgttttctttgtcatcagtcacgtcaccagtggctgacgaactcggagttagacaagatgatggaagatctgactttggctcagctcggtct

SEQ ID NO: 29013 - DNA, 393 bp, Gossypium hirsutum
  Clone ID: LIB3148-022-Q1-K1-A11
tgtgtgtcttcccatctcgctgctagcttccctgggaaagctgttggcgtttcacttgctggcaaagctgatccagctcaatctgctgaagctaatctcctgctgcggatgacgacgatgatgacttggatctgtttggtgatgaaacggaggaggataagaaggcagcagaggaaagagaagcagctaaaaagtctgctaagaagaaagagagtggaaaatcttcagtactgatggatgttaaaccatgggatgacgagaccgacatgaagcagttggaagaagccgttcgatccgttgaaatgcctggacttttatggggagcatcaaaattggttgcggtcggatattggattaagaaactccagatcatgcttacaatagttgacgatc

SEQ ID NO: 29014 - DNA, 363 bp, Gossypium hirsutum
  Clone ID: LIB3148-022-Q1-K1-A12
gcaacaacagcatttcacatccagcagcggtcctggagattccccaggaacaagccgtggaaatggtttatggagtaggtcaggcgcatcaccaatgttgcagctgcatcttcactcggactattcaccggtttgggttctaccacttcatcaggagcctcttctccagttgattggagcagtggtagctcaatggggcaattggactataccaatatcgattggagcttgaatcgagggttgtcttcttcgccaagtcctggtggaatctggttaggatcatctacatctccgatgaagagcattcacatgtattatcctaacacaaacggattaagtgctaaaccagcaatgagattgaca

SEQ ID NO: 29015 - DNA, 290 bp, Gossypium hirsutum
  unsure (1)..(290): unsure at all n locations; Clone ID: LIB3148-022-Q1-K1-A2
tttgtatgggcctgggcaaaaatggtccattatacttctagccctaaaatctagggtgttacagctacaccaatcctgtcttccacattttttatctttagtcccaaaatcaagctatgccattttgtttttatctttaataaaaccaaaacaacataaaaaataacaaaaaaaatgaaaagaaagaaaacaaaaactctgggggaacataagcaaaccattattacatatcgntccctgaagccgttctggtttgccttacattttttacattttttaatttcttggtg

SEQ ID NO: 29016 - DNA, 94 bp, Gossypium hirsutum
  unsure (1)..(94): unsure at all n locations; Clone ID: LIB3148-022-Q1-K1-A3
cggaattcgacgggatcgagcccaggcgacaagaataatagcaagatcaactgaaaaaataataaataaatttgttagtcataacttantgtgg

SEQ ID NO: 29017 - DNA, 377 bp, Gossypium hirsutum
  Clone ID: LIB3148-022-Q1-K1-A4
cgatgactaatttaagtaaataaaatttttttaaccaaaaacttgatcatcatgaattttatatataaagcataaaataatgaacaatttgaatgtttgaataatggcaggtgggatgataggatgtcagctgtaataccagatgaagaaatattctacacagtgggttttttacatttaagtggatttgatacttggaaagcttttgaagaccaaaataaagacataatgaggttttgtaataaaactggaattatgcttaagcaataccttcctcattacagtactaaagaagaatgggttcatcattttggctcaaaatggaaggtttttcaacacagaaaatatcaatttgatccaagaatgttattgtcacc

SEQ ID NO: 29018 - DNA, 400 bp, Gossypium hirsutum
  unsure (1)..(400): unsure at all n locations; Clone ID: LIB3148-022-Q1-K1-A5
gccttggaagagagtgaatttgagctagcattggcttgcttagacaaatttaaaagcataattggtaactgaattttgatatcattacctaccttctagttatcactttcacaacaaagccataatggaaaaaaacccattccttaccataggaacattcttcataaagctgtagttacagcaagctgttaaaaagacgggtgtttaaagaaagttgttcctcctagaagttgattcttatttgctctggctattgctttatagccataatgaaaaaatcattccttaccatggaaacattcttcataaagctgtagttacagcaaactgttaaaagacaggtgttcaaagaaagttgttgttttcaaaatanaaatttttttattaaataatttatatt

SEQ ID NO: 29019 - DNA, 414 bp, Gossypium hirsutum
  unsure (1)..(414): unsure at all n locations; Clone ID: LIB3148-022-Q1-K1-A6
ctcgcccatattctcttttactgcaaactgtgagcgagtgagtgagatggcttgctcagctactggatcggccgcggctctcatctcctttaagccaaggctttctcctccaattccaagcccttctcccaatccctttctctccccaatcccttcactggtctccctgcccctctcctttctcgtcccgcctacttttccctctcccgcacctgcccttctcgcaagtctttcgtcgtcaaagccaccagtgagcttccattggtgggaaatcctgcccctgattttgaggctgaggccgtctntgaccaggagttcattaaggtcaagctctccgaatacattgggaagaaatatgtgattctcttcttttacccgctggacttcacatttgtttgccccacagagattact

SEQ ID NO: 29020 - DNA, 369 bp, Gossypium hirsutum
  Clone ID: LIB3148-022-Q1-K1-A7
aggcgttcggttacgcgttcgaatggcgaaactgatgattacccgtgcgcacttcttatgatactgcttttgagagccaccggaattttactcccaatgtacatgtaattcgatcaattacagccattcgaaacaacattcgacgacgacgaccacgacaacatcatgattccgaggagattgccatgtctgaagacaatgatgatgattgagcagcagcaacttcacattgcccgacagatataatcttgttgtatgttcttaaatcaattcccacttttaatctgggcattactttgatgcccatcttgtccaaattcctcaattttttttggcatcaatgggaaatatcgtgaagtatttatttgc

SEQ ID NO: 29021 - DNA, 346 bp, Gossypium hirsutum
  unsure (1)..(346): unsure at all n locations; Clone ID: LIB3148-022-Q1-K1-A8
acgtaaacatcttcctgccagtgctcgtgtaacatctaagcataaagcataccaatacctatttttggtgatagctatggttttactcattgttgtttcacagtggggttggtaatgctgtttagaggagagaatggacatgaccattgcagctggtgccattacctgagctgtgttcctacatcaaaatggcactgtgggaactaagcagacctttattacatatcgntccctgattcttttctggtttcctttacattttttacattttttaatttcttggtgttgttacgtgcctatgtgtatatatatacatacatacatacatacgtacatggttagtttt

SEQ ID NO: 29022 - DNA, 310 bp, Gossypium hirsutum
  unsure (1)..(310): unsure at all n locations; Clone ID: LIB3148-022-Q1-K1-B1
cccacgcgtccgaagctgcatttagttccacaaagaaacaacatatagattataagcacctccccataagcaaaccacaaaggaaagcttggagagagacccaaaacaatgtctaaggaagtgagtgaagaaggacagggtcgtaaggactatgtggaccctccaccggcacctctgattgatatggctgaactcaagtcatggtctttttacagagccctcatagctgagttcatagccactctcctcttcctctatgtcactgntgctaccgtaattggtcacaagaaacaacaagatgcatgtgatg

SEQ ID NO: 29023 - DNA, 411 bp, Gossypium hirsutum
  Clone ID: LIB3148-022-Q1-K1-B10
ctctgctcgaaatcttcttcattctcattctctctccactgaactcttgctaaacggtatcgttttagtcagtctttcatcaatggcgaaagaaccgttcgcgtcctcgttactggagctgcaggacaaatcgggtatgctcttgtacccatgattgctaggggagtcatgttgggtgctgaccagcccgtgatccttcacatgcttgatatcccacctgctgcggaggctttgaatggtgtcaaaatggagttggtggatgctgcatttcctcttctaaagggtgttgttgctacaactgatgcttgtgaagcatgcactggagtcaatgttgctgtcatggttggtggtttcccaaggaaggaaggaatggagaggaaagatgttatgtcaaagaatgtgtctatttac

SEQ ID NO: 29024 - DNA, 413 bp, Gossypium hirsutum
  Clone ID: LIB3148-022-Q1-K1-B11
gctagacggagcttaccttcataagagagatcttagattttacaactctgagatgcatagggctgcttttgcattgccttcgttcctgaagagggagtgaggctactatgagactccgcagccccggaacaagaaaactgtctcctaaagcaaatttgtagaacttgcaattgtttactttttatcgtaagcttataaatacttgtattcgagacataggcagtaaataaatgtgttcaacatgcaagtgaaattggaaccattttagtatgtatttacaggtctaatttcagggaatacgtagtataggacttagccttatgggttgtgtgacgcagcaatgtgtttgcttgatgataggtgcttcaaatgtctttcaagtcagtggtctgaacttgacaacattgaaacac

SEQ ID NO: 29025 - DNA, 82 bp, Gossypium hirsutum
  Clone ID: LIB3148-022-Q1-K1-B12
caacccctgccttccacctcattactctttattggggccactaaactcaatttaacggcccggggtttacaaacgccgggcc

SEQ ID NO: 29026 - DNA, 367 bp, Gossypium hirsutum
  Clone ID: LIB3148-022-Q1-K1-B2
tggatactgggcttcattcaaaaaaaaaattaaaattttaaaaaaaaaaaaaaaaaaaaaaaaaaaaaaaaaaataaaaaaaaaaaaaagataaaaaactaaattcaaaataaaaaggggcgccccttttagagattcaaacttaactaacccttccttgcaacataatactttttctttattgaaacctaaatcaaatccactgcccgttttttaaaaacttcgtacctggaaaacccctgccattcccaaaataaatcgctttgaaaaaaatccccttttcgcaagttgccgaaataccaaaaaggcccgcaccaatcgcctttccaaacatttccccatcctaaatggcaaaaggaaccccccc

SEQ ID NO: 29027 - DNA, 314 bp, Gossypium hirsutum
  Clone ID: LIB3148-022-Q1-K1-B3
cttgtcacttgttcatggatattttggatattttactgtaatcccggattttatgctccaattttaaatgggttaatcgacactgttggtgaccaaaaaaaaaaaaaaaaaaaaaaaaaaaaaaaaaaaaaaaaaaaaaaaaaaaaaaaaaaaaaaaaagaaaaaaaaaaaaaaaaaaataaaaaaaaaaaaaaaaaaaaaaaaaaaaaaaaaaaaaaaaaaaagggggggcctttttaaaaaaacaaagtttattttctcttgcttggaaaattaaaatttttttttaggggcaccaaaataaaattaaatgg

SEQ ID NO: 29028 - DNA, 125 bp, Gossypium hirsutum
  unsure (1)..(125): unsure at all n locations; Clone ID: LIB3148-022-Q1-K1-B4
aaaaaaaaaaaaaaaaaataaaaaaaaaatatataatttcggcggcagaaaataaaaaaaaaggggcgggctcattaaagtggccgccccttctccgggttccnaaaaaaaaaggcgggcctctg

SEQ ID NO: 29029 - DNA, 362 bp, Gossypium hirsutum
  unsure (1)..(362): unsure at all n locations; Clone ID: LIB3148-022-Q1-K1-B6
gttagcttccgttccttccggaggaggggttgttgcggttgccgctcctgcacctggtggcggaggcggcgatgctgcacctgcagctgaggccaagaaaaagagaaggtcgaggagaaggaagaatccgacgatgatatgggtttcagcctcttcgactaagcaagcaaagcaaatatcaaggctttttagggtccctcggatgtaagttttcaatgttttggattttgtaggtggatatggtgttaactcttctcggattttgtttgagaaagttttagttaatgacattaacattttggttattnaaaaaaaaataatttatattagtaattttttttattattgtttaaatttaataa

SEQ ID NO: 29030 - DNA, 246 bp, Gossypium hirsutum
  Clone ID: LIB3148-022-Q1-K1-B7
cccacgcgtccgcatctgtacacttttgatggaagattgctatcaagtttgtataaaactatgtattgggatatcatcaagctcttttgtttagctataagtgttgaatgatttataacatatgatgatttctagagttgcttctcccaattaacatttataaaattaatgaaaaaatccgttgaattaaaaagaaataagtacagaacgctgatatcttaagaatgttagctgatgtactgttag

SEQ ID NO: 29031 - DNA, 270 bp, Gossypium hirsutum
  Clone ID: LIB3148-022-Q1-K1-B8
cccacgcgtccgcccacgcgtccgatatcttgacatcagaagctgttgggaatcgtggtaagaacttagttcaaattgaggtttatgatctacattgtggatagactttgtccaaccaattcaactggtatcgaagaaagattgaattgatgcaatatccgttgaaccaataaaaagccgattgaatcgggcaaaaaatttgaaaaaaaataaaaatcatttggactgattttaagttagtttaaatatttaattttgttgctttagttt

SEQ ID NO: 29032 - DNA, 341 bp, Gossypium hirsutum
  Clone ID: LIB3148-022-Q1-K1-B9
tagaatttgaggcaaagtcatcaacacacggagcatggtatgatgttgatatgtttctgtctcaccgagttaccagttccggtgaaactttcgtgtagatttgtcggatttggagctgaggaggatgaatgggttaacgtaaaaaaggcagtacgaggacgatccatcccatttaatgttgtatgaaaaagccaaggcttagcactttttcaagtagagtgttatttaatgttgtattccatggtcgtttatcttagtcggaacttgaattaggtgttattgaaacaggattttgtagctaccttgtgtactagcttttttaatcatgattgttaattatt

SEQ ID NO: 29033 - DNA, 225 bp, Gossypium hirsutum
  Clone ID: LIB3148-022-Q1-K1-C1
cgtacctttgctcagcatatcgagcataagctgttcaggaagacccaggataatctgtccaactgaaactagtatttttatttgtcgcgataatctatttcttctgtactctgatgaatgctatatttcgttgggggttaaacccttggttgtggcgtctgtctccactccttggctcccctttacctgttttatttgaataatgagaactgatttggttctttt

SEQ ID NO: 29034 - DNA, 402 bp, Gossypium hirsutum
  Clone ID: LIB3148-022-Q1-K1-C11
cccacgcgtccgattttgagcagaatcaggctgaggctcttgatttagataaaacagtgcttcagacagtggaagacgttgcagaggactggagattgatgatattaagggacttcttggtcgttgcaacttcaaagctgatatgcttgacagaaaggtttcccttttgagtggtggtgagaaggcacggcttgcattttgtaaattcatggtaaaaccgtcaaccctgctagttttggatgaaccaacaaatcacctggatataccctcaaaggaaatgctagaggaggcaattagagagtacagtggcacagtcattactgtttctcatgaccgattctttataaagcaaattgtgaacagagtagtggaaagtaaagacgggcatttgcaggactatgt

SEQ ID NO: 29035 - DNA, 245 bp, Gossypium hirsutum
  unsure (1)..(245): unsure at all n locations; Clone ID: LIB3148-022-Q1-K1-C12
attttcatcaaaaaaaaaaaaaaattaaattttaaaacaaaaaaaaaaaataaaatgtgagtgctaatctttaaaaaacaaataccacatacttgcgnttctataatattaaggaactgacttgaaaaatacaaatttataagcctgtatacttcactaacaaggcttttcttaatgtgatgaggagaaaagggcgcctctttcatgatgtcaattctttttgaaatctttatccctgctttaat

SEQ ID NO: 29036 - DNA, 399 bp, Gossypium hirsutum
  Clone ID: LIB3148-022-Q1-K1-C2
cttgcgtgccaggtttgtaggattatggtgtctttccgcacctttcctgttcgtcttttctatcgaaataaaatgaactgccaaacttcctttaattttcaataaagttggaagttttgatcttaaaatcaatgaacgttttggctttgtttaaggttggtagatgctgttaaaattctgggaaagtcgaggccatgtctcatatcaatatctaatagttttacgtcattgattcggaatccaaatgcggtacgtagcaattagttatcgcagcaggcttgggaagtgactactgaaacggatgaagatacgagctccaaataatactcgtgtaaaagcaatttggtaacagagaaataaaagaaacttcgcaataagcttcaaatataatgcttttat

SEQ ID NO: 29037 - DNA, 393 bp, Gossypium hirsutum
  Clone ID: LIB3148-022-Q1-K1-C3
cccacgcgtccgcccacgcgtccgcccacgcgtccgcggacgcgtgggtcagcacctcaagggccaatcactggtcaaacaaatggtgctgctgctggaggtcatccggaaaatcagccaaacagccccctcaacatcctgctgcactggctggtgtaggtgtgtatggtgctccaactatggggcagccgataggaggcggccccctcgtctcagcagttggcacaccagtgaatcttcctgcccaggcacatatggcttatggagtgagagcttctgtaccaggagcggtagttcatggtgcaccgatgaacatgggtcctgcgacatacccaattccgcatacatctgctcataggtaacatgctgtttagctgccaaatgtacaaaaga

SEQ ID NO: 29038 - DNA, 133 bp, Gossypium hirsutum
  Clone ID: LIB3148-022-Q1-K1-C4
tgtatttcagccttggatggctaattggtatgcgccctggggcggcgcttttagctgcggcgtttattgttggtttttttgcttctttttttatttttcgtatacttatttgtttatttggttgacttttttt

SEQ ID NO: 29039 - DNA, 407 bp, Gossypium hirsutum
  unsure (1)..(407): unsure at all n locations; Clone ID: LIB3148-022-Q1-K1-C6
gtcggcccacgcgtcgggcgattttatgatggacttttttttgagttattatccaaaggtccacatgatcgtcctaaacctcagcctagccgccgatattctnctgtaatatcatgtctggccaagaagaaagatctgacaaggtctcatctttgaatggtagagatgacaagtcatattgcggttatggccagatggctcatagtattgagccaaatagtactgcagatatatctcctgtcacagctaacgatgataatttagatgagattgaagatgatgatccattctcgaaacggaggaagatggatggtgggattgatatcactcctgtggtgaagccaatccgggaaccacgtgttgttgttcagactgtgagtgaagttgatatacttgatgatgggtat

SEQ ID NO: 29040 - DNA, 407 bp, Gossypium hirsutum
  unsure (1)..(407): unsure at all n locations; Clone ID: LIB3148-022-Q1-K1-C7
cccacgcgtccgaaaaggcttatgaaccctagcctcctctgctagggttcccacattcagccccccaccgccgccgcgtatttttcccaaccgcacgcgccgccgattgaaaggtacaaggcgaggcgaggaaggcgcgcaactcgcgcggagagggaccctgtccccgagtcgtgcggcgactggactgctggaggcggcggccaagaattttctgtttagtgtttcggtagttagggtgtttggaattttgggcttaggttataattttgttgggcctgtattttaaaattttgggctgtgtttttgtttgggtttattctcttacaggccgggcaaagattgggccctacaaatacttaataatacgatataacctnttttgtttttaatttttttttttttta

SEQ ID NO: 29041 - DNA, 193 bp, Gossypium hirsutum
  Clone ID: LIB3148-022-Q1-K1-C8
gagagtgtaagaatgataagttttatttttagacaagaatgtcctcttccatttgcttagaacatgcattaagatcctacaagattatcccccatgcaaaaaaaaaaaaaaaaataaaaaaaaaaaaaaaaaaaagaacacaaaaaaaacaaaaagaaaaaaaaaaaaaaaaaaaatacgaaaaataaaaata

SEQ ID NO: 29042 - DNA, 388 bp, Gossypium hirsutum
  unsure (1)..(388): unsure at all n locations; Clone ID: LIB3148-022-Q1-K1-C9
gggaaatagaagaaggggatagctggaggtttatgatgaatatgaagccatcggaggacatagatggagatgatgaagataactaattaagaagaataattttaaaaagaaagtggaaattcatactgtagatatctacacatacggtttttaactggttgcaggcaagtgatggatccatatgatgtttgatgttagatttccttacttcctgaagaagtaaaaaccattagaatttgtgttgtagtttatgtaagaacagacttctttttcttaatggaaatcttatttttctgcgttaaaaaaaaaaatatattttatattataaattttttaaatatttttattattttttatatantattttttttattttttttttattttt

SEQ ID NO: 29043 - DNA, 370 bp, Gossypium hirsutum
  Clone ID: LIB3148-022-Q1-K1-D1
cccacgcgtccgcccacgcgtccgtaattatgtatttggataatattattaatttcatcattttttgttcttaaaaaaaaaaaaaaaaaaaaaaaaaaaaaaaaaaaaaaaaaaaaaaaaaaaaaaaaaaaaaaaaaaaaaaaaaaaaaaaaaaaaaaaaaaaaaaaaaaaaaaaaaaaaaaaaaaaaaaaaaaaaaaaggggggcggcctttttaaaaattcaaagtttactaaccctttcttgcaactaaaaatttttttaatagggccacaaaaatcaaattccctgcccccttttaaaaaacgtcggaactgaaaaaaccttggcgtaaccaaattaaatcccttaaaaaaaaatccccttttccc

SEQ ID NO: 29044 - DNA, 415 bp, Gossypium hirsutum
  Clone ID: LIB3148-022-Q1-K1-D10
gagaattaaagctgaagctaaagctcgagatattgaagctgcagaagcagccaagagaagtgcaaaagcggctgtctcatctattcttccatctaattatttgggaagaaagaagatgaatctgactcaaccgtggcaaatgaaaatggtgaagtgccggatgaagatgagagtgaagggtctattgaggaagctaccgttatggagtcggtttcagattcgaatcctgttgatgcaaagcaaccattctgatagcaagaagtagctccgttgttttgaaggataaggtaagatctaatatgttcatttatggacttaattttatcagcttgtgtatcttgaattaggggattaaagaaaattaggttctagagtcactctctgatttctaaatattgatgggcatactggttga

SEQ ID NO: 29045 - DNA, 310 bp, Gossypium hirsutum
  unsure (1)..(310): unsure at all n locations; Clone ID: LIB3148-022-Q1-K1-D11
cccacgcgtccgcccacgcgtccgggcaatttcattgggaagaaaggtggtgaaattgaagacaatgcatgtaactaaacaccctantgtgcanggacatggacaaccgatgtgaaattttgagacacggtagtaccaagttcttcacaattttggctgtatgtttctttattgttctatgtagtcatgatggcaactttgctgaaacattcactctttggaggtgaatgaaactatttggtaatgaacaaagacttatgatgtcataatagatgattggacccaggnnaaaaaaaatttttatattttt

SEQ ID NO: 29046 - DNA, 51 bp, Gossypium hirsutum
  Clone ID: LIB3148-022-Q1-K1-D12
gtaaatttggtatttatagactgtggactatattttatttttattaggttt

SEQ ID NO: 29047 - DNA, 235 bp, Gossypium hirsutum
  Clone ID: LIB3148-022-Q1-K1-D2
agaatctagtgttggtgtggagttgggatttgaatgctttgtatagatggataggaataggcctagggcagttacttttctttttctctctttcctctaagttcctgcttaccacctttttgcttaaaaaaaaaaaaataaaaaaaaaaaaaaaaaaaaaaaaaaaaaaaaaaaaaaaaaaaaaaaaaacaaaaattaaatgttttaaaaaaaaaaaaaaaaaaaaaaaaatagg

SEQ ID NO: 29048 - DNA, 280 bp, Gossypium hirsutum
  Clone ID: LIB3148-022-Q1-K1-D3
cccacgcgtccgtccaagcacagcagatagagaaaacaaaaggttaagtgaagatgggagcagaacaagcactgaagagaattccacgcattaagtttcctcaagacacccaaaaccctcgccttcaggttcaatctctgaaatacaagcaacacgcaaagatggaggtgtcattggtaacttcattgcaaggtcaaggttgagctcagatgttcctgctccgcccagcaacactgctgtaggaagaaaagcatctcttttgccaaaacgtactcctgtc

SEQ ID NO: 29049 - DNA, 274 bp, Gossypium hirsutum
  Clone ID: LIB3148-022-Q1-K1-D4
aggaaaaaaccgaaacttagataactttcttttcatggaacctgcttgttcgtatgtatgctcgttaaagctgctgctgctgttgttgttgttgttgttgtgtaatgttcgtgacagtctataactgattgctattaataatgtcttagaatgtcgttttcgatctattttctattgtttgagtatgtcgttttcgatctattttctattgtttgagatacttgcattgcaatttgcatagccttagactcggcaattcatttgtttgtatcgt

SEQ ID NO: 29050 - DNA, 83 bp, Gossypium hirsutum
  unsure (1)..(83): unsure at all n locations; Clone ID: LIB3148-022-Q1-K1-D6
ttaaaacgtccgcccactcgttcgggcaattactatttctanaaaggtggtgaaattgaagaccatgcttttaactaaacacc

SEQ ID NO: 29051 - DNA, 212 bp, Gossypium hirsutum
  Clone ID: LIB3148-022-Q1-K1-D7
cccacacatccttacattcacattttattttataaacaaaccgccaagcgcagagcggggcgttaacatacactagaaatcacttccactcatgaagtacctcaaagacacccaaaacctttgccttcatgatcaatctcagaaatacaatcaacacacaaagttgaacgtgtcattggtaactacattgcatggtcaaggttgatctcata

SEQ ID NO: 29052 - DNA, 377 bp, Gossypium hirsutum
  unsure (1)..(377): unsure at all n locations; Clone ID: LIB3148-022-Q1-K1-E1
cacagactgttgctggctacgtattccttgtggttgctacctctatcatgacaaattgggcccttgcaaagcaccgtcggttgaagaagctattcgacggtaagatggaaggccgaagtacccccgaagatgggttattcttcctccattcctgtagaaaggatcgatgagcatcgtacttttcgagatattaaatttacgacgttgaaacatggtttccgagttcattgaaagatcaattcttgttagattatggaattttagtatgtgggcatgcattaggatgcttttttgcttatgtaaaatcattgccggtttaaactattgctgttggttattatttcaattgatggatnttcattttcttattttaaatc

SEQ ID NO: 29053 - DNA, 368 bp, Gossypium hirsutum
  Clone ID: LIB3148-022-Q1-K1-E10
aaaaaaaagaaatcgttgcataaaccaaccttaggtgggattcaaaagactcgattcttcaatcgtttaattcttcatttgttcaaagatgtactcaagaggtcaaggtattcaagttctccttccccgaacaagcgatacacccggtctgtgtcgagatccttgtcgagctcaaggagtcggtcccggagtaagagtaggagtgctgaaagtgatgttgaaaatcccgggaacagtttgtatgttactggcttgtcacctcggatcaccaagagagagttggagaagcattttgcaagcgagggaaatgtgatcgatgttcaccttgtggttgatccaaggaccatggactctcgcggatttgggtt

SEQ ID NO: 29054 - DNA, 404 bp, Gossypium hirsutum
  Clone ID: LIB3148-022-Q1-K1-E11
ccacacctaacgaatagacatactatatatataaatgtgtgatacatggacacacatccatgatcaaggtacagatatgcagaaaagcaacattcggcattacgtgaaccgggaattgccgcgctaggaggcctcactaacaacactactaaaggcgaacttcataagaagcactggctcatccctatatatacccgtttagtaagagcggacagcagcacaactcgtacctaacatgctaacaccacggtgatggtgtttaggcaaggcatcttcctgtatcaacatatgcataaatagatcctcatctctgtatagcataacagtaaattaaagtcccctctttttttactttagattttcatgtctcccccaagggaaaaggttatgttttatttggggcg

SEQ ID NO: 29055 - DNA, 326 bp, Gossypium hirsutum
  unsure (1)..(326): unsure at all n locations; Clone ID: LIB3148-022-Q1-K1-E12
cccacgcgtccgcccacgcgtccgtaaattttaaaaaaaaaaaaaaaaaaaaaataaaaaaggaaattttaaaaatatttaaaaataaataaannnnnaaaaaaaaaaataaaatataaaaaaatatataaaaaaaaaaaaaaaaaaataaattttattaaattaaattatatttaatttaaaaaatttaaaaaaaatttggggggtctttataaatattaaaatttttatttttctcttttttaataattattttttttttttatgggtaattcaatatataatttatatgcccatatttatataatctttattttgaaaaattt

SEQ ID NO: 29056 - DNA, 362 bp, Gossypium hirsutum
  Clone ID: LIB3148-022-Q1-K1-E2
atttaaagagcaggatgaacactgttgcaccaaacttgactgctcttgtcggagaacttgttggtgctcgtctcattgctcatggtggcagcttaataaatttgccaaacagcctggtagtactgttcagattctaggtgcggagaaggctctcttcagagctctgaagacaaagcattcgactcccaaatacggactcatctaccatgcatccttggttggtcaggcagcaccaaaacacaaggggaagatttccaggtcacttgccgcaaaggctgcattggcaattcgttgtgatgctcttggagatgaccaagataactctatgggacttgagaaccgagccaagcttgaagcaagat

SEQ ID NO: 29057 - DNA, 363 bp, Gossypium hirsutum
  unsure (1)..(363): unsure at all n locations; Clone ID: LIB3148-022-Q1-K1-E3
gtgagggaagagtgtaggattagagaacaggattttgggaattttcaggtggaggaaaggatgaaggccacaaaagaaacaagggaaaaatttgggaggttttttataggttccctgaaggtgaatctgctgcagatgtttttgatcgagtttccagtatgttcttcttcatcaccagttttgctttctctttaatggaaacttggcattttttgcttaggagggtgcttcgggaatcaagtttccattgagaaaattggttattttgaaatgggtctgtactgtttgttgcttttgtttaaaagaaatgcttctcggaattcatttancaaagaaaaccaaactcaacttgaaacaagatta

SEQ ID NO: 29058 - DNA, 158 bp, Gossypium hirsutum
  unsure (1)..(158): unsure at all n locations; Clone ID: LIB3148-022-Q1-K1-E4
cttnccaatattcccggttcctagaaatgtatacttttgttttgagcccggccaccagaggcaagggttaatttttcatcactagacctggttgagacacaatatttgcgactttaaaaaaaaaaaaaaaaaataaaaatttaattatttatatattt

SEQ ID NO: 29059 - DNA, 421 bp, Gossypium hirsutum
  unsure (1)..(421): unsure at all n locations; Clone ID: LIB3148-022-Q1-K1-E5
cccacgcgtccggaaaatgagccaaatgtgttcctggatatgnnaactccaagaaaaataaagaggattcttatgcattggctttctcaaacattctcnccgcaaaaggtaattacaagggaacaagcagttcaagatctggaggaattggagagaagaagagaagaacttgaacaattgctgttggcagaaagggtatgagagaatatgggtgattaagtcaaatagagaaagggacatcatgtccttgttgtgtgcaggtgttttctccctgagacaggcaaggaacttgacatcaagaattgttcaacttaaaaatacttccttgtactcattctcatcctctttatattttccaatgctttcttcaagtaggatactaagaatctcctatactattctttactcattctcatcctct

SEQ ID NO: 29060 - DNA, 344 bp, Gossypium hirsutum
  unsure (1)..(344): unsure at all n locations; Clone ID: LIB3148-022-Q1-K1-E6
gaaaatagcccactctttattacttttgtttgcataggcacaaaccttggacagagttgagttatgctgataatcaacatctggcattaccngnaccattgatttcctcgataaggtgcttcgatatgatcatttggaaaggctaactgcataagaagcaatggctcatccttatttttacccgattagaaatgcggaaagcagcagaactcggacctagcatgccaacttcacggtgatgatgttaaggcatggcatcttctgctttcttcatatgcatggtcagatcctcatccctttttagaatgacataagattaaagtctctcttattttttcttttga

SEQ ID NO: 29061 - DNA, 326 bp, Gossypium hirsutum
  unsure (1)..(326): unsure at all n locations; Clone ID: LIB3148-022-Q1-K1-E7
cccacgcgtccgattttttcttcttaatagtaaaatactcctttttgctcttctagggtgttgacctcaagcaaaacacgccgtcgccagaccacaccatatcaggtgaccggtaacgcgcgaaaggctcccgtttcagacgaagaacctgatcgacgaaggctaaacaccgaggtaagtaccccttttctttttatttatttcttttaaaatagatntgaaaccaaaaataagaaaaagatcgaaagaaaaaaaaagaaagagatagaatcaaaacaccttttttttgtttgctttattctcgatgctggaaatcatcttttgct

SEQ ID NO: 29062 - DNA, 348 bp, Gossypium hirsutum
  Clone ID: LIB3148-022-Q1-K1-E8
gaaaaggggaatgaaaccacatcatcagatgacaatgaagtaaaccaagataatatgactgtggaaaaacttatggacacttatgaggtttgcattctggcttgcgaaagacccaaacacgtcgacgtatagcttccttgaagagaatctcacctgcaaacttcactaaggaggcacgtaatagggttcctcaaatggtcctccagcggatacaatcacttaacaagcttgatgtggagctctatgagtatgctcaaggcatctttgcaaagcagcacaagcaagcagccgagaaagttgttgatgcgagaacactaggaagcatcttcatttattcgggtggcatca

SEQ ID NO: 29063 - DNA, 242 bp, Gossypium hirsutum
  Clone ID: LIB3148-022-Q1-K1-E9
gcttcacagtgtttggaagtaaaggtgatttggtgttcagggtagatacttacatggacggtaacaagggtgagatccttctcaaggatgccactgcaaccatctctttaccattcgccgcaagaaaatgatcctgggaaatagctggttgatttacaaaggcgaacgtaccttaacgaatcccctactttgtgttacgcaattgatgtacatgttaaacaacaagtgcttggcttacgtta

SEQ ID NO: 29064 - DNA, 382 bp, Gossypium hirsutum
  unsure (1)..(382): unsure at all n locations; Clone ID: LIB3148-022-Q1-K1-F1
cacaagatgaggaagataacttgagtaagtgttttgtttcaaccatcttcttacatcttcccaaaattggaagacaatgattactccgacccgcctgcaagtcttgtagttatggatttcatgttgaagatcatgctttctggtcttcggcttattaagttacacatctatatgttacatacatacataaataaattatgatgttgtttgtatattattacttcttgtttcactcactttgtaactttgtactaataattatgaattaagtaataaaaaaaaaccaatgattggcattgtagtaccagtgtggtgtaattctaacgagtaaataacatccttctcataagagtttgtggaatctattattttggtaannaaa

SEQ ID NO: 29065 - DNA, 186 bp, Gossypium hirsutum
  unsure (1)..(186): unsure at all n locations; Clone ID: LIB3148-022-Q1-K1-F10
tcaactttgcttgccaggttgtaggattatgggtgtgagtatttcttgctttgtttttgggtacagaaacatatatagaattttttgcttttntttttgtttactctcaatggaaataaaatgaactctcctttcaaaaaaaaaaaaaataaaatttaaaaaaaattaaataaaataaaaataaaa

SEQ ID NO: 29066 - DNA, 133 bp, Gossypium hirsutum
  unsure (1)..(133): unsure at all n locations; Clone ID: LIB3148-022-Q1-K1-F11
atttttgtaatatgcttaactagatttagtttaatgtgtgaccatcatttgtatgaaatggtgatctcattatctctgagcatcaaatggaaacccaagctttgagatttgactntagtaacattgaaaaata

SEQ ID NO: 29067 - DNA, 399 bp, Gossypium hirsutum
  Clone ID: LIB3148-022-Q1-K1-F12
cccacgcgtccgattttcgcgagaaagtgtgagatcgagagagaaaatacttcgcagggaattagcgagatcctgaaattttcctgcgttttctctttcaatcttctccggctacctgatttatccgtcatcatgacaacatcaaggcgacttgcagaaagaaaggtggagaagttccaaaagaacataacaaagagaggagctgtgcctgagacaaccacaaagaaggggaaggattatcctgtcggtcctgtgcttcttgggttcttcatattcgtcgtcattggatcatctctcttccagattatcaggacagcgaccagcggaggtatggcataagtctgcacttctgatgtaagagaattgcgaggagactggtcatgcattgggctttgcttt

SEQ ID NO: 29068 - DNA, 283 bp, Gossypium hirsutum
  Clone ID: LIB3148-022-Q1-K1-F3
gcatgctcgagttgaaaagaaacttacccatgcacaacttgctcagttgatcaatgagaaacctcagatcatacaagagtacgaatctggaaaagccattccaaccaacagataatcggtaaactcgagagggctcttggtgcaaagctgcgaggtaagaagtaaggcgagttgggtcttttttccttttgtggtgtaaatgaatgttctctaccattatggttttgcttgtaagaacagtgttttggactttgtggtgaccatgaaatgaagtgtgttcttc

SEQ ID NO: 29069 - DNA, 333 bp, Gossypium hirsutum
  Clone ID: LIB3148-022-Q1-K1-F4
ctcgaatccagttggattctggaaagccattttccatggctttccagaaagtcatcttttatatatgccaaaacctacatcctttaaccctctccaatatttttcttcgaatcatgctcagtaaggggggctatctgaatatccaatatcctttttagatattagattgcatctatccttttgcttatatatgaaattttaagtgcggaaaaatattgctgaagtatttattgtcttcaattttagaagtatattcccctctcaattcggataacttgtaaattactgataatccaaaatcttatcacctctaaggttcagattgaacaaagg

SEQ ID NO: 29070 - DNA, 403 bp, Gossypium hirsutum
  Clone ID: LIB3148-022-Q1-K1-F5
gggtgccagaccatggcaaatagcatttgtttcaggattcaagtgtaacagtgcagtttggaaagctttgaggacgataaatccggtaaaggagaaaaaccatggatggatgagatccataatttcccagttgatgttccaagggtctccaccatctaaatgacagaattgggtggtggtttcagcattgggtggaggaaacctttgcatttagataatctagttttttaagttatttaaatgggactagctttgagtgggattattattgttgtaacaatttgtggaaagcattgattcgagggtgttatgagaaaacattagaacatttttttttttactgacattatttcatgagatgcttgggctttcttccaagatcttcatcattttaaactgggat

SEQ ID NO: 29071 - DNA, 331 bp, Gossypium hirsutum
  Clone ID: LIB3148-022-Q1-K1-F7
cggacgcgtgggttttaagtaaaagaacacaaaaacggttccagtctgccggttctcttccaaatctcctttttttttcgtaagtatagttttagtggtagcacattttgacatatcctcttaaaggttgaatctatagcgaaaattttcccttgtaaagggttgacaatgaaatcaatgatgatgatgactatgataatggtcaatctagaaaagagttaagaactgtattgtcactttcttttgttccatggaagaaagcgttttgtttgtattgctctgaaattcatgttataaattgcaggcaaaactcaacaattgagtgtatgac

SEQ ID NO: 29072 - DNA, 232 bp, Gossypium hirsutum
  Clone ID: LIB3148-022-Q1-K1-F8
ggaaaattctgcgtagtgcttaaataaagttgttcaccacaagatatgttgaagtcacttttccaggtaaattatttgtactggttggagaggaatcaggaattgaatcaaggggtgcctccaatgactgcaggcaagggggtaggctacaaatctctctcgagtatgtgcaaagagaattcaaccatgttaaaatcgacagcgaatcagtaggttgggtaactgatggact

SEQ ID NO: 29073 - DNA, 412 bp, Gossypium hirsutum
  Clone ID: LIB3148-022-Q1-K1-F9
gactgatgctagagattgattgtgtaggattatgcaagaaaagatgcagtcaacactcgaggccaaacagatgcaacagggcgtgtgggacttgctcttgaggtgcaagtgcgtgccaccggggacttcagggaacagggaggtctgcgggacctgctatactggcatgaccacccatggaaacgtttccaagtgcccttaacctttacgtcgcccaatttgtgttgcagcctttatgggaaaaaattgaattgtttgtttgtgtaatatgtttgttgtatcttaaaacctatcaacttactttgaaatataatatagtacttggtagtttattttttttaaaaatttttattttttttaaagtcctttctttattttttatatttaaatttatttttaatatatttttatt

SEQ ID NO: 29074 - DNA, 410 bp, Gossypium hirsutum
  Clone ID: LIB3148-022-Q1-K1-G10
cccacgcgtccggtgaagattcttgtacttcttttgttctctcatctgaagcagcagtggcaggagctggatcaactaaagacatgcaggcccaggtgctgggcggtcaagctatgtgtcagcagctatacttgcaacagttccggatcctggagcgatggcagcagctgcgtggtacagagctgcagctttggctgtgaaggataaattccatccttcttttaactcgtctatcaataaatcagaatcataatattcatttgtagtctttctttaatcgaatctaccaaagcgttgcttttgtggttttagccttgcttttcaaaagtgttgtaaaaaagaaaatatgtatttagacttaaattataataaaaattttaaaattattaaattaagtaaattcaaattat

SEQ ID NO: 29075 - DNA, 414 bp, Gossypium hirsutum
  Clone ID: LIB3148-022-Q1-K1-G11
cccacgcgtccgcccacgcgtccgcagaatgggatatgccatcatccatggttgtatccgagggtcgagagagggcacaaaaagcccgagtttgctgtagttgccagcgctcttgttcggataaaacacacaatcgtaagcaaaagaggatcacaaataatcacttgaggtcttggtttacacacatatatataggcaaactttttcagtgaattataggtaattttttctgtttgtaatataccatttctatgtatcagctaccttcggatatcctgtggctcaatgtgttcatagctccaaagggtaaagaggggtccgtttgtgtgttaaagggttaggggtctattctagtttttacatatgtatatatatacacatatcatgtatgtgtatatgtatgttctggatgct

SEQ ID NO: 29076 - DNA, 339 bp, Gossypium hirsutum
  Clone ID: LIB3148-022-Q1-K1-G12
gccgttaaagaaaattaaaatgcatagctttgtatttccttttcttttgtttaaggtgcaatgcatagaaatgaaggatgaggtgttagatggagaggctaagtagttgcggacactttcggagagacgagtctgttctagcttcttcaccgtcaatatgaaatttcttgtatgcaagaaccaagctccattattttcctaaattgtatatagtttttgttatgtgccaattgcaaggtatgggacttgtattccgcataagaaaataaaagatttcctaatgaagttttaaaaatataaaaaatggttaatataattattatataaggggtataggtt

SEQ ID NO: 29077 - DNA, 132 bp, Gossypium hirsutum
  Clone ID: LIB3148-022-Q1-K1-G4
ggaactaatcaagtaagtgaaatttcaatttttggccttagagacggcctttgttttaaagaaggaaactaagcttaaaaaataaaagttggcctgaaaagaaccaatccaatttgcttgtttgatttgctg

SEQ ID NO: 29078 - DNA, 196 bp, Gossypium hirsutum
  Clone ID: LIB3148-022-Q1-K1-G5
ggctaagtttgggttttggagtgtttggattcgaacttagcaagcttcttggcagcagacatgactatttttttagtagtaagtggctagcaatttgatagagatgtacttaagcagttacaccaaacacagtctataacaatttattaaggatttggttttaaaaaatataaatattatttaaaaattattgggt

SEQ ID NO: 29079 - DNA, 261 bp, Gossypium hirsutum
  unsure (1)..(261): unsure at all n locations; Clone ID: LIB3148-022-Q1-K1-G6
ccgaccccgcgtccgcccaccgtccgcccacccttccgtagtctttgcttttgagagtaactttaaaatcctagcagccttgagtcctaacgagtccctgtttcaatgcttgnctttttagtttgtaaagtgcattgcttgttgaacttttatggtgcgtgtttgaatgatgaaagacctcgacatattttcttttaaaataaaatttattattttttaatgttatatattatttaatgtttgttatttaattattatttt

SEQ ID NO: 29080 - DNA, 375 bp, Gossypium hirsutum
  unsure (1)..(375): unsure at all n locations; Clone ID: LIB3148-022-Q1-K1-G7
cggacgcgtgggatctgactttctctgtaaccttagtttgttccacagaagtgattattggttgagaaaacatggggaaggacaagcataagcctgtgataagggtctgttttcacatcttgctcatggtggtcatggacaccctcctggcggatatccaccggctggagcgtacccccctcaaggctatccaccagctggctaccctcctcaaggaggatacccccctcacggctatccaccatctggctatcctggtgcatcccattcagggcacagtggcatgggagcgctgcttgcangtggtgcagcagctgccgcaactgctatgggggctcaccacgtgtctcatggtgctcatggtgctcatggtgc

SEQ ID NO: 29081 - DNA, 297 bp, Gossypium hirsutum
  unsure (1)..(297): unsure at all n locations; Clone ID: LIB3148-022-Q1-K1-G8
gcgagatggatctactcgatcctgatatgattattgtagaaattaatgctattaacgacaacttaatttcttggagcttgttaaaaaaaaaannnnaaaaaaaaaaaaaaaaaaaaaaaaaaaaaaaaaaaaaaaaaaaaaaaaaaaaaaatttaaaaaaaaaaaaaaaaaaaaaaaataaaaaataaaataaaaaaataaaaataaaataaaaaataattaaaataaataaaaaaaggggggcccttctaaaaaaataaaatttttctacccttttattgctataaaaattttttt

SEQ ID NO: 29082 - DNA, 324 bp, Gossypium hirsutum
  Clone ID: LIB3148-022-Q1-K1-G9
gttagtgaattgcaagtaagctggtttgtatcagtaaaaaaaattccagctgatggcaaagaaagttgtaaggtgggggtgctgaagcggctgcaaacaaaagaaaacatgcagcccgcagcactcgagtcatatagtagtttcatttttactgctatgagaataagagagatttagataaaccaaaacaatattttcttgatctgcaatgtctttcttgtgtctctacgttaaataaaagaaaaggcaattgctttttttattatattactattattttaattatttttttatttctatttattttattgattttttgtatat

SEQ ID NO: 29083 - DNA, 226 bp, Gossypium hirsutum
  Clone ID: LIB3148-022-Q1-K1-H1
gaaaatatagagcaagtagcctgaatagctttggatatcttgcacagtcttcaaaattgagacaattctctccatatatggtaacacaaatggcttcaattatttgtttttatttcttctctttttttttttgtgctgttggtcctccatcgcagtttggggattacctctgtcaagccaggagaatttgaaggaaaaatgataatattctctattgatttgattt

SEQ ID NO: 29084 - DNA, 368 bp, Gossypium hirsutum
  Clone ID: LIB3148-022-Q1-K1-H12
ccaacgcgccagccatccgaaagaatctgtagctgttaaaattcagcatttaattagtaagtgtgaacagattgtaaaacagtttcaacaaaattcatcctctattgggctcctctgccagtggatgggaatggaacaaagacaacatttgagtgagtagctataaccaggcttcaactttaatttcaggaagccactcgattgtaagttgttattcgtgcgtagcagtaatatatattgatttgatcgcctattgctagtaatttcatatggacttcccattactgtatatgaggcttgtaagcaaattgaatttatagtgtgtacccaaaaaacaattctaatatcaacttgttatggtgttccgt

SEQ ID NO: 29085 - DNA, 303 bp, Gossypium hirsutum
  Clone ID: LIB3148-022-Q1-K1-H2
gtcgcacgctcgaggaaattcaacacctttattgcccaatcggctttgcatgcaacacacgggccgggagaagtcgagtcaatgacatccatgagaaactgcgtctttgatggcgaggttctggagttgacaacttcactagcaacaaccggaatcaacacgcgatcagtctaaagtccgggttggggaggtgggcatactattagcatcgtgaaggtgtgtggacaatgccacctacttaactatgactcaccacgattgggacactacttgcagtgccatcggagagatgtacagatgcac

SEQ ID NO: 29086 - DNA, 210 bp, Gossypium hirsutum
  Clone ID: LIB3148-022-Q1-K1-H3
cccacgcgtccgcccacgcgtccgcccactcttcctattagtttttttaccaatgacccagaaattttacttttatttttccttttacttggttcccaatgacatggccacttgggtagtggcattgtctctctccatcttgtcttcttctttttaatttattttttaaaaactttaaatgatatatataaattctttgattacggtttt

SEQ ID NO: 29087 - DNA, 422 bp, Gossypium hirsutum
  unsure (1)..(422): unsure at all n locations; Clone ID: LIB3148-022-Q1-K1-H4
ggaantggagggccgacccagccgtccggtaagaatggagaatggacaattgtccaagggctggcaattgatgaattctcgaggaagaagttggacttgaccggagtggagctgaccgaggagaaggattggcatactcgtgcctctcatgaatgcattcatcatttccataatctgtttggaagaggagtggtttgccttaataggattagctgcagttttgaataaaaaaccgttctagatgaactgttagtgattggtaagcgacgtcctctgatcgagatcttcattatacttgtcacttgttcatggatattttggatattttaccggaatcccggattttatgctccaattttaaatgggttaatcgacactgttggtgaccattggtttttttgtctatctaggggattggttac

SEQ ID NO: 29088 - DNA, 80 bp, Gossypium hirsutum
  Clone ID: LIB3148-022-Q1-K1-H5
cacttccgttgtggtacacatgaatgtttttttacacaccttgcactgtattcaggcacgataattttccaaatatgtta

SEQ ID NO: 29089 - DNA, 318 bp, Gossypium hirsutum
  unsure (1)..(318): unsure at all n locations; Clone ID: LIB3148-022-Q1-K1-H6
tttcattgccaacaactgccctcctcttaggagtcggagattgagtattatgccatgttgtgcaaggttggagttcaccactacaatggaaacaacgtanacttgggcactgcttgcggcaaatactttagagtgtgctgcctcagcattattgaccctggtgactctgatattataaaaagcatgcccggtgatcactaagctatggggggataacttcctaagtgctgatttaatttcaatttttgggtgtctaaaaacattgttgatgttaaagacaaacttattctgaaaatcaaaactttttttgtagtgttt

SEQ ID NO: 29090 - DNA, 341 bp, Gossypium hirsutum
  unsure (1)..(341): unsure at all n locations; Clone ID: LIB3148-022-Q1-K1-H7
gcaattcaaatagtatcttcgacaccagacatggcgaaagcagcgaagcgtttaggcgagttcgcggcctgtgcttggaagaagaaaaggaaaggcatgcaatggatgatatttccgctatctgcctcttcttccactcatctcaccatgaagttaatcttgtaacaacttcaaaatagtgtgtacttaaatgagcaaatggtggctgctcttaaagtttattacaactatattatatatttagttaatcagaaagtattcatttcatgctcatanaanaaaaaaataattaaaattttctaaattaatattaaaaatatttttttaaaaaatctatattt

SEQ ID NO: 29091 - DNA, 328 bp, Gossypium hirsutum
  Clone ID: LIB3148-022-Q1-K1-H8
cccacgcgtccgcggacgcgtgggggcaactttgggtgattttccggctccgatgtccttatgtgcaataacatcgtttattggactggttataactcaatagtgcagttgttcaaaaatcatggtgccgaatggggttggccccttgtcagtgttttggacctagttggctattctctactgggaggtgctgtgagcggagcatgtgtaagcttcaatggatgggcaatgaagaaaaggggaccagtgcttgtctcaatgttttgccccattggaacagtcattacagtagttctctcctttattactttaggccagaccatttcgt

SEQ ID NO: 29092 - DNA, 401 bp, Gossypium hirsutum
  Clone ID: LIB3148-022-Q1-K1-H9
cccacgcgtccgcgtatacatcaaatgttcatgatgcaatccttccagcggaaacaattgagtgagtctggtcatggtgtgtcagatgagcatgctattcacttctaactgctaaggcacgcaggccattacatattgatggggtggctcatgctgctgcaacacaaatccagaaaaagtaccgtggatggaagaaaagaaaagaattcttattgatccggcaaagaattgtcaaaatccaggcccatgttagaggacaccaggtgaggaaacagtatagaacaatcatctggtcggtgggtattctggagaaagttattctacggtggagacgtaaaggaagtggtttgcgaggatttcgacgagatgcaattaccaaggaacctggaccacagtgcacg

SEQ ID NO: 29093 - DNA, 422 bp, Gossypium hirsutum
  Clone ID: LIB3148-023-Q1-K1-A1
cccacgcgtccgctggctttcaaaattttaaagcaaatattgaggccagaaagtttcttgctgtacgccagaatcaggaagccacactcatttcccatgtcaactcatccgattctgagtcccttgatgagatattccagagattgaaacgaccgtcagtagaccacagtgacgagaatgaaaatgagaacgacacagaaaccaagtctacaagatgatatcaaattcattcggaaaaaaaatgtgcctgttgctgtcgtggaaactgtgatacgaaatgtacagagctcattgaatttttacagtcctgtatgaaagatgtttggggtcagcagcaggaaatttcagactaatacaatatgggaaaaataattattccctggctgtatgattccagctaattgtaatttgaactgaacatt

SEQ ID NO: 29094 - DNA, 382 bp, Gossypium hirsutum
  Clone ID: LIB3148-023-Q1-K1-A10
agttattgagatagttgagatgctaagaaggggagagaagctaccacctggcactcaaaatccaaaacgaatcaagagtggaccagaaggtggaaataccactttgctaaccgatccgaaacctcctccatgccgtgatcttgatgcctgctaatgttaacatgccaccgcagtctcaaataatgtgaagcttggattttgccaaggcttttttggatgtatgttcttgttgaatttgtgaagctcaaccaatattttgaattttccatgcaatttaaacttggtacaagttatgagatgactaaatttgcattgtaccaaataattgatgttaatgtttttgccataatcttctatgaaagcaagccataattgttgtggt

SEQ ID NO: 29095 - DNA, 423 bp, Gossypium hirsutum
  unsure (1)..(423): unsure at all n locations; Clone ID: LIB3148-023-Q1-K1-A11
cttttagcatatagacaatagcaaatacagcaatggcttccagtgggcagcttcatgtggatttcgagctcaagtctcctgcagaaaaagtgtggggaaccattagggactccaccacgattttccctcaagccttgtcccatgattacaagagcattcaagtgctagaaggcgatggcaaggcccctggatctgttcgtcttattaactatgccgaagggtctccaatcgttaaggtatcaaaagagagaatcgaatcagtggatgaagctgagaagaaatatgtttacagcatcattgatggggatctcctgaaatactacaagactntcattggcaagatcattgtggttcccaagggagagtcgagcttggttaaatggtcctgtgagnttgagaaggcaagtgaagagatccctgatc

SEQ ID NO: 29096 - DNA, 417 bp, Gossypium hirsutum
  Clone ID: LIB3148-023-Q1-K1-A12
cccacgcgttcgcacccactttgcagatgcgtgtgagagacttggagcagattttgaatgtactgcggggaaatgttgtcgacgtagtggaatatggatatgaatgggaaatagaggatgaagaatcagatgaggaggatgaggatgaggatgaggatgaggaagaccgagaataaaactagtgctgtttttctttccccgttgaactttatttacaggtcacatggaagctaaaatttcctgtaacattaagagtatgccctttggagtgttacctgaactttgttcaggatttagttattctgatgtgatatgctagtgttaatcaatatatgaaagctttatctaggttacaaagggagaagcgagcttgttaaatggtatgtgagtttgagaagcaagtaaaaaaatccttgt

SEQ ID NO: 29097 - DNA, 239 bp, Gossypium hirsutum
  Clone ID: LIB3148-023-Q1-K1-A2
cccacgcgtccgcccacgcgtccgcccacgcgtccgtccacgcgtccggttctagatcgcgagccggcctttttttttttttttaaacaaatctcaaaaggccacctcccacattgctgtgaagttttctgaattgctgaccaagatcgacaggcgatctggaaaggagcttgagaaggagcccaagttcttgaagaatggtgatgcacggatgataaaaatggttccgccccacccta

SEQ ID NO: 29098 - DNA, 364 bp, Gossypium hirsutum
  Clone ID: LIB3148-023-Q1-K1-A3
gctctatcaactttcacgttgggctagagctcaggggtatttgtctgagaagaaagaggaggcctcatctcagtaaagtacccttttttcctgcttttctttccattttgagattctgctattttcttgtgatccctgtaagaatctattctgagctttactttataaagaaactgatttaattctaccttcatctggccgaagcttaagcacatagtaagccgattactgttaagtggaatcatgatcggccgcctttcttattatgcatgagtggtaaaacagcttagaattctacaatcaatgttgattcaataaactttttcttgatttagctgaccataaaagaaaaaaaaccggggaa

SEQ ID NO: 29099 - DNA, 366 bp, Gossypium hirsutum
  Clone ID: LIB3148-023-Q1-K1-A4
caatgttggagtgaatgactgcctgtgatgcaagaatctctctattctcgttccgtactattatacctgaagccgatctgaactccagacgatcgtaagctgcatcaaaatgaatgaagggccatccccttttgtgtatctattggagattgtcagatgaatggagaatgatttctactaaaccagatgaactaaaggctacaacagaaaagttgaagctgctcttcattacctcgatcaaaaacccagggtactgaataaaaatatgccagctattttcttaggcacaaccgcacctgggacaaagagtgttcatcactaccctctttattttaaggttgacaaaggaagggataaaatcccaag

SEQ ID NO: 29100 - DNA, 393 bp, Gossypium hirsutum
  Clone ID: LIB3148-023-Q1-K1-A5
cggatcagtaatcaaagcagtggtagacgcctcggatgagctgaacctaacgtataagtgtatgatcagcagagcttaccatgactcactgtttatggcaaggatagctccaatgggcatgatatttattccatgttacaaaggatatagtcataagccagaagaatatgcgtcacctcaggatttagaaaatggggtgaaggtattagcgctaaccttggccaagttgtctttgcgttgatgtgttgttgtatattgtagtttttattaggctggttaatgccactctttgtcaatattttcaataataacaactttggcatttatgaaaactttgtatcatgtttgagaatccaatctcaaagataatggaactcctacaatttggctttc

SEQ ID NO: 29101 - DNA, 365 bp, Gossypium hirsutum
  Clone ID: LIB3148-023-Q1-K1-A6
aaaaaaggcagttaggaaccagaaaccaaggcaatggcttctcttgcaaccttagctggtgttcaaccaacgaccatcaagggccttggtggcagctctctcaatggaaccaagctcttggtgaagtcaactcgccagagtttcaaacccaaaaactacagggctggtgctgtggtagcaaagtatggtgataagagtatatactttgatttggaggatattggcaacacaactgggcaatgggacttgtatggatccgatgcaccttcaccgtacaacccactccagagcaaatgcatagcatatggatcagtctccatatgaaagtacttgtagagtgggaaatgaaaagaagaaaaggaact

SEQ ID NO: 29102 - DNA, 412 bp, Gossypium hirsutum
  Clone ID: LIB3148-023-Q1-K1-A7
cccacgcgtccgcacggcgtctatgagggtagatggaacgatcgaggttgaagaggtgtgactgatggggtgcttacggcgcgaagcttctagaaaccctagggtttccagattctgtttaggcattgggccttatttaggttgggtcttgtttgggtttgggtgtaacgggttaatagattttgggccaaaagtttaggctaattgggtcgtaactaggtactgcgttttgggtagtctagctaggttactggttaatggattttgggctatagtatcgggtttgtaaactggactgtacaaaagctattttatttttatatttttgcatttatttgccaatgtatcagcccgggtaaatttgggttgctacaatcatcatatgattatttaggatatatcttacttacaa

SEQ ID NO: 29103 - DNA, 332 bp, Gossypium hirsutum
  Clone ID: LIB3148-023-Q1-K1-A8
cagaacagctggaaaccataaaggctattgaagagtcatttccaaggtcccatctgttgtgtcgatagctattccccacagatttaaacatcattaagctatctgtattggatgttgctccttcacccatttcttcaatccggatttctttgccaatcttcatccaaggttgaaatatgacgttccagttcttttcctatcagtttatttctaaatgaccatatcaaccataacgcatagcagaaaagccgacactggtaatagttgttgttgttgaaaacccaggttagccactcccatgtattctgactcgtattctccatgacccatga

SEQ ID NO: 29104 - DNA, 425 bp, Gossypium hirsutum
  Clone ID: LIB3148-023-Q1-K1-A9
ccacgcgtcgccacgcgtcgaaatctcaaagataattggaatttggagtgagcaagaaaaaggggtttgaaagaacaacagcagcagccatggcgaagaagatcagcgtaacaaagaaagccttgataccaggttcaatcaaaccctaagaatgtccaagggttcacaagaatgatctcctagttgtcaaagaaggttctacagaacgatgctggtacaagtgatgacatggacacatccatggagggaggggtcagaaatacaaataattgtgatggtaatacaactgttaataagttaacatcttcatcctcgaagaatgaggatgctgcccatgaagtccagaactctgcaatgggcacaagaactacagattctgccagggttacgaagttcactaaagagctctcaggacaaatggtcat

SEQ ID NO: 29105 - DNA, 159 bp, Gossypium hirsutum
  Clone ID: LIB3148-023-Q1-K1-B1
cccacgcgtccggattagcccattgtaatagtttataggcgctgtgaactaaaaattccccgaacggttctcctttccagacttgaatatcttcatggtccgtctctgtaagtgggatctgtgaaattttcttcgtaatttctgctgaaaaggtattgt

SEQ ID NO: 29106 - DNA, 383 bp, Gossypium hirsutum
  unsure (1)..(383): unsure at all n locations; Clone ID: LIB3148-023-Q1-K1-B10
cccacgcgtccgcccacgcgtccgctttgttgccttgtgtgtggtggcactcgcggtggtgctgttttcgggtgaaagtcgcacggcggaggcagtgacatgtaatcccgtggagcttgccccctgctcgccggcgcttacgtcgtcctcgcctccatcaagcgcttgttgcagcaagctgaaggcgcagcagccatgcctctgtggatacattaagaacccatctcttaaacagtatgtcaacagtcctaacgctaaaaaggttgcttcgacttgtggagtcccatatcctaagtgttaaatgttgcttaatggtgtatctactatctactggcagcanataagtgattctttttgctgtcaagtactgttctgaataaaag

SEQ ID NO: 29107 - DNA, 436 bp, Gossypium hirsutum
  unsure (1)..(436): unsure at all n locations; Clone ID: LIB3148-023-Q1-K1-B11
accacgcgncgattttttccatcgccgcttgcatcgatgacaagtgtgccgcttgcaatgccgtcgcgggggagctagagattcaactatcgaaggaaaaacccaggaaccatttggatatgagacatcgtttggactcgaaaggtcaacgccaaggaaaggttattgattacaggatgagtgagcttagagctgttgagctattggatggactttgtgaaaagatgcaagattacactcttgaaaagttagattcatctcgacgtgagtggatcaaagtgcataattgggacatcctcactattgataagcaagaagctaaggcatactcaaaagatatatcctcttattgtggacggttactggaggaaactgaagatgagttaacagaattgataaagaaaggatccgttaagcaaggagatgtaagcaaagt

SEQ ID NO: 29108 - DNA, 369 bp, Gossypium hirsutum
  unsure (1)..(369): unsure at all n locations; Clone ID: LIB3148-023-Q1-K1-B2
cccgtttcgacctccgcgtccgcttaaatttcttgcattatagccttaaaaattaatttaaaaaaaaaaaaaaaaaaaaaagcggacctttttttttttacaacctttcttttacctccttccatttgnnnttaactctaatatagtttccccctttaaacaaatttcttttctcgttgtttttccccctttttactttccaatcttctggcccccccccacctacttacttttttttttttttttccccctcccttttttttttttcccccttttttccccccccttccttttttaaaccctttccttttcctcctttttcaattttccccccttctctttttttctctttttcctttaatataaaaa

SEQ ID NO: 29109 - DNA, 256 bp, Gossypium hirsutum
  Clone ID: LIB3148-023-Q1-K1-B3
cttgatttcttacttttgaaatacaaatatgatctaatactgctactgaatacttattggcaaagattgaactgaatgtgcctatcaaagattagctctcttcctaagtcgtcggtggcttctccactccttgaaatttgaatcaaatttcgcattgtttttcctataattgttgtcaaggcgtgcgcctaggttttgcgtaaaatccaagatcggccaagttaaatgatgataattttcttttaccaaaagacat

SEQ ID NO: 29110 - DNA, 372 bp, Gossypium hirsutum
  Clone ID: LIB3148-023-Q1-K1-B4
gaacaaaatcaacaatgacattgtcactgtgcaaaagaaggcaaggactatcaaggcacagctcgaagaaatggaccgtgccaatgcaactaacaagcgcctctcaaggtgcaaagaaggcacgttagcttacaggactaggattgcagtaaccaatgggttgcgcaataagttgaaggagctgatgatggatttccaaggtttgaggcagaagatgatgaccgagtataaggaaacagtagggagaaggtattttacagtgactggcgaaaacccagatgaggcaatcatcgagaagataatatcagatgggaatggaggggaggggttcttaacaagggcgatacaagaacatggtcgagggaaagtgct

SEQ ID NO: 29111 - DNA, 419 bp, Gossypium hirsutum
  unsure (1)..(419): unsure at all n locations; Clone ID: LIB3148-023-Q1-K1-B6
acgattaaggtgttgtgcccaggtanataaggtgatggcacanaatcaanggaaaggtcctctncttccttctggtgggaagacaacctttatttgaggcacatgctcattgaaaaggcaccagaaagactttcctcactcaaccaacttttttctgtttgtttataatacagcgagctgatagtagcaaaaagaatgacttgttattttgcttcagtaaaggaaaggtgctaacatccatgtattaacaacttgataaccacactttatggaaatcaacctatcaatcatgcccctaaggatttgaccaatggtagtgtgtccgcatcgattcttacaactcaccttcaaaatcttttccagcaaacctcacttcaacagggtcttatcgtgaatttgttgaatagcttgcagtcagc

SEQ ID NO: 29112 - DNA, 373 bp, Gossypium hirsutum
  Clone ID: LIB3148-023-Q1-K1-B7
cccacgcgtccgacttgcagcacatctcatacatcctgtaaaatatcacaagaccgcaggagaatgctcagaattctctaaatcagccttacacagtggacacaccgcttgctcgcacagagttctacgcgcaagattaccatagtaaccagtgatcgttccatatattaattcgatcaccattcccaacccttcacacaatcccttctgcaatcaactcacgtgcattgcaaatgcttttccaggtaaatgattgatcaagaaagacgagaagaatacctcatacggagaaaagagaaagccgtttattaaattgcaaaatcacgatattttgctccgattgacatctatcaactcggaacttgttcggagt

SEQ ID NO: 29113 - DNA, 129 bp, Gossypium hirsutum
  Clone ID: LIB3148-023-Q1-K1-B8
ccttaaatcccctttataactcttcgatagggccccctaaaaacaaattacttgcccccgtttttacaaccttttgacttgaaaaacctggccttacccaacttaaacaccttgagcacataacccttt

SEQ ID NO: 29114 - DNA, 285 bp, Gossypium hirsutum
  Clone ID: LIB3148-023-Q1-K1-C1
gcccgatgatccttaagaacccaaactccctccaacggcggcaaccgttgttgcatagccgttccaacagcgtcgatagctgcatcacccctcgtgggaacaccaatctcaggttcggagaggtttgcggtggtactaccgccgacgttgcggctgtctgttgctgttgcccatgtgggttggccaaccttgtggttctagcaatatacaaggttcctgcagggctgtaccgccgcgctctccgccagaaacggctgcgcaagttgcacaaaaaaggttacttta

SEQ ID NO: 29115 - DNA, 407 bp, Gossypium hirsutum
  unsure (1)..(407): unsure at all n locations; Clone ID: LIB3148-023-Q1-K1-C10
gtttatttaggaagggctaaaggaaaatattcgaccgtggtcttcgcacaaacatacttgtccaggacaatcgtccccgcaggatggaccgactggagctaccagggtggccctgatcatctgttccatgccgaatacaagtgtcacggaccgggtgccgatacattcgggagagttcattgggcgaaacaattgacggacgaggaagctaagtactggacttccattgagttcatcaatggcaacgtttggcttcctgcatggctttgaacagaagatatatactttgcaatgagcggaaaatttatggaattagtttatttaaaaaaaaatngatttgtattgtatgagaggagaactttggatgcattcaatgtagagtttcataagatctattgaaaatgaat

SEQ ID NO: 29116 - DNA, 287 bp, Gossypium hirsutum
  unsure (1)..(287): unsure at all n locations; Clone ID: LIB3148-023-Q1-K1-C11
ccgggcgaccccgcgtccgcccacgcgtccgaaaaataaaaaaaaaattataaaaatttataaaaaaaacaaaacanntggggggatttcaaaaataatttgggggggggtgcgaatttttaatttgtggtagggtcccacccctacgcaccccccctttcttttcctttcccccaccccattcccttacccccccgccctaccctttttcaatggccgtggccttcccttcccccccccttctcccaccccatcccccccccacccccctccccttccccccttcc

SEQ ID NO: 29117 - DNA, 277 bp, Gossypium hirsutum
  Clone ID: LIB3148-023-Q1-K1-C12
cccacgcgtccgtgcagaaaagaagtcagttaacaaatttttggaaaaaaaaaaaaaaaagagaaattaaaaaaaaaaaaaaaaaaaaaaaaaaaaaaaaaaaaaaaaaaaaaaaaaaaaaaaaatataaaaaaaaaaaaaaaaaaaaaaaaaaaaaaaaaaaaaaaaaaaaaaaaaaaaaaaaaaaaaggggggggcctttttaaaaaaattaaacttaaaaccttttttttttaaaggggaaaatttttttttttttacccaaaaataaaaacac

SEQ ID NO: 29118 - DNA, 417 bp, Gossypium hirsutum
  Clone ID: LIB3148-023-Q1-K1-C2
atctggttgtagtttactataatccttccaataacttatagcatactgaaggtttccggtgaaaaaaaaaaaaaaaaaaaaaaaaaaaaaaaaaaaaaaaaaaaaaaaaaaaaaaaaaaaaaaaaaaaaaaaaaaaaaaaaaaaaaaaaaaaaaaaaaaaaaaaaaaaaaaaaaaaaaaaaaaaaaaaaaaaaataaaaaaaaaaaaaaatattctcccctgtaaaaaaaaatataaaaaaaattcttagaggggcccccttttaaaaaaaatatttctaaaaccacgtatcttcaaacaaaaaaacttttaaaaaagaacaaaaaaaaaaaattccgaccgtttttaaaaaaaaatattgaaaaaaaacaaacggttttaacaaaaaaaaatatttggaaaaaaaaaaactttttt

SEQ ID NO: 29119 - DNA, 397 bp, Gossypium hirsutum
  Clone ID: LIB3148-023-Q1-K1-C3
gcgagttgaaaccagagagaatcaaactcaagaaatggaaaaaaggaaaaagggaaaggaaaaagaggttctgtaattatatctcacattgtcagaaagttcatagtttacactgcaaatatatagctgtattattggaacattatgatgcacattcacgttttgcatcttcttaataataattaaaaaaaggttttactttaattcattgaaataaaagtacatagacattcctttgcaaaaaaaaaaaacaaaaaaaaaaaaaaaagcactcaaaaatagaaaataaatagggaagacaacaacaaaaaaaccattcaaaaaatttgctcacttaaatttcctaaaatgggacaccaccctttaacccaattttaaacccaaccggggggggggg

SEQ ID NO: 29120 - DNA, 358 bp, Gossypium hirsutum
  Clone ID: LIB3148-023-Q1-K1-C4
attgaatttattgatataaaataaaaaaaatattttttaaaaaaaaaaaatagaaaaaagaaggaaggggaattataataatatagaaaaaaatataaaaaataataaaaaaaactaataataaaatataaatatataatatataaaataaggatcttgagatttaagggggggtcttttttaaagatttaaattttatttctttttttttgcaaatttttattttttttttattgacacaaaatttaatttaatgggcggaggtttaaaaacttgttgattggaaaaaccttgggtttcccaatttaattggctttgaaaaaatttccttttttgcaggttgggttattactaaaaa

SEQ ID NO: 29121 - DNA, 413 bp, Gossypium hirsutum
  Clone ID: LIB3148-023-Q1-K1-C5
gccttatcttccacgcccgccgtcacccatctcaaccaccaacgcatcgctctcggcagtttcatcgaagattacgctaacagagtccacataatctctttcgaccctgaatcacttaccctcacaacccacccatctttgtcgttcgaccacccttacccacccaccaaacttatgttccaaccccaccggaaatcccctttctcttcctcctccgacctcctcgcttcatccggtgactacctccgtctctgggaagttgggcactcttctatcgaacttatctccattctcgacaacagcaaaaccagcgagttttctgctcccttaacttccttcgattggaacgacgttgaacccaatagaatcggaacatccagcatcgacaccacctgcaccatttgggacatcga

SEQ ID NO: 29122 - DNA, 346 bp, Gossypium hirsutum
  Clone ID: LIB3148-023-Q1-K1-C6
gtccagcaacaacatcccgtgcctacggtgaaaggtgacatcgtgatgatgagccaattagtggctggaaactgaatcaagacctgttgaagtcgaaaaacctgcctgtcattatgatttgttttgtaaataggtagctttgcttgtattccaccctaaaaccccacaagttgaattactagagctgccaaataaagagtagctgtagaatgtagagatatttcatataattcataagcgtagtctgtctgtattttatattggttgtttccatgaattccaaagaatgagattgtgacattagagaggaaaagacaatggaaatagatgaaaatagtatagtttg

SEQ ID NO: 29123 - DNA, 69 bp, Gossypium hirsutum
  Clone ID: LIB3148-023-Q1-K1-C7
gtaggcctgtaaatcttgttaattactaaaatggtaaattaaaggaaaaaaaactgggttggaggcggt

SEQ ID NO: 29124 - DNA, 373 bp, Gossypium hirsutum
  Clone ID: LIB3148-023-Q1-K1-C8
gatcctactaagtgcatgtaagaaatcttgttttgaagcactgggtgtggttgaatatttgagcatataacttgagagagaagatatttggtatggtagttaggctagtcctaagtcctaaccagtcatatatgagtagggttcttgtgatctcaagcaattatgccagtttgattttgcttatttatattaatagaggatttgctttgctcttgactatgtaaagaatattattagcttcactttaagcgattttcctcgtcaaagaaaaagaaataaaaggtaagcgccttaataataatcaaacctttcattacatgtccccagcttaagtccttgctttgggccctcgatgtagtggttatttaagtcc

SEQ ID NO: 29125 - DNA, 317 bp, Gossypium hirsutum
  unsure (1)..(317): unsure at all n locations; Clone ID: LIB3148-023-Q1-K1-C9
cggcccggaancccggncgacccacgcgccgcccacgcgtccgaaaaaatactagtccatgctttcaccattgtaccaatagtccaaaccgatactttttatgctacctaatgaaactctattatttttcaccatggggtttctactacaatcatgtatatattattacctttggctatggcacgtaataataagaaaagagtttaatgcanaaaaaaaaaaaaaaaaaaaaaaaaaaaaaaaaaaaaaaaaaaaaaaaaaataaaaatataaaaaataaatataaaaaattataaaataaaaaaaaaaaaataatt

SEQ ID NO: 29126 - DNA, 413 bp, Gossypium hirsutum
  Clone ID: LIB3148-023-Q1-K1-D1
ggggttccgatagagaagatagacattgttactgctgccatgggacatgcattggcaacagaaggaggattctgcactggaagtgctcgtgtcattgatcatcaacggttgagcagttctggctacgtcttctctgcatctttacccccatatttggctagtgctgcaattactgctattgacatcttagagcaaaatcctgatctgacatcaaagctgaaggaaaacattgccattttatggaaaggactctctgatatccgggggctttcaatagcaagcaatccagaatcaccgattgttttccttgtgcttgaaaaatcaactggttcaatgaaaagtgacctccagctacttgaagacattgctgatcgtgccttgaaacaagaatccatttttgtaatggcttcaaa

SEQ ID NO: 29127 - DNA, 211 bp, Gossypium hirsutum
  Clone ID: LIB3148-023-Q1-K1-D10
aaaaggcggcggtgcatctgaaggcagctggaggtcttaagtttaggtttcaaagtgggcttgggcctatattgttatgggtttggtttgggtttagtagttagtaattttaagtttctctattactgtttggtttgggttctctcttttttgatcgatgttgttactgttctcttaaaatcataaaaatggaatgaagtatcttcttttc

SEQ ID NO: 29128 - DNA, 336 bp, Gossypium hirsutum
  Clone ID: LIB3148-023-Q1-K1-D11
cccacgcgtccgctgttttcatgggaaaccgccggaaaaatcctccgccgttggaattcgaggcggaggagtgccttgggagaacttctaatcctatagttctctggcaggtatatgccattggtggtttctttttactgaaatggatttgggccagatggaaccagggggaagagattggatccaagaagggagcctccgaccattaccaacaaccacctgctgtggatgacttccaatattgggtgattctctttcgatttttggtttactaaaccaagaccttatcggtttttctggacctatgtttggctccgtggtgcctggtggaagtgg

SEQ ID NO: 29129 - DNA, 276 bp, Gossypium hirsutum
  unsure (1)..(276): unsure at all n locations; Clone ID: LIB3148-023-Q1-K1-D12
cccacgcgtccgcttgcactaaacgaccaatacctctataagataaatcaagaggccaaggcttgtttatctctactaaattgcaccagtttataaatccgacagccttagcacttgaaaaaaaaaaaaaaaaaaaaaaaaaaaaaaaaaaaaaaaaaaaaaaaaaaaaaaaaaaaaaaaaaaaaaaagggagggttgtgttgtggttttaaggtnacgaaccctaccgtgcataacttcacactcttttatattgtcactaaaatccaattaaaa

SEQ ID NO: 29130 - DNA, 244 bp, Gossypium hirsutum
  Clone ID: LIB3148-023-Q1-K1-D2
gcttcaaatccaaggaatacgttcgtgaaacttttgcttggatgcattattactggtaccttaccaacgatggcattgaatttttaaggacataccttaatctcccctctgagattgttcctgctactttgaagaagcaaactaggcccggtggtggtcgtcccatgggtccttctgatagccgcccacgtggtccgccacgctttggcgacggtgagaggcgattcggtgacagggatggata

SEQ ID NO: 29131 - DNA, 199 bp, Gossypium hirsutum
  Clone ID: LIB3148-023-Q1-K1-D3
aaaagaagaaggaagaaccggaggaagagagtgatgactatatgggattcagtttgttcgattaggtgtgttttggtcaattactagttatataacattaaggtagtgactcttttagagttgtattgctattggtatttgcatgttaattagaaatattacgtttttgttgaatgaagttgacactaagtagctcttt

SEQ ID NO: 29132 - DNA, 209 bp, Gossypium hirsutum
  Clone ID: LIB3148-023-Q1-K1-D4
agacgttttattctcaccaacatctttcaaaaaatttattcgtgaaattttttgaactgaattattagattaattctcttttttggtttattttggtgttccttttaatttgtttaaaatcgaaatcaacttttgtaattgatggttaaattttactaacaagtaacgtttgaggtttatgcattctgcactcctcaaacatttgtatc

SEQ ID NO: 29133 - DNA, 403 bp, Gossypium hirsutum
  Clone ID: LIB3148-023-Q1-K1-D5
cccacgcgtccgagcaagctactttcccttacatatttgcggttagcaagtacttgcagcctggaacttttgatcttgtgggcaacattttctatgagattgaccagcacccataccaaagtacattctataatggtaccattgaagttgttgaagctggtggcttcctcagtgtcgagtctgttttccttgttaccctcgggattgcactgctggttctcttcggtttatggcttcaaggtcaatttcagcgtatctccaagaaaactaagagagctccaaaggtggaagtcggaaccaggactactgatacctcattggacgagtggcttcagggaactgcttacactcagtcagcttccaaatcgaagaaaaagaagtagatggggcagtgcttgcaggc

SEQ ID NO: 29134 - DNA, 432 bp, Gossypium hirsutum
  Clone ID: LIB3148-023-Q1-K1-D6
tcgtaatgggtactgtcccaaaagatttatatatttaaaaaaaaaaaaaaaaaaaaaaaaaaaaaggaataattattatataaaaataaaaaaaaattattttaaacaataatataaaatatataaataataatattaaataaataaaataaatccagtttaaaaaaataaaaataaatactttataataaactatccaaatagtggtctcctttttatattactaaattttttattttcttttaatgcaatttatacttttttttttctcctataaaaatttaatttaattgcttttttttttaaacctttttattattaaaattcttttttttcccaacttatatagttttgatttaatttttactttttcttaggtttttttaatttactaatattgttctttcctttttcttttttaaaaattttttt

SEQ ID NO: 29135 - DNA, 194 bp, Gossypium hirsutum
  Clone ID: LIB3148-023-Q1-K1-D7
ggttcttgctagtttgtttaagtggcatgtattaggaaaggtctttagcattttgatattgttgtgaagatgtaaatattgaaagttgatatgtttatgcttgttgcttgtgaattacatttgaacttgtgtgcataactaggaaaaccttttgaaccacatataagtagatactgtacaaatctttttggtgc

SEQ ID NO: 29136 - DNA, 353 bp, Gossypium hirsutum
  Clone ID: LIB3148-023-Q1-K1-D8
gccttcttttcagaactaggcaagacatcacgcgactcttccagtaagggtaatacatcttctgatcctaggaacgaggaagaacctgcttgggcaccattgcgtgataattacatgctaacaaatcctaagttgaagaactgggataaaacagctgaagcaggcatagctgatgatgctggaaggatgtctgaagatagtgggtcagatgatgattaatttcatccgaatttaagaagcttaaaggttatctcttatagttcggtcatagatataatggtctatttatcatctaacattataaatgagttaaaatcagaggcaaatggttctatttggctgatgatgcgttt

SEQ ID NO: 29137 - DNA, 330 bp, Gossypium hirsutum
  unsure (1)..(330): unsure at all n locations; Clone ID: LIB3148-023-Q1-K1-D9
cgaatatgcaacaacatgaatattcgtgagcgttcaaactaatagaggttatgcgggtggtgtaggaacctaggtcatacaatgtcgtcctatccacatcaaagttaaatattgttatatgtcttcatgggaattgttaaccattgttaatccaaaataaatttaataaataataaaaatatattaaaaattttttaaaaaaaaatattataattatatataaatattttaattaatatattttattttnttatataataattataatttttttttttattttttcttttttatatttttattaattttatatttttattatattttttt

SEQ ID NO: 29138 - DNA, 418 bp, Gossypium hirsutum
  unsure (1)..(418): unsure at all n locations; Clone ID: LIB3148-023-Q1-K1-E10
cctggttgatgatgacattgtgaccctagtgtatgtcatgtgataatttatgagtggttggatactccaaaaaaaaaaaaaaaaaaaaaaaaaaaaaaaaaaaaaaaaaaaaaaaaaaaaaaaaaaaaaaaaaaaaaaaaaaaaattttttaattttttttttttatttggtggggaaaataaaaaaataattgttttattaagaaaaaaaataaaaaatattaaaaaaattattttttagtggaattattttaataattttttttttttaaaaaaaatataatagaaaattagtttattttttttttaataaatatattataaaaaaaaaaaattntttattttatttttttttaaataaaaaaatatattatatttttgtaataatataaaattataaaatatttatataattatt

SEQ ID NO: 29139 - DNA, 399 bp, Gossypium hirsutum
  Clone ID: LIB3148-023-Q1-K1-E11
ctcggattgtacaagggtattgttcctctttggggccgacagattccatataccatgatgaaatttgcttcttttgaaactattgttgagatgatctacaagtatggtattcccactcccaaggagcagtgcagcaaaaatctgcagcttggtgttagttttgctggtggttatgttgctggtgtcttctgtgctattgtttcgcatcctgctgacaaccttgtctccttccttaacaatgccaaaggagcaactgttggggatgctgtgaagaagcttggattatggggtctgtttacccgtggtcttcccctccgtattgtgatgattggaactctaactggagctcagtggggtatctatgatgctttcaaaagtgttgtggggctgccaactact

SEQ ID NO: 29140 - DNA, 70 bp, Gossypium hirsutum
  Clone ID: LIB3148-023-Q1-K1-E12
aaaaaaaaaaaaaaaaaaataaaaaaaaatttaaaaaataaaaaaaaaaaaaaaaaaaaatgaaaaaatt

SEQ ID NO: 29141 - DNA, 177 bp, Gossypium hirsutum
  Clone ID: LIB3148-023-Q1-K1-E2
cccacgcgtccgcttctgagaccatccgggtatccccacttgttcacattctctcttaatagaaaaaggaaagtttgaggtggaggaagtctacaatttctctcaagatgatctcttgacagaagatattttgatacttgacacacgtgctgaagtgtttgtttgggttggtcaatg

SEQ ID NO: 29142 - DNA, 145 bp, Gossypium hirsutum
  unsure (1)..(145): unsure at all n locations; Clone ID: LIB3148-023-Q1-K1-E3
cccacgcgtnccgaaaaaaaaaaaaaaaattttattaaaaaaaaaaaaaaaaaaaaaaaaggggcgggccctttaaaaaaattcaagcttacttaccccttcattccaccgcataacttttctataaagacacctaaattcaatt

SEQ ID NO: 29143 - DNA, 390 bp, Gossypium hirsutum
  unsure (1)..(390): unsure at all n locations; Clone ID: LIB3148-023-Q1-K1-E4
ggttattcctgatgctctcaaggttttgaggcttcagaaaggacacaagtactgcttgttgggcaagctttcctctgaggttggatggaaccattatgacaccatcaaggagctcgagaggaagaggaaggaaagagctcaagtggcatatgagagaagaaagcaactcactaaacttagggttaaagccgagaaggttgctgaggagaagcttggtgcccagttggaagttattgctcctatcaaatattgattcaaagatgattgaaacatactggttacgtttcagtgcacttccataatgttgttttgagttgctcataattttattcccccaatcgttttaggtagatgctatgctatatatgttcgnatgttatcttggggttt

SEQ ID NO: 29144 - DNA, 412 bp, Gossypium hirsutum
  Clone ID: LIB3148-023-Q1-K1-E7
cccacgcgtccgcccacgcgtccgcccacgcgtccgcggaatgtctctggccatggtttgcatggtgatcagtctagacacagatcttcagatgacgtgccatcatccaaggatgcgcaacctgattctgaaaggacacgctcctcttcgagaaatgatagtgcttcaaagcggcctgttgttgtatcaggcaacagccaacctggctcctctggtgagccaagtgagaatcgttctagcagattattctcaagcagtggtcgcatgtcaacgactcagagagttcaacccggctttgaatctaaatcatcatctttcactcgtactgcagtcacaagagctggccgtgatgacaccctccgaagctttgatcttttgacgatcgggagtgggaaaaggaaataaaccacac

SEQ ID NO: 29145 - DNA, 312 bp, Gossypium hirsutum
  Clone ID: LIB3148-023-Q1-K1-E8
gccgggatggtacatagcatggttattacttaagatggagcattattttattgggtggcggtagattctcatcttagatgccaacagctatattccctttctgagaaaacaatcgtaagcatttctgctggataagaactgggctgtaactgctactgctataaactatttctacatgttaaatggcaagaaaagtttttataaaacttttgttccaactcaaatacttctgcttttattaaatattgtttcaaagatgaatcatatttttttgctacttttatatttctttttccttttttattttttttt

SEQ ID NO: 29146 - DNA, 326 bp, Gossypium hirsutum
  unsure (1)..(326): unsure at all n locations; Clone ID: LIB3148-023-Q1-K1-E9
ggcgaccacgcgtnggttacctttctctttacctttttatttattttcgtatatgaaaaaataaaagaactaagggatgaagaaaaatataaaatcaaaacaaagaactagatgaaaaaccctcgtaaataaaaaaacaacaatcaccttcgaaggttcttttagattaatagtctctgccttttgtttgtggctaaaaaaaaatacaaaggtaaatttctggtttttataaccgannntcaagactggttactcctatttttttttgtcgtttctacttgttcctctgttgatgcgtgtgggttttgtctgcaggtgtcagagag

SEQ ID NO: 29147 - DNA, 409 bp, Gossypium hirsutum
  Clone ID: LIB3148-023-Q1-K1-F1
ggttaagcttattgatgatccacagactgttgttaataatcgaaacaaagctttgatgcttattgaagcctggggggagtcaaccagtgagctccgctatttgcctgtttatgaagagacttacaagagtttaaaatcaaggggtgttcgctttcctggacgtgacaatgagagtttggcacctatttttacccctcctcgctcagtttccgcagctgaagtggatgctagtcttgcaaatcagtttcaacatgacatgcagcttcagcatgacactcctccccaagcctttaccgccgaacaaactaaggaagcatttgatgtagcaagaaatagcattgaacttctttcaactgtgttatcctcatcaccacaacaagatgctctcgaggatgacttgacaactaca

SEQ ID NO: 29148 - DNA, 357 bp, Gossypium hirsutum
  unsure (1)..(357): unsure at all n locations; Clone ID: LIB3148-023-Q1-K1-F10
cttcatttcgcccaagaattggccattctaattgaatggcctattcttaaccactaactgctccctgcatttggccagggggtcaagggtcccaatgtcaattggaaaagatccggaaccacctgctatcaaaagttggctgttacatgccccaatgtcaatgatgttcggtaccaagactgcagtatgacatagaagtcatggtgtttgttgcatangngatgaactacgtgactgtctgcagagtgccactttatgtatcacatctaatgcaaacaccattatatgaagatgtgcatattgatgagttgctgtgttattatattatgcacttacgtatatcttaataattgatgc

SEQ ID NO: 29149 - DNA, 402 bp, Gossypium hirsutum
  Clone ID: LIB3148-023-Q1-K1-F11
tgaaatcaatgattgggacctctttttcatgtttcttcaagaaactggatttggtttgctccaagaactgcatcatcgtttacgaatgtcatgttctgccagtttcttttgaacataacaggatccgatgaatgataatcaacaaggatgagtaacctcaggaagatcatgctggtgcatgatatgcaaaggcatttcggtcgaaaatgtttatcgttttcggtgaccaaatctggcttgactgactaactgttagggtgatttttgatgttgtccagcatcattcctagttatggaggaccatttttaaacagggccaattgtaggctttctacatgaaaattgctgcctttttcttcttgaatggattggtgatgtacatatatcattaccttagacata

SEQ ID NO: 29150 - DNA, 68 bp, Gossypium hirsutum
  Clone ID: LIB3148-023-Q1-K1-F2
gttattattgcatctctgttattcaatttacgatttgattaaaaaaaagttggggtttggttcaagtt

SEQ ID NO: 29151 - DNA, 364 bp, Gossypium hirsutum
  unsure (1)..(364): unsure at all n locations; Clone ID: LIB3148-023-Q1-K1-F3
gacaagcaatgccctggctctcgtcaacaactatgcctcaactcaaagtaacttaccttagtttctcatcatacgggggaggctactacttctcatgaaaacactaaagagaagataagtataagctgaaagatttgtaagatagcaggttatgttgtgaactgtattgagggaatatcaaatttgtgtttgtgtgaactgttgtgtatatgtaatacaatatcaacttgtgaatcaaggtttagttttcaaaanaaaaaaaaaaaaaaaaaaaaaaaaaaaaaaaaaaaatttaaaaaaaaaaaaaataatgaaataatttatttaaaaaaaaaataaaattaaaatatattttaaataaggg

SEQ ID NO: 29152 - DNA, 411 bp, Gossypium hirsutum
  Clone ID: LIB3148-023-Q1-K1-F5
ctctattttattctctgcgaattcattcccctgtttttcttttcttcttttttgaagagcttcatttccctttcaatggaaagcatggaagccaagctcccacaaaacccacctcataaaacacacaaacttgtcctttgtgcacaaatttgtttgagaatcgtggccatttcgactgcatttgctgccacatggacgattgtcaacgccaaggaaactgttgtggttttcggcttgcaattcgatgctcgatatacctattcctctgccttcaagttcttcgcgtttgcaaatgccatcgcatgtggtttcacttcgctttccttgatgttcgtgctcttaatcttccgccatggccgctttacaccttcgaacttcttcttcctattcctacacgattttgttatgatg

SEQ ID NO: 29153 - DNA, 94 bp, Gossypium hirsutum
  Clone ID: LIB3148-023-Q1-K1-F6
attttagacttaatatatcatttggtacctaagtttgagtcttttttaatgtagcagtgccagccttttagtatgtaattcaagttttagagtt

SEQ ID NO: 29154 - DNA, 213 bp, Gossypium hirsutum
  unsure (1)..(213): unsure at all n locations; Clone ID: LIB3148-023-Q1-K1-F7
gagagttagagacttaaaagaagaagtcgatttttgtgtgcataaaagttgtctccatttgtttaattactatgtacctttgagcttttgagggtagaataatttcccacanaaaaaaaaaaaaaaaaaaaaaaaaaaaaaaaaaaaaaaaaaaaaattaaaaaatattaaatatatttattgctttttaaaaaataataaaaaaataaaagg

SEQ ID NO: 29155 - DNA, 419 bp, Gossypium hirsutum
  Clone ID: LIB3148-023-Q1-K1-F8
cccacgcgtccggtcggatgccaagagcgccaagctctccgtgaataagaaatcaaccacgaaagctggaaagaaatcggggaaggcagctaaggatccaaacaagccaaagaggcctgctagcgccttcttcgttttcatggaggagttccgcgagcaatacaagaaggagcaccctaaaaacaagtccgttgctgctgttggcaaagccggtggagataaatggaagagcctttctgaagctgaaaagcgaccttatgttgataaggccgagaaacgaaaggtcgagtatgaaaagaacatgaaagcctacaataagagacaggctgagggtccccaagaagatgaggaggaatctgagaagtctgtatctgaggtgaatgatgaagaagaagatgatgatgaaggcagtggagacg

SEQ ID NO: 29156 - DNA, 309 bp, Gossypium hirsutum
  Clone ID: LIB3148-023-Q1-K1-F9
accaatcatcacccgattccatcttggactattcctatcttttcttttataattatcttgacccctttacccattctgaaaaatccaatatatacccaccaaagaaaaagcaagagcagtaaaaatccttgatcagcaacccataaggtttcttttctgtttttgtttttttgtcaatcaatcaatcatgacaggcaaagcctagcccaagaagcacactgccaaggaaatcgcatccaaaagcgatgccggcactaccaaccgaggttgtggccaggctggattaatttgccgtgcttgcgtggagac

SEQ ID NO: 29157 - DNA, 404 bp, Gossypium hirsutum
  Clone ID: LIB3148-023-Q1-K1-G1
gctatgttatcgatacatgttagttccacatcaacagcgggccagacctctgctactaaggggttttgaacgcacgggattgatgtgcgaaaaccgctacagacccaactgactggtccatggtcttcgagggaggctagaaacaatttttatataaggtcgcatagtaagttcactatgagagactcactaccttgaccatatattacggggactggaagcaagtttcctacctttaccgactatagagccgatattaccttgcgatgttacttgctcttaagtaccgtaagctggccgaatcggtacctttggcagtcgaagagtaaattgaaattgaagttgccggggaaacaattgggagggatttccgagttcttgagaataatatttgttggtttggc

SEQ ID NO: 29158 - DNA, 68 bp, Gossypium hirsutum
  Clone ID: LIB3148-023-Q1-K1-G10
ttacaacgtcataacttttatatcgtgtcacctaaataaaattaactggccgcagtttaacacccctt

SEQ ID NO: 29159 - DNA, 68 bp, Gossypium hirsutum
  Clone ID: LIB3148-023-Q1-K1-G11
gctgccttgagtaaaatccttgtgtgatagttattctatatgtttttgaatatgaaattgttgacatg

SEQ ID NO: 29160 - DNA, 396 bp, Gossypium hirsutum
  unsure (1)..(396): unsure at all n locations; Clone ID: LIB3148-023-Q1-K1-G12
gggcttcactcttgaatgactagtgattccaaggtgtaattatccgactaattgcaatgggggtttttcttttatgcttttaacttgagatctggatgctaaggaattgatatggtcaaagcaaatatgttatgattttggaagcaaatcttgaatattttgaagagttattgttgtattagcaaaaaaaaaaaaaaaaaaaaaaaaaaaaaaaaaaaaaaaaaaaaaaaaaaaaaaaaaaaaaacccaaaaaaaaaaaaaaaaaaaaaaaaaaaaaaaaaaaaaaaataaaaaaaaaaaaataaaaaaaaataaaaatataaaaattattnnggggggggactttttaagaaaaaaaaattttatgggggtggttgggaaaaaattttttttttt

SEQ ID NO: 29161 - DNA, 426 bp, Gossypium hirsutum
  Clone ID: LIB3148-023-Q1-K1-G2
gattcggtgagctctaaatgaaccataaggagcagcaaaaagtccagcactgttctttagtactctttgcaaaaacccatattgcagggcattgtctaaagacatggtggctatcctcttctccggagcaataacgaggacatctgacgttagtggtcactcgcttgtgtctaaggttgactagtgtaggtatatagttccaggagatccgccatattgttaatgtaattttttatggtagttataaattccatagttttctacagaagtctttgattttggtctgtattaagtaaactattaggatccaagctagcatattgtaatagtttataggcgctccgtactgagtattctccggaaagttcttctttccacacttgaaaatcttcatggttagcttctaaaaaaaaaaaaaaagggcgg

SEQ ID NO: 29162 - DNA, 252 bp, Gossypium hirsutum
  unsure (1)..(252): unsure at all n locations; Clone ID: LIB3148-023-Q1-K1-G3
naaaaaaaaaaaaaaaaaaaaaaaaaaaatttataattattaaaaaaaaaaaaaaaaaaataaagaaaaaatttaaaaaaaaaaaaaaaaataaaataaattttaaaaaaattaaaaaaaataatataatatttccatattaaattatttttattttaaaaaaaaaaaacttttattattaaataaaattattacggggttccatattttattgtatttttttttattgaaataaaaaaatttttttttttt

SEQ ID NO: 29163 - DNA, 397 bp, Gossypium hirsutum
  Clone ID: LIB3148-023-Q1-K1-G4
ttaatatcatcttagattctgcgcaaagggctcttcgatcatgggatataattagtgcaatgattaagtctcaagtgtttggtatgatcatatctattgtgagctgtgcttggggagttaccaccatgggaggagccaaaggtgttggcgaatcaacaacatcagctgtggttatttctcttgttggtattttcatggctgattttgcactctcatattgcttcttccaaggagccggagattcgttgaaaaactgtgtataaccaggttggcctctttgtcagcatctaactctttacacctatctcaatgttgttcaatggatggctcctagaggacagataacatagaggggaactatataggttctgtataaagtcttgcaatctttggctag

SEQ ID NO: 29164 - DNA, 391 bp, Gossypium hirsutum
  Clone ID: LIB3148-023-Q1-K1-G5
attatctcccagttgttagggtttgtttctttgtctccctcttctctctctcgatgcctgcatttccatcccccaagtctcccttttctttttcaccatttaaaacatcaacgaaaatctcagtcttcctcacattttcattcacaaaccaaccctttcatggccaagaccaaacctggcaagaaggaccttgattcctacgctatcaaaggcaccaacaaagttgttcgtcctggtgattgcgtgctgatgagaccgtcggactccgataagccaccgtacgtggctcgtgtagagaagatcgaggccgaccatcggaacaatgtgaaggttcgagttcgatggtactatcggccggaggagtctattggggggagaagacagttccatg

SEQ ID NO: 29165 - DNA, 422 bp, Gossypium hirsutum
  Clone ID: LIB3148-023-Q1-K1-G6
gagaagctgctttaaactgctgccttgaagagctagaagcaaaaaataatgaaacattactacttggaaagaaggtcaaagagttggaagataaactgcaagtagctgtgaagggtggtggaagttcagccgaattgaaggatggagtagaggtgaagtccagagatattgatggattaacattttcagcatcatcaaaacggaagagcaagaaaaagttggaagcagcttcagtgcaagctgcatcctcttcatcaactcctacccaccacgaggttgcttcgcccttgaccaccttaaagttcattttggatagcttttgtgtccgtaatcatcggtgttattctaggaaagcgttattagtgtaagtttttcgtgtttattggtttttctttgcagcttgcgtctaaacatataagcta

SEQ ID NO: 29166 - DNA, 233 bp, Gossypium hirsutum
  Clone ID: LIB3148-023-Q1-K1-G7
aacatatccaaaaatgtagaatgtgctttacctagagcttcttcctaaatatcagttagtccttgatttttttttcagtatgtactatgtgttatcaagtagatttggagtttgaatatctacatctaaattattttcatttccaagcagagatcttttctgatcaattttcttgtaacaaaataaatagtatcattgtgtttgttattatagaattacaagagtcttgtact

SEQ ID NO: 29167 - DNA, 316 bp, Gossypium hirsutum
  Clone ID: LIB3148-023-Q1-K1-G8
cggacgcgtgggtgaagagcctgaaaatgaagacgaagacgaagatgaagaagaatcgagtcagccaccaaagaagaggaagaagtaatcatttacagattctaagactttttttcggtgttcaacttcaataattcaagcctaagtttcctaagaattaagaactgaccacagtttttacctaaacttataacatgtgggacaagtcacgagagttaatggcttctaatttagttcataaatgctctttacagagaactttgaacctttataattttgtgttactttattagaaaaaatgaaatcgcattatggc

SEQ ID NO: 29168 - DNA, 72 bp, Gossypium hirsutum
  Clone ID: LIB3148-023-Q1-K1-G9
tttgaagtttgctactgtgtgtaaatgcttttcgttcattccatgaaatagcttgtagattatttttgagtc

SEQ ID NO: 29169 - DNA, 416 bp, Gossypium hirsutum
  Clone ID: LIB3148-023-Q1-K1-H10
gctgcccaaggtcttgcatatttgcatcattattgcaagcctagaatttttcaccgtgatattaagtccaataacatattgcttgatgaaaagtttgaagctcatgttggtgactttggactagcaaaagtcattgacatgccacaatccaagtcaatgtctgcaattgcaggttcttatggttatattgcaccagaatatgcatataccatgaaagtgaccgaaaaatgtgacatctatagctacggtgttgtcctacttgaattgctgacaggcaaaacaccggtacagcctctagaccaaggcggcgatctcgtaacatgggtgaggaattacattagagatcaatcgttgtcacctggaatactcgatactcgcttgaatcaacaagatgagactaccatctcgcatatgat

SEQ ID NO: 29170 - DNA, 325 bp, Gossypium hirsutum
  Clone ID: LIB3148-023-Q1-K1-H11
ggagaaatgtttatagtttggtgttgaagggccagcggattgtaatttgaaagtgttattgtgggaagtgttgagaaagggagggcggagcctgatttttggctttgatgatattctcacatccatatctactacccatgacaatgacagaatgggagttgctctgatatttgtagctttgatgaccagttagttaaatattttagtaggtcgtggtttcaactgatcctagacttgcatttcatttctcctgcttgaaccaaataagatatgcttctcttctctttgtagacagccatggctttagtgttttgttttcctcagc

SEQ ID NO: 29171 - DNA, 342 bp, Gossypium hirsutum
  Clone ID: LIB3148-023-Q1-K1-H12
cgagaaatcaaggaaaggatcaagaaaaccaaggatgaaaagaaagcaaagaaagccgaggtagcggcgaagcaacaaaagacgcagggcaaaggtaacattcctaagggtggtgcaccaaaaggtgccaagctcggcggcggcggaaagcgttgagtggctaggttattttcccctttttccctaccctgagaaaataggtagtattttcaaatttaatgaaagccttgtacggtatgaattggctttttggttatgttgatttttattttatgcttattatataccatgacctcatgttgaattcaagttatcaagtaattttatggattttttttcaat

SEQ ID NO: 29172 - DNA, 417 bp, Gossypium hirsutum
  Clone ID: LIB3148-023-Q1-K1-H2
cgcctcctatcgtgaagccaccttcaccgggaacaccgtgtcctccaccaccacctccggcgcaacaaacatgccccatagacactctcaagctaggtgcatgtgtggacgtgttgggtggcttagtacacatcggcataggtagcagcgccaaagacacttgctgccctgtactacaagggctgttggatttagacgctgccatttgtctctgtactacgatcaaagccaaccttttgaatatcaatattataatccccatagctcttcaggtcctcatcgactgtggcaaaactccacctccagggttccaatgtccagcacaatgatgaaaaacataaaaaccccatgtttttttttctttcgaagtaacaaatattttcatgtcttattatatgtttcttttaataatttatg

SEQ ID NO: 29173 - DNA, 396 bp, Gossypium hirsutum
  Clone ID: LIB3148-023-Q1-K1-H3
cccacgcgtccgggcggaacgtggaggttcgtaccacccaaaacgttaatgggtcaaagaagaatataatgataggaagtgttggaaaaatcaatggtgggaaagtgactaaatcggtttcgtgtcaccagagtttgtacccgtatttactttactattgccactcggttcccaaggtccgggtctatgaagctgatattctggatccgaattcaatggagaagattaaccatggtgttgccatctgtcatttggacatctagttggagttcgggtcatggagctttcttggctttaggttcgggtccgggtcgaatagaagtttgtcattggatatttgagaatgatatgacatggacaatagccgattcctgattagcaagaagggggttttat

SEQ ID NO: 29174 - DNA, 131 bp, Gossypium hirsutum
  Clone ID: LIB3148-023-Q1-K1-H4
aaggaagcttgatgggggtttcttcgatgttactgttttttttaatggattatttgtttttaattaaaaaaaaaaaaaaaaaaaaaaaaataaaaaaaaaaaaaaaaaaaaaaaaaaaaaaaaaaaaaaca

SEQ ID NO: 29175 - DNA, 258 bp, Gossypium hirsutum
  Clone ID: LIB3148-023-Q1-K1-H5
atccgtttgcctttgaagattcttaaactgtgttcaagcatttgttgttgctcgtcttgatgttattcgagctagaaatcatcaatggaggaaaagctggtatgcatcaaagcattttgttcacggtactagtggttctaggatggattccttctttatactgcttttactgttcagagatgaaaagaataaccgacttcgcttactgaaccgcactctggcaaatattcaattgacgtgcctgttatggtttatgtt

SEQ ID NO: 29176 - DNA, 412 bp, Gossypium hirsutum
  Clone ID: LIB3148-023-Q1-K1-H6
caacttctggggaatgaattttacaacttacaaactgaggtctttggttcgtaaatggcagacccttattgaagctcatgttgacgtgaaaacaactgacaattacactttgagaatgttctgcattggaattactaaaagacgcccaaaccaagttaaaaagacttgttacgctcagtccagccagattagacagatacgccgaaagatgagggaaataatgactgcccaggcaacatcttgtgatttgaaggaactggttcaaaagttcatccctgagatgattggaaaagaaatcgagaaggcaacatctagcatctatcctttgcagaatgtgtttattcgtaaggtcaaaatcttgaaggctcccaagtttgatctcgggaagttgatggaggttcatggtgactac

SEQ ID NO: 29177 - DNA, 273 bp, Gossypium hirsutum
  Clone ID: LIB3148-023-Q1-K1-H8
accacgcgtccgcccacgcgtacgcaaatgtcttttgttaatttcttcggtttcaataaagtgattgtgaaggaagattgtaagcataatgaggtgaaatatgaaactccatttcaacatcattgtttttgctgtttttaagcatggatttttctgaatgaatgtgttgtttgtgcacaaaaaactacatacaaaattgcatgttcatatgatgtgaaaccaagaccagaaacctcaaaaatggaaggataattgcgcacagaactcacagag

SEQ ID NO: 29178 - DNA, 225 bp, Gossypium hirsutum
  Clone ID: LIB3148-023-Q1-K1-H9
aaaaaagggaaaaaaagaagaaaaaaacagaattgggaaatggaaacagaccaactttcgaattttcattgtaccggtaccagtcttgcttcttttacgttatgtttccaagtcaagaaaatagtgacaaaaaaaaaaagttaattttgcagccatagctgatggctcatgcattgtttatttccattacaagtatacattaaaaggaagtttaagtttcccggt

SEQ ID NO: 29179 - DNA, 169 bp, Gossypium hirsutum
  Clone ID: LIB3148-024-Q1-K1-A1
cccacgcgtccggtaggttggctagtgtaggaatatagttccaggatatccgccagacagacagtagagtttttgatggaagttgtaaatcccataactttctctagaattctttaaaatcagtctgtaataagttattagaaattaaatcaacttcttgtaatagttt

SEQ ID NO: 29180 - DNA, 400 bp, Gossypium hirsutum
  unsure (1)..(400): unsure at all n locations; Clone ID: LIB3148-024-Q1-K1-A10
cacaagtttagctttgaatttgggatggattttgcttccttgttgactacaatatgtggttgattgtcattaatgtttaaggctttcaacaagttgccaagcatattaagtttgtttagattaggtggatgattaacatttctcttttgcttggattttcccatattgttataaattatgtgttcctgtttcttaaaaaaaaaaaaaaaaataattaaaattttattatttatataatttttaaataaataattttatatataaaattattatttttttttattaaaattttttttttttttatttttattttttttttatttttttttttttattttttatttttttttttttttattgntttnttntttttttttttttatatttttatttttttttt

SEQ ID NO: 29181 - DNA, 344 bp, Gossypium hirsutum
  Clone ID: LIB3148-024-Q1-K1-A11
cccacgcgtccggtggtagttcacagccaaccggtacgaacgtgttcgctcgtttggagtggtctgatatgaagtataccgtgggcagtcctattgcaattagctggacatgataggagaataaaggggatggacagtttttaaactttaaaaagttgaatggcttcttaaactcactcaacaagatgagatgggggttggttcaattgttttagtgttttgtagttgccagattcatgatagctaaaccagctaataatggaagctggggtcttaagtgtttgatgttattctctgagagagggaacaatgaaaactaggaacattggtaggttttctttctc

SEQ ID NO: 29182 - DNA, 444 bp, Gossypium hirsutum
  unsure (1)..(444): unsure at all n locations; Clone ID: LIB3148-024-Q1-K1-A2
accggaatggnagggccggacccacccgtccggatcgcggggaggtggtgtggcccacgactcgtttttgcgcgacgtgcggagcccggaggcaggcttgcggcgctggcttccctgatgctgggtttctcatttccttttttgttttattggtatttggcctaggtattatgtgggcttgtgttttgttttgtatattgggctgagagatgtgggttaggttttgggtaatctgttgggctttgggtttgttttaaatttggtcctacagtagggttttggcattcttagctttgattgattgcttcagagtttgaggagtgaagaggtgaagtatgaaaaatatttttgcatgactgagaagaatcattcattagtggtagggtatacaaagattatgattttttgcgttatattccttcacactacttttttagatatgta

SEQ ID NO: 29183 - DNA, 375 bp, Gossypium hirsutum
  unsure (1)..(375): unsure at all n locations; Clone ID: LIB3148-024-Q1-K1-A3
gtgccaagtaggaaatggaggtgaaggagatgaatgaagctacttaaatggattgggacgtgtgtcatgaaaggaagtagtacaatctaaaactgttggaaatgccctgttgtcaagagagattcaattgttatgactctttttatgatgtttggactgtggagtgtcaatggcattttacgtttttgtctgtctctttttaaaaaaaaaaaaaaaaaaaaaaaaaaaaaaaaaaaaaaaaaaaaaaaaaaaaaaaaaaaaaaaaaaaaaaaaaaaaaaaaaaaaaaaaaaaaaaaaaaaaaaaaaccctaaaaaaaaaaaaaaaaataaaaaaaaaaaaaaaaaaaataaaaaaaaaaaaaaaacaaaaaanaa

SEQ ID NO: 29184 - DNA, 410 bp, Gossypium hirsutum
  unsure (1)..(410): unsure at all n locations; Clone ID: LIB3148-024-Q1-K1-A4
atcccggggcggaccaaggcgtccgcccacgcgtccgacgaaagcctaatcgaacaagagttagaaacaaattgtacggagcacccagaccctgatttgttaattagaaccagtggtgaacttagggtcagcaacttcttgttgtggcaattggcttacactgagctcttctttgctcaagaactctggcctgatttcaggaaagacgagttcgtcgatgctttgagttcgtatcagcagcggcagcgccgctacggcggaagacattgatcagctcatcagaaagtaaataaatatggtgttagcaattgaagatatatagtcttactatacatatatagaaatgttatacaaatatgtaaaaactttcgtgtaggatagtcaactgaatcacagaaagttgatattna

SEQ ID NO: 29185 - DNA, 270 bp, Gossypium hirsutum
  Clone ID: LIB3148-024-Q1-K1-A6
cccacgcgtccgcgtgattgcagcactggtgtgttctagaaacccctagtgctttcggctgctaagattcccctttttggttctttcgagtttgggccctttttgcaaatcgggcttaaggatttggtctttgggcatctgtatatgtttgggctattcgggcattagaccagatttgtttttttattattattttgggttagtgtttattaaaggttgtaaatggacaatttggactttatttaggtttatttgactggctatttattt

SEQ ID NO: 29186 - DNA, 96 bp, Gossypium hirsutum
  Clone ID: LIB3148-024-Q1-K1-A7
ttcctttccaacctcgattttgacgaagcgaaacaaaattcgtggctctttcttgaggtaaaatttcttttctttttcttttttgttttctaatgc

SEQ ID NO: 29187 - DNA, 408 bp, Gossypium hirsutum
  Clone ID: LIB3148-024-Q1-K1-A8
ctcgcggccacctctcctccaccgtcatcttctccaatctgggggggatgcgagtgtatgtttgcgagcacaacacttctccaccagagagccagcacataaagacaaaccaacagaacatacttattagatcgctcatgcttaatgacaagaatggtgattccagttcaaaggatgtgaaagctgcagctgagggtcctagaaagagggctgctgaaagagtcatggatagtagggcttcagcaaagaaagccaatacacaagagggatcaagcagtcgtgctgagaaggactaccatagtttaaccgtagagaggcttcgtgcccttcttaaggaaagaggactttctcccaagggaaagaaggatgaactgattgctcgcttgaaatgtgtaaatggttcatcac

SEQ ID NO: 29188 - DNA, 177 bp, Gossypium hirsutum
  Clone ID: LIB3148-024-Q1-K1-A9
tgccgttgagcctgaaatagcagaggagttctaggacatggtcgttgtggaatcggttagtaggtattgatcgttatattatccagttggttagagttcatttcgcatttgttcattggcaaggtaatagtatggatgcttctttggcaatggtgagttatttaaaatttggtggcg

SEQ ID NO: 29189 - DNA, 156 bp, Gossypium hirsutum
  Clone ID: LIB3148-024-Q1-K1-B1
gccaaaggaagctattctctgctaaagcttcacctataaaattgtgtcagctgtatttgtgtgatgtaccaggtttatggaccatggattccttgcttgcaagatgcaggatcaagagaatttgttaatccatgttaatatatagattttgtcccc

SEQ ID NO: 29190 - DNA, 362 bp, Gossypium hirsutum
  Clone ID: LIB3148-024-Q1-K1-B10
cccacgcgtccgatgagtttgtggattgttttcaaaaaaaaaaaaaaaaaaaaaaaaaaggaaaataaaaaaaaaaaaaaaaaaaaaaaaaaaaaaaaaaaaaaaaaaaataaaaaaaaaaaaaaaaaaaaaaaaaaaaaaaaaaaaaaaaaaaaaaaaaaaaaaaaaaaaaaaaaaaaaaaaaaaaaaaaaaaaatggcgtcaccttaaaataatcaaattttaacacatccttcatttcaacattttattttttattaaagaaacccaaaattaatttccctgcccaacattttaaaaaacctgaattgataaaaaaactcgctttacaaaaataaattaatctcaaaaaaaattctttt

SEQ ID NO: 29191 - DNA, 220 bp, Gossypium hirsutum
  Clone ID: LIB3148-024-Q1-K1-B11
atttatttattattatgaggagcaaaggatatcgaagataatattattttaattaatagaggagcggtagtagtagatagtcgggatttagggtcattttcctttttcctaaatgttggaaccattattatgttccgttgttactctcttttctttatgcaactgagggaattcctctttttttcttttttaacagcataatagtaacaccagctttcat

SEQ ID NO: 29192 - DNA, 407 bp, Gossypium hirsutum
  Clone ID: LIB3148-024-Q1-K1-B12
aaaaagatcgaaaagcaatgagctccctgtgatgaaaaatgaatctactaagttggacgcgatcaactgcaactcagcagggggatgaaatgattgtgaccaaggaagaaactaccacagatcaagttgaggagccaaagatggccaatgaagaaactaatgttgatcatgttgaggagccaaagataaaagatgaaatagaggaagaagatccagaggaagatcctgaagaatatgaagaaatggaggatgcaagtcaacccaattcctctattgagaaaaatgaagaagagaaggcacaaacggatgctaagcctgaaaaggggtctgaaaaggaggctgagaagattgaagctatggcatctaccaaatctgaaataaccacaaaagctgctagtacagatgct

SEQ ID NO: 29193 - DNA, 447 bp, Gossypium hirsutum
  Clone ID: LIB3148-024-Q1-K1-B2
ccggccgacccacgcctccgaaaaaaaaaaaaaataaaaaaaaaaaaaaatatatattaaaaacaaaaaaaaaaaaaaaaagaaagggtacaaaaaaaaaaaaaccaaaaaactaaaaaataaaaaaaaaaaaaaaacaaaacacttcccaaaatacaaaccactttcttcccttttaaaccaccctaaccttcccccccctttcttccctttacaacacattcccttttccccccccttttttaattcccaaggctcccttaccaccccccctcccccacatattcccccccttaatccccttttcccccccccctatccccccccttaccccctcctattttttttttatcaccccatgaaacccttcccttccacatttcctccccccccccctcctaactcttccccccctttttttattcactttattcccccttttttccc

SEQ ID NO: 29194 - DNA, 246 bp, Gossypium hirsutum
  unsure (1)..(246): unsure at all n locations; Clone ID: LIB3148-024-Q1-K1-B3
cccacgcttccgtgcgatttacttaccgaagggcaaatatgtaacatggagggatccgtgcagttgaccttgcatatgatttgattcaacagggagaaatgaggcaaatatgcaaatgttgtagtgaaatatttcgagagtttttaattttctgggtgttgatgtgtttatgttggagattcttgtttgctaaagtaacacgactttcgcatagacattataaatgcagagaaaggttagcngttt

SEQ ID NO: 29195 - DNA, 431 bp, Gossypium hirsutum
  Clone ID: LIB3148-024-Q1-K1-B4
agccgtcgcccaaggcgtccggttcccttgtactaaaacatgttcctcctcagagtatggtagcaggtacaccggcacaagtaattggatccatagatgagcaagatccatctttgacaatgaatcatgatgctaccaaagagttcttcaaacatttagctgttagttttagagatggaagatccaaataagccaaagaatgatgaggaaaacaaggatggtggacattgatgtcaatgtccactgccagttgcagctgtatgtaaagaaaaataagactagaatggtaaaagtaccatgaaagcctgcattttgtcccctctactaaaaaaatggcaaattaatccctctgagttagattaaagagcaaactagtcattccgttaaaaatttcatccatttttgttgttaaaaattggttcttgtacgtc

SEQ ID NO: 29196 - DNA, 143 bp, Gossypium hirsutum
  unsure (1)..(143): unsure at all n locations; Clone ID: LIB3148-024-Q1-K1-B5
atttagactgtttatgttatgttgtagtataataatttgtatgcaaatttgtaagttatgctagtttggctctaaaacaaaaactcttgaacttcagcaagagctttattcagaaaataatcaatgaatattttttatcangt

SEQ ID NO: 29197 - DNA, 418 bp, Gossypium hirsutum
  Clone ID: LIB3148-024-Q1-K1-B6
aaaatatctgctttttcttagttttcctttttgtcccttgtttatttgatatttccccctcatggccgccgctgatgtcgagttccggtgcttcgtcggagggctcgcatgggccaccgacgaccgggccctcgaagaagccttcagtgcgtttggtgaaatcgtcgaatcgaagatcattaatgatcgtgagactggaagatcccgaggctttggattcgttactttccgtgacgagaaagctatgagggacgcgatcgaaggaatgaacggtcaaaatcttgatggaaggaacatcaccgtcaacgaagcccaatcgcgcagaagtggaggcggtggcggaggatttggaggaggaaacggtggttacagccgcggtggaggcggcggcggatatggtggtcgccaaggaggatat

SEQ ID NO: 29198 - DNA, 413 bp, Gossypium hirsutum
  Clone ID: LIB3148-024-Q1-K1-B7
gtttttgatctataaaatttcatctattgctggaaagagcaagagggttcttagagggggaattgaaatctaaatcgaaaactaaaaatgttgagggtaaaatgagtgataaactgggcacgagcttcgatttcaaattgtcaatacctcctaagtcatgacccaaagatttccccttcacctcctcaacatttcgcttcaaaatcatccattcgcttcgtcgatatttacaagcttgcaagcaaggaacaagtcgagaaagaacgagcatgactggcagtgctgatgaattgaatagaggatattttggtgatatgtctgagctaaaacaacgcggtggtaaggggatgagcgatctgctatcttcaatttgtttgtgatgaaagatgagtcagaatcattttggtgttttg

SEQ ID NO: 29199 - DNA, 159 bp, Gossypium hirsutum
  Clone ID: LIB3148-024-Q1-K1-B8
ggaaatgaaagagtaagaatgcatgatcttgtaatagatatggttaaacttatcactcgaaatttgtatgaatcataaattaacattgcacatgtatggttgggtctcttacactttttattttagatgaattaaaatgatacactaaattcactattc

SEQ ID NO: 29200 - DNA, 192 bp, Gossypium hirsutum
  Clone ID: LIB3148-024-Q1-K1-B9
atttcctccaaagcttgtaatagtttattgtaatagtttataggcactgcgaaccgaaggctcacctgaatactcacctcaccagaccaagaaatcttcgtgaggtgtgcgtgctaaagggatacgaaggatttttccagcatcatctgcggaaaatttattgtttatgaaatctcacttccatgttctctc

SEQ ID NO: 29201 - DNA, 422 bp, Gossypium hirsutum
  unsure (1)..(422): unsure at all n locations; Clone ID: LIB3148-024-Q1-K1-C1
ccgtccggggaagttgaactgcaaaacgataacatgtacctgcgagcaaaaatagctgaaaatgagggagcgcaacaacaatcaaaccagctgatacaagcagcctcctcctacaatcgcaactttctgccagtaaacctgctggaacccagtaataatgattactccaaccaagaccaaactcctcttcaacttgtataagcttctctcttccacctccatctattcaagctgacatgcaagcagcagcctctaattttctaccaactttatctctggttaagcatatatatatatcttataagccatgcaagtatatatatatatttatatatggnttataaacagttgaaagcgtagttgttgattgtgatgaatgtaaagaacttaagtttcagtactggactcctttttaactgtta

SEQ ID NO: 29202 - DNA, 421 bp, Gossypium hirsutum
  Clone ID: LIB3148-024-Q1-K1-C10
cccacgcgtccgcccacgcgtccgcccacgcgtccgcaaaatcagaccacgaccaagatgggcttccttttcctatcatttcagggatcttccccagctatttttcactctgatacagaattatataatttgttttgaagtattttgaatttcctacaagcaacgagagatgcaggcatcaagggcaaggttgtttaaggaatacaaagaggtgcagcgagaaaagacggcggatcccgatattcagcttgtttgtgatgattccaacatatttaaatggactgctctaatcaagggaccatctgagacaccttatgaaggtggagtgtttcagcttgcattcgctgttcctgagcagtaccctttgcaaccccctcaagtgcggttcttgacaaaaatatttcaccccaatgtgcatttt

SEQ ID NO: 29203 - DNA, 421 bp, Gossypium hirsutum
  unsure (1)..(421): unsure at all n locations; Clone ID: LIB3148-024-Q1-K1-C12
tgaaccactaatgagagccctctcaaagcttatatacctcaacaatccagatctagtctgatttgtgggagaggcactagttggaaatgatgctgttgaccagttatcaaaattcaatcagaaattggctgacctctctacttctcctactcctagattgatagatgggattctgctcaccaaatttgacactattgatgataaggttggagcggcgttgtcaatggtgtacatatcgggagcaccggtgatgtttgtcgggtgtggccagtcatatacagacctgaagaaccttaacgtcaaatcaatagtcaagacactgctgaaatgagtgaatgcacggtgtgggataaaagaacgaaaaagaaaaactcataaatgcattttcaatgctccactcttttatgactntgttttcttt

SEQ ID NO: 29204 - DNA, 413 bp, Gossypium hirsutum
  Clone ID: LIB3148-024-Q1-K1-C2
ggaaagaaaaaaagaacaagcttgtctaataggagattaaggcatactgggccatatctgctcgctgcaatgccgatgtctcaagaagcatctaattacgatgaggtttccatgcagcagagcttgttattctctgatagtctcaaggatttgaaaaatctgagaacacaactctactcagcagccgagtactttgagctgtcctacgccaacgatgatcaaaagcaaatagtgatagaaacattaaaggattatgctgtaaaagctattgtgaacaccgtagatcatttgggttctgtgacatacaaggttaacgaatttttggatgaaaaggttgatgacgtttctggaaccgagcttcaggtttcttgtgttgaagagaaagtacgcaaatgtcaagagtatattgatct

SEQ ID NO: 29205 - DNA, 295 bp, Gossypium hirsutum
  Clone ID: LIB3148-024-Q1-K1-C3
cccacgcgtccgagagccgtgaactgccgcatgaagaagtgtggtcacagcaatcagttgaggccgaagaagaagatcaagtagataccgactggtgttatcctgtctgctttaaaagaaattgaatgtcagactaggaaaatatttccattgagttcttttgctattattctattttgttgagattttgtttgtgggttctggatttgatgttccaatgtatgtttggacaatcttatgtcttttgtcttggaattttgataaggaggtggaaattttaagtaacgctagtttt

SEQ ID NO: 29206 - DNA, 228 bp, Gossypium hirsutum
  Clone ID: LIB3148-024-Q1-K1-C4
cgtccgcaaagggagtgaaggagtttacaaggctgttgaagcttacctcttggctaaccccgatgcctgcaactaagatatatgttggttgctttgaattctcttgcttgattttaaagaatggtgtgcttttggtattttcctttttactcttaaaacttaaaccgtcttccggttgtcttaataaaaatggcggtggtaattgatctttgatcatctttgattttt

SEQ ID NO: 29207 - DNA, 422 bp, Gossypium hirsutum
  Clone ID: LIB3148-024-Q1-K1-C5
cccacgcgtccgcccacgcgtccgttctactttgctttcctgtaacgctgaaaaaaagagaagagaagttctcaagagaaaaggagaagagatggcctcaaagcttcttcgtcaaaccctaaccaaaacctacacaaccgccgttatacgccgcttctccaccatggctgctgtcgcttccccttccgagtatgaggacccaacaggaatcaccatgaaaggtgtgaaaatttcgggccgtccactttacctcgacatggggtgttcctgatgactatgaatgtgaggttatcgaaaatgatgctcctattcccaagcatgttcctcagcaccgacctggtcctcttccagaggagttttacaagacgctagaagctctttcaaagaaagacgagcctaaagtcacctccggagatccaaag

SEQ ID NO: 29208 - DNA, 442 bp, Gossypium hirsutum
  Clone ID: LIB3148-024-Q1-K1-C6
cggccttttccccagcaaccattgaggcctccacaaggccaaacacaaatatcgtttggggtaaataccaagtccgtgttatcgcctaaggcacaagaaatacctacagcagccagtctgcatcgcctatgattgtttggtttcacgtagctgtggcaactcgagaacaagctcaacaagcaacacagttggtttcatcagttcctacactgccatcacaacgggacacagatttcttctgctcgtaatcgccaaaaatcgtctctggtttgtggaagaaacgtgccttcaatctttgagcacatgcaccagccaccttttctacagcagatgccttgttattacaggagacccccatggaattttcaagggacgaggtttttgaggggaccagagctcttcatgtatgcctgaggaactaaagatattaattgtctgacag

SEQ ID NO: 29209 - DNA, 408 bp, Gossypium hirsutum
  Clone ID: LIB3148-024-Q1-K1-C7
cccacgcgtccgctcgtttttgaagtttacttccaaggttacaggcaggcatcttggtgggagagacggacaacggttccaccattttcaattgggttcttgttcttgcaaggatttctggtgaagctcttgggacgatttaatctttgtcttgaaatgaacgtggtctctgaaaagacatcggggtatttagtggacaatggcaatgcgaggaaggctctgttagtcatttggtgcttgtgttatgttgggttcataatttaagcattataaattgctgaaattatcattctggttctgctgtgaaaggatacctcctatgttactgggatttggatacgagtgtctatacaaatatctgtacggcacaaaaatgtttgcatggtttttaaaaattgtagtaaaaat

SEQ ID NO: 29210 - DNA, 383 bp, Gossypium hirsutum
  unsure (1)..(383): unsure at all n locations; Clone ID: LIB3148-024-Q1-K1-C8
gcccacctccgcccacctccggctttatattataattcatatatcaaccaaancgcttgtaattaacgtatttgcttgctaatgcttcttttccttgaattggttgggtcagtcttcggcatcatttttccaagacaacagcgtatctctagggaagttaatcggatttagacaacacagagaggatcaagcattttctaacgcaatcaacggggagagagtatcctgatccaatagaagctactgtcgggatgtctcccgacgtgacaacaattgccgattgagccaaggattgcatcctcttatactagctcacttgtaagatcaacaaagcaaagcagtgaaaccatttgtgtttgaggttgaatctaccatgatttagt

SEQ ID NO: 29211 - DNA, 259 bp, Gossypium hirsutum
  Clone ID: LIB3148-024-Q1-K1-C9
atttcctccaaagcttgtaatactttttctcaataaatcataggcacttccaaccggatacttactttaatactcaccttaccacaccaagaaatcttattgaggcatacctactaaacatatacaaaagatttttccagcataatctccagaaaatttattgcttatcaaatcatacttacattttctctcaagatactaaaaagaagacttctaaaaaaatcataaaatatttatgcttcatcttagaaagccaata

SEQ ID NO: 29212 - DNA, 299 bp, Gossypium hirsutum
  Clone ID: LIB3148-024-Q1-K1-D1
ccacccgtccggaagtttttaatcccaactttctgctaagtctaaaaggacattttctgatcgacaaaaggttaggttcatcattgcccagaaatgtgaaacgtttaatgtgattattacaaataaacattacatatgaatggttttattttttttacatttttgtgtgtgaaatgaaatgttcggtataatgctgacttgtggatatggcatgatttgtggtttgctctctcgttatataattaccaacaattcatggattttaaaaaaaaaaaaaaaaaaaaagggggccccccttt

SEQ ID NO: 29213 - DNA, 349 bp, Gossypium hirsutum
  Clone ID: LIB3148-024-Q1-K1-D10
gtttgaattccaagtgatactttgcactcttaaaaaaaaaaaaaaaaaaaaaaaaagaaggaaaaaaaaaaaaaaaaaaaaaaaaaaaaaaaaaaaaaaaaaaaaaaaaaaaaaaaaaaaaaaaaaaaaaaaaaaaatttaaaaaaaaaaaaagggggcgccctttttaaagaatcaaagtttacttccccttgcttccaacttattagtttttttttagggcccccaaatttaatttccttgcccgccttttaaaaacttcttaactggaaaacccttggctttcccaaattaaatccctttgaaaaaaatccccttttcccaagttggcttaataccaaaaaggccc

SEQ ID NO: 29214 - DNA, 249 bp, Gossypium hirsutum
  Clone ID: LIB3148-024-Q1-K1-D11
cccacgcgtccggaataaacttctgacagattatgcataccatatttccgctgccaaaggaagtggagagctgtgcttaaaacatatattctcttttggagcattacctcgggtgcctcttctaaaaaggcttggttacactgcttgatatttattgggtccattgcattggctaatacatgcgtatttatattgatttctgtatagacctttgaaaatactatttctgcaatatcctcacattgactt

SEQ ID NO: 29215 - DNA, 398 bp, Gossypium hirsutum
  Clone ID: LIB3148-024-Q1-K1-D12
agcatcaatcgaagatgaatgaatgatccaacctactgtgaaattcaagccgaaagcaggcttttatcatatcaggtataatttgagctttgccggtgatctctacctagttttgaagattctgcataataccctttttaagcaatcgtccactaaatgtgtatattatttagcgatatcgataccctttggaattagttgtatatttaccatataggctctttattcgcctatatatatatgtcacgggtgcctcttggttgagtgttgttttatgagcaggatatgttttgatgtgagaatatcgagttttccgatcctttataagtgaagcaggttgcttggctcgaattcgaagtcgaatatcaccctttttaaaggcaatggcagtgagtttg

SEQ ID NO: 29216 - DNA, 394 bp, Gossypium hirsutum
  Clone ID: LIB3148-024-Q1-K1-D2
gaacttccctgacactaaggctcgtattcttggtgccaaatctgattatctcccacctgtgcgcgaccacctaataaatggaactatgtatcgaataaaaacccgaatcacacatgggtgatcaatctactacgttgaaccgataaaaatttggtttaactattaaaggccttaaaaaatcaaggttttttttttttttttcaaaatttcatttgtaattaatgaaattttcacttttaatcccttagttttatattacaagaaaaaaaaaaaaaaaaaaaaaaaaaaaaaaaaaaaaaaaaaaaaaaaaaaaaaaaaaaaaaaaaaaaaaaaaaaaaaaaaaaaaaaaaaaaaaaaaaaaaaaaaaaaaaaaaaaaaggggggccgttttaaa

SEQ ID NO: 29217 - DNA, 311 bp, Gossypium hirsutum
  Clone ID: LIB3148-024-Q1-K1-D3
tcgaatttactctgtggaatcagacaaattacaaataacgtttggtaccctgtgtgctcgccgagtatttttgggtggctgtttattataatcaaaaacaaaattctctgattaattgagtgtaagcccgcattgtgggacaaaaatctccaagtataagcccttattctgctgattatatcttattgatttgcatttcatgattaagagggttctggatttgatgttccaatgtatgtttaggcaaatcttatgtcttttgtcttggaattttgataaggaggtggaaaattttgggcggcccttttttt

SEQ ID NO: 29218 - DNA, 407 bp, Gossypium hirsutum
  Clone ID: LIB3148-024-Q1-K1-D4
accgaaggcccaagttgtaggcgtgccacaatcaatcggaaagaacgccgataggaaggaaacgaggcagatggattttatggaggaatcagaaaactttgcaatgaggaggagatttccacatggaagcgcctttggccatctgaaatcctggagtaggcagcctgcatgcgaaaaagtcaccatcctttctctgcaaaaattatcaagtttttgctctacaaattgatgctcttggaaactgagatcaagttaaaagttgcatgaatgtggagtgcgtagtgaatgtaaaattcccatatttacatgccaatatagtatatcccactaccaaggttttgttgaaaaccatttggaattggaaaccccattgattatggaagaaatatgtataccttctagagctc

SEQ ID NO: 29219 - DNA, 298 bp, Gossypium hirsutum
  Clone ID: LIB3148-024-Q1-K1-D5
agccgtccggggcgaattatttggtgaatggagttggagaagaaggaacagtggtggttcttcctaggaatgaaaaagacggtgggaataatgggaagatggtcaccatcaccttgcctcaacatctattgctaaagcttaacaatgtacttcaaattgattggaatattgttatttaatttaaatattttctcatttcatttcttgtaatgcatgcgggttatcgtgtctgtaagagaataatgaatgtatggtgtctctgttgttatatatgaataacattctcattatcatattt

SEQ ID NO: 29220 - DNA, 100 bp, Gossypium hirsutum
  Clone ID: LIB3148-024-Q1-K1-D6
gcccgaaatcccagggccgaccacacccgtccgatcttaataaaattcctagtacttttcttgttcaaaaaaaaaaaaaaaaaaaaaaaaagggagggat

SEQ ID NO: 29221 - DNA, 103 bp, Gossypium hirsutum
  Clone ID: LIB3148-024-Q1-K1-D7
cggacgcttggggccactattttcatctattaccatccaaacttttatcaaaagtaagaaatgtgactgatttccattagggaagttcattttctttttctag

SEQ ID NO: 29222 - DNA, 415 bp, Gossypium hirsutum
  unsure (1)..(415): unsure at all n locations; Clone ID: LIB3148-024-Q1-K1-D8
cccacgcgtccggaaaatacagagtgcatgtatgcctttttcacatgcaaaaagcggactgcagctctaccttttattggctttgcttaggttctttttggaattagtataattctagtactccctttttacccctcgctttgcatcaagcttttaagattcaatgggctagagagccttgattatcacaaccgattgcggattttcatccatgaagtgcatttttttgggttttttctttctttcgtcttgcatcgactgcaaatgttgcctacgtacgtataaattacagtatgacagttgctctgtccatacagtttgattaatattacaggtagtattttctgcttntnanaaatatttaaaatataatatttttatttttaattattaaattattttttttttttttttt

SEQ ID NO: 29223 - DNA, 387 bp, Gossypium hirsutum
  unsure (1)..(387): unsure at all n locations; Clone ID: LIB3148-024-Q1-K1-D9
gtacgaattcncaatttcccgatgtatcttcaacaactgacttcaacgtcgtcgtgtctggccgtccgatgtacagaccttcnatatacccgaacgttggtcaacctggtcaccccgtagtccctcccgcaccccggacctcctctttcccttcctctttcgccggattgggcattagagttgttttgaaaccagattatcgaattactcctctgcctcaattttcgccgcaagatggggatattcgtcgaagcaatttccagtttgattttcagtttgagaggaaaatcttggctcaaccagatgcggaattcatgaatttgagccaacttgactttgtaaattattcttcggaacctacccaatcaactcctttcttcggtgcaa

SEQ ID NO: 29224 - DNA, 367 bp, Gossypium hirsutum
  Clone ID: LIB3148-024-Q1-K1-E1
aaaagggagtcttcaagatggagtcttcaaggcatgactgcacttgttactggtggaacgaaagggctcgggcatgcaattgtggaggaattagctggattcggagcgattgtgcatacatgctctcgaactgaaaccgagctcaacaattgcttactcgaatggaaagcaaagggttttcgggttacaggttcggtgtgtgatgtttcagatcaaactcaaagggagaatctgttaaacactgtttcctcagaattcaacgggaagcttaacatcctgataaataatgtcggaacgaatacaacgaaattggtgacggattacacggcggaagatgtttcgtttttgacgagcaccaacttcgaat

SEQ ID NO: 29225 - DNA, 371 bp, Gossypium hirsutum
  Clone ID: LIB3148-024-Q1-K1-E10
ctagccgatccgttctcttcacctcgacttttctgcatctccttgacccccgaccgagcagtccagcttgaaaatggcagcaaaatatattattggttctgttgcggcatcatttgctgttgcttatgtagctgataaacttgttgctgattagaagatttttggagggactacacccaacactgtttccaacaaggaatggtgggaagaaactgacaagaaatttcaggcatggccacgcactgccggtccacctgtggtgatgaatcccatcagccgccagaatttcattgttaagtcgggttctgaatgacacgtaatatttgcttgtattttagtcaaagtttcagtttgattctacattcgctgtg

SEQ ID NO: 29226 - DNA, 117 bp, Gossypium hirsutum
  Clone ID: LIB3148-024-Q1-K1-E11
aaagaatttactatatgtcactactcttcccctctcctcagattttggtggagaatgtatgatcataatatcataagtctagtatattaagaatggtaaccaacgtacttctttttt

SEQ ID NO: 29227 - DNA, 302 bp, Gossypium hirsutum
  Clone ID: LIB3148-024-Q1-K1-E12
gagggatgcgttaattcaagaagaggttaaggagtattttcgaattgcgtgtatgtgtagcagtgaaggatcgaaagaaaggcccgcaatgatacaagttgtagagcttttgaatcaaatttcgacttgaattttgcgttaggaaattttcttcttcccttttataagaatgttgtattatttggttcatgattctatctctaattggggataggatcatgtgaattatgtaaatagcttatcatcattttggctaataatcaaatttccattaataatgttgatgagaatacattttctcc

SEQ ID NO: 29228 - DNA, 413 bp, Gossypium hirsutum
  unsure (1)..(413): unsure at all n locations; Clone ID: LIB3148-024-Q1-K1-E2
ttccaaccctccagcataagccatccaacatgagtttttttgttgaccagatactcctcgaggtgagtgaaggtaagttacccaaagaagcatttaagaaattcgttctaggaaaatatttagcttttaaaacttgggctaacaaagaattcggataattaaaaaggcgccaaccctgcttggctaatagcgcaacattgaacttgtttaaacttctaaatcctaaaccacccaaatcttttggtaagcaaacatctttccacgcacaccaatggatcccctttttacttttatttttttgccaccaaaattttgcaataattccctccaaccctatacataaagttttaggaagaaaaaaacaagacattgcacaggttggtatagattgtaaaatggctntaatgaaaatt

SEQ ID NO: 29229 - DNA, 417 bp, Gossypium hirsutum
  Clone ID: LIB3148-024-Q1-K1-E3
gtttttagttactatccatttccctccagattatcctttcaagcctcctaaggttgcgtggaggaccaaggtcttccatcccaacatcaacagcaatggaagcatttgtcttgatatcctcaaagaacaatggagccctgcactaaccatttccaaggttctgctctcaatctgctcgttgctgaccgatccaaaccctgatgaccctcttgttccggagattgctcacatgtataagaccgatcgggccaagtatgaagccactgctcgtagctggacccagaagtatgccatgggatgacagtggttggtgtgtaatacctatcagctttcttatgtgttttggggaaagaaggaggtgttttttcttaaagtaacttgccattgtgctttggatatgggaaagatatggaacat

SEQ ID NO: 29230 - DNA, 418 bp, Gossypium hirsutum
  Clone ID: LIB3148-024-Q1-K1-E4
aggcgtccgcccacgcgtccggtttgataattattaccttatacaagtgctgtttgattttcctttttgaatgttgtcatggtgtataaatgttgagggttaaatattttagaattaaaagcaaattgacatgatatatatagcaattataatattatttaattaatattatacaattaatataaaatgaaattaaaagcaagatgtttgggagtatgattcggtacttttcaacgaaacccaagccgaaaatgaagccaatcgagttgaaaacgtcgcctgagcaaacgcagaccataagcagagtgtcacctttgacattctcaaggagcatgggcccctcaccgtcggtgatacttgggaacgaatcaaggtcagttgtttagtagactataatctgtattcattgggtatctat

SEQ ID NO: 29231 - DNA, 388 bp, Gossypium hirsutum
  Clone ID: LIB3148-024-Q1-K1-E5
cggacgcgtgggcatccaccaagattcatgctgcccctggaggtggatcttctctggatgacgttttcggtgggggacctggcggtagcaaatgagatcgaatgacttaatatatcttgataatggtagtattttggttgttgattcttagggaagccatagattccagatgttgctgttttcagatattatcacattaagcaatggaaacttaccgtcatgtagtgtaatattacagatcttgtggctattgttggtttattcgaagaagtctccagatagatgcgaaaacgtgtattgcagaactcagttactataaaaagcagtgttatatatttcatctgcaaaaaaaaaaattataaataaaatataaaaaaaataatttttt

SEQ ID NO: 29232 - DNA, 372 bp, Gossypium hirsutum
  unsure (1)..(372): unsure at all n locations; Clone ID: LIB3148-024-Q1-K1-E7
cccacgcgtccgcccacgcgtccgggattagcatggcaggactgagttcaaagacgggcgctcatctggctgatgcaattcatgatgcagttactcgtatgtcatagaaattgggcttagcacacacagcaggtcctcaatacacttgattgggaatcacatcaaatgagtatttgtttttcactttaccattcaataataactgtatttgaacaaaattgtagccctcaaaacactgaaagggcagaaagaaataaactcacttccacttccttaaaaaaaaaaaaaaaaaaaaaaaaaaannaaanttagaaaaaaaattaaaaaaaaaaaaaatatttattttttaaaaaaaaaaaaattaaaaataaa

SEQ ID NO: 29233 - DNA, 381 bp, Gossypium hirsutum
  unsure (1)..(381): unsure at all n locations; Clone ID: LIB3148-024-Q1-K1-E9
cccacgcgtccgcccacgcgtccgcttactcgttcgcccacgcgtccgcccacgcttgctgccactcgtccgtgaactatagatttgataacactgtttaattgtgctggagaattgtgttttacttgtaattaaagtgtgtttaattgtatgcttaaacttccatagttataagttttatgttttactccattttcaggttgttgggaaaaaaaaaaaaaaatataaaattatattaaaaaaaaatatatttaattaaaaaaaaattatatttttaataaataaaaatataatttttttttaatttttaaatatatganttttttttaaattaaattttaatttttttttttangttattaaatattttttttttttttt

SEQ ID NO: 29234 - DNA, 452 bp, Gossypium hirsutum
  unsure (1)..(452): unsure at all n locations; Clone ID: LIB3148-024-Q1-K1-F1
acccggaaanaccgggccggcccaccccgtccaaccaataaaagtgcttggataaagcttaatgtggatcagactggtttctatagggtgaggtgtgatgaggaacttgccgctagactccgctatgctatagaaaacaaatacttgactccaactgacagatttggcattcttgatgattcatttgcactttgtatggcacgccagctgcctttgacttccttgcttaccttgatgggtgcctacagagaggaacttgactataccgtgctgtccaacttgattagtataacatacaaggttgggaggattgcagctgatgcaagacctgagctaatggataacatcaatcaatttttcattaacattttccaatattctgctgagaagctcggttgggatgctacacaaggtgagagtcatctggattcaatggtgagaggagaaatttt

SEQ ID NO: 29235 - DNA, 423 bp, Gossypium hirsutum
  unsure (1)..(423): unsure at all n locations; Clone ID: LIB3148-024-Q1-K1-F10
cccacgcgtccgcccacgcgtccgggtgctgtgggtttgtgcaatgctggtaagctgagggttgatggaagagggtgcaaatgcggaagaaattagcaatggagcaatgggaaaaaatcttgaacaaccatgcaaacaagggatgggtaattgtgtgccaaaaccctcctctggttataatagaggatgtgaagaagtcgaaagatgccgacatggtccctaattcaacatccttcatttaccacaatcggaaaatgcacataaaataccacgcacaagattggcttctccctctcatctaatctataataatttacgagcaaaataaaaggaagaattagttgtttcgtatgttgatttgttccttattgttgtgacccacgcatgccagaaacatgntcctgaataaagtattttattttt

SEQ ID NO: 29236 - DNA, 422 bp, Gossypium hirsutum
  Clone ID: LIB3148-024-Q1-K1-F11
cccacgcgtccggaagcaaatggcggtgaagagaaaaagggcaaggttgaggaacaggggaacgagcagctagtgaaagacacttactctagtaaaaccagattatatacagatcagtgcactgcatttgcatcaaatcttaacattagggcaatagatgaagatctaaagcaattctttagtgatgttggtggagtcactgcgattcgaattctgcatgacaagttcactggaaaatcgagggtctctctctctgtctctctctgaatttgtgtatgccgacatgcatgtgccctcttaattatttttgtgtccgtcactgccatgttagaaatgaaacatgaagctgtcttcattagctgcttactagatgtcagtttggtgctcaagctgcactttccatatcacaatctttattaagt

SEQ ID NO: 29237 - DNA, 418 bp, Gossypium hirsutum
  Clone ID: LIB3148-024-Q1-K1-F12
gcctagattgctacctgatgtcaccgatttgacctcattctggagactcttcactgtagtccctgttttagtcacggcatatatctgccactacaatgttcacagcatagataatgaactagaagactctacccagataaaaccagttgtgcgtacggcacttgctttatgctcaactgtttacataatgacaagctttttcggcttccttctatttggtgattcgacattggacgatgtgctagccaacttcgatactgaccttggcattccttatggctccctgcttaatgacgctgtccgtgttagctatgctgctcacctcatgcttgtatttcccatcgtcttctacccgttgcgactcaacatggatggtctcctattcccatctgcaaggccgctagctcttgctaatatg

SEQ ID NO: 29238 - DNA, 229 bp, Gossypium hirsutum
  unsure (1)..(229): unsure at all n locations; Clone ID: LIB3148-024-Q1-K1-F2
ttttcnnacaaaaaaaaataaaaaaaaagaaagatttttaaatcccctctaaactacccaacttacttacacatacattcttccctataacttttttatttttcaacctaaattaaatttactccccttctatttacacactaactactttaaaaaccctttcttaccccaacttaacaccacttatacaaaatccccttttcccaactttcctaatttccaaaaatcc

SEQ ID NO: 29239 - DNA, 418 bp, Gossypium hirsutum
  Clone ID: LIB3148-024-Q1-K1-F3
tgatgcttgtgtatgttacaaagttcttttggtgggaagctggttactggaacacaatggacattgcacacgatcgagctggattctatatttgctggggttgcttggtttgggttccatccgtgtatacttcaccagggatgtaccttgtcaaccatccggtaaaccttggaatgcagcttgcactatatattcttgtcgttggcattctttgcatatatatcaactatgattgtgataggcaaagacaagaatttcgcagaacaaatggcaaatgcaaaatttggggaaaagctccatcaaagattgaagccacctacacaacaacatccggggaaaccaaaaccagccttcttttaacatcaggatggtggggtttggctcgtcatttccattacgtgccagaaatattagctgc

SEQ ID NO: 29240 - DNA, 442 bp, Gossypium hirsutum
  Clone ID: LIB3148-024-Q1-K1-F4
cccggggcgagaccacacgcgtccgcccacgcttccggcagtttcctttgagtgaggacaaggaaagggaagttaagcagagagtgaaggaattggagcaggttcttgatgcattgaaggaagatttagaaccgctggaaaagctggttagggaagtgttccataggattgttcgaagccggactgaagggcttgattcttttgcaaggggacacaaccctgagtgaaacctctcttgttgtgttggttgatttacaccattagtgtcaaatgtgcaacttgcaaatatgtctgtttttggctttggggaagtcatggatcatgaagatgaagatggataaaagggcttgaggtatgcaccaccaaaaaaaaaaaaaaggggtaagaaggaaaaccataagaaaatagagatttgtttgtatttatcaccatatatcagtgt

SEQ ID NO: 29241 - DNA, 78 bp, Gossypium hirsutum
  Clone ID: LIB3148-024-Q1-K1-F5
ccgaaaaaaaaaaaaaaaaaaaaaaaaaaaaattaattaaaaaaaaaaaaaaaaaaaaaaaaaaagaaatttttaaaa

SEQ ID NO: 29242 - DNA, 408 bp, Gossypium hirsutum
  Clone ID: LIB3148-024-Q1-K1-F7
cccacgcgtccgatttaagcaattggaaactaatgtgagcttgaaagaatccgatgcctggcctgctgagccacaagatgcttacggcttggagaagcttgcaacagaggagttgtgcaagcattacaccaaagactttggaattgaatgtcgcattggaaggttccacaacatttacggcccttttggaacttggaaaggtggaagggagaaggctccagctgccttttgcagaaaggctattacttccattgacaagtttgagatgtggggagatggtcttcagactcgatctttcactttcattgatgaatgtgttgaaggtgtacttagattgacaaagtccgatttccgtgagcctgtgaacatcggaagtgatgagatggttagcatgaacgagatggcgga

SEQ ID NO: 29243 - DNA, 367 bp, Gossypium hirsutum
  Clone ID: LIB3148-024-Q1-K1-F9
ccgccattttgttcaaacgaataatcaaatggaagttactaattaaagagctgctggtggttcatgattgagactgagtcctaaagcagttcaaatcggactctctgaaatgaagaatacacttgctatgttctgagaggtaatctaaatatctatatatctatgaagcatggacacggacacataatatgggtacgacacgatacagaacacggccacatggcaatttttaaaaaatgaggacacggatacggtaggatagcaataaaaaatattaaaaatattatatatatttttatgtgaaaatacttaatgtaaatgaaaatattgatatttttcattaatatataatcgacttttttccatt

SEQ ID NO: 29244 - DNA, 262 bp, Gossypium hirsutum
  Clone ID: LIB3148-024-Q1-K1-G10
tttttgaaaagaacctggtttttattattaaaagggttaaagaatccctaagttggggagctttggtggggggtgggtggcaaggggaacctaatggcccttggattttaaaattccctttggtggatgccttaaaaaaaaaaaaaaaaaaaaaaaaaaaaaaaaaaaaaaaaaaagggcggacaatataaaaagatcaaaaataacatacacatacatgcaacgtcatagctcttgtatagtgaaacctaaattcaattcg

SEQ ID NO: 29245 - DNA, 322 bp, Gossypium hirsutum
  Clone ID: LIB3148-024-Q1-K1-G11
cccacgcgtccgagatccctgatccaagcgtcattaaggaatttgcagtgaagaacgtgaaggagatcgatgactatcttcacggtaaggcttagagaggccaggccatgccatgccatgccatgcatgatcctagccctgtttaatggattctctcatgttttcttagtaataaaataacatgcaaggatcccacttcagaatatttgtctaggatccatccttaattagttcatcttgttgagtggtgacttcttgctgcaaagtaatcctgttgctttgtattttcaatattaatttatgtattgccatgggttttctt

SEQ ID NO: 29246 - DNA, 427 bp, Gossypium hirsutum
  Clone ID: LIB3148-024-Q1-K1-G12
gtcccatcactttgcctccccttgtgaaacctccaatcaagttgccaccggttgggcctccaatagttaagccacccattgacctccctccggttacagtccctccaattaacctccctccagggacggttcctccagtaactaagccaccaagtgggaaaccctgcccaacaccaccaaccaaggacacttgccccattgacacactgaaattgggtgcttgtgtggatctgctgggagggttggtgcacattggactaggtgacccggttttgaatcaatgttgtccggttctttcaagacttgccgagctcgaagctgcggtctgcttgtgcaccaccctcaaacttaaagttctcaaccttaaaatttatgtgccactggctcttcaacttcttgtcacatgtgggaaaacacccccttctgg

SEQ ID NO: 29247 - DNA, 75 bp, Gossypium hirsutum
  Clone ID: LIB3148-024-Q1-K1-G2
cgtccgggattttaattgtgttattaattaattattttaaattttaaaaaaaaaaaaaaaaaagggggggaaaaa

SEQ ID NO: 29248 - DNA, 322 bp, Gossypium hirsutum
  unsure (1)..(322): unsure at all n locations; Clone ID: LIB3148-024-Q1-K1-G3
ttaccccgttcttttccgcggagttaatggaacagttgctcatgaattcattatagacgtgagaggttttaagaatactgctggaatagagcctgaagatgttgccaaacgtcttatggactatggattccatgctcctacaatgtcgtggcctgttccgggaacgctcatgattgaacctactgaaagtgaaagcaaggcagagctggaccgattctgtgatactcttatctccattagggaagaaattgctgaaatcgagaatggaaaggctgatatccacaacagtatagtctgcttaattactagttattgcatcgna

SEQ ID NO: 29249 - DNA, 414 bp, Gossypium hirsutum
  Clone ID: LIB3148-024-Q1-K1-G4
cccttccgaatttccaaaaaaaaaaaaaaaaaaaaataataaaaaaaaaaaaaaaaaaaaaaaaaaaagaaactttttaaaaaaaaaaacccaaccaaacacccccaaacaaacaaaaaaaaaaaaaaaaaaaaaaaaaaacaaaaaaacaaaaaaaccaaaagggccccccccccctaaaaaacccaaaaaaccctccccttcccccccactaaaaacctttccaaaaatccccccaaaaccaaattccctacccccttaaaaacccccaacccaccaaaaaacccctcatttccccaaccaaaaaccccattcaaccacccccccttccccccccttcccaaaaaccaaaaaaccccccccctactcccttcccaaaaaaattcccatccaaataaccccaaaacccccccc

SEQ ID NO: 29250 - DNA, 360 bp, Gossypium hirsutum
  Clone ID: LIB3148-024-Q1-K1-G5
aagaggctttattgatagcttgtaaaatacaatgttttatacacttttcatccccaatggtgagtgcaactttgtgtggatgatagcagccataaagctctgtttccagatggtggaaacctaaagcagtgctggcagcttgaaatacattggagaagattgagatgattcaatttgtttcatacttttctggacagaaagttgtcaaacagcaaaaggtaaacttgttcattatttgatctaaatgaaggaaatgacattcgagatgactagagaatgtggtgttttgtttatcacttctgtaaatatattttcagcagttgtaaaaaactccattactgaaaatatatgatgatcatt

SEQ ID NO: 29251 - DNA, 426 bp, Gossypium hirsutum
  Clone ID: LIB3148-024-Q1-K1-G6
cggacgcgtccgcccacgcgtccgcccacgcgttcgcccacgcgtccggaaatagcggagtggaaaacggcgccacctctctctagcgacgtagaaatcggcagttacctctttgattttctcttcgccgctcaagacgcctccacttcgttgctcctctgggtggtgaccctcctcgactctcatctcgatgttctccggagagttcgagaggaagtgtcaaggatttggtcgccggagtcggatactttaataagcgcagagcaactgagggaaatgaagtacactcaaacagtggcgcgtgaggttataagatatcagcccccggcggcgctagtaccgcacattgcgatgaaggatttcccgttgaccgagtcgtacacgattcccaagggcacgattgtgttcccttcggtttacgaatca

SEQ ID NO: 29252 - DNA, 376 bp, Gossypium hirsutum
  Clone ID: LIB3148-024-Q1-K1-G7
cccacgcgtccgcggacgcgtgggttgatgtactctttataaatttgatagaccaagtgggacattgagagcaatgatggatttgtagtgcatttcgcgagttaaaaaaaaaaaaaaaaaaaaaaaaaaaaaaaaaaaaaaaaaaaaaaaaaaaaaaaaaaaaaaaaaaaaaaaaaaaaaaaaaaaaaaaaaaaaaaaaaaaaaaaaaaaaaaaaaaaaaaaaaaaaaaaaaaaaaaaaaaaaaaaaaaaaaagggggggcccctttaaaagaaccaaagttaattaccccggccttgcaaataaaaacttttttttttgggcccccaaaataaaattaaggggccggcgtttaaaaacgttggacctggaaaaac

SEQ ID NO: 29253 - DNA, 421 bp, Gossypium hirsutum
  Clone ID: LIB3148-024-Q1-K1-G8
ctcaagttcctcgccgtctccgccgccccttgtggtcattgtcgccagttcctccaggagctacgcgccgcccccgatgtcaacatcctcataaccgccaccgagaaggaaaaagaaaacaaaacgatcaacaatcgtaacgataaagacatgcaatttgctcctttatcttattttttacctcacaggttcggccccgatgatttgctggaaaaagacgtccctcttctcctcgagcctcaccgaaacggcttgtcgttttgctccgatacccgcaacggcgaaatcaacggcgacggtgacgattcaaagtacgcggctctggaagcggcgaatgcatcccacgcgccgtacagcgggtgtccatcaggggtggcgttagtggacgtggaagggaagatatacaaagggtcttacatgg

SEQ ID NO: 29254 - DNA, 352 bp, Gossypium hirsutum
  unsure (1)..(352): unsure at all n locations; Clone ID: LIB3148-024-Q1-K1-G9
tccgccccctatgtcaacatcctcataaccgccacctanaaggaaaaagaaaacaaaacgatcaacaatcgtaacgataaagacatgcaatttgctcctttatcttattttttacctcacaggttcggccccgatgatttgctggaaaaagacgtccctcttctcctcgagcctcaccgaaacggcttgtcgttttgctccgatacccgcaacggcgaaatcaacggcgacggtgacgattcaaagtacgcggctctggaagcggcgaatgcatcccacgcgccggacagcgggtgtccatcatgggtggcgttaggggacgtggaagggaagatatacaaagggtcttaca

SEQ ID NO: 29255 - DNA, 99 bp, Gossypium hirsutum
  Clone ID: LIB3148-024-Q1-K1-H1
catggggccaattcgttttacagcacaaaaatgagtccatctccttatataaggcaagaataattgcagatttgatttatttaaaagattcaatatctg

SEQ ID NO: 29256 - DNA, 232 bp, Gossypium hirsutum
  Clone ID: LIB3148-024-Q1-K1-H10
cccacgcgtccgcaaagactctgcaccatgtaaggagatcccatccctacaactgattggccaaactcttagctatgctagggagttggagcggattgtgtaggcaagttgctatccagtggttgctttttctgctcttaaaagaaaattcatataacttgccatcattttgttgttctggatttttactttttacattcagtatgcaacttaaaaaagttgtttccatttc

SEQ ID NO: 29257 - DNA, 168 bp, Gossypium hirsutum
  Clone ID: LIB3148-024-Q1-K1-H2
cgtccgcccacccttccttccttgtctcccctaaatttaataaacgaataccaagttcgatttcatgttgattctgtactttaagttgaatccataatatagcatatagacatcgaactgaattgctgttgaacttcctagtaatattttcatgttcaagtttctttt

SEQ ID NO: 29258 - DNA, 404 bp, Gossypium hirsutum
  Clone ID: LIB3148-024-Q1-K1-H3
gctcttcctcaagttcctgttaaaagtggaagtggtggatcctggctcggaggcataggctctaccatagctcagggcatggcatttggtactggaagtgctgtacctcacagggctgtggatgctgtgatgggtcctcgtactattcaacatgaaactgtggtttccgaggctgcagctgcccctgcaccagcaactacttccagtagtttagctggcactgattcatgcagcatccactacaaggcattccaggattgcctgaatagctatggaagcgaactcagcaagtgtcagttctacatggatatgttgactgagtgcaggaagaacacagggtccatgttgggtgcctaaaagtttattcaccattttccttgttatgctattgaaattgtcagctt

SEQ ID NO: 29259 - DNA, 327 bp, Gossypium hirsutum
  Clone ID: LIB3148-024-Q1-K1-H4
cgtcggcccacgcgtccggccgaggttcaacgaaaatatgaagaactccagcaacaacttagaggggaggcagcagagagggaggcagcggctgcagcgagagaggcagaggcacgagcgatggtagcagaacagagcaaaaagtacgatgacctccagctacagcttcagcagatgatgcatatgtttcaacaatcgcaaaagccgccgtcttagacattagttttcttattgtaagaatgtttttaagttttgtcacgtttaacattattgtaaaaatattttaaattatactttatttattaattatatcatatatctttagtt

SEQ ID NO: 29260 - DNA, 321 bp, Gossypium hirsutum
  Clone ID: LIB3148-024-Q1-K1-H5
gctcggaccggaatggaatggccggaccgacccgtccgaaatcggagtattggtcggaaaagggggattttatggaaatgtgttcagaatgaccccgccgcgctgctttactaaagaagatgcagatttcctagtagatgcaatggattacaccatgggcaagatgtaagtaaagcttccctcaagtcttaaatgtagataaaaatatgttatgtaattgtgattatatcacaagttgatccatttatgcactctgcttctataaggttaatagactgtgctgtttggatacccttttattttttaatgcttattttggtg

SEQ ID NO: 29261 - DNA, 261 bp, Gossypium hirsutum
  unsure (1)..(261): unsure at all n locations; Clone ID: LIB3148-024-Q1-K1-H6
cggtgagagaatcctaatcccccgagctacaacggaggcattggatgttcgtgagtaccctgtttacacctaaggttgacaaacgtgggcatgtaattctaggaaatatgccagatcgttattgcaacttttgtgggaagctgtaaactccatagtttgctgtaaattttttagattcggcctgtaataaataacttctagaatctagtaaagaattctgtaatagtttataggcactacgtacagaaaactctcccgnct

SEQ ID NO: 29262 - DNA, 207 bp, Gossypium hirsutum
  Clone ID: LIB3148-024-Q1-K1-H7
atttaatcttcagattagcaaaagtaggaatgtaattccaagaaattcctcatattgtgattttgactttcgaggggatttgtaaattccatagttttttgtaaaaggctttattttcggtttgtaaattaataggattttgagtaccctcctgtaatagtttgtaggcgcttctaaccgaaaaattaccagatggttctcctctcc

SEQ ID NO: 29263 - DNA, 421 bp, Gossypium hirsutum
  Clone ID: LIB3148-024-Q1-K1-H8
ctactggtctgaccactgaagttaagtctgttgagatgcaccatgaatccctcccgggggctttccctggtgacaatgttgggttcaacgttaagaacgttgctgttaaggatcttaaacgtggttttgttgcttcaaactccaaggatgatccggccaaggaagctgccaacttcacctcacaggttatcatcatgaaccaccctggccaaatcggaaatggttatgccccagtcctcgactgccacacctctcacattgctgtcaaattttctgagctgttgaccaagattgacagacgatctggcaaggaactcgagaaggaacccaagttcttgaagaacggtgatgcaggtatggtaaagatgattcccaccaaacccatggtggttgagactttctccgaatacccaccactcgg

SEQ ID NO: 29264 - DNA, 67 bp, Gossypium hirsutum
  Clone ID: LIB3148-024-Q1-K1-H9
aaaaaaaaaaaaaaaaaaaaaaaaaattttttaaaaaaaaaaaaaaaaaaaaaaaaagaggaatatt

SEQ ID NO: 29265 - DNA, 266 bp, Gossypium hirsutum
  Clone ID: LIB3148-025-Q1-K1-A1
gttaaccgggagcatcgggtcaaactcttcttcgttatcaaggtaatagctacgaatgttcatcgactacccggaaatggggtggcctttctttgaacaatcactgacttctcataaacagttagggtattctttgtgaaggctaggaaagatggatcttgatatttttatttattttccattatctaatttatgttatgtgtaaatatatgtttttataattgaattttatatttaataaatcgcttccaattgttattgatttt

SEQ ID NO: 29266 - DNA, 319 bp, Gossypium hirsutum
  Clone ID: LIB3148-025-Q1-K1-A10
cgatgaccggagtttcaggtcaatctaccaggaagaagatgaacaaggtttcaaaggtcttaaagtcagcaaagacctaatggaaatcggcggcgacgccctcaaaaccaacatcacaacattgggtccgctcgtcctcccattctccgaacaactcttcttcttcgccaccctaatttggcgccatttctttggcggcgataaatccaaaacctccctatcaccgtcgtcgaagccatacatccccgactacaagctcgccttcgaacacttctgcgtccacgccgcaagcaagacggtgctagacgagctgcaaaaa

SEQ ID NO: 29267 - DNA, 319 bp, Gossypium hirsutum
  Clone ID: LIB3148-025-Q1-K1-A11
gaaggatttacggtggggctaagagaaatggaagccgtcctcgccatttctgtaagagcagtggatctgttgctcgccacattcttcaacaattgcagaacgttaacatcattgatattgatcctaaaggtggtaggagaatcacatcgaacggccaacgcgacctggaccaagtagccggaaggattgcggttgccatctgagtaacttttaatacccaaatttgcttgtttttgctgttaagcaattttcattttaggtaccgagagagtgaagacatggaatatttttattttagggtttggtgacttgttctctc

SEQ ID NO: 29268 - DNA, 290 bp, Gossypium hirsutum
  Clone ID: LIB3148-025-Q1-K1-A12
cccacgcgtccgcccacgcgtccgcccacgcgtccgaaaaaaaaaaaaaaaaaaaaaaaaaaaaaaaaaaaaaaaaaaaaaaaaaaaaaaaaaaaaaaaaaaaaaaaaaaaaaaaaaaaaaaaaagggaaaaaaatataaaagaaaaaaaattaaaaaaaaagggcatacaaaaaggggggtcttttttagtgtgtccctttttttattcggttggttgcatttttaaaactttttttttgggaaaacaatggattttcatagctggttgttttagaaaaaaatttttgt

SEQ ID NO: 29269 - DNA, 285 bp, Gossypium hirsutum
  Clone ID: LIB3148-025-Q1-K1-A2
cccacgcgtccgaaaaaaaaaaaaaaaaaaaaaaaaaaaaaaaaaaaaaaaaaaaaaaaaaaaaaaaaaaaaaaaaaaaaaaaaaaaaaaaaaaaaaaaaagaaaaaaaaaaaaaaaaaaaaaagggggggggaaaaaaaaaaacagaagcttattacgggaaaagggaaagaaaaagggggggtgttgggttaaaagaaaaaaaaattcaggggggggggaaacaaaaaaaaacgggttggaaaaagagaaaggcaggacaaaaccaattgggcctggcaaaaa

SEQ ID NO: 29270 - DNA, 333 bp, Gossypium hirsutum
  Clone ID: LIB3148-025-Q1-K1-A3
ggctatgatgtcttccttgggaattttcgtggcttagtctctagagagcatgtggataaaaatatctccttaaggcaatattggcgattctccataaatgaacacgggacagaggatattccagctatgatagagaagattcacgaggttaaaactgctgaattgaaacttagccatcccaatcaactccagagcgccaatcagcttgcaactgcgtcaaagctttagctgccagcatttctggcatcaactatgaccttacgaacaaactcccaggcatgtgtggggtgcacagccctttcaagatcagccccagcactaactgcaaaagtg

SEQ ID NO: 29271 - DNA, 263 bp, Gossypium hirsutum
  unsure (1)..(263): unsure at all n locations; Clone ID: LIB3148-025-Q1-K1-A4
taattcttgaatgttaaacatagaatgaataactcatattctagtattggttcctttgatcctcatcgtttggcccattggtcaagggtgtttattctcatacccaatttatgggatcaaataatgggaattgtctactagtggtgtgtgggggaatgatttctaccaaaaaaaaaaagagagttatggttcctctctctccccaccctggttgtaatagtaccatgtaatgtatgtatatctttgtggcagtccagtccang

SEQ ID NO: 29272 - DNA, 303 bp, Gossypium hirsutum
  Clone ID: LIB3148-025-Q1-K1-A5
cgaagatctctctcctatatttctacagtctgtatatttcgcggccaccaacaaccaccgaagaaaatgacttcgaacgcggcggtgccgttctggcgtgcagcggggatgacatatatcacctactccaacatatgcgccaacctcgtcagaaactgcttgaaggaaccttataagactgaagccctttctcgtgagaaagtccatttctccatctccaagtggactgatggaaagcctgaaaagcccactatccgctcagattcacctgaagaatgagttgcgtggttggtcattgaagtc

SEQ ID NO: 29273 - DNA, 308 bp, Gossypium hirsutum
  Clone ID: LIB3148-025-Q1-K1-A7
aaaaaaaaaaaaaattttttaaaaaaaaaaaaaaaaataaaggggagataaaaaaaaaaaaaaaaaaaaaaaaaaaaaaatggaaaatagataattaaaaaaattaagaatttaaataaagaaagagtaaaaaaagttacttgagggataaatggattgtggttttttgggagaacatttggagtttgctattttattctgtttgtgacggatctttcttttattgagatggagtaattaccaagtgttggattgttacatgtacttataaaagaacgtgagctgtgattagacaatggtgagacagg

SEQ ID NO: 29274 - DNA, 111 bp, Gossypium hirsutum
  Clone ID: LIB3148-025-Q1-K1-A8
aaaaaaaaaaaaaatttttaaaaaaaaaaaaaaaaaaaaaaaaaaaaaaaaaaaaaaaaaaaaaaaaaaaaaaaaaaaaaaaaaaaaaaaaaaaaaaaaaaaaaaaaaaaa

SEQ ID NO: 29275 - DNA, 320 bp, Gossypium hirsutum
  Clone ID: LIB3148-025-Q1-K1-A9
acataacgatcgggttttacactggagaccacggagacggcgagccattcgatggggttttagggacgttggcccacgctttttctccaacgagcggaaggctccatttggacggggatgagaactgggtagtttctggtgatgtgacgaaggcatcggtgtcgacggcggtggacttggagtcggtggccgttcatgagatcgggcatctgttgggtttggggcattcgtcggtagaggatgcgattatgtacccatcgataacttcgcggacgaagaaagtggaactggcggacgatgatatccaagggattcaattg

SEQ ID NO: 29276 - DNA, 227 bp, Gossypium hirsutum
  Clone ID: LIB3148-025-Q1-K1-B1
gttgctttgaacagttctatgtttggtgtggtcacactcacagattgatgatctttggttatggcggatgagtgactcatccaccattactacaagctttgttttggttggttttttttttttaattttttttccaagtcatcatatcttgtaggcctctccttgtatatgaattgtacaattgcaactactctgtttttataaatgaagcttgaaattttaccttc

SEQ ID NO: 29277 - DNA, 320 bp, Gossypium hirsutum
  Clone ID: LIB3148-025-Q1-K1-B10
aggaaattaaagactttcttaaaaaaaaaaaaaaaaaaaaaaagggaaaaaaaaaaaaaaaaaaaaaaaaaccaaaaaaaaaaaaaaaaaaaaaaaaaaaaaaaaaaaaaaaaaaaaaaaaaaaaaaaaaaaaaaaaaaaaaaaaaaaaaaaaaaaaataatttagaaaaaatgaaatatttttgtgtgggtttaaatttaaaaaataaaaagggttaaaaaaaatttaaaaggggggtttttttttttggttgaaaaaatttagggtggtgtgatggggggtttttattttttttagtgaggaagattttttttttttt

SEQ ID NO: 29278 - DNA, 297 bp, Gossypium hirsutum
  Clone ID: LIB3148-025-Q1-K1-B11
attggtatacttcaaagctcatctgtcaacccagagccccttctctccgccgaatctcctttttctcccgtaaaaatgtctctggtggccaacgaagattttcagcacattttgcgtgtcctgaacaccaacgttgatggaaagcagaagattatgtttgctttgacctccatcaagggtatcggaaggcgtttcgccaacattgtttgcaagaaagccgatgtagacatgaacaagagggctggtgaactgactgcacaggaattggacaatctcatgacgattgtggcgaacccg

SEQ ID NO: 29279 - DNA, 293 bp, Gossypium hirsutum
  Clone ID: LIB3148-025-Q1-K1-B12
ggtgactgcaccaacttcgagatcgatccatcattcggatacgaagcttctgagctctaccctgaagtgaaatacaccactgtggaagaaggcctcagtcattttgtttgagaaagctagaaatcaaatcagatcattgttattaaactgataccagtaataatgtaaaaactgtcactgagagatttgtgcagaggacttgaggattctgtgtgtacgtatgtgtgtgtgtcataaatttctcgttactatcattcaacataatgccaaacatgcttttcttcttgtgtcgt

SEQ ID NO: 29280 - DNA, 271 bp, Gossypium hirsutum
  Clone ID: LIB3148-025-Q1-K1-B2
gcaaatcaatcgaccttgtttgggagtgctcttttggaaaatccaaacaatacagaaagacatgagatatatcttcctccccagatctacatcgaggacaagcagcagtgtcggctatttgtttagatcgcaaattaactagagtaggcatatagttctatgatgctctccaaactataatagtaatctttgaggggagctgtaaattccagagctttttgtagaaattttttaaatcggtttgtaataatcagtcgttaggattcgagct

SEQ ID NO: 29281 - DNA, 294 bp, Gossypium hirsutum
  unsure (1)..(294): unsure at all n locations; Clone ID: LIB3148-025-Q1-K1-B3
cccacgcgttcgnaaaatatttaaaaaaaaaaaaaaaaaaaaaagggggaaaaaaaaaaaaaaaaaaaaaaaaaaaaaaaaaaaaaaaaaaaaaaaaaaaaaaaaaaaaaaaaaaaaaaaaaaaaaaaaaaaaaaaaaaaaaaggggggggcggttttaagggatcaaagtttatttccggttgtttggaagttattattttttttttggggccaccaaaattaatttaatgggcggggttttaaaaacgtggggattggaaaaaccttgggtttcccaaatttaatggctttg

SEQ ID NO: 29282 - DNA, 309 bp, Gossypium hirsutum
  unsure (1)..(309): unsure at all n locations; Clone ID: LIB3148-025-Q1-K1-B4
gtgcccacggcgcctttagggcccctgaggatctcttcttggacgaacaagaacaagtatccaccggtttcttgtcctttctaggtgggctgccaccaatgccgncgttgccgctgcccctgctgttgccgctcgtgtctgaatccgatccacggttccgcctctttgaatcttttcctcttggattacagtaatggttcacatgtcattgattcaatttcagttttttctttaagaacaataaaattcctattggggaatttatagctgtagtttattttttacgaattagagtttatattaacattt

SEQ ID NO: 29283 - DNA, 184 bp, Gossypium hirsutum
  unsure (1)..(184): unsure at all n locations; Clone ID: LIB3148-025-Q1-K1-B5
ccgcccacgccgnntccggtctcgagtgaatggggaatggnnngcccctcttccaatgctgcttagtttgggctttattttttattagttgagaaatgtgtaatccaaatctnttcgcattnntgttgttggaatttnccttgtaaaacannagttacttaaccctaaatgaatccattttcac

SEQ ID NO: 29284 - DNA, 325 bp, Gossypium hirsutum
  Clone ID: LIB3148-025-Q1-K1-B6
aacaaagcaaataataacaatcaccgccatcattgttgctgccgcctcaatgagcgtcgtcatggctgccggtgcaccatctcctgccccttcagccggtggttctagtcctagctcctctcctggttccgccccagcatcaggaccggattccagcgtggctgccgctaccttgcctgttcttggatcattggcctccattgtttctttgttttcttacatgctgcaataagttacatgtatgaaaaatgaacatgtcaacgaatgttttattttattcttttcgaaagaaacatgtgatgaattttgaaaaaattggaataaa

SEQ ID NO: 29285 - DNA, 277 bp, Gossypium hirsutum
  Clone ID: LIB3148-025-Q1-K1-B7
cttttagatcatatgcatgattttcaggattgagctggtaaaagaaatggctaggggaagtacaatatcattttctctttcgttctttgggtccattgtcattcatgtccccctcccctccccccaaaactctaccgactttattcttaatcaagtgatgtaagtgtttggtgtagagacaagggatgtgaagatgttaacttcattttttttttcttttttctttttatttccgaacgacccattatttataacgttatatacaagtttctttctt

SEQ ID NO: 29286 - DNA, 331 bp, Gossypium hirsutum
  Clone ID: LIB3148-025-Q1-K1-B8
cttagacattatctcatctcccttactctccctttattctccagccgaaaggctcatttcaacccaaccatttccaaaatctgatcgtgaccagcggagcaaggcccaccgacggtgtgaacgcgatataactccggtcatgaagacgcggaggagggcgacgtggtacgtgggtgcgaacgtggagcagggcgcgcgtgtatggcggaggcgatcgcggctgcggcgcaaatgaggcttctagtgtttagggtttgctgaaaagtgttttgggtttgcggtattttggggctgtttgggttaattgtttttgtaattttggaattttttt

SEQ ID NO: 29287 - DNA, 325 bp, Gossypium hirsutum
  Clone ID: LIB3148-025-Q1-K1-B9
cccgagtatagtggaaaaatggttaaagtcaatcagtctgttaatttatccattatttgttcaagaataacattgtttcttttgagctatgcatgggatgttttcttttgatcagtaaaaataagcagttgtgctgatcccgggaattaaactactgtggtctgtgcccctgtgcaagtttgtattttaatttgtcttctgaaagtatataaaaaattttaatcttgaaattagattaattttaaatggaattccatgtaaaattctttataattcatatattttcagaaaaggaagcatgatggagatgaagatcttagtgatg

SEQ ID NO: 29288 - DNA, 316 bp, Gossypium hirsutum
  Clone ID: LIB3148-025-Q1-K1-C1
cccacgcgtccgcaaaaaaaatctttccagtttctattttctaaaaacaaaactgaaaatgtcttgctgcggaggaaactgtggctgcagctctggttgcaagtgtggcaatggctgtggaggatgcaagatgttccctgacataatagagaagactacaactgagactattgttcttggtgtgacaactcagaaaatgcactttgagggatctgagatgggagttggggttgagaatggatgcaagtgtggagacaactgcacttgcaacccttgcaattgtaaataagagggggggaaaatgaacaacaaagag

SEQ ID NO: 29289 - DNA, 304 bp, Gossypium hirsutum
  Clone ID: LIB3148-025-Q1-K1-C10
cgaaaagcttcagaattgcttatggcgattctttctcaacgaccatcttctttctcaacttttaatcccaacgctccattgtttgttccgctagcgtatcggacggaggaggatctgtttgatgagtggtgggctctcgtccaatcctaccggtgtttccatgactactggcttcaagaacgttaacacgatccccaaaacgacatcaccgatcttatttttcccgacgatctggatgccgtctgtgacgattacgacaactttatcgttgaccctacctgtgaagggaaggaagaagatactc

SEQ ID NO: 29290 - DNA, 299 bp, Gossypium hirsutum
  Clone ID: LIB3148-025-Q1-K1-C12
tacctaataaaaaattattaaaaaaaaaaaaaaaaaaaaaaaaaaaaaaaaaaaaaaaaaaaaaaaaaaaaaggggcgccggttgtgacccacccgtcctcccacgcgtccgaccgctacttccaccatggcatggaggggctcaaaccttctatttagcgtctaaatctaatcataaatttaatgttggctattagagtttttttcggacttcacccttaataatttttttgccttttaatcttaccctttgttatcctagaattgggctatttgctctccaatttttttttcatttt

SEQ ID NO: 29291 - DNA, 121 bp, Gossypium hirsutum
  Clone ID: LIB3148-025-Q1-K1-C2
tacagttgctatccctctcaagggagaatgagtcaaaatttcaccccttatttattaaaacaaatccttagtattttcttttcaaaaaaaaataaaataaaatccttagtattttattttt

SEQ ID NO: 29292 - DNA, 303 bp, Gossypium hirsutum
  Clone ID: LIB3148-025-Q1-K1-C4
ggttaatgtgctttatatcaattaaacattagcgtgttttgtattgttaacgttctttctattctgatgatgaatattactcgacccaattccaaaaaaaaaaaaaaaaaaaaaaaaaaaaaaaaaaaaaaaaaaaaaaaaaaaaaaaaaaaaaaaaaaaaaaaaaaaaaaaaaaaaaaaaaaaaaaaaaaaaaaaaaaaaaaaaaaaaaaaaaaaaaaaaaaagagacacaaaaaaggaaaaaaaataaagcgagggaaaacaacgtaaaatatgggaaaacctgcttttctacccgcttcg

SEQ ID NO: 29293 - DNA, 326 bp, Gossypium hirsutum
  Clone ID: LIB3148-025-Q1-K1-C5
cccacgcgtccgcccacgcgtccgatgatgttgcccctattcctggaacaaccaagataaaaaatctagatagcaacattgaatcagtgaaagtaaagctgacaaaagaagatttgaaagaaatttcagatgtgatcccaatccatgaggttgcaggtggtagttatcctgatgctttaaagaaattctcttggaaatatggcaatacaccaccaaagaagagcgcctaggttttaaaacaaagtttcatgagttactaaagctttggaaattgctgttgtaagttgatatgcttaggctttcatagcctttatataataaaaatt

SEQ ID NO: 29294 - DNA, 295 bp, Gossypium hirsutum
  Clone ID: LIB3148-025-Q1-K1-C6
gatgaaatagtgtacattatttattgtaaatcctagactgttctttgtgatgctttcattgttaaaaaaaaaaaaaaaaaaaaaaaaaaaaaaaaaaaaaaaaaaaaaaaaaaaaaaaaaaaaaaaaaaaaaaaaaaaaaaaaaaaaaaaaaaaaaaaaaaaaaaaaaaaaaaaaaaaaaaaaaaaaaaaaaaaaaaaaaaaaaaaaaaaaagggggcgcccttttaaaagaaccaaattttacttccccttccttgcaaattaaaattttttttttggggcccccaaaataaaa

SEQ ID NO: 29295 - DNA, 256 bp, Gossypium hirsutum
  Clone ID: LIB3148-025-Q1-K1-C7
cccacgcgtccgcccactcgtccgttttttaaaaaaaaattgagcattagttttttttcctataaatggaaacattaactcgttaaactcatttgtctttcggcattcctaatctacctttaatccacaaccccccccccaactaattatactcacttgtaaaatttgagtcatgttatttcttagttcacgctcaaaccctttattcttaagagtaatgtaaatgaggttattgacccactattacttctgttgt

SEQ ID NO: 29296 - DNA, 101 bp, Gossypium hirsutum
  Clone ID: LIB3148-025-Q1-K1-C9
aaaaaaaaaaaaaaatattaaaaaaaaaaaaaaaaaaaaaaaaaaaaaaaaaaaaaaaaaaaaaaaaaaaaaaaaaaaaaaaaaaaaaaaaaaaaaaaaaa

SEQ ID NO: 29297 - DNA, 231 bp, Gossypium hirsutum
  unsure (1)..(231): unsure at all n locations; Clone ID: LIB3148-025-Q1-K1-D1
ttcccttcttggctgaaaangnttaggataatcgggctagttaggctttagggcatttgggtctaggtttgggctttaatgatggactattagtttggttatatattttgtgtacttttgtgtttaattattttttattttttttattatttatattttttttttttttgtgtttttatattattttttctttttttttttactataattctttcttattttatgattatt

SEQ ID NO: 29298 - DNA, 307 bp, Gossypium hirsutum
  Clone ID: LIB3148-025-Q1-K1-D10
cccacgcgtccgtgttgataaaatttctgtggtgatgaagccctatacaaaggaggtagttaaagcttatgggaggtttttggaatcagcaacaacataccatcaacaggttcaagcctctgtgcaagaaactttgaagaagcatgagctgacaagacctcttgcaaccaaagagcttgagtggttttcggcatctgctctattggctctacctattattattttgttcagaatattttcagcaattttctgcaaaaagacaaagaagcgtgttcgacatactaatgcagtccaccatggtcgtcgt

SEQ ID NO: 29299 - DNA, 309 bp, Gossypium hirsutum
  Clone ID: LIB3148-025-Q1-K1-D11
gagatgtgaagccccataatgtcatgattgatcacgagcagcgtaaacttcgtcttattgattggggccttgctgagttctatcatccagggaaagaatacaatgttcgtgttgcttcgagatattttaaaggtcctgagcttcttgttgatttgcaagactatgattactctttagacttgtggagtcttggttgtatgtttgctggaatgatattccggaaggagccattcttttacgggcatgataattatgatcaactagtcaagatagccaaggttcttgggacagatgaattaaatgcttatc

SEQ ID NO: 29300 - DNA, 313 bp, Gossypium hirsutum
  Clone ID: LIB3148-025-Q1-K1-D12
cccacgcgtccgcaaaagaccaactaaactcaccaaaaataatggtggccagcaagaaaacgaagaagacccatgagagcatcaacaacaggttggctctcgttatgaagagtgggaaatacactcttggttataaaacagtgcttaagtccctcaggagctccaaagggaaattgattatcatttcgaacaattgtccaccgctgaggaaatctgagattgaatactatgcaatgctctgtaaagttggagttcaccattacaatggaaacaataatgatctaggaactgcttgtgggaaatacttccgtgc

SEQ ID NO: 29301 - DNA, 205 bp, Gossypium hirsutum
  Clone ID: LIB3148-025-Q1-K1-D3
ctagttcttgataccgcagctagcttgtttgtttgtttggatgcttgatgtttacatatattgtttgatttctatatttgtgataaaacaatctaaatttcttaattataaaaactcattgtgagcagaatagtccagggaaaagggaaagttgtactagctgctgcttctttttaatttcatccatccactcaacttcataacc

SEQ ID NO: 29302 - DNA, 307 bp, Gossypium hirsutum
  Clone ID: LIB3148-025-Q1-K1-D4
cgtgaatacacgataaagcttctgagtacatcattccccaacatgactgctgctgaggtttctcaatttgtgaatggattatttgactcgagaaatgatttgtccacttttaaaaatcacatacgggacttccttgtgcaatcaaaagaattttcagctcaggacaataaagatctctatgcagaagaagctgccctacagagggaaagagagcgacaacggatgctttctatcccagggcttattgccccaaatgagatacaagatgagatgttggattcgtagatgtggctaatttttgcatgga

SEQ ID NO: 29303 - DNA, 293 bp, Gossypium hirsutum
  Clone ID: LIB3148-025-Q1-K1-D5
cttaataataatctcctgtcaactaattattctaaaaaaaaaaaaaaaaaaaaaaaaaaaaaaaaaaaaaaaaaaaaaaaaaaaaaaaaaaaaaaaaaaaaaaaaaaaaaaaaaaaaaaaaaaaaaaaaaaaaaaaaaaaaaaaaaaaaaaaaaaaaaaaaaaaaaggggggggccgttttaggggaccaaagtttccttccccgggcttgcaaggttatactttttttttggggcccccaaaatgaattaatggggccggggtttaaaacggtgggacttggaaaaacctgg

SEQ ID NO: 29304 - DNA, 301 bp, Gossypium hirsutum
  Clone ID: LIB3148-025-Q1-K1-D6
gtacttgtcttgctatagatagataatctgaattcaagtttcggtgaaaaaaaaaaaaaaaaaaaaaaaaaaaaaaaaaaaaaaaaaaaaaaaaaaaaaaaaaaaaaaaaaaaaaaaaaaaaaaaaaaaaaaaaaaaaaaaaaaaaaaaaaaaaaaaaaaaaaaaaaaaaaaaaaaaaaaaaaaaaaaaaaaaaaaaaaaggggggggccctttttaaggaaccaaattttccttcccgggctttgcaagttttttttttttttttggggcccccaaattaaattcccggggccgtgtttt

SEQ ID NO: 29305 - DNA, 57 bp, Gossypium hirsutum
  unsure (1)..(57): unsure at all n locations; Clone ID: LIB3148-025-Q1-K1-D7
cgcccacgccgtccgcaataatgtatagtntttgtttcttaaatgcggttggtttag

SEQ ID NO: 29306 - DNA, 314 bp, Gossypium hirsutum
  Clone ID: LIB3148-025-Q1-K1-D8
ggtatagcagcaaaaagaatggcagagattttgggatacatattgacaccattggagtttctcaagattcagcaaccacaaaaagctcaagattcagcaaccataaaaagaaaggtatttgagcagcctaggttcttgagaatccctttcctatgtagtaagtttgcatcatataaccaaatttagagccctatctgaatcatcatagccagccatagttatagctttgagttgctgtaaattctactattactataagaggagttgaaatgctgaaaggcttgtggatgatggccttattttgtgatgcaacg

SEQ ID NO: 29307 - DNA, 260 bp, Gossypium hirsutum
  Clone ID: LIB3148-025-Q1-K1-D9
tggaatttgatgatgcacggaacaaattttccttgtagatttctttcaaacttttttttttttacatttccatttaaccaagcccctctttacacaaatcaaagtaatatagaacgtgttttttgcaatctccttgattcagacagtaatgaggaagaaaagtaaaattcaaggttgttcatattgcttgttgataaaccttggtttatgtaatgctaaatttgattttttttccctaatgaaacaaccttttatgccat

SEQ ID NO: 29308 - DNA, 413 bp, Gossypium hirsutum
  Clone ID: LIB3148-025-Q1-K1-E1
aaaaaaaaaaaaattttaaaaaaaaaaaaaaaaaaattaaaaaaagaaagaaaaaaaaaaaaaaaaaaaaaaaaaaaaaaaatatataaaaaaaaaaaaaaaaaaataaaaaaaaataaaaaaaaaaaaaataaaaaaaaaatataaaaaaaaaaaaaaaaagaatatataaaaaaaaaaaaaaaaaaaaaaaaaaaaaaaaaaaaaaaaaaaaaaaaaaaaaaataaataaataaaaaagagaaaaaagagaaaaaaaaaaaaaaaaaaaaaaaaataaaaaataaaaaaaaaaaaaaaaaaaaaaaaaaaaaaaaaaaaaaaatatataaaaaaaaaaaaaaaaaaaaataaaaagtaaaaaaaaaaaaaaaaaaaattatataaaaaaaaaaaaaaaaaaatataataat

SEQ ID NO: 29309 - DNA, 305 bp, Gossypium hirsutum
  Clone ID: LIB3148-025-Q1-K1-E10
caacattacaacaacgttaatagagagcatatcaatcaaattcatcaaatctttcattcttatattctctttctttcttggtttcatgttttcagggcctttgtgttgaatctaatccaatctctgctatctttctcagccatctctccacaagcaataagaagaagattccatcccaatcttttcttaaagactacccatatcttcttcttcttttttgtcagaagaaaaaaatatatctgaatcccatattttgctgaagaagagattccaattctgctggtttttacccctcgacatgtctt

SEQ ID NO: 29310 - DNA, 297 bp, Gossypium hirsutum
  Clone ID: LIB3148-025-Q1-K1-E11
ctaagcgtccaaaagtatagtttttttttatcatttattttaggtgaacggttgtagtagaagatctcatgggaattttgtttaattgatgaatgctactgtggtataacagcaaaaattgtgagagtggaggtgggggaaagaagatgaaagcaaaaagggaacttggtgatagtgtagacggggaacgagacttaaaatggcagagggttgtggattcaccatcttcacctcctgaagagtcacttgtgccttataatgacgatgaagatgatgaaagaagagcattgaatcaca

SEQ ID NO: 29311 - DNA, 180 bp, Gossypium hirsutum
  unsure (1)..(180): unsure at all n locations; Clone ID: LIB3148-025-Q1-K1-E12
gaatggcttaaaaacagtacaagggactgaacttctcggatgtagtatatgacctgccatgaatgtctgaaaacatgtaagtgcccagttatggttgtgttatgaatggcttcatctgacttgaataaaggaagcatgtcatgttcgtaatcggaaagattaaaatctatttttggtngg

SEQ ID NO: 29312 - DNA, 151 bp, Gossypium hirsutum
  Clone ID: LIB3148-025-Q1-K1-E2
atcagttttaatgcctggtgaggaaactcctactttcattgcacatcctactccagctctgctgccatgtccaccagaccgtgtcttgagacctctgcatcaacagagccaaagcattggtgtgccttcaagcttaagctgatgctgcact

SEQ ID NO: 29313 - DNA, 277 bp, Gossypium hirsutum
  Clone ID: LIB3148-025-Q1-K1-E3
ggatctcaagcaaagctatgtggataatgaccagcttcattaacgacatatttgagaaactggctcaagaagctatcgaggctcgcgaggtacaacaagaagcccacgattactacaagggaaattcatacacgtcattaggctcgttctcaccacagaaacttgcgaaacacgccacctttgaacgtaccaaggcatatactaaatatactagctcttgaattgaatgaattacgccgattttaagcttagcatttcttatagaagatccttcttg

SEQ ID NO: 29314 - DNA, 324 bp, Gossypium hirsutum
  Clone ID: LIB3148-025-Q1-K1-E4
cccacgcgtccgcccacgcgtccgcccacgcgtccgagattatggaaagaagtcaaagcttgggttcaccatctatccttcgcctcaggtctcaactgcagttgtggagccttacaatagcgttctgtccactcattcgcttcttgaacacacagatgtggctgtgctcttggacaatgaagcaatttatgacatatgtcggagatccctcgatatcgagagaccaacttacaccaatttgaaccggttgatttctcaaatcatatcgtccttgacaacttctttaaggtttgatggagccattaatgtggacattacagagtt

SEQ ID NO: 29315 - DNA, 302 bp, Gossypium hirsutum
  unsure (1)..(302): unsure at all n locations; Clone ID: LIB3148-025-Q1-K1-E5
aagaaaggccctagtccatggttaagaatgtttcaaaatgccagagagtggtgctcatgatatggttatgagattcaaaggacaaatgagaggagttgaagtgtgattgatgatggatgcttcatctgagttaaactgttatattgaaatgcctggaaagcagtcttagtctttaatttagacataaagagtctttgctttgtgcaaacctcaggaactgtgtcttaatactatttcttcatcatgcccaanaaaaaaaaaaaaaaaaaagaccatgaaaaatgatgaaagaagagcattga

SEQ ID NO: 29316 - DNA, 309 bp, Gossypium hirsutum
  Clone ID: LIB3148-025-Q1-K1-E6
atctgttcataaaaagagctgtttatgtgaatctatctgcagccatggatgatcggagcataaatcacaagtcatggatagcacagcatagagtttaatttataatccggagatagatataatatcattagactgttgcattataattttaattagatgagttagtagcggctggaagccccatctcatcagttttctttttattatatctttttttgttattgttgcttttgtgtgagctgttgcagaaactttggaacttgacaaactcattgttgaatcttgaatgcattcgacattcactggatt

SEQ ID NO: 29317 - DNA, 317 bp, Gossypium hirsutum
  Clone ID: LIB3148-025-Q1-K1-E7
gaataaaaataaaattttttaaaaaaaaaaaaaaaaaaaaaaggggttatataaaaaaaaaaataaaaaaaaaaaaaaaaaataaaaaaaaataaagaaataaataatggggggggggttgttgttttttattgattctgtcgcttttttgttagaattggattttttttttttggttgtttttttattttttttggctgtggtttttattatttgtttttgtgtaattgttggttttgcgtgttttgttgtttttgcttgggatcttttttttctcttttggggtttttgtgtgggtgcccgctttctttggtttt

SEQ ID NO: 29318 - DNA, 312 bp, Gossypium hirsutum
  Clone ID: LIB3148-025-Q1-K1-E8
atgacatggtccacgcagatggacttctatcccttgagactagtcaacatcggagatgcaccatgcttgatctattcactgagatagatcggttgcttcgtcctgagggttggatactaatccgtgacgccgctcctcttgttgaatcagccagagctctaacgacacggttgaagtgggatgccagaatcatagaaattgaaagtaacagcgatgagcggctccttatttgtcagaaacctttctttaagaagcaagcaatgtgagaacaatttctccattaaaccctagtttatgtcttggtattcaaac

SEQ ID NO: 29319 - DNA, 303 bp, Gossypium hirsutum
  Clone ID: LIB3148-025-Q1-K1-E9
agattctttacttcggtgtctgttattgagaattttccttttatggctacttatgtggtgcgccaaactaattctgaccatgatgctatagtcttggataaaaaaaaaaaaaaaaaaaaaaaaaaaaaaaaaaaaaaaaaaaaaaaaaaaaaaaaaaaaaaaaaaaaaaaagaaaaaaaaaaaaaaaaaaaaaaaaaaaaaaaaaaaaaaaaaaaaaaaaaaaaaaaaaaaaaaaaaaaaaaggggggcccatttaaaagaaccaaattttacaaccgcttcctcgggaaaaaaaactttttt

SEQ ID NO: 29320 - DNA, 329 bp, Gossypium hirsutum
  Clone ID: LIB3148-025-Q1-K1-F1
agagtgcagaaaactaatatggaaacagaaatccggcttgtgaaatttgggatggcggatgtgtggtggacccttctcgggactgctatcccggcagttatcgcagggcaagtttttagattgaggaaaaagcatgcctaagaacagagacttaagagtgccaggggaagggagatgtgctcggatgacattttcatttgatagaaattttttttttttttcatttttttttttttggtttttcttctttttttttttattctctctttttttttttttttctctcattactatttttttttactttatatcttttttttttttttttt

SEQ ID NO: 29321 - DNA, 315 bp, Gossypium hirsutum
  Clone ID: LIB3148-025-Q1-K1-F10
cccacgcgtccgagaaccgataaggttttcattacggttctattacctgattcaaagaatgcaaaagttaaccttgagccggaaggagtgtttaatttctctgctactgctggaactgacaataacacatatgagttgaagttggatctttttgataaggtcaacgtggaggaaagcaaaattaatattggagttaggagtatattctgcatcttggagaaggctgaaaaagtgtggtggaaaaaattattgcgcggggatggcaaagccccccattacgtcaaagtggactgggacaaatgggtggatgaagat

SEQ ID NO: 29322 - DNA, 207 bp, Gossypium hirsutum
  Clone ID: LIB3148-025-Q1-K1-F11
aaaaaaaaaaaaaaatattaaaaaaaaaaaaaaaaaaaaaaaaaggaaaaaaaaaaaaagaagaaaaaaaaaaaaaaaaaaaaaaaaagggagggaaaaaataaaagataataatattaattaaagggaaaggaggtgggtttgatttggtggtgtttgttaaaggtgggggggggggaagcattgtttatactaaagtgatgggta

SEQ ID NO: 29323 - DNA, 237 bp, Gossypium hirsutum
  Clone ID: LIB3148-025-Q1-K1-F12
cagcaattaagcatctcctacatgtttaatgcaatcaggagataataatcagtctcctagatgtttcagcataggtttctcaatcttatgtagcgttttttcttcctatggaaatgtaatgtaatgtattgtaggagagggcaagtagtagtattttctcttaggttcatttatgtggttgtagatttcacctttgtaacttataattaacaattgcaatcaaaacaaggctgcttg

SEQ ID NO: 29324 - DNA, 332 bp, Gossypium hirsutum
  Clone ID: LIB3148-025-Q1-K1-F2
taaaaaaaaaaaaaaaattatttaaaaaaaaaaaaaaaaaaaaaggagggaatttaaaaaaaaaaattaagaaaaggaaaaaaaaaacaaaggaaacaaaagaaaccaaacgggggcaggcggggaaaataaatttagtaaacaggcccttgatttcaaaaaaaaaggacttaataaaaccacgtcctgaaaaaaacaaaagcggtgacgaaactaaattgctttgccagggaaaacattttcgtaaccaggcttttagcgattgggatagggcccgcttgccttgcctgactgaacatttgcacggccgggaaaggggaggcgtccccccc

SEQ ID NO: 29325 - DNA, 325 bp, Gossypium hirsutum
  Clone ID: LIB3148-025-Q1-K1-F3
cccacgcgtccggacgacctcaagcttctccgaattctggtttcattttacagctgcaacaatttgaaaaaacccttcgaggtaaggaatatgaaaagactcggctcgatcggtctgcattagtttgtcggtccattttctccttcttcaacaaaaagcagtgagaagaaaggcctggctttttggcattgttacgatgcactcgataaagatgctagtatattgtgtgatggttaaatgtaatcaacatatactagccaaataaacatgatccaatttattaaactatatgaattggaacatacaataatagaatggaaatttt

SEQ ID NO: 29326 - DNA, 278 bp, Gossypium hirsutum
  Clone ID: LIB3148-025-Q1-K1-F4
cccacgcgtccgcccacgcgtccgcccacgcgtccgcacatacagttgaagtgatgccaaagtgtgtgcctaagaagtcatctcaataaagacgggtgaatgacacaccatcatggtaaaatcgttcgaggagagtgtctggtaaaaccgtttaaatacttattttacttctccatacggtaattaaaattcttttgcagcatcctagttactggatgcaagggtgagtttatttttctttatatatatgatatacatatacgtttgtctttgttttc

SEQ ID NO: 29327 - DNA, 281 bp, Gossypium hirsutum
  Clone ID: LIB3148-025-Q1-K1-F5
gccaatttgatccggtgaatggcggggaaatgactcagctggaatatcacaactttctcaagccagaggcagctttctgaagatttacatttatatatacatatttataaatatatgtttctctatcttattcggtcaaatatttggcatcttccacggtccacttcctcctttcccatcattcacttaatgcatttcccaatctgtaaatatatatttaagcgtagttttgtaaagttcgtaattgttcctaagaaaaagtacataaatttcagctgttc

SEQ ID NO: 29328 - DNA, 311 bp, Gossypium hirsutum
  Clone ID: LIB3148-025-Q1-K1-F6
ggacttccaggtttagaagtgtacaatctcaaattttggtactgaggatcaattacccttgaaagactgaaggctgaatccagtgaagattggcagaagggacacactcttagaggtatgaagccaagatccgtcggaatttgcttataacacatttaaactgtctgattgaaaactccttacatataacaatttgtcctcgaaagataaagagttttctgtctttttgattggtcagtttatgcttttgtcttgtatatcaaatactggcggaggaatggttatggctgtgtacaactgcaactgaattc

SEQ ID NO: 29329 - DNA, 299 bp, Gossypium hirsutum
  Clone ID: LIB3148-025-Q1-K1-F7
gtgagatttgcattaatggttcatgaacattttaacttatattcgacagaataaaagtaagattctgaccctttttttttaaaaaaaaaaaaaaaaaaaaaaaaaaaaaaaaaaaaaaaaaaaaaaaaaaaaaaaaaaaaaaaaaaaaaaaaaaaaaaaaaaaaaaaaaaaaaaaaaaaaaaaaaaaaaaaaaaaaaaaagggggggccgttaaaaaaaaaaaaaaatttaataccccggaaaaaaaaaaaaaaagggtttttttttgaaaacaaaaattaaattccggggcgggggtt

SEQ ID NO: 29330 - DNA, 324 bp, Gossypium hirsutum
  Clone ID: LIB3148-025-Q1-K1-F8
cccacgcgtccgcccacgcgtccgcccacgcgtccgagattctgaagtttcccctcacgactgagtctgcaatgaagaagattgaagacaacaacactttggttttcattgttgacattcgtgctgataagaagaagattaaagatgctgtcaagaagatgtatgatattcaggccaagaaagttaacaccttgatcaggcctgatggaacaaagaaagcatatgttaggttgacacccgaatacgatgccttggacgttgcaaacaaaattggtattatctaggctagttggtagctaccttgttgagcatttatttttcttt

SEQ ID NO: 29331 - DNA, 305 bp, Gossypium hirsutum
  Clone ID: LIB3148-025-Q1-K1-F9
gttctagcgtgcttgggttgttaagagtttctcgcagggaatttaaatcgctgtttgcatatggattgtcggtcgtgaatgtaataccagtgacagagaaccccccttaaaccctaaacggtgagtggtgttgtggctactttgataatggcgcatggtattatgtacttgaataagcagtacttgctgaaaataataataatacaacactgatatgttaaatccttgttcgtataaattctgatatattttagtaattttgtgttataaagatattgagaaaattgtgaagaatgtagtagaag

SEQ ID NO: 29332 - DNA, 324 bp, Gossypium hirsutum
  Clone ID: LIB3148-025-Q1-K1-G1
gtcgaggagttggaaccttttaagaatcaccagaatatgttggctggtttagactacgttgttgcccttaagagtgatgtatttgtttatacatatgatggaaatatggcaaaggcagttcaaggacataggcgatttgagaacttcaagaagactatcaacccagacaggatgaattttgtaaaacttgtggatgattatgacgagggaaatatttcttggaagaaattcagttccaaagtgaaaaagcttcacaaagatcgagatggatctccctattatagagagtctggggagttcccaaaactggaggagagtttctac

SEQ ID NO: 29333 - DNA, 298 bp, Gossypium hirsutum
  Clone ID: LIB3148-025-Q1-K1-G11
catctttatatctgatcacggaaatattcgtggtaggagatccagaaggagatccggaaatggcaataattacagcacatgcgcgagaaagttcatcggaggacacgggttattcgttcgtgcatggcagaattacaggaacagcgaaggacgtatttttgggcagggcctggaagagcagtccgagggttgtttattcttatactgaaatggacgaaatcgtccatcctggtggatggtctagtaatcgccaacctgaacgagccgacactgtgtactacggagaatacaaatgcac

SEQ ID NO: 29334 - DNA, 138 bp, Gossypium hirsutum
  Clone ID: LIB3148-025-Q1-K1-G12
aatgactccaaggccttttggagggttcgaatcgaggcatgcagctccatgtcctaccttctgcttttttcccttgttttatatcagtttactttcttcattaaaggtcttcttttaaaaaaaaaaaaacttttagat

SEQ ID NO: 29335 - DNA, 313 bp, Gossypium hirsutum
  Clone ID: LIB3148-025-Q1-K1-G2
cccacgcgtccggtaaaaaattgcaccatgactaatacttccaatggtgttagaatcaaaacttggccaggtgctgaacctggcacttgttcgaacattcactttgaggatattaccgtgaccaatgtcagttctcctattataattgatcagaaatattgcccatggaacaaatgcaaaataaatgaagaatcgaaagttaaactaagcaacattagtttcaaaaacattcacggcacttctgcgcgtccagaagctgtcaagattatttgtagtgctactttgccttgtgaaaatgtagaacttgcagaca

SEQ ID NO: 29336 - DNA, 296 bp, Gossypium hirsutum
  Clone ID: LIB3148-025-Q1-K1-G3
aaagaatgcaccatacgtgtgggttcacttccctggccgtaactcatgggatgtgttcagcgaaatactcgagaagacccacattgttactacgcctggaagtggtttcggacctggcggtgagggtttcatcagagtcagcgcatttggtcacagggagaatgtcttggaagcttgcagaagattcgagcagctttacaattgaatctaatagcatttgaccggttacctcggtttcagaccggagaccaaaggccgtatgcttctatgatttttgttctcaattctgtaatatt

SEQ ID NO: 29337 - DNA, 314 bp, Gossypium hirsutum
  Clone ID: LIB3148-025-Q1-K1-G4
catgatgtttcacgggaaaatgcatggtgaccacttggtcgagctcctacgtccttttgttcagcaatggagtcaggctgactgttggatgcaattgtatgaccggtggtcttctgttgacgatctcggttccctagctgttgtacaccatatgttggctaatgacccaggaaagagccttctatggttcagacagtctctcctccttttaaggttaaattgccaaaaggctgcaatgcgtagtctacggttggctagaaaccattctacctcggatcatgaaaggctcgtctatgaaggatggatattgtacg

SEQ ID NO: 29338 - DNA, 256 bp, Gossypium hirsutum
  Clone ID: LIB3148-025-Q1-K1-G5
gcttcttggtgctaggagcttctgtgttctaccctttgattctaggtttcgatttctcttcctattggaggatgatgggaactccctttcctttacataataaaaccaaccatgtttcgttttctacctccaaaagtaggcaggcaattcttcaccacaggggctgttcccatgttatctatggccttgaaaatagatctcattgcacagtagttatgcatggaaaaaaattcaagccagggttccttttttttct

SEQ ID NO: 29339 - DNA, 343 bp, Gossypium hirsutum
  unsure (1)..(343): unsure at all n locations; Clone ID: LIB3148-025-Q1-K1-G6
cccaatcgttcgcatatatttatataaaaaccttttatttgggcgaaaaaaaaaaaaaaaaatttntnntnntnnttttttttttntttaaaaaaaaaaaaaaaaaaaaaaaaaaaaaaaaaaaaaaaaaaaaaaagaataaataaaaaaaaaaaaaaatttataaaaaaaaaattaaaattatttttttggggtttttaaaaaataaaaaattataaagtggtggggggggggnttttttttttttttttgttaaataaaaaaatataaaaaattttgaaaaagtttaaaaaataaaaattttttaaaaatcttttttataaaaaaaaaaaaaatttttttt

SEQ ID NO: 29340 - DNA, 319 bp, Gossypium hirsutum
  Clone ID: LIB3148-025-Q1-K1-G7
atgtattaaattacatattgaattaatgtttatgtgttaaatttaaattcaaagaaaaaaaaaataaaaaaaaaaataaaaaaaaaaaaaaaaaaaaaagaaaaaaaaaaaaaaaagacaaaaaaaaaaaagagaacaaaaagaaaaacaataaacccaaacaggaatgaatattgtaaaacatgaaaaaaaaaaataaaaagagaaaaaataagtaagaaaaaaatacaattccaaagagaaaaaaacttggggcggccccgattaagaactaccgattcttggccggtgtggggaggtccaaaaactgttaattgaa

SEQ ID NO: 29341 - DNA, 312 bp, Gossypium hirsutum
  Clone ID: LIB3148-025-Q1-K1-G8
cccacgcgtccgctcaaataagcttctagtttagggacatcctccctcctaaaaatatcccacagtgcaccacctgtctcctttctgctggtcaagggttccggaattgaagctcctctaagctcaccactggaaacatatattatattatcaccccaattggtggcttccgattcatcgacgccttctttaagtcgctctctttccaaacgttccttttcatcctgtgccttgtgtttcattttcaacttctccattgcggcaagctgctcatcgcttaaggctacctctgaagtatgtgtcaaaaatgtt

SEQ ID NO: 29342 - DNA, 296 bp, Gossypium hirsutum
  Clone ID: LIB3148-025-Q1-K1-G9
cccacgcgtccgggtcaaagccattaatgagatatgtggccaagctaaattttcagatcttacaaagaactttttggttatactagctgagaatggaaggctaagacatatagaaagcattgcgaagagatttgtggagttgaccatggctcataagggagaagtgaaagctattgtcacaagtgttattccccttcctcctcaggaggagaaggaactaaaggagaccttgcaggaaataattggacaggggaagcaggttaagctggaacagaagatcgatcctagtattcttg

SEQ ID NO: 29343 - DNA, 307 bp, Gossypium hirsutum
  Clone ID: LIB3148-025-Q1-K1-H1
gttgccttctgattatgctcagggtgtggcaacattttccttggcaagaggagcaactatggataaagcttagtaacctgttttcttagacaaccaagtccaagtacctgtctactctcgatagccattggcttgaccggcggaaaacaaactgacctgccatacgtgaagtcagtagtgctatttttgagggtgaaaagtcaggagatagtatgatatatatccatagttatagcagctaatgggtgttagtaatgttgtcaagaacttaaaaagagaatcagtttctctgcatggttttatgagt

SEQ ID NO: 29344 - DNA, 145 bp, Gossypium hirsutum
  Clone ID: LIB3148-025-Q1-K1-H10
catacatcaaatcttctctatgatcattctgtttattcgttgtgtaacgccattttgctgtggagtatggcgaactatcaagtgtctcacgatcccttctgacttgtacaatctattaaattcatcagaacagaactttaagccc

SEQ ID NO: 29345 - DNA, 307 bp, Gossypium hirsutum
  Clone ID: LIB3148-025-Q1-K1-H11
cccacgcgtccgcaaggacatagtttattggatctacaataaactgaagaccaaagaaacattggttgaggcggtggaccctaaaatctcgatggcatcaaaggaagatgccatcaaggtgttgagaatcgcagtccactgcacggcaaagattccggcacttagacctagcatgagaaaggtagttcaaatgctggaggaggctgaaccttgtaaacttactgatattattgttcatgaaaaaggtgaaaagtagcctccactgaggaatggaacaagagtggcaagaaatgattccagattgatc

SEQ ID NO: 29346 - DNA, 305 bp, Gossypium hirsutum
  unsure (1)..(305): unsure at all n locations; Clone ID: LIB3148-025-Q1-K1-H12
attgaatcctctcccgatggttttaacatgcttaggcgtatgtatgaaaatgttcaggaaccatttatgaatgctacaactatggctggaaataatggaaatagtccgagctcaaacccatttgctgctctattgagcaatctaggtgattctcaagctaggagcttacctaacaacacttctacaaatggttctgaaaccactcatggacatacttccccaaacacaaatnctcttnctaatccttggggaaacactgttggtggcgggggcgcccagaccaatgctactgcaaggtcaaatcc

SEQ ID NO: 29347 - DNA, 225 bp, Gossypium hirsutum
  Clone ID: LIB3148-025-Q1-K1-H2
gcaggaagctctctctatttcttctgcagtgcgctgctgccagttgcagcacggtgtgtaagattaagtgttttcttaacctcatcagtgttccaaacttatttcatatgaacaaaacctcagaagtagaggatataattcatttctacacacttggttaacgtgaaggcttgtacaatgtattattggttgtttgttgattaaataatactagtgttctttctc

SEQ ID NO: 29348 - DNA, 99 bp, Gossypium hirsutum
  Clone ID: LIB3148-025-Q1-K1-H3
gattgatcatattataccaaatcttgacattttcccctgcatatgtaacgaatcttttgcccctttgtgatcataaatttacaaaatcaatgttgtctt

SEQ ID NO: 29349 - DNA, 340 bp, Gossypium hirsutum
  unsure (1)..(340): unsure at all n locations; Clone ID: LIB3148-025-Q1-K1-H4
ggggggagccangcgtccnaaaaatttgtcgattcttgtttttnttttgctatgtccatgatgttgctttggaggttcttaatctgccttaatcaactaatatgtgctacttgtagttactttattgtactctggacaaggaaaaaatttgcctgacttatgatttagaaattatttaaggcaggcaatcttgcggtgacaatttgggtcaattctcaatagttcagcaggattcagctaatgcactcacacatgaatcaagcaattcaattacgggcagattttgccattcttattgtacataccatggtaataaaacaagaaacatgcaattcgattt

SEQ ID NO: 29350 - DNA, 311 bp, Gossypium hirsutum
  Clone ID: LIB3148-025-Q1-K1-H5
ggggatgaaagtgaggagaatgctgatacaggtgggggtgctgataaagatggtgatggagatgatgatgcctagttctcacttgaggaaattatatgaccggtaatttgtctctccctctagggatttgatttgcaattctcaatagaattataaaattgtagtcattttagatgttcaataggtgggattgtaacatatgaggtagttactcttttgtagtaacttattgtggtatgcttgtagctgaagtttctcatagtgaacatcatgttgtttattcggcagaagtttcaaagatttgagtttta

SEQ ID NO: 29351 - DNA, 172 bp, Gossypium hirsutum
  Clone ID: LIB3148-025-Q1-K1-H6
gggggtcgaaccaggcgttcgccggcatttaaacattataatgttcatgttttgacattaggtgccctgttttgcctttaaacctgacgcacttactgtatatattagtaggtcggtatgtaatttttgacttcgttttctttctttccctacatgaatgccatttgctttt

SEQ ID NO: 29352 - DNA, 288 bp, Gossypium hirsutum
  Clone ID: LIB3148-025-Q1-K1-H8
acgatttaaagctgactcgacacgaaccaggataatgttctatagcacgttttacaccatgaaaaatgacaactcgggttctctctgtggaccggtggtggatgatgtgaagttggttagtattcgaaaattgcatcgtttgtaaaattcatgttttaaatttgttttgcattgattatgctacaaattaatgtgtttcatccatttaggggtttactttaggattatttaatgtaacaaattaatgagttcaccaccaatgtttacatttatgtatctactttcttc

SEQ ID NO: 29353 - DNA, 326 bp, Gossypium hirsutum
  unsure (1)..(326): unsure at all n locations; Clone ID: LIB3148-025-Q1-K1-H9
cccacgcgtccggaacttttaatctggatccctgagagttattatttttgtattggaatttagattatctttgaactttataaatgcaagcttattttggttggtnaaaaaaaaaaaaaaaaaaaaaaaaaaaaaaaaaaaaaaaaaaaaaaaaaaaaaaaaaaaaaaaaaaaaaaaaaaaaaaaaaaaaaaaaaaaaaaaaaaaaaaaaaaaaaaaaaaaaaaaaaaaaataaaataaaaaaaaatgggggggccgtttttaaagtatcaaatttttataccggggaattccaaggttataccttttttaatggggccccaaaaa

SEQ ID NO: 29354 - DNA, 226 bp, Gossypium hirsutum
  Clone ID: LIB3148-026-Q1-K1-A1
gtaaattctacaccctgaaatcaaaatactctgctcctcaattgtgaataagaagaaaagttcgctgtatgttcctttcccttcacttcaatgaggtaattactgtatttaaattctaaaagaaaagctgcatttttgaagtgtgcatgttcataattttgtcaaaagaacaactttgtaatgaatacatgagtactctttaaaggaaagggaaaattgttattat

SEQ ID NO: 29355 - DNA, 266 bp, Gossypium hirsutum
  Clone ID: LIB3148-026-Q1-K1-A10
gcattttggtggagtagtactaaagataaccgggaactttgtttatttggggattaacaaagtccccatccccaacataaagtttaccattggatttctcttgcttgtattttattgtattgtgttgtatatacctttccttttggtgtatataagagaagtgcagccaaagagaatactggatttttttaaaaaaaaaaaaaaaaaaaaaaaaaaaaagaataaaagattaaaatttaaaataaaataatagaatataataatgg

SEQ ID NO: 29356 - DNA, 383 bp, Gossypium hirsutum
  Clone ID: LIB3148-026-Q1-K1-A11
cacgcgtccgcccacgcgtccgcactttgttcacgttttgttgcacacattattcttgtaaagatcatatacaatacaaaatgtggactattggattaaaaaaaaaaaaaaaaaaaaaaaaaaaaaaaaaaaaaaaaaaaaaaaaaaaaaaaaaaaaaaaaaaaaaaaaaaaaaaaaattttaaaaaaaaaaaaaaaaaaaaaaaaaaaaaaaaaaaaaaaaaaaaaaaaaaaaaaaaaaaaaaaaaaaaataaaaaaaaataaaaaaaaattaagggggggggcgtttaaaaaaaataaaatttattttggcgtggattggaaaaaaaattttttttttttaggcaacaaaaaataaaaatatatggggaggggtaataaaa

SEQ ID NO: 29357 - DNA, 354 bp, Gossypium hirsutum
  Clone ID: LIB3148-026-Q1-K1-A12
cccacgcgtccgcccacgcgtccgccctcgcgttcgcgggattacccgctgagtttaagcatatcaataagcggaggaaaagaaacttaccaggattcccctagtaacggcgagcgaaccgggaaaagcccagcttgagaatcggtcgccatcggcgtccgaattgtagtctggagaagcgtcctcagcgacggaccgggcccaagtcccctggaaaggggcgccggagagggtgagagccccgtcgtgcccggaccctgtcgcaccaagaggcgctgtctacgagtcgggttgtttgggaatgcagccctaatcgggcggtaaattccgtccaaggctaaatacgggcgagag

SEQ ID NO: 29358 - DNA, 421 bp, Gossypium hirsutum
  Clone ID: LIB3148-026-Q1-K1-A2
cccacgcgtccggcaggtctctccaacaccatggacatgaagaagaagatctcttgcgctgtcatattcgccgctgcctcaatgagcgcagtcatggcagcaagcaccgccccagcttcctcaccagatggcgccccacttagctccgcctcagttggcgctgcaccagcttctgcaccaggcccggactccagcgttgcaacctcaaccttgcctgttcttgggtcattggttggagccttcattgtctctttctttgcttaaattatgggttacctgcagtatttgaagagatcatatataacttacataccatttgtattcaagaaggctcacgttccgttccctttattttgacttctactgattgaagatttctttttcttcacttgttctgtaatgtgagaatttgaattccttc

SEQ ID NO: 29359 - DNA, 396 bp, Gossypium hirsutum
  Clone ID: LIB3148-026-Q1-K1-A3
cccacgcgtccgtgggtctccatggaatcttcttttcgtttctcaactttacccgatggattgccctttgtgcatttcaaacggatttaactgaatgtagagaatggttactgcaattcttatttttagtgcttaggcctcattgaaacttcggtgctgaatatgttaaagcttttattgttcttgttcttcaaaaaaaaaaaaaaaaaaaaaaaaaaaaaaaaaaaaaaaaaaaaaaaaataaaaaaaaaaataaaaaaaaaaataataataataaaaaaaaaatattaaaataaaaaaatataaatttaaaatataaaaagggggggcccctttaaaaatccaaatttaattccccgtgattgcaaattaataactttttttttggggccccaa

SEQ ID NO: 29360 - DNA, 390 bp, Gossypium hirsutum
  Clone ID: LIB3148-026-Q1-K1-A6
ccttttttttttttttttttttttttttttttttttttttttttttttttttttgggtgtttttttttttttttttttttttttttatttttttttttttttttttttttttttttttttttttttttttttttttttttaaaaaaaaaaaaaaaaattttttccaaaattataaaaaaaaaaaaaaatttccccaaaaaaaaaaaaatttttttttaaaaaacccccccccaaaatttttttttttcccccccaaaaaaaaaaaaaaacccccccaaaaaaaaccccccccccccccaaaaaaaaatttttaaaaaaaaacccccccccccaaaaaaagtttttaaaccccccccccccccccccaaaaaaaaaaaacccctccccccc

SEQ ID NO: 29361 - DNA, 297 bp, Gossypium hirsutum
  Clone ID: LIB3148-026-Q1-K1-A7
gcgtccggaattctggaagtatttccagcggtttttttatccaaagcagcatacgtaatccatgggcgggtttctggccattccggacatcaaatacaagctctagccataatggagctgcgggaagtaattccccacggcatgtgcatgacaacaatcattctatggcgtataatggacggccccctgactgaagtctgtaatcgtgtacacctgcagtgcttgggcaaaaattagttgcactgaatgtggattgagggatctaaaaaaagtctgaccctgtaaaagtgaataaag

SEQ ID NO: 29362 - DNA, 207 bp, Gossypium hirsutum
  Clone ID: LIB3148-026-Q1-K1-A8
cacaaatcaacccctccccccctctctctgtagtagttgttgatcctgagattcaaatctctagggtttttggctttggttgttgttctattattaccttctgtggaactttagttagcaattagatttttagggttttcggtataatgtgaatataaatcaaattatccatctttttttcccttctactctttcattaatggtatt

SEQ ID NO: 29363 - DNA, 405 bp, Gossypium hirsutum
  Clone ID: LIB3148-026-Q1-K1-A9
agagagggagattgagttaggcccgaagtgcacccttaaagaacaactcgaaaaagataaggatgatgagagtttgaggaggtggaagcaacaacttcttgggactgtggatttcgagtccgttggagaaaagctagaacctgaagtgaagatattgagccttgcgatcaaatcacatggtagacctgatatggtacttccaattccggagaacggaaagcctaaaggcttgtggtttaccctaaaagaaggaagcaaatacagcctgcaattcactttccaagtgagcaacaacattgtatccggcctcaagtacactaatatggtttggaaaactggtgtcaaggttgatagcacgaaagagatgatcggaaccttcagtccccaggcagagccttacacaca

SEQ ID NO: 29364 - DNA, 399 bp, Gossypium hirsutum
  Clone ID: LIB3148-026-Q1-K1-B1
cggacgcgtgggcggacgcgtgggcatgggtgttgtaatcattgacggatcgacggtgagagccttcgtgactgacgaccaacagttcacgaagagcgtggatgagcgtttcgcagctcttgacctcaacaacgacggtgtcctctccaggtccgagcttcgcaaggccttcgagtctctgcgtctcctggagtcccacttcggtgtcgacgtcgccactccccccgacgagctcactcagctttacaactccattttcgagaggtttgattgcgatggcagcggcaccgttgacctccaggagttcagatctgagatgaagaagattctgcttgctattgctgatggattgggatcttgccctatccagatggttcttgaggatgatgaccaaagttt

SEQ ID NO: 29365 - DNA, 385 bp, Gossypium hirsutum
  Clone ID: LIB3148-026-Q1-K1-B10
ctatgctcgactgaaaattcccatttcatgtatttttctttttcgtctatcaatgcaggcagattgtaaatagccatataaaaaaaaaaaaaaaaaaaaaaaaaaaaaaaaaaaaaaaaaaaaaaaaaaaaaaaaaaaaaaaaaaaaaaaaaaaaaaaaaaaaaaaaaaaaaaaaaaaaaaaaaaaaaaaaaaaaaaaaaaaaaaaaaaaaaaaaaataaaggggggggccttttaaaaaaaaaaaaattaaatacccgggtaatgaaaaataaaatttttttattagggcaacaaaaataaaataaaggggcgggttttaaaaaaatttgaaaaggaaaaaaccttggggtaccaaaataaaatggttttaaaaaaaacccttt

SEQ ID NO: 29366 - DNA, 362 bp, Gossypium hirsutum
  Clone ID: LIB3148-026-Q1-K1-B11
cccacgcgtccgcttaaaaatgacatccatgggggcagctttgaagatcggaattcgagttgcgaaaaaagcaaccgatgaagattgaattcgagtctgaatgttggatatggcggcatgctgtacatgcagcatttgcctttgaagaaaaggaaatgaaagctgcaacttattatgtaaattacaagttcttttatgtagtgtaaaatatggttctcatagaaataagttcaagacaataagatggctagcgctttagcagcccttgttccctttttattagtagagtaataatatatcttttgagagactaaaatggctgatgctcgtttcttttatctacttttatccattctgatgtt

SEQ ID NO: 29367 - DNA, 409 bp, Gossypium hirsutum
  Clone ID: LIB3148-026-Q1-K1-B2
cccacgcgtccggtataagagttaccaagagttatccgatgccttggctaagatgtttagctctttcactatgggtaattatggacctcaaggaatgatagatttcatgaatgaaagcaagttgatggatcttctcaacagttctgattatgtgccaagttatgaagataaagatggcgattggatgctagttggtgatgtcccatggcagatgtttgttgactcatgcaagcgcttacgcataatgaaaggatccgaagcaattggtctcgcaccaagagcaatggagaaatgcaagagcagagcctaaaaacaagatcctggaattgagcaaaaggctaggagagggagccttcttattgggatgtgttttatgtttttttaatggttatatatatatatttaatat

SEQ ID NO: 29368 - DNA, 298 bp, Gossypium hirsutum
  Clone ID: LIB3148-026-Q1-K1-B4
tttttcgtccgaagattttccatttaagggggggggaaccttttaagggagtagtaaaaaaaattttggtttttgaagagcccttaaaagagcaaattgatgggctctatcaaatctgttgtgatctcattctaaatggggccaacagtagctactttctaaaaattgtggaattttatggatccacgcttggtatgtagccaatcccaagaaaaaaggtacgaggggaagaatcgacaaggaatccataacaaaaaaaaaattgtgaatgaaaaaaaaagcgtgacgagaataattt

SEQ ID NO: 29369 - DNA, 411 bp, Gossypium hirsutum
  Clone ID: LIB3148-026-Q1-K1-B7
atcggcatcaatcaaatctgatactatcttgtatattctaaaaaaaaaaaaaaaaacgggggggtctatttataataatggacctcaaagaatgatagatttcatgaatgaaagcaagttatatggaacttctcaacagttcttattatgtgccaagttatgaatataaagatggcgattggatgctagttggtgatgtcccatggcacatttttgttgactcatgcaagcgcttacgcataatgaaaggatccgaatcaattgttcattcaccatgatcaatggacaattgcatgaccttagcctaataacattatcctggaattgttcatactgctaggagagggagccttcttattgatatgtgatttatgttttttaaatgtttatatatatatatttatatttata

SEQ ID NO: 29370 - DNA, 337 bp, Gossypium hirsutum
  Clone ID: LIB3148-026-Q1-K1-B8
caggaacgtacctaaagcttcaaaatccatctttgctccaaacccatctcgggatttgaatttcaatgaatttcaagttaaggccaaagcagaatccattgaagaaggaaactctagcagcagtggaatgtctactgatgtattaacaacaacaacatcatcatctggaggacaagtttgcatgttatagtcaagagttagatttggagctatcaattgcgattagttcatcctgaaagtactacaactcaaccggggtttcaactgctaactcagcccaatccaaacctccgttagacaaaagcaatatccagatcctgggactggctatagcggt

SEQ ID NO: 29371 - DNA, 319 bp, Gossypium hirsutum
  Clone ID: LIB3148-026-Q1-K1-B9
ctcactcttgcattctgttaagcattctgtgatgggctgcatcatgttctgcactaggaagtggactatggagatagttagggagatgcttctgagacagcttttaaaacacttgttaaagccatgatagaagccaatatagaattcaaagtatgcttaacagaatacttatttaaccaaatccttaacataataatacctaaaataaactattaaagaaactcccttatactgcccctcgatcctcaaatctatactaaaatctagaacaaaacctaaatcctatccctaatactatgttaaatatattcttaaaaag

SEQ ID NO: 29372 - DNA, 426 bp, Gossypium hirsutum
  unsure (1)..(426): unsure at all n locations; Clone ID: LIB3148-026-Q1-K1-C10
cccacgcgtccgcccagcttccatggggttgcatttgaggaacttgtgctatctaggccttgataacaacaagcttaacgggaaagtacctgaggagtttgggtttctggagtttgtgaatgaaatcaatttggaaaacaacaatctaagtggaaaacttcccttttctgctaacttcactgctaaagttggtgaaaagttaaggttaaaaggcaatccagaactgtgcgttgatgagaaattgagccatcgtgaaagcgttggggaactgaagaaatgcagcaagccagacattcccaatccagtcctcttcattggggtttctcattctgggctgttatcatcttcatcatctttccttgttttattngctgtttggggtctctggatccctttggcttgattgattatcatcaaagcgcatgg

SEQ ID NO: 29373 - DNA, 268 bp, Gossypium hirsutum
  Clone ID: LIB3148-026-Q1-K1-C11
gccacgcgtcgggctttcctgaaaattactcaatggaataatggttatgccagcacctcacctatcttggttgcctacgcagttccaacacctatctccacactaatctgttacaactctcttgcagcattggcattttatgggatatgctaaaagtcaaccatttttatactgggaaatctggtatgctccaaaattttgactgaatcagttcgactgtagaatgtacggtgtgagaagttgcagtttgtgtcagttagagggagtc

SEQ ID NO: 29374 - DNA, 408 bp, Gossypium hirsutum
  Clone ID: LIB3148-026-Q1-K1-C12
cccacgcgtccgaaatcggcttttcaatttggttggttccacactggggatgtcgggttttgtgactccgatggatacttgcatcttgttggtcggatcaaggagctcatcaatcgtggaggtgagaaaatatcaccaattgaggtagacgcagtgttattggctcacccagctgtaacacaggcagttgccttcggtgttcccgatgagaaatatggcgaggagataaattgtgcggtgattttaaggggaggaagcttggatgaagcagaaatcacgaaatattgcaaaagaaatcttgcgagtttcaaagtacccaagaaagttttcatcacggattccgtgccgaaaacagctactggaaaaatccagaggaggatagtagcagagcatttcttggctcatacg

SEQ ID NO: 29375 - DNA, 211 bp, Gossypium hirsutum
  Clone ID: LIB3148-026-Q1-K1-C2
cttcaccagtatttgaatgtttaaattatggtcacttttctctttgtaacttctaactcttttgacttgagattcatttaaacatgcctattgttgtattaaaggtggatacatctatatacagatacaaacagattactcagctgacaagctttgaaattcctttttagggaatttgaaactgctaattgacaaaattactggttgatgc

SEQ ID NO: 29376 - DNA, 424 bp, Gossypium hirsutum
  Clone ID: LIB3148-026-Q1-K1-C4
cggtccgacccacgcgttcaaaatgcgtcaatccagcttccatggggttgcatttgaggaacttgtgctatctaggcctggagaacaacaggctcaacgggaaagtacctgaggagtttgggtttctggagtttgtgaatgaaatcaatttggaaaacaacaatctaagtggaaaacttcccttttctgctaacttcactgctaaagttggtgaaaagttaaggttaaaaggcaatccagaactgtgcgttgatgagaaattgagccatcgtgaaagcgttggggaactgaagaaatgcatcatgccagacattcccaatccagtcctcttcattggggtttctcattctgggctgttatcatcttcatcatctttccttgttttattgctgttttggggtctatggatacttttggcttgatt

SEQ ID NO: 29377 - DNA, 357 bp, Gossypium hirsutum
  Clone ID: LIB3148-026-Q1-K1-C5
gtccaatttggccagaagggtattccatacttgtttacctacgatggacgcacaatccgtggcgcgagaccctttgatcaaagccaacgacaccatcaagcttgacttagagagcaacaaaattgttgatttcatcaagtttgatgttgggaatgttgtcatggtcactggtggaaggaacaggggacgtgttggagtgattaagaacagggagaagcataagggttgcttcgagacaatccatgtacaagatgcttctggacacgagtttgcaactcgtctatgcattgtctttacaatctgttaaggaacaatgccatggatttcgttttccatgggcctgggttttcaagtttg

SEQ ID NO: 29378 - DNA, 403 bp, Gossypium hirsutum
  unsure (1)..(403): unsure at all n locations; Clone ID: LIB3148-026-Q1-K1-C6
gccccacgcgtccggtttgaggtcgtcgactaggaaatatggtgttgtacatgagtctcgttagaattcactcttcttaatttcttttagtttggtgtgaaatgattttctttttattctttggttattattgtagtgtttatgaaaggaatttgtttttttgtttttgtttttatttactgtaaaggatttgtatgcatagattactttggttaatttagtattatcgagtttcaatccagttataaaattattaaaaatttattaaaaaaaaaaaaataaaaaaaaaaaaataatatataaaataataaaaattatatattatatattttttttanntattttttattataattatttttattttttttttttttattatattatttttttttttttaaaa

SEQ ID NO: 29379 - DNA, 414 bp, Gossypium hirsutum
  Clone ID: LIB3148-026-Q1-K1-C7
caagcccttcaatttaatgcttgaagaaagcaagaagggaaacgatcaaagagaagccaatggcggcggtagaaactccgactgagaatccagctccagcgtctggcgacggtgacggcgcctcactaacctgcgccgaggcaacggttaggattgccattacaaaagccaataaaaaagccttcaacatgctaacttgggccatttctagaagagaagaaaagctgaaaattttgggatttttcttctaaaaatggtgagatattagaaatctgaatggagactagggctgggaaagggtggtgctttatagggagagtgaacagcgcgtggggcctagtgagagggagattgacagctgggtaacgttcacataacagcttataaagtgaacacaccatgaatcaatgtaat

SEQ ID NO: 29380 - DNA, 418 bp, Gossypium hirsutum
  Clone ID: LIB3148-026-Q1-K1-C8
cccacgcgtccgtggaagcaacctcacttctttcttcatcttcttccttcgccctctctttccttccttcacctctttcttctccagatctccaccacaagtctcttgtcttcaggggcatgtttccagttactgtaaacccgcagacatgttcaacagctgttgtccgcagaaagttgagcttctgtacaaaggcagttcttggaggaaatgtgcatgtaacaggagttcctacttctgtccctgtaagagtagcacacgagcttcatcaagctgggcatcgatatttggatgttaggactcctgaagagttcagtgcagggcatgtccctggggccattaacatcccttacatgtacaaagttggatcaggaatggcaaaaaaccccagttttgagctgaagtatcatcacattta

SEQ ID NO: 29381 - DNA, 328 bp, Gossypium hirsutum
  Clone ID: LIB3148-026-Q1-K1-C9
gacgtcggctatggccgtcaacaggttcatcatcagcctcatggcgatgccttcttccatccattggattgtgagccgactttacaaatcggatatcagcatgatccaatgtcagtggtgactgcagggccaagtgtgaataattatatgacaggttggttaccatagtatatatatatctatatatctatatgaagaagaagaaaccatgggtatggatttcttcataagaaacttattttatgttattatatgaaacaaaagaaatgtgtaatgccatggatttattattattattattattattggaactttgtgtttttaatta

SEQ ID NO: 29382 - DNA, 371 bp, Gossypium hirsutum
  Clone ID: LIB3148-026-Q1-K1-D1
gagttatggcatggttaaaaacccttggcccaatgttgatgcacacagtggagtgctgctgaaccattttggtttaactgaagctagatactataccgttctttttggtgtatcaaggagtattggaatttgctctcagctaatatgggaccgagcactatgattgcccctcgaaaggccaaaaagtgttacaatggattggcttgaaaattattgcaagaaagctaaagcagcttaaaatcggtggatgaattaattaagcataataatttctcacaaggattggtcttgtgatgagtgtagcagctacctacatggtcaacggcaagctgtttcgttttttttaataatttactggggaaattagatgt

SEQ ID NO: 29383 - DNA, 217 bp, Gossypium hirsutum
  Clone ID: LIB3148-026-Q1-K1-D10
cccactcgtccgattcaccataacgctcattttatataaccggcattgatctattgtacgcgggtctatgatacccaggactaagacaaaagatatggctactgtcttcctcttcaagtctgcaccgaggacaccaatcgtactttgttactttcttagatcttatattaactagttaatgaatttatttccaggaaattctccagacctttatttt

SEQ ID NO: 29384 - DNA, 346 bp, Gossypium hirsutum
  Clone ID: LIB3148-026-Q1-K1-D12
agcaagattaggaataaaatcccaggaaattcgccaaatagtgattacgatttttgaaggtagctggaggctccataatttcctgtaaaattctttagtttcggtctataataaataattagtaggatccagaatagcatattgtaactgcgtattgaatactcgccggataattctcctttccaaacttgagtatcctcgtgatcagtctctgcaagagggatctgtagaattttttgagcaatttctgcttgaaaggtactattaatcaaatccgacctccattttctgtttgtattatcaataagatccgagactaactgtaattccctattgtttgatctaa

SEQ ID NO: 29385 - DNA, 311 bp, Gossypium hirsutum
  Clone ID: LIB3148-026-Q1-K1-D2
gtgcctccagcagactcatcagtgttcttcctaatatctgttagattttcagccactagtttatacagtgacctgaaggttgtgaacattattcccctgagaggtggagctactcccaagttctcgcagaggacaaatttgagtacagagaattaccaagttgtgtgaatgttaatatcaatattccaagtgtactaataataggttgcgacactttttggtgaactttgagagcaagttcaagtattcaaacaacggctattttttttcttgaaaaaaaaattaaaaaaatttaattttaaaaatataat

SEQ ID NO: 29386 - DNA, 420 bp, Gossypium hirsutum
  Clone ID: LIB3148-026-Q1-K1-D3
cttgctcaaaggtatgaagaactatacaaagagtacggtgtcaaatttttaaagggtgcttctatcaaaaacttagaagctggtcctgatggacaggtagctgctgttaaacttggagatggatctactgtggaagctgacatggtagttattggtattggagcaaaacctgcagttagtccctttgaagtggtaggattaaataatactgttggtggcatacaggttgatggtctgttccggacaagcgtacctggaatatttgcagtgggagatgttgcagcattcccccttaagatgtatgaccgtgtagcacgagttgaacatgttgatcatgctcgtcgatctgcacagcattgtgttaagtcattacttagtgcacaaactcacacgtatgattatctgccctacttttactcg

SEQ ID NO: 29387 - DNA, 67 bp, Gossypium hirsutum
  unsure (1)..(67): unsure at all n locations; Clone ID: LIB3148-026-Q1-K1-D4
gcgtccgccaaaagacagttcattcttttgcagatgttttttttttcggtnggacatacngcaaccc

SEQ ID NO: 29388 - DNA, 94 bp, Gossypium hirsutum
  Clone ID: LIB3148-026-Q1-K1-D5
cccacgcgtccgaaaaaaaaaaaaaaaaaattaattaaaaaaggacaaacaaaaaaaaaaaagggaggattaaggggccgccgatgtaaaagga

SEQ ID NO: 29389 - DNA, 384 bp, Gossypium hirsutum
  unsure (1)..(384): unsure at all n locations; Clone ID: LIB3148-026-Q1-K1-D6
tccgggtcggcccaacccgtccgcccacgcgtccgtttacaacaacaaaaaaaatctttccagtttctattttctaaaaacaaaactgaaaatgtcttgctgcggaggaaactgtggctgcagctctggttgcaagtgtggcaatggctgtggaggatgcaagatgttccctgacataatagagaagactacaactgagactattgttcttggtgtgacaactcagaaaatgaacaacaaagagaagcagagaggcctttgtctttttaactaaataaattctattactttagtatgtatcagcaaatcttcatgaggatttggttcttaattatgtgtaatgtgggcttttctgctatgtcagaatgtattatgatatttnng

SEQ ID NO: 29390 - DNA, 336 bp, Gossypium hirsutum
  unsure (1)..(336): unsure at all n locations; Clone ID: LIB3148-026-Q1-K1-D7
agccccgcctaaagtggtggaggtgtctttggttcagggatctaagtggacctacttaaatttttctagtaaatttatattccactgcagttattattaattggtttaagatagggcgattatcattgtatcaaaatccaagttgttccttctgcctaatcccatgtgtaatctataacccttagagggtgttcagttttaccttttctttcttttcttttctttttttttaaaaaaaaattttgagttttgtnaaaaaaaaaaaaaaaaaaaaaaaaaaaaaaaaaaaaaaaataaaaaaaattttgagggccgtcctttttgaaggatcctttc

SEQ ID NO: 29391 - DNA, 128 bp, Gossypium hirsutum
  Clone ID: LIB3148-026-Q1-K1-D8
ggagagcgggagtaatttggtaaaattaaaatgcaaagttaaagaaacttgtgcaaaccaaaaaataaaataaaaaataaaaaaaataaaaataaaaataaagaaagaaagaaaataaaaataataaa

SEQ ID NO: 29392 - DNA, 214 bp, Gossypium hirsutum
  Clone ID: LIB3148-026-Q1-K1-D9
atttgatattatgaacaattattgtgtctaccttgagcaacttatacgtctctatgacttttaccatatttgtgtgttaataatattggtattgcttattgagttttaaaaaaaaaaaaaaataattaaataaaaaaaaaaaatggaaatataaaaaaaaaaaaatatataaaatataaaaaaaaaaaaaaaaaaaaaaaaaaaaataatatat

SEQ ID NO: 29393 - DNA, 105 bp, Gossypium hirsutum
  Clone ID: LIB3148-026-Q1-K1-E1
cggacgcgtgggcggacgcgtgggaaaaaactatgaacgggggatcaatcatttttctttgattgtaattttgtgtaattatctttatatatgtgtttttaagtg

SEQ ID NO: 29394 - DNA, 421 bp, Gossypium hirsutum
  Clone ID: LIB3148-026-Q1-K1-E10
ctcatatcatgagttactgggacagcaagccatctttgctgaacattcagcatctgctggtcatccatgtccgtatgtagcttactttggaccaacggttcatccctcatcctcaaattccggtggaagtgtttcagatagttctagtttcaacggtcactggaatggtccatcagtgcctagtgagatgcctacatcttatgcttttcctgcgatggatctccattatcatagttgggagcatcagtccactccattctccacatttagcagccgaattggtagttctgatcaacctccaaatccgcctataaatcaaaggtccaccaggagcagttctgatacaccaagatcagcatcttttatgcatccgtttgttgttggccacagttctggtgcaagagcagggagttcagttgct

SEQ ID NO: 29395 - DNA, 66 bp, Gossypium hirsutum
  Clone ID: LIB3148-026-Q1-K1-E11
aaaaaaaaaaaaaaaaaaaaaaaaaaattaataaaaaaaaaaaaaaaaaaaaaaaaaaaaaaaggg

SEQ ID NO: 29396 - DNA, 421 bp, Gossypium hirsutum
  Clone ID: LIB3148-026-Q1-K1-E12
cggacgcgtgggcggactcgtgggctgcgtatcgtgagcggtggtggcctcggctttctgggctcatcgcctcgtcatttctacccggagattagcaatggaggcggataaaactttatcgccgtcgtcggatcgagtgaatcgggagggactacagggtccaagggacgataattcctcttggccagtgggtaccgaaggtagctgctgacgcttatgtggcgcctaaatttgtcttggccgtcaagtaaccgtcaacgatggagcctcggtatgggacggctgcgtcctatggggcgatctcaacaagaacaaccgtggattctgctctattttgcaggaacgctgtgttattcacgccccttggttctcaactgcctggtttctggcagagacatcaatttggcgcatccttgttcta

SEQ ID NO: 29397 - DNA, 374 bp, Gossypium hirsutum
  Clone ID: LIB3148-026-Q1-K1-E2
tttactttgaccaatgagccaattggggtctcttggtctgaagttctggatgctcagaagagttctggttggcattcttccacgagtgctgaaatggatgaagataaatggcccagcgatgcctctgttaaccgatatgaagctggttcagacatgcaggttcctgccccactggcaacatggtgcatggctgctgtaaacaccacttggagagcatgttgagaaactacatgaaccaactgggaagccattcagggaactccaatttttcattctggaggtttaggtcaaggaacgaggagtatcggttggggaaacagtcggggaacattccaggacaatgaaagcatcaactcatgcacttattggggaag

SEQ ID NO: 29398 - DNA, 146 bp, Gossypium hirsutum
  Clone ID: LIB3148-026-Q1-K1-E3
caagccctgcttgtttgtatggaaaattatgtttgaaactaaaaaaagccctcccccctccaactcctgtaataccctctcgtttcctgtctaccgaagcccgggtgttttttgccattattactgaaagctttgaagacctttca

SEQ ID NO: 29399 - DNA, 403 bp, Gossypium hirsutum
  Clone ID: LIB3148-026-Q1-K1-E4
acaacttcagtttaaagaaaccaaagaattgcttgccaaggaacgtgaggctgccaaaaaggcagtggaggtagtccctataattcaggaggttttggtggtggaccctgtgatgttggagaagcttacaaatgagaatgaaaaactgaagtgagttcgttggaaaagaaaattgatgaaacagagaaaaagtttgaagagacaaacaaaataagtgaagaaaggttgaaacaagctttggatgcagaatcaaaaatagttcaattgaagacttgtatgcacagtcttgaagaaaagatttcagacattgaatttgaaaaccaattttttgaggcagcataccctattaaatttctgaagaatgcttgagaaaggaaaggcagagatgtgtcttattacctac

SEQ ID NO: 29400 - DNA, 196 bp, Gossypium hirsutum
  Clone ID: LIB3148-026-Q1-K1-E5
cccacgcgtccgtttttctggaaatgtagctttgtgtagtccaaaagttctttttataagtgtgcgcaaataccaatatttgcaatttttctgcttaaaaaaaaaaaaaaaaaaaaaaaaaaaaaaaaagaaagataataaaaaaaaataaaattaaaaaaaaacataaaaaaaaattgaggggtcgttttatagt

SEQ ID NO: 29401 - DNA, 250 bp, Gossypium hirsutum
  Clone ID: LIB3148-026-Q1-K1-E6
gtccgcccacgcgtccgcccacgcgtccgaaaaattttttttaaaaaaaaaaaagagaacaaaaaaaaaaagaaaaatataaaaaaaaaaagggcccccaataaaaaaaaaaaaaagctaattaacacctcaatacaacaaacatggccgtcctaaactggaacccaaattcaattccactgctcatcgttaacaacattctattctgttaaaaccctatcttaacccaactgaattcgctttcaaaaca

SEQ ID NO: 29402 - DNA, 332 bp, Gossypium hirsutum
  Clone ID: LIB3148-026-Q1-K1-E7
gtaagagtacggggctgtgtgttggcccttggcgtgaggcatacgaggactgcgtgctggtcgtacggcactaaaggctcggtgtggctgctgagcggcgcttagggttttccccttctcttttggccgaaaagagtttaggatggctaggcatagttgggctttagggtattgggcctatatttgggtcttgggcattggtttgggcttgcaatgatttggtttgtaaaaggacattaaaatgggctgtttgtgttttaaactttttgttattgattattttatattatgttttggtctataaaatatatatttatttttttattgtccgt

SEQ ID NO: 29403 - DNA, 189 bp, Gossypium hirsutum
  Clone ID: LIB3148-026-Q1-K1-E8
gtgaaaaaacgggccattacagattcatcttcattaaatacacctatttcattcgtcaaaagcattcttttcaaaaatctcccccccccccaaacccaaccccctattttctctccccctctctcccctccttcccatcaccccctcttcctcaatacattccctccccccccctcccactcccctcca

SEQ ID NO: 29404 - DNA, 71 bp, Gossypium hirsutum
  Clone ID: LIB3148-026-Q1-K1-E9
atttttggcaacttgagaaaattttctcaatgttgtttctcctttattataattaaaaataataataacag

SEQ ID NO: 29405 - DNA, 217 bp, Gossypium hirsutum
  unsure (1)..(217): unsure at all n locations; Clone ID: LIB3148-026-Q1-K1-F1
ggtccgcccaacccgtccgcccacgcgtccggaaagctatatgaatcttttgttagaccattaaagggttcctttcctgggtcataaatggctgttcccagtcttaataactatttggttaaatactacaaatccagtactatataagtgactagggtattttcctctagcatatatatagcctataggcagtttcttttgaaccttatactactnt

SEQ ID NO: 29406 - DNA, 420 bp, Gossypium hirsutum
  Clone ID: LIB3148-026-Q1-K1-F10
gcatcagagacgccgtatgctgccgatttcacctcttgtctgaagctcaagacggagcagaggttctcatgtctgagatacgtattagcgctgaaaagggtggggaattttttatcgacaccgatagattaatgcggcaagcaccaactcctataccaagtccacaaagcagtggagacttttcagcactaagtccgatctctggtggctttgtaatgagctgcagagtccaaggggaaggtaagaacagcaagccattagtgcaactggccatgcgacacgtgacatgcatagaagatgctgccatcttcatggcccttgcggcagccgttgacttaagcatcgaggcatgcaagcctttccgaagaaagtttaggagaggctcccgaggctctcgccattctttatgaaaaaaaagaa

SEQ ID NO: 29407 - DNA, 167 bp, Gossypium hirsutum
  Clone ID: LIB3148-026-Q1-K1-F11
gtcctttctttgttatgtacaacatttgatatccacaagcccagatccaccgattttctccatcgacattattttttaattttttaattatttggttttgggtttcaagtgtactatgaggcaagtcctttaatccttatttctattaattccagttttgttcactg

SEQ ID NO: 29408 - DNA, 303 bp, Gossypium hirsutum
  Clone ID: LIB3148-026-Q1-K1-F12
caatggcatatgtttttgcttaaacttaatgttgcaatgaattttccatagtctattatgaggattttcttgaatctaaaaaaaaaaaaaaaaaaaaaaaaaaaaaaaaaaaaaaaaaaaaaaaaaaaaaaaaaaaaaaaaaaaaaaaaaaaaaaaaaaaaaaaaaaaaaaaaagaagacaaataaaaaaaaaaaaaaaataaacaaaaattaaaaaaaagggggctgctttaaaaaaaatccaaactaaatataaccctgccgtccaacgatatactccttttttaagggacaaaaaatata

SEQ ID NO: 29409 - DNA, 438 bp, Gossypium hirsutum
  Clone ID: LIB3148-026-Q1-K1-F2
cacgcgtccggcggcttcttcatcaatcgtgacagaatcccgggttactggatatggttccattacttatcccttgtgaaatacccatatgaagcagtcttacaaaatgaatttgaaaacccagcaaagtgcttcgtgagagggattcaaatatttgacaattcaccacttggagcagtccctcccgccatgaaagtgaggttactgcagtcattaagcaacactttgggaatgagaattacaagctcaacctgtatgacaacggggttggatattctgaagcaagaagggattacagatttaagcaaatggaattgcttgttgattacagtggcttggggtttcttgtttcggattttgttttacttctctttgttattgggaagcaaaaacaaaagatcatgaaaaacccggatgattgtttttaacaagtttaag

SEQ ID NO: 29410 - DNA, 412 bp, Gossypium hirsutum
  Clone ID: LIB3148-026-Q1-K1-F4
ccaagtcgaagatacaaggtgctggaggagtatcatgcaacctttgttgagacagttcccttcaaaactattgccactttcaccttgttccagacaatatacttgcttgtatgctttggcataacatggatccctctagctggagtcctttttccactgttgatcatgcttcttgtgccagtgaggcaatacttgctccccatgtttttcaaagctgtccatcttcaagaccttgatgctgcagaatttgaggaagcaccgcccattccgtacatggcatttgaagacctggaacttgagggaaggaccactactactatggatggtgcagaaattctggatcaaattatcacgacaagtcgtggagaaatccaccgtatgcagagtcccaatacatcttcagtcttggaaa

SEQ ID NO: 29411 - DNA, 414 bp, Gossypium hirsutum
  Clone ID: LIB3148-026-Q1-K1-F6
aacttctttgtgaagattgtcaatgcgactgctcaggaccatctgaaaaagcagcaagataagcagcttgcgaagaaggtatctgcttcgagacattaagcttgcgaatttatgaagcgggtatactggcattcggtcatcgttttactttattattcgtttaggggtagtaatagttcactatatgttaccgctctttcataatttaccattaaagcaattccccaacaaaccattgcactatgtagtccccttatagagctttgtataaaggaaataggtacacagacaaatagaagctacaggtttttataattcctgtgtaatgctggcagtaatatttgtttttctcccattgttaagagctatttgacacttggaaatttattctttcgcaatgtaagacttcaaatt

SEQ ID NO: 29412 - DNA, 302 bp, Gossypium hirsutum
  Clone ID: LIB3148-026-Q1-K1-F7
gaagagcttaatgtgtgatcattgtttctttttttgtttttgtttttaattgaggaaggaaggttattgtaatatatatatatataattatgtagcatatgaagtgtttttattttgagaaaatcaatagaacaataatgctaaagttggaggccattttataaaaaataattaaatatttttaattataaatatattattataatattaataaaatatattatttttataatcattatatatttaatatttaaattaggggcgcccgtttttatgtatccattctttctttccctttcttt

SEQ ID NO: 29413 - DNA, 419 bp, Gossypium hirsutum
  Clone ID: LIB3148-026-Q1-K1-F8
cccacgcgtccgcatgaattgtttggttgtgatgattttataaaacaggagatggaaaaaaattgcagagcatcatcaggttccaagtcagatggatctggtagacggatgaaggaggttgcttgtcctatctgcaccgttcatttgcaggtccaagttcccagctcaggttctgagacaattgaatgtggggtttgccagcatcctttccttgttagtgcccattgatcttcggtcaccacccaaccttctttaattatgtcaattaatttctccttctattgatttcattattagtcataatttggattagtcttgtgtattccttttcattgttctaacttctaaataaaagactaaaccctgtcaaattttccagttctgtgtatattaagttttctgaatctcgagtcttgtct

SEQ ID NO: 29414 - DNA, 313 bp, Gossypium hirsutum
  Clone ID: LIB3148-026-Q1-K1-G1
gattgacataacataatatgtatggttgcttttgattcgcgggttactcacatggttcttgatagcattgattactccgagtatgtacatcagcttacaaagctaatgatgaaaactaccacctgaacgtcatgctcaacaacacccactataccgaataagattatcaaaatggcatctaaatggtttcgctaaaaccccatccacggggcagtcctataacggactcaatcttaccaacaaccccataccactttgctcctaataaccagcctacaatacatgaaagcaccatgcccacacctttcaactt

SEQ ID NO: 29415 - DNA, 334 bp, Gossypium hirsutum
  unsure (1)..(334): unsure at all n locations; Clone ID: LIB3148-026-Q1-K1-G10
cccacgcgtccggttgaccaaggaaagcgaattttgaaggaaagtggaatgacactaattggagcagaagatttggatgatgctgcagagaaagcagttaaggcagccagcaaatgagaaatttaagatacgagtcctttgttcttattgtttttcatctttcacagcattgatgagtttttcctttatttttcttttcatcaagcccatagaatcttgttaatgataaagcagcagggggttactgtcctgcaaaattgatatatttgccacatttgctccggacagttggcatataattcaaagttgatataacatccttctttgatttgng

SEQ ID NO: 29416 - DNA, 378 bp, Gossypium hirsutum
  Clone ID: LIB3148-026-Q1-K1-G11
cccacgcgtccggaaaaaatccataactagaagtgaaaataatgaagcccatcattaccaagaatgttgcagttgctctatctttctttattttcctttctttcttccccttactaaacgctaccaaatactcggacatggtcaacgaaatctgtcctagtgttaacaacactaagctttgctccgaaacccttaagaatgatttacctgacgatataggcgccagcgattctttcattgtgagatttgtcaatattgctaaaggaaatgccacagaagtttccgctagcatcgacaagtcaatagggtcaggtggtgaaggaagtgtggaccttctggccttggaaaaatgccaagtagatataaaatctgcagtac

SEQ ID NO: 29417 - DNA, 422 bp, Gossypium hirsutum
  Clone ID: LIB3148-026-Q1-K1-G2
gacaacccgcttcaagaagaaccgcaagaagcgcggccatgtgagcgccggtcacggtcgtgtcgggaagcacaggaagcaccccgggggtcgcggtaacgctggaggcatgcaccaccacaggatcctcttcgacaagtaccatcctggttatttcggtaaggttggtatgaggtacttccacaggctccgtaacaagttccattgccccatcgtcaacatcgacaagctctggtctcttatcccggaggacgtgaaagccaaggccaccaaggatgccgctccgatgatcgacgtgacacagttcgggtactttaaagtcctcggcaaaggtgttttgccggagaatcaaccggtggtcgtcaaggctaagttggtgtcgaagaccgctgaaaagaaaattaaggagggctgtggtgctg

SEQ ID NO: 29418 - DNA, 137 bp, Gossypium hirsutum
  Clone ID: LIB3148-026-Q1-K1-G3
cccacgcgttcgcccacgcgttcgcccacgcgttcgggatgtactaaaagaactcgtaatggtgatgttagtgcagtcttaatgcttagtgaggccaaaactatatgtacttttggttttgttggtgctactttttt

SEQ ID NO: 29419 - DNA, 270 bp, Gossypium hirsutum
  unsure (1)..(270): unsure at all n locations; Clone ID: LIB3148-026-Q1-K1-G4
cccacgcgtccggagctgactccatacagcttgaggtatgtattattttttctgtgacagctcatttgagtacctgtgtataaaataaggtagtcaacaatatgaggcgttaatgtttttaattgaattgttggattcaattcgnaaaaaaaaaaaaaaaaaaaaaaaaaaaaaaaaaaaaaaaaaaaaaaaaaaaaaaaaataaaaaaaaaaaaaaaaaaatttatttagcttttataaaatttaaaatattttcttttatgtgaccta

SEQ ID NO: 29420 - DNA, 232 bp, Gossypium hirsutum
  Clone ID: LIB3148-026-Q1-K1-G5
atcaaatgagttcggaaccacgatataccatcagtatatatacactgctggtcagaacgaaagtagtaaagttgaaaagagtgtacagtgctacccttatctttgttttgaagttggtatctatcttgtacatgctaggttcttggcttcttgccttgtgtattcaagttttggttgcatatttttattgtgatattatgcctattttcttatataaacacagtattctctt

SEQ ID NO: 29421 - DNA, 238 bp, Gossypium hirsutum
  Clone ID: LIB3148-026-Q1-K1-G6
gcgaacaaggcttaaatgaaacaattgaaccgacggtcacactaacaatggccccattttgatgttctggatgtccatctcgttcaagtgttctggctttctttttttatatttcttattccctgcaaacattacccatttgtcacttgtagtttaaagaataatttgagtaaatttcgatttcctttgttgtattacctccatagctgcaaaaggaaagaaaaaggttttctcctaa

SEQ ID NO: 29422 - DNA, 331 bp, Gossypium hirsutum
  Clone ID: LIB3148-026-Q1-K1-G7
cagaaacaagcacattattattgatcttttttctggcaataacaacaagattaactgttgactcattttcaaacagtagttcatagacatcattgagactgtataccgtggggcaaggaaaggtcgtggtctggtaattgctcctaaagattactcgacaaaataccgttactgagtattcttgcaacctgttgttgatcagaaagatttaatggtcatatttcgcgaattcaatacatactattttccttatgaactgtgtatgtcgttcgcaatgcttgcgtgtacgtgtaggataatccaaatgtgagtataaactttttatattttt

SEQ ID NO: 29423 - DNA, 331 bp, Gossypium hirsutum
  unsure (1)..(331): unsure at all n locations; Clone ID: LIB3148-026-Q1-K1-G8
cccacgcgtccggttgaccaaggaatgctttttttgaaggaaagtggaatgacactaaggagagcagatgatttggatgatgctgcanagaaagcagttaaggcagccagcaaatgagaaatttaagatacgagtcctttgttcttattgtttttcatctttcacagcattgatgagtttttcctttatttttcttttcatcaagcccatagaatcttgttaatgataaagcagcagggggttactgtcctgcaaaattgatatatttgccacatttgctccggacagttggcatataattcaaagttgatataacatccttctttgattt

SEQ ID NO: 29424 - DNA, 351 bp, Gossypium hirsutum
  Clone ID: LIB3148-026-Q1-K1-H1
gagctgctgaccaagattgacacacaatctgtcatggaactcgagaaggaacccaagatcgtgccgaactgctatgcaagcatggttacaatgattgccaccatacccacggcggttgagactgtgtccgagtacccaccactctgacgttctgttgtacgtgacattcgccataacatgcgcgtcagcgtcattaacagtgtcgtgaagaatgacccaactgatgctccagctaccgcttctgctgccaagaataattgcgagattattggagagattattgtatcaattttcatttcagctttggtcacttatcttgacaatggactttaaatttaccttttgagagac

SEQ ID NO: 29425 - DNA, 376 bp, Gossypium hirsutum
  Clone ID: LIB3148-026-Q1-K1-H10
tgcaaaggaaaaaaaatattgaagacgaaatagattcaaatcaccttctgattttttttgctggttctttgtattgaatttgtgtagtgtgcgtaaaaaaatatggtatggctattacatggctttcatagccggaaacagagaaaaatgaaaaagaaaatacaagtttcttgtcgtttttttttctttctctttgctgtgctggtgttttcgtatttgcttgcaggtacggagttcgctggcatgcgttggcccttggcgtggggcatacagaggcgcggacgtggtcgtacggtgctgaaggcgcatggaggctgggactgctgcggcgcaagcagaaactgctagggttctgccctgattttttgttttgggc

SEQ ID NO: 29426 - DNA, 361 bp, Gossypium hirsutum
  unsure (1)..(361): unsure at all n locations; Clone ID: LIB3148-026-Q1-K1-H11
cccctcctcccagttacgaagaagcttacatgatcatccaacaaagattaagcaacaagaaattgaacaaagtgatggtggattttgagagtgagctgcttttggaggattgatccattcaggctgagggggaaggtccttatgaaacaacagcagaaagaaaatcaattagtttttctttccttccttcctcatccagaagcaaaattatttacagtttgtcttataattaatgggaattgcaaactattttatccctcaacatgcccccttgcaagggatgtcccaagttttgggctttgctgtagctcgaaagctggatgatatttactgtttaagtaatcctacttnctattgtttc

SEQ ID NO: 29427 - DNA, 168 bp, Gossypium hirsutum
  Clone ID: LIB3148-026-Q1-K1-H12
gacgaagaacttgataccttgatcaatggaaccatagctggaggtggtgttatcccgcacagtcacaagtcgcttatcaacaaatcctctaaagagtagtgtatgttaattgggttctcttgtggattttggttgtagccatattaaacttttgaaaatgtttttggg

SEQ ID NO: 29428 - DNA, 417 bp, Gossypium hirsutum
  Clone ID: LIB3148-026-Q1-K1-H2
acccttcctacggtagtaaccaatcaggaggaagacaagttacccgctgttcaaacggctcacatcaatctgaaagttaaaggccaggatgggaatgaagtgttctttaggattaaaagaagtactcaactaaagaaacttatgaatgcttattgtgatcggcaatcggtggagttcaactctattgccttccttttcgacggtcgccgtctgcggtgcgagcagactccggatgagttggaaatggaggatggggatgagatagatgcaatgctgcatcaaactggtggtaccatggcctaactagcttctttataggtttacttacctagtaggattcaaatggtagtatttgtgagattaggacctatatgtattaaacctcttgaaactgtgaggtctgctagtgcaatgtcc

SEQ ID NO: 29429 - DNA, 438 bp, Gossypium hirsutum
  Clone ID: LIB3148-026-Q1-K1-H3
ttccggttccctgtgtttgtgtttgtaagtatttgttccctagtctgttttcaaagaaattttggttgcgcattgtttaaaaaaaaaaaaaaaaaaaaacaaaactaaaaaaaaaaaataaaaaaaaaactatacatacaaaattaacacttataaaaaaaaaaaaataaaaaacttcaacttaataataaaaatacaaaattattttagggcccccccctttaaaaatcccaaatttacttccccttccatccaaagaataatctcttttttagggcccccaaaatcaatttccctcccccctttttaacaccctctaacctgaaaaaccccttcctttcccaaattaaatccctttaaaaaaaatccccttttccccattttgtttattaaaaaaaaacccccccccattcccctttccaaaatttcccccccctt

SEQ ID NO: 29430 - DNA, 294 bp, Gossypium hirsutum
  Clone ID: LIB3148-026-Q1-K1-H4
aaataattgaattggacctttgtttggaattaaactaaactattgtgctattttatattaattcctagttcatggtttttatctgtatatatatttgttctgccgttactcttcctagtaaaggaatatttaaattggacaaaaaaaaaaaaaaaaaaaaaaaaaaaaaaaaaaaaaaaaggaaaaaaaaaaaaaaaaaaaaaaaaatggggggggcgtgtttaagaatccaatagttttgttcccgtggaatgaaaatcaaatttttttgcttggggtccccaaatttaattc

SEQ ID NO: 29431 - DNA, 313 bp, Gossypium hirsutum
  unsure (1)..(313): unsure at all n locations; Clone ID: LIB3148-026-Q1-K1-H5
ccggaattgactgtgctcacaatcccgccaatagtttggcccagctttgaatctgattagcttttgtaggttatatatnaactgtataatgtattttgtgggtgcgtcatccatctgatcaataaagcatanaaatttgtatccccaaaaaaaataaaaaaaaanaaaaaaaaaaaaaaataacaataaaaaaaaanaaaaaaaaaaataaaaaaataaaaaaataaaaaaaatacaaataaagggcggccgaatattttaaaaacaaaattttattataaaccttgtatttcctattgtctatttatctttt

SEQ ID NO: 29432 - DNA, 380 bp, Gossypium hirsutum
  Clone ID: LIB3148-026-Q1-K1-H6
ttgacgggccggacccacccgcccgggagaaaggatcgatctttatgaagaagctcgtggtaagtatatagtggatgagaatgtgttgaaggtaatgcagagtcatgctgtggtaatgcatcctctcccgaggcttgatgagattaccgtcgatgttgatgccgatccgagagctgcttattttagacaagcaaagaatggtctttatataaggatggctcttttaaaattgttgcttgttggatggtgaggagaagaaggggctatttttggatttattttgggaaatttggcatcttttaattcagcttgattagggtaatcattgtgcttttgagaaactgaagcaaataactaaaaaaaggatcaatttcttaata

SEQ ID NO: 29433 - DNA, 426 bp, Gossypium hirsutum
  Clone ID: LIB3148-026-Q1-K1-H7
catggaccaatgctgcaagcggtggcctcatatgatcccgtagttcaggatgctgcggatcatgctgtgaagaccatacaacagagatccaattcccttctgccctacgaacttaaagaaatagttcatgccaacgctgaggtattggaagattttgcaaaactcaacatggttcttaaagtgaagagaggagacaaggaagagaagttcaaggtggaggtacaccataagaacgaagggacttaccatgtgaaccacatggagcaagaccagtcttgaaagctaacggtatggtaaaactgttaaaaagagtttgaatcttaatatgatgatatgactataaaaaagtgtgaaccttgtatcatgtgttcatctttactcctgttgtaaaacctatgtttgtaagaatgttcggagaacatacac

SEQ ID NO: 29434 - DNA, 193 bp, Gossypium hirsutum
  Clone ID: LIB3148-026-Q1-K1-H8
caagtactaagtttcattattctggggtgatcccaatttccaaatataaatgtaatatccctgtacagataatgaaaactgaaaagggcattctcatttctctttaatcaggttaagaaaatataccttcccttcctttaagccagggaaaaatacattcatatatactatttactttctctctttgcaagct

SEQ ID NO: 29435 - DNA, 362 bp, Gossypium hirsutum
  Clone ID: LIB3148-026-Q1-K1-H9
cccacgcgtccgcttaaaaatgacatccatgggggcagctttgaagatcggaattcgagtggcgaaaaaagcaaccgatgaagattgaattcgagtctgaatgttggatatggcggcatgctgtacatgcagcatttgcctttgaagaaaaggaaatgaaagctgcaacttattatgtaaattacaagttcttttatgtagtgtaaaatatggttctcatagaaataagttcaagacaataagatggctagcgctttagcagcccttgttccctttttattagtagagtaataatatatcttttgagagactaaaatggctgatgctcgtttcttttatctacttttatccattctgatgtt

SEQ ID NO: 29436 - DNA, 228 bp, Gossypium hirsutum
  unsure (1)..(228): unsure at all n locations; Clone ID: LIB3148-027-Q1-K1-A11
gattttagtttatgtgcaaggatccttgatctattttggaggttgagagaagttttcattaaaattatgaaatttgcaattatctactatgcgactgtagttcctaaaagttttgtggtnaaaaaaaaaaaaaaaaaaaaaaaaaaaaaaaaaaagggggggccgttttaaagatcccaactttccttcccctgccttccaacttattagtttttttttggggcaccc

SEQ ID NO: 29437 - DNA, 271 bp, Gossypium hirsutum
  Clone ID: LIB3148-027-Q1-K1-A2
caggattagagaggcgtacgatgtttccaggggatggagtaagtgtagataagggtaaagggggtaggaagccctggaaatcccatttcttttaacctttaacccttaaccctcatacctttgggtccataataaggtttaagaatcaagggccaagaccgggtaaccttattggttctaccgggataaagcttttactctgttctactatgttgaaggggtctggcccaatatatatatatgtatataatgaaggtggcaatgcatgaac

SEQ ID NO: 29438 - DNA, 211 bp, Gossypium hirsutum
  Clone ID: LIB3148-027-Q1-K1-A3
attccattttctccaaaaaaaaaaaaaaattttaaaattaaaaaaaaaaaaaaaaaaaaagagaaaaaggagaattaaaaaaaataaaataaccaattttttttaaggtgctcccctctttttcttcccacctttatttccccccccttcccccaccattcaaacttcttttactgggccacctttttgttttccccccttttttttcttt

SEQ ID NO: 29439 - DNA, 264 bp, Gossypium hirsutum
  Clone ID: LIB3148-027-Q1-K1-A4
ataaaagagagcaatgtagcagtagacatttttggcttgtactaactttggtgaatatacgagagtttaaaagtcaaatggctcaaaaaaaaaaaaaaaaaaaaaaaaaaaaaaaaaaaaaaaaaaaaaaaaaaaaaaaaaaaaaaaaaaaaaaaaaaaaaaaaaaaaaaaaaaaaaaaaaaaaaaaaaaaaaaaaaaaaaaaaaaaaaaattggggggggggttttaaagaatcaaattttaataaccctgtaattggaaaaa

SEQ ID NO: 29440 - DNA, 397 bp, Gossypium hirsutum
  Clone ID: LIB3148-027-Q1-K1-A5
tggactcgggtgtgtcagtgttggataaggatatatatcttacacaggtatttttagttgtgtaagttattccttatatttggagggtcttagagagttatatccccacacccatgtacgaatatacattatacatggacacttaaagaaaaaaaaggaagagtcagagatcaacatagcttttacaaacattgcgtttggatcaaaatgctatcgagttttcgattttgttcaggttacatccacgaccagaaagtgacgtggagtacttgcatggcattttggaatcaatcgcccgtatagaggcaaaggcatacatgttgttgaaggatctaggcgcgacccaagtcgatgaagtgttcaccgccggaggcggtgcaaagaacgacaaatggac

SEQ ID NO: 29441 - DNA, 259 bp, Gossypium hirsutum
  Clone ID: LIB3148-027-Q1-K1-A6
aaaaaaataaatgttaaaaaacctggggattcagacaaatacttattatgatgaactgatgtgtgtgggcaggaattaattactttgttcaacaaaataactagttgttgttgctactgctgctgcattataaggtattaatagaggtactgtgagtcctttttctaaaaaaaaaaaaaaaaaaaaaaaaataaaataaaaaaaaaaaaaataaaaaaataataaatgggaaataattttggggggtctattttaaagt

SEQ ID NO: 29442 - DNA, 303 bp, Gossypium hirsutum
  Clone ID: LIB3148-027-Q1-K1-A7
acaaagatttactggggtgatgccagggataaaatatgtgaatctgttgcagagttgaagcttgattgtttggtaatgggcagcataggccttgccaccttccaaagggtcctgatgggaagggggaccaccattttgttggtaattccacctggccaagtaccattggttaaggatcccagtgcccatggattttgatctcagaattctgcaaaagtaatgttctttgaaaataatcgatgttccctgtttctatttctatgtgggggatttatgtatgtatgtatggacaccttggttctg

SEQ ID NO: 29443 - DNA, 251 bp, Gossypium hirsutum
  Clone ID: LIB3148-027-Q1-K1-A8
cccacgcgtccgcgtagagaacttgaagcggccaaagagagttgttcaatgtggtagatgccatttattaggtcattctcaaaagaaatgcacaatgccaatttgaccctgatttagaatcttttttttgcccctttctttttagcctttgaatattttgtttttaagtttcaatagaatcagtaatgtgtttgtaatgttattgtatggttttaacattccagtcttagaataaagcatatcctctgctc

SEQ ID NO: 29444 - DNA, 241 bp, Gossypium hirsutum
  Clone ID: LIB3148-027-Q1-K1-A9
atttaagacaggtatgcgtcggcgtggggacacagtttgatgaagtgggggttaaacttggtagtgcagggatgggagattggagtctatttataaaattagctaaccctacttctgtaaaacgaaaggtgaggggctgttctcactcatgactcgtgtattgcgcctaatagctaatccacttgtgaaaggtgtacactacatttcgtttaatcattgatttttttttcttttccttttt

SEQ ID NO: 29445 - DNA, 164 bp, Gossypium hirsutum
  Clone ID: LIB3148-027-Q1-K1-B1
cggacgcgtgggctgcccttttcggtgagactgatgattgattgctacttaaatatgtaggttggtggcttttgaagcttttatggtttatgcattatgctcctggtatttgtactctgtatatttttaatttgaggaattcagtcttactgctcttttgattt

SEQ ID NO: 29446 - DNA, 446 bp, Gossypium hirsutum
  unsure (1)..(446): unsure at all n locations; Clone ID: LIB3148-027-Q1-K1-B11
gtacaccacaaggataaagtttttcaaggattacatttctcagttgaagaaagccattgatgataagtccaacttgaccggctattttgcgttgtcntttttttataactttgtatgtgtattatgatatactttaaggttttgcattgtttacgtttatttaacttttttattgtttttcattgttttttttttttttcataaattttttgttttagttactttgtattttttttttttatttttttttttattgtttttatttttttattatttatatttattttgtatttattttttattttatattttttttttaatttttattctttttattttttttctctttatcatatttatttatatgctttttttttttttattttttattttattatattttttataattacctgttatacttttataatattttattttttttt

SEQ ID NO: 29447 - DNA, 256 bp, Gossypium hirsutum
  Clone ID: LIB3148-027-Q1-K1-B12
gcgatcccttatttcgttcgtttactcccccttagccttgacattgtcatatcacactagctggtgagctgaaattatacagcaccccgtctggaatcaacttgaggcttcctgtgcgattgaaatgcttggaattgggagatatatgtatgaaaacactaacgtacgtctgaagtgaagacagaaaacgctgtaaggaatcactattattatcattatgatcaccattatgagaggctcacagagattcattaga

SEQ ID NO: 29448 - DNA, 263 bp, Gossypium hirsutum
  Clone ID: LIB3148-027-Q1-K1-B2
gttcgagcgacgcgtcacgtatatcgcgagcggtcgccctaatgaattattgtcctgtgattggtctaactataatgggtgctgaggttgaacttttttgtcacagatctctaataccaaattgtatcttattccataaatgtgacgatttgaaattattcatccctatagctatctcttttagctcaagttaggaagccaaaaagaagtgtaagagatggtggctttcctgtgcctacaaaaaagattactatataacaagg

SEQ ID NO: 29449 - DNA, 163 bp, Gossypium hirsutum
  unsure (1)..(163): unsure at all n locations; Clone ID: LIB3148-027-Q1-K1-B3
tcgcccacgctggtggattccacattttgtaacattgnnataanctcgggtnncagnagncaaggggggaccacagtaaaaaagccaacatagaagtaaaaaaacagaaggatcatactgtaaaaccatgttgtaaaaactgtaattttctgcccgcatgcat

SEQ ID NO: 29450 - DNA, 198 bp, Gossypium hirsutum
  unsure (1)..(198): unsure at all n locations; Clone ID: LIB3148-027-Q1-K1-B4
cgtcgtcaaggctctccaaccgctgttgaaggctccagtgccagtaccagcgctggagacgtaaaacagcagaggaatccaagtttcttcgccatttatcgaaatttcatcaacttttgatagtttggtttcgtaatcaaaatacagattttcatctgatcactaaatattaattatatacgtttttctaaannaaaa

SEQ ID NO: 29451 - DNA, 134 bp, Gossypium hirsutum
  unsure (1)..(134): unsure at all n locations; Clone ID: LIB3148-027-Q1-K1-B6
atttgtatatgactctgcaagtgtgtgcctagcggcattaccatttgtgacccatcattcccctttgtgattagaaacattaagaatagaatactcttaaactgaatgacagtttattcaccttcttttgcanc

SEQ ID NO: 29452 - DNA, 134 bp, Gossypium hirsutum
  Clone ID: LIB3148-027-Q1-K1-B7
tttgtgttttaaactttttgtttattgatttattttatattttgttttggtctgttgtgggtgtttgggccgggcaaatttggcccactacaattattatcgtaattttattaaagagtgatagttcttttgtt

SEQ ID NO: 29453 - DNA, 400 bp, Gossypium hirsutum
  Clone ID: LIB3148-027-Q1-K1-B8
acgcccacgcgtccgaattgcaaaattcttggcatgtgattgggcaagagataatatgggggttaatattgtcaccccgggggtgatcaaaactccccacactttaccttattttgaaggtaataaagaattattagagacaaccatgagccgaacaccattagctcggttcggaaagccagaggaagtgtcggcgatggtggctttcctgtgcctaccggcagcttcctatgtaacagggcaacttatttgtgttgatggtgggatgacagtgaatggcatctactttccaaagcaaattaggaaacaccatgagccatgttatcggatcaaataatgttatattataatagagttaatatttattgtttaacaaataatacaacgtttaccattcaat

SEQ ID NO: 29454 - DNA, 215 bp, Gossypium hirsutum
  Clone ID: LIB3148-027-Q1-K1-C1
cgaaatctaaagtttgagcagagcaagcgtttctacatatcacattgtataggattggatgccgatgataaaatattttcttgacataacataactcaatgcatggttacccaaattataaagtaactgtttaagtaaaaaaaaaaaaaaaaaaaaaaaaaaaaaaaaaatttactttataatcttaaaaataaaaaaagaattaaaatgggcgg

SEQ ID NO: 29455 - DNA, 97 bp, Gossypium hirsutum
  Clone ID: LIB3148-027-Q1-K1-C10
ggattttaattgtgttattaatttattattttaaattttaaaaaaaaaaaaaaaaaaaaggggaaggggaaatttaaaaaaggaaattaattttaaa

SEQ ID NO: 29456 - DNA, 304 bp, Gossypium hirsutum
  Clone ID: LIB3148-027-Q1-K1-C11
gacatttcttcatttggacttttaggccagatctctctcaatttcaatctttcagatctggcagctgacttttctcctagttcacgtttctttctgtcaatttgtatgggcacatgcatttgccctgtagcacatattttctgcgtgcatccatgtcttcattgtgagtccgttttagacattattcttgatttagccaatgttggaggccttttatgtgttccctatctaaaatattttctccaggtcataaacaaggactttgcccctgttccattagtttattcattcatgaaaattacaa

SEQ ID NO: 29457 - DNA, 412 bp, Gossypium hirsutum
  Clone ID: LIB3148-027-Q1-K1-C12
caaattactaagagctgtgatcaagtgcttgaccaccccagagcaatatttcgagaaggttctacgtcaagccatcaataagttgggatccgatgaatgggctcttacccgagtcgtcacaactcgtgcagaggtcgacatggtacgtattaaggaggcatatcaacgaagaaacagcatccctctcgaacaagcaattgctaaagatacttcgggtgactatgagaagtttcttcttgccttgatcggagctggagatgcatgaaccgtcttcggtattaagttcctctgtatgaatgtctagtttgccttatccgctatgacttaataatttatgcttggtttttcatcgttttcattatctaaagcattgcttgcttccatgatagaacattcaaaataaaatgattga

SEQ ID NO: 29458 - DNA, 338 bp, Gossypium hirsutum
  Clone ID: LIB3148-027-Q1-K1-C2
tatggctaaaccagttctattacatcttcggcttccttttcatagtgttcgttattctaggaatcagttgtgcggagataacaatcgtgctatgctacttccagttgtgcagtgaagactaccattggtggtggagatcttatttgactgctggctcctctgctctttaccttttcctttactcgattttctacttctttaccaagttggagatcacgaagctggtttcaggcatcctttactttgggtacatggtaatttgttcatatgccttctttgtcctaacagggacaatcggattctatgcttgcttctggtttggtcgaaagatctactct

SEQ ID NO: 29459 - DNA, 402 bp, Gossypium hirsutum
  Clone ID: LIB3148-027-Q1-K1-C3
gttgataattgggcctttgaggagggccctcattctgactttcctggacctacttccggtagcacagcctgtgttgcagttattagaaataaccaacttatcgttgctaatgccggcgactcacgttgtgtgatatctagaaagggtcaggcatacaatctctctaaagatcacaaacctgatcttgaggtcgagaaagaaaggatcttaaaagctggggggtttatacatgcaggacgtgtcaatggcagtttgaatcttgcaagagcgataggtgacatggaattcaagcagaataaatttttgtctgctgaaaagcaaattgtaactgcaaatccagatataatacaccgtgagctttgtgatgatgatgagttcatggttcctgcatgtgacggaatc

SEQ ID NO: 29460 - DNA, 293 bp, Gossypium hirsutum
  Clone ID: LIB3148-027-Q1-K1-C6
tccaaagaagatgatgtccggaagtatgtctacacttaccggaggactttcacagcaaagtgctggcaagaaggtcagtaaagctccaaaaatccagaggctggttactccattgacactccagaggaagcgtggtagaatcgcagaaaagaagaagagaattgccaaggccaagtctgaggcagccgagtaccataagcttctcgccacaaggttgaaggagcagctggagcgccgtattgagaagttagcaaagaggaggtcgaagctctcttctgctgctgctaagcctt

SEQ ID NO: 29461 - DNA, 247 bp, Gossypium hirsutum
  unsure (1)..(247): unsure at all n locations; Clone ID: LIB3148-027-Q1-K1-C8
ctccacgcgtcctcccactcgtccgcgaaaactgcattatgtaaaattgctgtaataagtatcgtgtttctgttaaaggaaacactatgtctggcttgtaccccattactgattaaaaaaaattttatagctaaacctgttgctttgcttgcttagcatggaaatttatgttctttcattggtntaaaaaaaaaaaaaaaaataaaaataataaataaaaatataaaaaaattaattatttaatttt

SEQ ID NO: 29462 - DNA, 308 bp, Gossypium hirsutum
  Clone ID: LIB3148-027-Q1-K1-C9
gcgtccttctatccttctcacaaccctattttcattttcccaaaaatcaactttatctgcgggccagttcacatgcacatgtaactcctatgactgacctctgctgtcaagaaatacatgggtcttcttgtctaggtgcactttcaccacatagctcgaccttcaaagagggcaacctggaatagaaacaacacactttcccttcgcctctaccgttgatcccctgtaccgtactttgtgattttgttccttctatcttggctttattactattgtaaggtttataataaattttatacgttatattt

SEQ ID NO: 29463 - DNA, 376 bp, Gossypium hirsutum
  Clone ID: LIB3148-027-Q1-K1-D1
acagttgctgattactccaatggatctgaaggatacacatataattactatgaagatatgacccgagaaagagttattgagatagttgagatgctaagaaggggagagaagctaccgcctggcactcaaaatccaaaacgaatcaagagcggaccagaaggtggaaataccactttgctaaccgatcccaaacctcctccatgccgtgatcttgatgcctgctaatgttaacatgccaccgcagtctcaaataatgtgaagcttgggtttgccatggcttttttggatgtatgttcttgttgaatttgtgaagctcaaccaatcatatattttgaattttccatgcaatttcaacttggtataagttatgagatga

SEQ ID NO: 29464 - DNA, 282 bp, Gossypium hirsutum
  unsure (1)..(282): unsure at all n locations; Clone ID: LIB3148-027-Q1-K1-D10
ctgttttcttctactcttgacattatatgatggaatgcatccattcacaataaaagaaacgttctcggcatttattattttttatctgggaaaattactaaaataccgtttgtatggctttttgtgtatggttgctttgacttatatgatggaatgcatccattcacaataaaagaaactttctcggcatttattattttttatcataaatggcccaggtatttaaaaaaaaaaaaaaaaaaaaaaaaaaaaaaaaaaaaaaaaaaaaaaaannnnnnntnn

SEQ ID NO: 29465 - DNA, 371 bp, Gossypium hirsutum
  Clone ID: LIB3148-027-Q1-K1-D11
atccaatggctgaaggataagggcttgaatgcctacagcatatcttacggaagttgcttgctgtataatagtatgttccctcggcacagggagcgaatggacaagaaggtggtagatctagcccgggaagtggcaaaggcagaactgcctccgaatagaaagcatcttgatgtggtcgtggcttgtgaggacgacgacgacaatgatgtcgacattcctcaggtttccatctacttcagctaaggcctaaggttgtttttctcatctctcattccctgctgcttggggttgtgatctaaaagcacaaaacttttacagtgttattaaaatggatatttcttttttaaagtaaattcatcgtaacttttaag

SEQ ID NO: 29466 - DNA, 454 bp, Gossypium hirsutum
  Clone ID: LIB3148-027-Q1-K1-D12
ggagcaaaagaagtagttgtttggggaacctttatttcatttaagggaatttatgcacgtcgacgatgtatcttatgctgtggttttcttactaaaaaatcatatttgtttttaacatgttaacttagttaattaaaatatttttatctttttattgaatcatcatttttttttttattaatatttaggaacgttatattattttattttttaaaaatttaaatattattttaataaaatattaatttaattatttttttattattattattatttatatcattatattattttttattatttatctttatttttatattatatacaattattttttaattattttaatctatattttattttattctttatatttattaatttttaatttttaataatttaatttaaattttgttttaatacataataatttttatttttatattatatttat

SEQ ID NO: 29467 - DNA, 440 bp, Gossypium hirsutum
  unsure (1)..(440): unsure at all n locations; Clone ID: LIB3148-027-Q1-K1-D2
ctcttcctccctctcttcctcccacgcgtccgatattttttatttttttaaaaaaaaataaaaaaatatgagaaggtttattatttttataaatantaattaannntaaaaaaaaaaaaaaaaaatatatatattaaattaaaaattnaatatatatttttttatattttcttaaaatttttttttccttgttttttaattatattatttttaattttccctctctttaatccttccccccttttttcccctttcttcccactttttttttctttttctttcgcacccccattttttcctcctccccccctctttctcccccccttttcttattttaccccccccccttcctcctccctccttttttttctcttggtatatttcctcccccctttcttccccctttttttttttttttcctctacttatttccccccccc

SEQ ID NO: 29468 - DNA, 118 bp, Gossypium hirsutum
  Clone ID: LIB3148-027-Q1-K1-D3
gttttaccttctgttatgtacggactgaaagtagtagtggggatttaatactaaaagcggtttttggcttctcttttacttagaatattcaagtttatgttatgttctgttgttccct

SEQ ID NO: 29469 - DNA, 199 bp, Gossypium hirsutum
  unsure (1)..(199): unsure at all n locations; Clone ID: LIB3148-027-Q1-K1-D4
aaaacccggcccgacccacgcgtccttccactcaaccctccacaccctctttttttttctccaaccccacaaccancacagaagacgtaaatcttaaaatgaatccacccccccccaacatttatctaaattccatcaacaatctatagtaaaatcacttaatcaaaatacataatatcaactaatcactaaatattaa

SEQ ID NO: 29470 - DNA, 401 bp, Gossypium hirsutum
  Clone ID: LIB3148-027-Q1-K1-D5
aaaaaaaaaaaaaaaaaaaaaaaataaaaattaaaaaaaaaaaaaaaaaaaaaaaaaaaaagggaaaaaaaaaaaaaaaaaaaaaaaaaaaaaaaaaaaaaaaaaaaaaaaaaaataaaataaaaaataaatataaaaaataaataaaataattttttttaaatatatttttatatttttttaaattttatttgtggggtttttttttttttttataatttttttttatttatttattttttttattttttttttttttttagaaaaattttttttttttatttattgttttttattaattaggttatttataaaattttgtgttttatttttttttatttttagatatttttttttttttaaattgagtttaattttattattttttgaaaatttttttt

SEQ ID NO: 29471 - DNA, 397 bp, Gossypium hirsutum
  Clone ID: LIB3148-027-Q1-K1-D6
gtctttagctcctagcagcatgaagattaatgttgttgctccacctgagaggaagtatagggtctggattggcggttctatcttgtcttcccttatcacattccaacaaatgtggatcgccaaggcagagtacgatgaatctggtccatcaattgtccacatgaaatgcttctaaatgttaatcgacatgatcttttttctatcatcatatgtttattttttttgtcggatagtactatcattccttttttagaaagagtttttttatttttgttttaactcttatttttttattattttttttaatagaagttttctttttttttttacttttcatattattattatattctttttttttatctatttatttcatattttttatatttgttatttt

SEQ ID NO: 29472 - DNA, 341 bp, Gossypium hirsutum
  Clone ID: LIB3148-027-Q1-K1-D7
cattagcattgtattcgaagggataaagtgtgatgtacatttattagtgtacgagttgatgtagatggaaagtctcatttatatgatttttaaagtgaaattaataataccgaatttgtactttcatctttaataataaaataaaaaaaaaaaataaataaattattataaaatattttttttaattaaaatatatttttatattattttttaattttttatttaaatatttattttttttatttatttatttttatttattttttttatttatttttattttttttggttgtttttttattttttattttatatttttttatttttttttatatttatta

SEQ ID NO: 29473 - DNA, 435 bp, Gossypium hirsutum
  Clone ID: LIB3148-027-Q1-K1-D8
ttccctgttctaccactcttccggttattttcaaaaaaaaaaaaattttaaattttaaaaaaaaaaaaaaaaaaaaagggcaatggtaaattttaaaaaaaaaaaaaaaaaaaaaaaaaaaatataattaaaaaaacccaaaaaaaaaaaaaaaaaaaaaaataaaaaaaaaataaataaaaaaaatattatggccccccctttttaattttcaatatttatttaccccttttttccaatttttttttttttttttatttcccctaatttttttttttttccctttttttataaactttttttcttaaaaaaccctttttttaccatatttttttttctttttataaattcccctttttccccatttttcttttttaaataaatcccccccaattttcctcttttaaaatttttcccatttttttttcttttttt

SEQ ID NO: 29474 - DNA, 369 bp, Gossypium hirsutum
  unsure (1)..(369): unsure at all n locations; Clone ID: LIB3148-027-Q1-K1-D9
aaagaataggaatttttaaaaatttaataataaaaaaaaaaaaaaattaaataatataattaaaaatatttttaattaaaaatttttaaattaaaatataaaaaaaaatttttataaaaaaaatattattataaaaaaaaataattttaaaaaattttataaaatatttttaaaattaatttaataatttttaataaatttaaattaatttttttttatttattttttaataattaaaaaaaaaaaaattttttttttttttaaaaaataatatattattattttattttttattttttatataatatttaaaatatattatatttttttttttttnntattttattatttattataattaatttaatt

SEQ ID NO: 29475 - DNA, 253 bp, Gossypium hirsutum
  Clone ID: LIB3148-027-Q1-K1-E1
aactcaacaaggctcttgctgttgaccccaggattgagatttgcatgctccctgttggtgatggagtgaccctttgccgccgtgtcaaatgaaccaccaccgccgccgccgccgccacagccgcttctaccacccaagattgacaaacttataagtacttcaaaatttcataaatttttttttgtgcaatttcaaatatggtgtaaatttaatttggtatttataaaagcaaagcaatgcccatctaccattt

SEQ ID NO: 29476 - DNA, 374 bp, Gossypium hirsutum
  Clone ID: LIB3148-027-Q1-K1-E10
acaaggtcgaagagtactgtttatgcttggtggaattcaaatgcttgcaacacaagtaacaattggagggtttatgacagctttattaggtgatcatggtggattgagcaaggcgagtgcttatgtggttctagttttgatatgtatatacatttctgggtttgggttatcttggggtcccttgggatggttagtccctagtgagatttatccattagagattcgatcagctggccaaagtattacagtagcagtcagttttttcttctgttttcttattggacaaacttttctagctatgctttgccacatgaaggcagggattttcttctttttcggaggatgggtggctctgatgaccctatttatatact

SEQ ID NO: 29477 - DNA, 223 bp, Gossypium hirsutum
  Clone ID: LIB3148-027-Q1-K1-E11
aaaaaccagtgataacggtagagaagactctactgcattaaagactacaaacgatgtgttggaaagaaggatcctgactctgcaatcgagattgtatctacaatgatgacatagagcttaagagcattgggaaaaaaaagtcaagggttgcctaaacagtgcaatgtaattactcgggtagcaattacactatctagtttatacaaaaaaaatttaatttttt

SEQ ID NO: 29478 - DNA, 430 bp, Gossypium hirsutum
  Clone ID: LIB3148-027-Q1-K1-E12
gaattccgggtccgccccacccttccgcaggcggcgggttccttttttttttttaccaaagttcatggttttggtcctccttgggctggcctggtccttaaagtctggctttgggggctaataatctgtttccattgttctcatcttcctgctcttataaatgcttaaacatcagaccttatttttttcaggacatggttttgaaggtttcatgagctctgcaaccttcttaggctggagaacgatcgcgttcattcacaattgcatacatttatagctgaaaatggctgatggaatatcaagcttttggggtccagtcacatctacaagcgagtgttgtgagaagaattatgcctactcttcttatgttgcagagttctacaatactatatcgaatatcctcgccattcttttagccttcatcggtctc

SEQ ID NO: 29479 - DNA, 348 bp, Gossypium hirsutum
  Clone ID: LIB3148-027-Q1-K1-E2
cccacgcgtccgggaaatgtccatgcggcggttgagagacttctaggtaacccggggcagtgattcgtcaagataatgcttttaaatttgaacaagaactgtgatgtaagattagttgattcggcctgctgacttagcaaaaccacagattatgctgattccttttttgggcacacgtttactgtttaatgacgtggtaaacaggatgatgtacccagagaacttgatatataggcttatgcgtattcttggatcattccatcttttgcccacgcacttggctgtgtacatacacacattggattaattttgagaactttaaaaggatggttccagcatcttcaattt

SEQ ID NO: 29480 - DNA, 397 bp, Gossypium hirsutum
  Clone ID: LIB3148-027-Q1-K1-E3
gttatctctctttttaattttttttccaatttcatttcttcttattttgcagttagaaagcttaagaaatttagtcacatttgttaatttctttcatttttttatgaaacgtatggagttaaggaggtgcaaagagttttctagggcgaaatggaggaggaggaggagaagatggacaggtgacagcggtgaccgtggcagtagatcagttcgaacaaaggtgaagaagttgcaaaggctaattccgggtgcaaaagggttgaagccggactggctgtttctaaagacagctgattatatattgcagttgagattacaagttaatatattgcaagctctttccaagatttatggaccctcacattaatggttatgatattttatgtatattttgata

SEQ ID NO: 29481 - DNA, 377 bp, Gossypium hirsutum
  Clone ID: LIB3148-027-Q1-K1-E4
ggaagggtcactgaggaggaagaatcaaatccaatcggttcgattcgaggggttcatggaggttggtgtctggtaaaatgtcttggggttacaatacattaagctagttgtttttaggttatgttactcttgtacttcacaatatctctttgtttggttataactaagtgaagtgcattttgtaattgaaatgccccaataataaactaggttgcagtatcgatccaatttcaactttttacattttcaatctgatctgatcattgttatgtaggggataaactcggttgagcaacaaacaagtaaaataacgaaaaaattgaaaagatcaaatatatatattttttgtaaaaaaatctctctaaagaggataaaaa

SEQ ID NO: 29482 - DNA, 289 bp, Gossypium hirsutum
  Clone ID: LIB3148-027-Q1-K1-E5
gtcaattactagttatatcacatgaaggtagtaacgcttttagagttgtattgctattggtatttgcatgttgattagaaatattacgtttttgttgaatgaaagttgacactaagtagctctttctttgtgatctgtttttttgaatcttcctatatatagaagtattatagattctagaccaataattattaaaaaataaaaaataaaaaaaaaaattaaaaaataaaacataaaaaattatataataattaaataataaaataaattttaatataaaaaataaagg

SEQ ID NO: 29483 - DNA, 245 bp, Gossypium hirsutum
  Clone ID: LIB3148-027-Q1-K1-E6
cccacgcgtccgcccactcgtccggactctaatacgtgagtatggagggttatgatctggatatccgtgtaccggtatgcaggcatgagtatttcgagaaaaatgaggtgtcggagcaatatataagtataattaataaccattctttggtatagagatccctacaccccctttcatttctcgtgtttgtgcattcatatgcatgtattgtgtggggaaatgaatttttcatcgattagaaagtt

SEQ ID NO: 29484 - DNA, 384 bp, Gossypium hirsutum
  Clone ID: LIB3148-027-Q1-K1-E7
gcttggagatacagcaagtttggagttcatgaggggaaggaggatcctggagattaatccagatcatccgattattaaagacttgaatgctgcttgcaagaatgcgcctgaaagcagtgaagccaagagagcagttgacttgttgtatgatacagcattgatctccagtggtttttctcccgacagccccgctgagttaggtaacaagatatatgagatgatggcaatggcacttggaggaagatggggtagatatgaggacgatgatgaagtggaagcatcagaagttagtgctgctgaaactgatacgagtgccagtgaagcttcagagaaccaagtgatcgaaccatcggaagtaaggacagagagtgatccttggcaaga

SEQ ID NO: 29485 - DNA, 401 bp, Gossypium hirsutum
  Clone ID: LIB3148-027-Q1-K1-E8
cgctcttccaggtagttagcaattatcatcatcatgaactcaatctttagttccgctgaggcgctctggggtgagttgttgggacacgcactcaggtctttctttgcttctacaactaataaaaatattgttagggggtttagtggcacagtttatgtgtcaccacctgatgacatgtagaacaagcaacaaggtaacgttgtgaagaagcaacagagggctccccgtttcgctcctgagctcgacggccttcactgctttgagacccttgtttcctactagattctttccttcatgaggttgaagttattcaacaagattgattcttttttctttttaatagcagaagctagaaattcttactgcatatgtaaaaatttggggataatttgaaattcttt

SEQ ID NO: 29486 - DNA, 349 bp, Gossypium hirsutum
  Clone ID: LIB3148-027-Q1-K1-E9
cggacgcgtgggggagtccaccctccacttggttctccgtctccgtggcgggatgcaaatgttcgtgaagaccctgactggaaagaccatcaccctggaagttgagagctcagacacgattgataatgttaaggccaagatccaggataaggaaggaattcctccagaccagcagaggctgatttttgctgggaagcaacttgaagatgggaggacccttgcagattacaacatccagaaggagtccaccctccacctggtccttcgcctccgcggcgggatgcaaattttcgtgaagaccctgactggaaagaccatcaccctggaagttgatagctcagacacgatt

SEQ ID NO: 29487 - DNA, 349 bp, Gossypium hirsutum
  Clone ID: LIB3148-027-Q1-K1-F1
caaagttctcctttccgaccctgttttccgtccattggttgacaaatatgcagctgatgaggatgcgttctttgctgattacactgaagctcacctgaagctctctgagctaggatttgctgatgcataagctgatgatgattgcaaaaataggaagaagccaacgacacagatgttttaggttttgttttctctctaaagttggcttaaggaatgaatttggggaggtttccgagacaagcttttttcgataattttattctaaactcacattccccatcttcttgttcgtagctggtgcattttcttcttagtggatgctccatagatatgtttggtgaatgcattc

SEQ ID NO: 29488 - DNA, 399 bp, Gossypium hirsutum
  Clone ID: LIB3148-027-Q1-K1-F10
gccaaacaagcagttcgagagaaaactctactcgaggaagcagaatcttgatttcgtatggaggctacagagcgagaagctcatttgatagctgaggtagaagaaagatttatgaaattaactgaaattcgagaggcaaagttcataaaaatgatggatgctcgtgagaaaaagtataaggctctcatcgatgagtgtatggcaaagggaatgtcaagtaagtccaagacttttcataataagcatagtaaggtgactattttataactagattgtcaataagtttattaatggtttaatagacattgcttgttgtaattgaatgctatgtccttatttgatgtcttcattgcttgctcaaccaataattagtagtggatgtattgatgaaaattcttt

SEQ ID NO: 29489 - DNA, 366 bp, Gossypium hirsutum
  Clone ID: LIB3148-027-Q1-K1-F11
gtagaactagagactgtgaatcgcaagaatagggaactggttgacgggataaagcaggtgactatggaagcccagaattgggaccatagagcaaaatacaatgagtcagtcgtcaatgtgttgaagagaaacctggagcaagtaatgtcacagtcacagggtggtgagcagcagggaaaggaaggttttggagaaagtgaagtcgatgatgctgcctcgtatattgaccccaacaacttactcagcattcctgatgttggtggtgccaaatgtgtttccaggaatcgccatggcatgatttgcagagcttgcaacgcaaaagaggtgtccgttttgttgatgccgtgtaagcacctttgcatatgt

SEQ ID NO: 29490 - DNA, 372 bp, Gossypium hirsutum
  unsure (1)..(372): unsure at all n locations; Clone ID: LIB3148-027-Q1-K1-F12
cctgactctaactccaccttccaagttgctagtgtgaacttcacagccaaggcggagaggacacgtatcgcgttctacagtgtgtattacaatacaagaaccgatgacatgagctcactatgtggtccggtggtggacgatgttcgggtgtggtattcatgggcaagtagaaatgaggtccaagtattgttagggcttggactttctttttgggcttaccttttggttttggtttagagttgggtgccttaagtgaagggtagattaatacttgctttagttatgtacggttttaaggctaaaatatccncaagtgcttgtaatgtcatctttccacgttttcgtttgagaaatgaaaatgangttagttgc

SEQ ID NO: 29491 - DNA, 74 bp, Gossypium hirsutum
  Clone ID: LIB3148-027-Q1-K1-F4
tctccactcgtcctcccactcgtcctcccactcttccgaaaaaaaaaaaaaaaaagggaaaggggaaaattaaa

SEQ ID NO: 29492 - DNA, 202 bp, Gossypium hirsutum
  Clone ID: LIB3148-027-Q1-K1-F5
cttttttgcttatttttcgcttatttgtatatgtaaattggctgcagtaatctttacaacgttgtaattggtgtttggagttaatatcctccattgtttaattgcttcaatagcagctccatttttgtcttatggataaggtgtcattttcatttttgtcggaaagcctaatcagaagggacacctatgggatttgtctatt

SEQ ID NO: 29493 - DNA, 385 bp, Gossypium hirsutum
  Clone ID: LIB3148-027-Q1-K1-F6
cccacgcgtccgattgtgatacactcacttttccttgttgctgcagatggtcttgaatgctattggaatgcatttgagttaccttatacttttcctgcttcttaccttgaccctcaaaactacacttcattacttccattatattccattccacctgaagtcatctcatatgaaactttcacgatccattggtgatatggatgttggggagttcattgttcctgttccatacgtaaagcaagtaaaggaattggagagaagaaaagaagaacttgaataattgctcttgggagaaagggtatgaaagaatgtgggtgattaagtcaaatggagaaagggacatcatgtccttgttgtgtgcaagtgtttttctcctaagacaggc

SEQ ID NO: 29494 - DNA, 61 bp, Gossypium hirsutum
  Clone ID: LIB3148-027-Q1-K1-F7
cattttttttaaacaaaatgttgttccattttaaataattcagttcaatttacaagtgcac

SEQ ID NO: 29495 - DNA, 358 bp, Gossypium hirsutum
  Clone ID: LIB3148-027-Q1-K1-F8
cttcaccgtgacataaagcctgacaacttcttgatgggcctaggacgcaaggcaaatcaggtgtatgtcattgactacggccttgcaaagaagtatagggatcttcaaactcataagcatatcccatacagagaaaacaagaacctcacaggtacagctcgttatgcgagtgtgaacactcaccttggtattgagcaagccgaagagatgatttggaatcccttggctatgtgcttatgtatttcctaagaggaagccttccctggcaggggctaagagctggcacgaaaaagcaaaaatatgataagattagtgaaaagaaggtatcaactcctatagaggtgctctgcaagtcata

SEQ ID NO: 29496 - DNA, 385 bp, Gossypium hirsutum
  unsure (1)..(385): unsure at all n locations; Clone ID: LIB3148-027-Q1-K1-F9
gctgggaaggttgccaaccatccttcaatccttgcagacgcttgaaatctactactgtaagagactggtagtttcaatttcttgttttcccttgctgcgtaaaatatgggttgaagggtgtgaagaattggtggatgaaggttctttgtccgtacagaaggttacctcctttaaaagtttgtgtgtttcaaatatttcaaattttaacatttcagcagagaggataatgttgaggtttgcaaactccgaaagattcaacgtctctggttggaaggagttgggatctttatcgcaaattgngttaagattagtcgggcatcgttttattagtattgcggattgtccccaattggtctctttggaaacagaggaggagagattgcaa

SEQ ID NO: 29497 - DNA, 324 bp, Gossypium hirsutum
  unsure (1)..(324): unsure at all n locations; Clone ID: LIB3148-027-Q1-K1-G1
gcgtccgnccaaaacaaagtgtgaattacgttgcaatatttcccatatgcatcataaaccaagggattgtgggactaatgcaccaagttctggatatttggctcacaataaaacaagccctcgcaaatggtgtccatgggtcaatagtttcctaaaagcccattacctttcatgtgaaggcctgcaaattcaagcccaaatctcaagtgaaaaaacaaattaaaaggttaaagtacatgagaggttcctgtattattagtctctggatcaatttagtctttatgatattaaaaaagaatcaactaagttcatcttaattttttt

SEQ ID NO: 29498 - DNA, 292 bp, Gossypium hirsutum
  Clone ID: LIB3148-027-Q1-K1-G10
ggtgactgcagggccaagtgtgaataattatatgacaggttggttaccatagcatatatggctctatatatctatataaagaagaagaaaccatgggtatggatttcttcataagaaacttattttatgttattgtatgaaacaaaagaaatatgtagtgccatggatttattattattattattattggaactttgtgtttttaattaggatgcactataacaaactccatctgtgtgagctataaagtgcatctttctttgaacaagttaatttgttgttaagagactaa

SEQ ID NO: 29499 - DNA, 332 bp, Gossypium hirsutum
  Clone ID: LIB3148-027-Q1-K1-G11
gggttttatgtgccttcaaggtggtatctgcttatcaagcatggggaggccggtctcgtgtgagagagccgttgcatggaaagtggtaaatgatgaagaaaatgctcattgtatctgtttcactttcatcaactggtcttttgtatgaaaattctaagagaaaataggatttagatatcaacctagattagaagatgctccctttccatttttttcccaagacttttgtagtttggagaaacctttgatgtgatatgatatcgaatcaaaatggtatggggggcctagatttcggttttaaaaaaaaaaaaaaaaaaaaaatataattaatt

SEQ ID NO: 29500 - DNA, 359 bp, Gossypium hirsutum
  unsure (1)..(359): unsure at all n locations; Clone ID: LIB3148-027-Q1-K1-G12
cccacgcgtccggtcttcatgtaccccagcaacatttgagttgtctagatgcctgacgggattcgatcgatgactcaagtgactgtgcctttccaccaggttttacaaactttgtcgaaatgttttgttttcagtcattttgtttctttactaccatagaaactctgcttttgtccaaaatgtctcttctatctcggattttttgcgtgtttgttcatggacttcgaagttttgggtaatcaatcatttatggaactgaatagcaactttgttcntntnaaaaataaatttataatttaaaaaaaaatttttatattattttatttatatattataatattaaatattaaatataaaat

SEQ ID NO: 29501 - DNA, 186 bp, Gossypium hirsutum
  Clone ID: LIB3148-027-Q1-K1-G3
cccacgcgtccggtaaatttttgcgcattggcaatcatattacgtactttgaaaagaattgtaaaagtataactgtttcttaatttttgttctttctctgttcatccttaacagcaccacatgtttgttatatattgatgttagtgttatcatctaatgcaataatatatacgtcttctttacctc

SEQ ID NO: 29502 - DNA, 398 bp, Gossypium hirsutum
  Clone ID: LIB3148-027-Q1-K1-G4
agtgatgtagtttttgaaactcttggcagggaacttacaagtgtccaaggtgtatcagactggttggattctgcatatagttatttggcaatggttaattacccgtatccttcaaactttttaatgcctttgccgggacatcccataagagaggtctgcaaaaagattgatgggtctcctgccgggtctagcattctggagcatatattcaatggagtaagcgtatattacaattatactggagaggttgactgttttcaacttgatgacgatcctcatggcatggatgggtggaactggcaagcatgcactgagatggttatgccgatgtctagtgatcgaaacactaacatgtttccagcatatgattgggattactctgctttccgagaagggtg

SEQ ID NO: 29503 - DNA, 407 bp, Gossypium hirsutum
  Clone ID: LIB3148-027-Q1-K1-G5
cccacgcgtccgaaaagagcctggtagaagcatttcaaccattgggcatatccgattggaactcccttttttggattgctcatcctggtggtccagcaatattagatcaagtagaagccaaattagcactgaagccagagaagctacgagccacaaggcacgttctttcagagtatggtaacatgtcaagtgcttgtgttctatttattttggatgagatgaggaagaaatcaagggaagatgggcttcagaccacaggagaaggattggagtggggagtgctctttgggtttggacctggcctcactgttgagactgttgtgctccatagtgttgctgcttaaagttaaacaaacatgccttttaaagtaatggtcgtgctccacttggcttgcagttttatcttc

SEQ ID NO: 29504 - DNA, 337 bp, Gossypium hirsutum
  Clone ID: LIB3148-027-Q1-K1-G6
gttcatgcgagtgttttatgagaacaaacttcgagaagtgtgtagtgcattctactttcgtaataaaattcaggcaactgctctaatttatttcaagaggttttacctgcaatggtcggtcatggaacatcatccaaaacatataatgttaacctgtgtgtatgccgcctataagatagaagaaaatcatgtgtcagcagaggagcttggtaaggggatttcacaggatcatcaaatgattctcaattacgagatgatagtgtctcatagtctggaatttgatctgattgtttatgcaccctatcgctcatttgaaagttctgtcaatgacatggag

SEQ ID NO: 29505 - DNA, 417 bp, Gossypium hirsutum
  unsure (1)..(417): unsure at all n locations; Clone ID: LIB3148-027-Q1-K1-G7
attcgacggtacgccccacgcgtccgcccacgcgtncgggaagatgacttaaagccaataggcagaatgtcacagggggggtatggtgcatacaatgcttacatttctgctgccactatgtatgctgcagttggtgctcctaccttgtatgaccatcctggccccatgtatggaagaggggagtccagccgagggatgggcaaaaagatatttgttggcagacttcctcaggaggccactgctgatgatctgcgtctgtattttggtagatttggccgtataataaacgtttatgttccttatttcatgtgagagatttgaaattttctttttcttttaatttctttggtggtttgtgagcaaaaagagcaataagtgatgagtcccacttgcatggggtcatttctttattctttt

SEQ ID NO: 29506 - DNA, 289 bp, Gossypium hirsutum
  Clone ID: LIB3148-027-Q1-K1-G9
agagaaactactgcattaattaatttatttaatattaataaattaaatcaaggaaataacacacaagaaaagcaaagaaagatggcacgccaagtatttgtcatggcccttgctttcatggctgttgttggggcatttgctgccaattcttcaccttccgcgtcgccatcttcttctcctgctgccagccccgcaggtggcccagctagcgaccttgctttttcccctggtgtcgagagtccaaatgaaagcgaggacccaagtgaggaaccaagcgaggacccaagcg

SEQ ID NO: 29507 - DNA, 317 bp, Gossypium hirsutum
  Clone ID: LIB3148-027-Q1-K1-H1
aattaaacagtttttttaatcttttaaaattaaaaaaaaaaaaaaaaaaaaaaaaggaaaggaaaaaaaaaaaaaaaaaaaaaaaaaaaaaaaaaaaaaaaaaaaaaaaaaaaaaaaaaaaaaaaaaaaaaaaaaaaaaaaaaaaaaaaaaggggggggccgttttaaaggatcaaagtttacttccgcttgtttgcaaagtaatattttttttttggggcaacctaatttaatttaatgggcggggttttaaaaacgtggggattggaaaaaccttgggtttaccaaatttattggctttgaaaaaattccctttt

SEQ ID NO: 29508 - DNA, 92 bp, Gossypium hirsutum
  Clone ID: LIB3148-027-Q1-K1-H10
aaaaatgttaacactatgttttgtacttatgaatagtgagagtaaacattgttcccaaaaataatgtaagtgaaaaatgtattttttatgct

SEQ ID NO: 29509 - DNA, 308 bp, Gossypium hirsutum
  Clone ID: LIB3148-027-Q1-K1-H11
gccacgcgttcgactgaagcttccttgatcaaatacaaaaaccattgaaaacaatttctagtgatattgttagcattgagcttttgttgtaatgagaatggacatggaatcaccgctgcctccttcaccaataggcttcgagggctttgaaaaacgcttggaaatcactttcttcgatccacccgccttcaatgacccaaatggatacggtcttcgagccctatctagagcccaaatcgactcaatcctcgagccagcttgctgcaccattgtttctcagatctcaaattccaacttcgactcgtacg

SEQ ID NO: 29510 - DNA, 155 bp, Gossypium hirsutum
  Clone ID: LIB3148-027-Q1-K1-H12
atcgaaagtattcatttaaataaaaattttaaaataaaaaaaaataaaggggaatgggtaattttgtggcggcttatatataaggactagttttgcggccgccgtcttagaagcccccagcttttctatgctgtcacccggcgttctctcccttt

SEQ ID NO: 29511 - DNA, 138 bp, Gossypium hirsutum
  Clone ID: LIB3148-027-Q1-K1-H2
cccacgcgtccgctcatcttcctagtcccattatacgacaagttcttcgtccctggtgccaggaagattaccggtcacgaatccggaatttcgcctctacagaggataggctcgggtcttttttctctcaaccttttc

SEQ ID NO: 29512 - DNA, 213 bp, Gossypium hirsutum
  Clone ID: LIB3148-027-Q1-K1-H3
caatcttgattgtgtgcttccatagctgttcttctatggatttgaatttagatgattgcgcgtgaaaaaaaaaaaaaaaaaaaaaaaaaaaaaaaaaaaaaaaaaaaaaaaaaaaaaaaaaaaaaaggtaaacaaaaaaaaaaaaaaaaaaaattaactgtgctttaatgtaaaataaaattcaattaactggcggtacataaaaaaaaatta

SEQ ID NO: 29513 - DNA, 68 bp, Gossypium hirsutum
  Clone ID: LIB3148-027-Q1-K1-H4
cataagctgattcgtaccttgttggaaacttttaggctctataattttgaatatatatatggttttgt

SEQ ID NO: 29514 - DNA, 131 bp, Gossypium hirsutum
  Clone ID: LIB3148-027-Q1-K1-H5
cccacgcgtccgatttcaatgagcttcctctcggttatcgaaaaggaaatgatagattggttgctaggtgtgacatcagtaactataaccaatttatcaaagaaatagagattatctttgcattgatgatc

SEQ ID NO: 29515 - DNA, 176 bp, Gossypium hirsutum
  Clone ID: LIB3148-027-Q1-K1-H6
ctcgatccaaaccatgctcaagcctcctgaatgatgctcccaggttgctgaacttgaatttatgcttttgtattttcttatcttttgcagctactttagcttgttggtatttggatccatccaagtatatatgaataaaagggttaacgctacgtttagccctcgagctttaggcg

SEQ ID NO: 29516 - DNA, 190 bp, Gossypium hirsutum
  Clone ID: LIB3148-027-Q1-K1-H7
ccaacccttccggttccccttaggcgtacctctcgatccacatcataaaaaaagtaaaggggaaaatgaagggtctgcaggcacttatattggcaatggtaacggttatggcgatcgctacaactgatgctcaaagcatttgcagcatgccagcttcaagtttgatggcatgcaaaccagcagtgacccc

SEQ ID NO: 29517 - DNA, 219 bp, Gossypium hirsutum
  Clone ID: LIB3148-027-Q1-K1-H9
cccacgcgtccgcctttctttcttttatttttgggtttgttcttgtaagagagctatatatgatatattattaatggtttctatatgaaggtgtgatggaaatgatggccacccctaaacaaacctaatctcttaagcctatgatatttttatgggattaaccccctccatttatgtcatccctgtcatgcaatgatattttttattcataatttatat

SEQ ID NO: 29518 - DNA, 404 bp, Gossypium hirsutum
  Clone ID: LIB3148-028-Q1-K1-A1
cccacgcgtccgggaaacttcaaggtgcttacagaaagtggccagactggggtaacttatattgcagagtagcaactttaatgattttgtcaatggtagtttcatagattctttgccttcaaccacgaaggagatgactctgatttcatctgcagcatacctcagtcttcctcttgatgcgtcggctttcctttacattaacatactttgtttaagaagccatggattcaacaaatatcagtatgaaactgtctttttcttcccctgttttgtttgctgacaatgcagattgagatgccgtgaaagtgattaagggaaacaatttctgttccttgattggattacgccattgatactctttgataaaatctttcaatgaacaaagcatgattattttgatcaag

SEQ ID NO: 29519 - DNA, 52 bp, Gossypium hirsutum
  Clone ID: LIB3148-028-Q1-K1-A10
ggcttttctgctatgtcagaatgtattatgatatttaagaaagtttgttttc

SEQ ID NO: 29520 - DNA, 351 bp, Gossypium hirsutum
  Clone ID: LIB3148-028-Q1-K1-A11
ctctttgctgctttccattttactccttcatctttccttagctttgcattttccgacgagaaaaaaagcaataaaatgtcactgtggcaacatatccggagccgccatgaggaaaaaggcgttatctatgccgtcttgtttacatgttgttgctgtttctgctgctacgagactttagagtttatattggagaatgggatacgtttcgtgcctttcctttaagctaatgttttaatttccactctcatcatcacttgctcttgtttcggggaattagatcaccccatcttaattattgtaaaataatgcaagtgttatccaccaataacttatgcagtttagtttgctgct

SEQ ID NO: 29521 - DNA, 417 bp, Gossypium hirsutum
  unsure (1)..(417): unsure at all n locations; Clone ID: LIB3148-028-Q1-K1-A12
tcgnttccgctctgggatgaacntnnttgtgatnatctttggctaggtatttgaccaagggtgctttnnatttgtttttacgcagtgcatatgtctatgctggacactatggagctaaaactaacaactgtgaaactatnntaaaagaactctncaatgaacctaattagagctcttttttttgagcgtttcggaaanntccttgagaatttaaatatttatatcnntctatgttcnntacacttccaagtgtcnnggcttatttcaaatttaatttannatatgtaattaccatannttttattcaattttttatnggaatatttannttaaatattatattnnattatttgtatattaagattgttggttttaaattatatttaattgaataaatgtataaagtttggagcttna

SEQ ID NO: 29522 - DNA, 234 bp, Gossypium hirsutum
  unsure (1)..(234): unsure at all n locations; Clone ID: LIB3148-028-Q1-K1-A2
accggtattgaatggccggaccgacccatgcgttttaaatgctctgatccgcgaacttgcagtgaagtcgtaaaacattatgactaccaaatctatgcagttgattttagacaattcctgctatgatagtttccctttagggttaattacactatcccctgattgatataaatataaattttaaatcataatttgaatgctgccnaaaaaaaaaaagaaaaagaataaaaatat

SEQ ID NO: 29523 - DNA, 218 bp, Gossypium hirsutum
  Clone ID: LIB3148-028-Q1-K1-A3
cccacgcgtccggatacttataacaggcggcagttcacttgagaattgtaagaccttgtttttgctgcatgcattgcttgtagcaaatgaaaatgattccccaacataaattttacagaacaaactttaagcagaaccggtccaagcttttcatgaagatttgtcagatagcgaaattcatctggttttcgtattataatcttaaatatgttgtattt

SEQ ID NO: 29524 - DNA, 287 bp, Gossypium hirsutum
  Clone ID: LIB3148-028-Q1-K1-A4
aatcgtaaggagagccattctaatcatgcaccagagaggtgaagttgaatatcaacgagaaaggcatattatcgttcgtaaagtataaatcttgcggttgtaatgtttggaaccgaaattatcagggcagcagttttattgcaagatgaagttccaaattccaattgtagtggtggtcttgatcaggaatgaccgggctaacaaaaagttgtgtaatgttatgttgtacgtctctgcaacttgttttgatcttacattttaatggattcagtggatggattgtctcg

SEQ ID NO: 29525 - DNA, 215 bp, Gossypium hirsutum
  Clone ID: LIB3148-028-Q1-K1-A5
cccacgcgtacggttctagatcgcgagcggtgccctttttttatgggtggtgttaattccggggttttttatataacggtatcggtgcatatatatatatagacacaccaaaagcctagctgcttagagaattatctcttaggctcaattgacgtaccatacgaagagtatggaaaagttctttgcgaagactaaccaattctactagatcgcaa

SEQ ID NO: 29526 - DNA, 184 bp, Gossypium hirsutum
  Clone ID: LIB3148-028-Q1-K1-A6
tgaaataccggggtcgaccacacccgtccgccacacgcgtccgattttattttggtctcatcatagctgtacttttatagtgagttatattgaggtataggattgttgaattatgcccctttttttgatatctttgccactggttttctggcaaagaaaaaaaagtatagacacagatattgtt

SEQ ID NO: 29527 - DNA, 387 bp, Gossypium hirsutum
  unsure (1)..(387): unsure at all n locations; Clone ID: LIB3148-028-Q1-K1-A7
ggaatgctgagcaccatagctactggattggctattgatgcttatggtcccatcagtgataatgctggaggcattgctgagatggctggcatgagccacagaattcgagagagaactgatgctcttgatgctgcaggaaacaccactgctgctattggaaagggtttcgccattggttcagcagcccttgtgtcccttgccctctttggtgcctttgtgagccgtgctgctatttcaacagttgatgtattgacccctaaagtttttattgggttgcttgtcggggcaatgcttccttactggttctctgctatgaccatgaagagtgtgggaagtgctgctttgaagatggttgaggaagtgcgtcngcaatttaacacgatccca

SEQ ID NO: 29528 - DNA, 420 bp, Gossypium hirsutum
  Clone ID: LIB3148-028-Q1-K1-A8
cggacgcgtgggcggacgcgtggggggataaatacggaatatctagagtcgatgaggacaggtttggaatttcccgattgttttgatggtagtaattcagttgagtggcagtgtggtaactccgaggatgttagagggttaaaatcgtcaagtgctaggctaaggtgcgacttctccgcccttaggagcctggctttctgtttaagattatacagttcctggtacccctcttgatcttaggcttcgcattcggtttacagttcttggggaagaaggaaaaaaccgaaacttagataactttcccattacggaacctgctagttcgtatgtatgcttgttaaagctgttgttgttgttgttgtaatgttcgtgacagtctataactgattgctattaataatgtcttggaatgtcgttttc

SEQ ID NO: 29529 - DNA, 197 bp, Gossypium hirsutum
  Clone ID: LIB3148-028-Q1-K1-A9
cccacgcgtccgaaaacatcaccacatttatggattgagaaaactttattgttgttgtgggaggactactatgcttgtatgtatatgatgcgcctgcaatctgcttatgaatcttttactggatacatgaaatatacagattgctttcaaaaaaaaaaaaaaaaaaaaaaaaaaaaaaaaaaaaaaaggggcggcga

SEQ ID NO: 29530 - DNA, 423 bp, Gossypium hirsutum
  Clone ID: LIB3148-028-Q1-K1-B1
ggaaatagcaattattgcattgattttggctgtcttgcttggagcttttattttggtaccccgagatggtaaatcagctcataagaacaaggttaaatcgactgttgccaattctaaggcatccaagtcctatagtaaaacagaagttatgctacataataagaggacagattgttggattatcattaaggacaaggtttatgatgttacctcatatgtagaggaacaccctggtggtgatgccatcttggcacatgccggagatgattcaaccgaagggttttatgggccacaacacgcaactcggacgtttgacatgatcgatgacttctacatcggagatcttcagaagtaatctccaagcaactatccactattgggttttgtaaggttagggtgaaaacacttctgagaatatctttc

SEQ ID NO: 29531 - DNA, 433 bp, Gossypium hirsutum
  unsure (1)..(433): unsure at all n locations; Clone ID: LIB3148-028-Q1-K1-B10
cccacgcgtccgcaccaccatccaactacagctcatcatcgtcatcatcatcaccgtcgcgcgatcctctgattcttcatcaacggctgagattactcctgtgcattgcttttccgtttgggagagcagcttttccaatagagttgggaagtctgtgccgggccttgtcctggcaatttagtcatttccttatccctttctatgatcaggtgcagccgaatgtaggacaatataaaataaataaaaagaacttgttatgatcaaaaaaaaaaaaaaaaaaaaaaaaaaaaaaaaaaaaaaaaaataaaataaaaaaaaaaaattaaaaaaaaaaaaaaaaaaaaaaaaataaaaataaaaataaaaaaaatttantttattttttataattgggggggccctttttaggggatcaaagtttccttcccctttt

SEQ ID NO: 29532 - DNA, 204 bp, Gossypium hirsutum
  unsure (1)..(204): unsure at all n locations; Clone ID: LIB3148-028-Q1-K1-B11
aaaaaaaaaaagaaaaaaaaaaaataataaaaaaatnttcttttttaattagtaaaaaataacaggggggggcctttttaaagaataaaaatttaatttacgtgtatttgaaattatatattttttttatggtgtaattaaaataaaattaatgggccgtggttttaaaacgtttggttggggaaaaccttggctttaccaaat

SEQ ID NO: 29533 - DNA, 434 bp, Gossypium hirsutum
  Clone ID: LIB3148-028-Q1-K1-B12
aaaagatcgagaaaaaagacgaggccaaaagagaaaaatacaaaagagaagagaaaatgaggatagaaatagcagaagcttgggatagtcttttacttgctcaagtaataaggggctccgtgttaataacccaatcaattcttagaaaatatattatattaccttcactgataatagttaaaaacattgcccgtatgttattatttcaatttcctgagtggtctgaggatttaacggattggaatcgagaaatgcatgttaaatgcacttataatggtgttcaattatccgaaaccgaatttccaaaaaactggttaacagacggtattcagataaagatcctatttcctttttgcctgaaaccttggcacagatttaaactacaaccctctcataaagatccaatgaaaaaaaagaaaggtcaaaagaatgat

SEQ ID NO: 29534 - DNA, 388 bp, Gossypium hirsutum
  Clone ID: LIB3148-028-Q1-K1-B2
aagcctttctgacatgtattctgggctaaataccttttatatttaacatcgggggattatcggcggatacaactattgcattttaacctactttttgcggattcagttctgggatctgtaagttggtttctaatatggttgattagcttgttatatttttgttgattgaagtgatgtttgtaaccctgggaacttggaggtaagtttttgtatttgaaatttggttacattttgtctttgcttaaaaaataggtaaataggtaaattagttgtccattgaaaaaatagaccacaaacacgcaactcggacgtttgacatgatcgatgacttctacatcggagatcttcaaaagtaatctacaagcaactatccactattggggtttgt

SEQ ID NO: 29535 - DNA, 133 bp, Gossypium hirsutum
  Clone ID: LIB3148-028-Q1-K1-B4
cccttccgaatggcagtaactttttgtttaggtagctttattttaaaactagcttttattcctgtttcggcgcgttgtacatcataatgtcagcttcaacttctagtctaataaaagcttgtttgagggtccc

SEQ ID NO: 29536 - DNA, 390 bp, Gossypium hirsutum
  Clone ID: LIB3148-028-Q1-K1-B5
aaaggcttaacaacagagggaattcaacactgcttctggagaggatatgtttgtgtgcggggatttgaccagaaatctcgagcaccccgtcctctaatggctagattacatttcccagtcagcagattggccaaagcaaaaggcaagggtgctggagaagacgagtaaatgatagcagagtcataagatccaaacaagtcaacattgaccaaataaccatgtatgaagaaatggaattgcattttacaccactgacttggcttgtagggaaatgtgaaattccttgtataacccataatggaaaagcatgtagggctgtatactgtttaacaaggttgtaattatttagtttcgtgctcaaattttgagcaatttttcagaaatcagttt

SEQ ID NO: 29537 - DNA, 259 bp, Gossypium hirsutum
  Clone ID: LIB3148-028-Q1-K1-B6
cccacgcgtccgcttgaatcatggaaataccattgagctttattgatcagcgtatgatttggggtctccgtgtgcaggtataaataaatcccaaggtttcaagaagtgaatctagcatttagccagagatcctcgacttagcaatgtttgtataatttttttttaaaatatgacatgtacctaagttgagtcggtgatcatatttgtatttgaagcttgaaatggtaatttggaaatggttagatggtttatttgcata

SEQ ID NO: 29538 - DNA, 311 bp, Gossypium hirsutum
  Clone ID: LIB3148-028-Q1-K1-B7
gccacctacgacacgcgtcgacaccttcgccacgcgtcgacatggggcggcgccttgttcacaaccatccataacggtttatgcagaatctaatagtcattgtatgaaactgcatccgattatctgtatatgcgtatggtataagatagctagcgactgaattcttacaattctggttggtggttacacagcatcatgtcagttttaactgaatcactattatgttaagttgatgcagtgtctagtgttacagactggaaccgattttacacattcaatgcacgcaaagcaatatagaataaacaagcctt

SEQ ID NO: 29539 - DNA, 184 bp, Gossypium hirsutum
  Clone ID: LIB3148-028-Q1-K1-B8
ggattaatcatcattgttggcggtgaataccttggttacgaccaaaaatacagcaggtgcgggtgtataaaaaaacaaaatcgtgtaaattaggctagagtatctatcatatgggaatcttactatttcttccgcctgcaacaaattaatcaaagaagtaccgattttcttgttctatttcttt

SEQ ID NO: 29540 - DNA, 403 bp, Gossypium hirsutum
  unsure (1)..(403): unsure at all n locations; Clone ID: LIB3148-028-Q1-K1-B9
ggccgatgtaattttgaggttgggcttgtattaggttatttttttgaatttgggtcatgtggctgagctataggcctgttgggcctgttcttgtagttgggccactagtttctgtaattggactgtaaggactattataatattttttgattttttttgttttgttttttgtttgctcggaccagacaaatttggcccactacaagattatttatcaaaatggtatatttgatnaaaaaaaaaaaaaaaaaaaaaaaaaaaaaaaaaaaaaaaaaaaaaaaaaaaaaaaaaaaaaaaaaaaaaaaggnnnaaaaatataaaaaaaaaaaaanntaaanaaacaaaaatacaaaaaaaataaatattgggggggggccctttaaaagaatcaaattttacttcc

SEQ ID NO: 29541 - DNA, 457 bp, Gossypium hirsutum
  unsure (1)..(457): unsure at all n locations; Clone ID: LIB3148-028-Q1-K1-C1
tacccgggccaaccaacgcgtccgccaacgcgtccgctaatctttacaagaatgatcaaatgtcagcatttctggtataaactcacgcagaaagataattgaatctaaaacaaaaaaaaaaaaaaaaaaaaaaaaaaaaaaaaaaaaaaaaaaaaaaaaaaaaaaaaaaaaaaaaaagncnaaaaaaaaaaaaaaaaaaaaaaaaaaaaaaaaaaaaaaaaaaaaaaaaaaaaaaaaaaaataaaaaaaaaaaaaataaaaaaaaaaaagggggggccctttaaaaaaaaaaaaattaaaaaacccgggaatgaaaaaaaaaactttttaaaaggggcaacaaaaaaaaaataaaggggccgggtttaaaaaacgggggaagggaaaaaaccggggggtaacaaaataaaaacccttgaaaaaaaatccctttttgccaagtggggaaaaaacaaaa

SEQ ID NO: 29542 - DNA, 436 bp, Gossypium hirsutum
  Clone ID: LIB3148-028-Q1-K1-C10
cgtttaaatacaggcctggaacttctaaacatgagcattgaggttgaacaaaggcttaggggggtttcattaccatttataattcttcaaggagaagatgataaagtaacagataaaactgtaagccaacaactgtacgatgtggcatcgaattcagacaagacattgaagctatatcctggaatgtggcatggcttgttatatggtgaaacaccagagaacactgaaattgtgttttcagacattatcgactggttaaaccagaagtttgaattaagaaattcaaggttagagagggaattgaagcatcaaaatgatgagatttttatttccaaagacattttctaagcacactcaaaacctatcgtatatctaaatcaatgtaataatggcatccaatttatcacaaattataatataataaatgcaattgcaa

SEQ ID NO: 29543 - DNA, 225 bp, Gossypium hirsutum
  unsure (1)..(225): unsure at all n locations; Clone ID: LIB3148-028-Q1-K1-C11
gctcgtgtgtgcgatcttttaatgatctatcccaagtttggcggacatattttggaagcaagntctattcgaatgtntgcatgcggaaccacagtatntgttgaatgcatntcaatgtttttncccgagcaccgttttctttaggaatactcctaatagatcatagacattgtttgctgttgaatctcattgaaaatatatggaatttttttttgcaacggggcc

SEQ ID NO: 29544 - DNA, 425 bp, Gossypium hirsutum
  Clone ID: LIB3148-028-Q1-K1-C12
aagaaaaataaccacaagatgaagctttttggagagaaaactggacgcaagggtcatttggctgttacaacagaggtttttcaggtcgctccttccctttgcatggttgaacttcgaaaatctggaggggataccctggaatttcacaagttctataataatctctccactggactaaaagatattatttgggatacgacctctgaaggaaaatcgggcgaaaacagtgctgcggcaggctcctcgtaaccgacccgacgacaggtgtttcccaaaatgcgcatttgttgctattcaaaggggaattctttttatttatttatatttttgtgttggtttgaatgcttgtaataaagctgtgtatacttacatacattaatgttttgaaaattgtataatataatttgtttttctttttctttttt

SEQ ID NO: 29545 - DNA, 394 bp, Gossypium hirsutum
  unsure (1)..(394): unsure at all n locations; Clone ID: LIB3148-028-Q1-K1-C2
gtaatgttcatccggtcgataacgtagctgtttctgatgaactcgaagtccgagtttgagtggagaaaaccaccacgcttgctgatgattcctagcagagtctgcttcccctgagaaaatcattaatctctggtgcaagtataccccaagttctgatccatcaggtatggaaaataaatcagcattgggtctctggcaatcaagattctactttccgaggagcgtgatgtgtgtaattcttttataatgggggcagctcagccccccactgaaaatcatttttaactttttgggtctattatgtaattactacaaatttgagaaaataattttaacctttttctctcccannnnaaaaaaannnaaaaaaaaaaaaaaaaannnnnnnnncccc

SEQ ID NO: 29546 - DNA, 432 bp, Gossypium hirsutum
  Clone ID: LIB3148-028-Q1-K1-C4
cggacgcgtgggcggacgcgtgggtttttataggcatattacaaccgtatattttctattaggtgtctcttttattgtctgtttctgcgttgttttcttctgtctctgttgcgtgtttcttttgctttgcaggtgtcagagggttggtggtacgggcgacgatcgccggtagtagaggcggtggtagcgtgtggcggctggcttaggtagctttagggtttctgtttggctttagttcttgggctagtgtgctagttttttgtttgggctgttggtttaatttgtttttgggtgtaatagggtgtattgggtttgggtctggtattggttcattgggcccggtctaatttgggcatttacaccatgatttaagttctgcataaaagaatagaagaaaatagtaaagcactttcgttttaaaaaaaataattt

SEQ ID NO: 29547 - DNA, 437 bp, Gossypium hirsutum
  Clone ID: LIB3148-028-Q1-K1-C5
ggcaatgtgggagctgaatatgccgtgttcgagcaaggtgcttcagccggaaatgttggaaaagaaaagatagtagagcaaaagacggcaaatcccgtggcattgcttctctcctctgccatgatgttgagacatctccagtttccttcatttgccgatcgactcgaaagtgcagtgaaacgtgtaatctcagagggccagtatcgaactaaagatctcggtgggcaaagcagtacacaggaagttgttgatgccgttattgctaaactagattgattactcgtcttcttcttcactatgggttttccacagtaagattttcttaagttggtatatctcattcttacattttcagaataatatttttttttcgaaatactcgaaaatcaaacttataacaaacaacaaacaactgttgagttgtgaaccattttaca

SEQ ID NO: 29548 - DNA, 397 bp, Gossypium hirsutum
  Clone ID: LIB3148-028-Q1-K1-C6
gtccgtgctgttttctacagtttccggccgtgattcataattttagcatgaaatgaagttcttagatgcagcattatgagcttgagcatagatccagaactgtagtaggaatttgatattttatctttggctaaaagagtttcaagatcacttgatgagaaacaaaagacatttgagtacaaaaaaaaaataataatagaggataaaaaataaaaataaaaaaaaaggaaaaaacaaaaatacaaaaagaagatgaatattcaaaaaaaagacaaagtttaaagaaaaaaaaaaattattattcaatttaaaataaaaaaagggggggctcttttaagggtcccatgttttttttcctgctttttcaagaataatattttttttatggggcccctaa

SEQ ID NO: 29549 - DNA, 278 bp, Gossypium hirsutum
  Clone ID: LIB3148-028-Q1-K1-C7
caagatttcacttgggaggttgtcaagccactcaagtgggacaaggtccaggcttaatgggggcttcatcacattggttctatgtctgatttatttgatctgctgtctgctaccatatgaggctgcttttcttacaatttcctttaatttcttttttgggtttgaaatttgattaaaatttatatttatgcatatgatatgatatgagcgataatgaatgttattattattacaatttgaaagataataacagaaaatgaattaaagcatttttcttt

SEQ ID NO: 29550 - DNA, 366 bp, Gossypium hirsutum
  Clone ID: LIB3148-028-Q1-K1-C8
ggagtcggtgatttcggtgataagggtggtgcgcctgctgattatcagccttcattcaggggccctggttcaaggcctgcttttggtcgtggaggcggaggttatggtggtgccagttccgcaagcggtgcaggtcttccatgagtttgtcagtttaggttgaatggcacttcctagttcattttggggtgtgcttttttgcactcaaatggttgagattatctatgttcttttttcccccttgtttttgatgcttttgttgcattgattttctttgtttcaattagacagtaaataccgaagttgtgcagctcaatttcggaagaaacattaattattataatatataatgaaatcggcatcttt

SEQ ID NO: 29551 - DNA, 426 bp, Gossypium hirsutum
  Clone ID: LIB3148-028-Q1-K1-C9
caaaaaccaaattccctttgatacaactttgggaataatattacttggtaagttgtttgatgacccaaatgttaaagttccaaaattacttatgatccggttttcaagacaaaaaaaaaacccacgcgtccgaagatgacaagattattgctgtctgtgccgatgatcctgagtatcgtcactacaatgatatcaaggaactcccacctcaccgcctggctgaaatccgtcgcttctttgaagactataagaagaatgagaacaaagaagttgctgttaatgactttctgcctgcctctactgcatacgaggcaatccaacactccttgaatctctacgcggactacatagtggagagcttgaggcggtaattgtcggttcaccgtgccccgtctatatacaaatatatatattaatatgaatatg

SEQ ID NO: 29552 - DNA, 400 bp, Gossypium hirsutum
  Clone ID: LIB3148-028-Q1-K1-D1
gtccgttttcttcttgttcttaaaaaattatgatatggtatcatattagatatattacattaaactggagtttaaaccccatcagttttgttatagttattaagtttcaaacttcaaaaaaaaaaaaaaaaaaaaaaaaaaaaaaaaaaaaaaaaaaaaaaaaaaaaaaaaaaaaaaaaaaaaaaaaaaaaaaaaaaaaaaaaaaaaaaaaaaaaaaaaaaaaaaaaaaaacaaaagggggccgcaaattaaaaaaatcgggggctttttttcagagacctcgcgacttataaaccttttttaaggcgcaacaaaatttaattaatggcccattttttaaaaaccggggggctggaaaaaaccggggggttccaaaaaaaatcgtttgaaaaaaaataaa

SEQ ID NO: 29553 - DNA, 330 bp, Gossypium hirsutum
  Clone ID: LIB3148-028-Q1-K1-D10
cccacgcgtccgctttgaatgtaagcactatttgcaggaagacaaattttggatgtgatggtttttgttgtttctagacaagtggtaagactagtagtgttgggtctttatcggttgctattaggaatacttgcgttactgaatttaatttggtttgaatgataattgtctttggaatttgtgttggtttgccaaaaaaaaaagataataaaaaaaaaaaagaagctataacaaaaaaagaaaaaactaaaaatttaaatatcgcaatcaaacaatacaaaacttaataccgacctaccaaatattccaatggctatggggcggcctttt

SEQ ID NO: 29554 - DNA, 431 bp, Gossypium hirsutum
  Clone ID: LIB3148-028-Q1-K1-D11
gttttcaatgcatagctgctttctgttaggcaagaaatctggtggaggggagagggtgggggaaagcttaattcatatatatatgttctcaagagcatgtgaggccgggctagttttatcaagagtgagttattcttcgaattgggataattcgagaactggtttactgttggtgaatttcccataggtatgctccacaattctaaaatatgctcaatgtgacagtgatagttataatccagttcctggtgtgatgcaaggagtgccttcttcaaggaattatagtggtggatttgcatccaagctcatggtaatcaggtttctttgcctatattcatatctgtatagataaaaacttgcttcacatttatcatgcttcatcacgttgtataacgcactggaagcttgtaagttatttaggctgaaatagc

SEQ ID NO: 29555 - DNA, 344 bp, Gossypium hirsutum
  Clone ID: LIB3148-028-Q1-K1-D12
cccacgcgtccgcacatatcaagagagccattattgacaagaatgctcgaattggagacaatgtgaagatcataaacagtgaaaacgtgcaagaagcggcaagggaaaccgatggatatttcataaagagtgggattgtgacagtagtcaaggatgccttgattcctagtggaactgtaatctgagaagattgcattatgatacagcaaaccaccattagtgtttctagatagagaaagtaatgcaatagcaaatcacttccactttatcccttatcatgtatattttgagctactgcggtataattatattaataaaatgaaatggagccgataatggccggc

SEQ ID NO: 29556 - DNA, 426 bp, Gossypium hirsutum
  Clone ID: LIB3148-028-Q1-K1-D2
aatggagatgatgtttcaactatgcaactaccatacgcttgcaagcttttaatccaggaacggcagtcaatgaatatcgttccacgtttgaaattagcagaggcgaattaatggtatgttcagatgattttgtgttggtgtatcatctgaaaatttggtagctatacagcagatggttggaatgtttttgggaggaagaattctgcaccttaccgatatgctcagcatcaagtctgtagaaattgtggggaagtgttagaaatggattctccatgcatgtcactactattttcttttttatttttactgaaatcttagcttgtgctgtatgtaactcctcccaagctaatgtgattttgtattatttacttaaagtggtttacaaatataatcattttattattattattagtagtttcttaattc

SEQ ID NO: 29557 - DNA, 352 bp, Gossypium hirsutum
  Clone ID: LIB3148-028-Q1-K1-D4
gggggggggaaattctgaaaatgatttgagatcatttcagaacatctctttatttaagtttttagaatttttaggccacatacggatactacattaatggtcactgacaaggcgcttgataaactccacaacaacattaactgaattgtttgaagcaagggaaatgaaagtatcgatctcattcgattcagccgagccaccaccggccaagtcggagagagccctaatgatgataaaaggaaccctttgttgcatacatatcagtgccactgctgcactctccatgtcgaccgggcttacgttgaactttttgtaaatgaagcttcgataagcagcgttgtctacgtaaatg

SEQ ID NO: 29558 - DNA, 449 bp, Gossypium hirsutum
  Clone ID: LIB3148-028-Q1-K1-D5
ccacccgtccgaaacactgaaaacaatgtgttggagccacccaacaagagtgcacctcagacttcaatgaagaggcctgcgcatcaacaacactcgagcttttcatctccatgggctgttgatgatctgttagaactttcagatattcaatctctaaacaagaaagagcactctgagcttggagagcttgaatggctagcagacatcggtctttttggtgatcaattgccacaggaggctttagcagcagctgaagttcctcaacttccgatatcgcaatcaagcagtacaaacttataccgacctaccaaatattccatggctcttaaaaagcctagaatcgaaaccccggatgaagatgacgagttcttcacagtccctgatctaggttgagttggataacgagactcgtgtgtcagtagttcgaccaaactatagtgtttcatatg

SEQ ID NO: 29559 - DNA, 438 bp, Gossypium hirsutum
  Clone ID: LIB3148-028-Q1-K1-D6
cacacccgtccgcccacccgtccgaaccttcaaaaggaggaaactgcactggcagcacatccggtacatcctgtaaaatatcacaagaccacaaaagaatgctcagaattctctaaatcagccttacacagtggacacaccgcttcctcgcacagagttctacgcgcaagattaccatagtaaccagtgatcgttccatatattaattcgatcaccattcccaaccctccacacaatcccttctccaatcaactcacgtgcattgcaaatgcttctccaggtaaatgatagtgacatcaatcaactcggaacttgggcggagtcagataatcatctacactatcatcaacgcttgggtattttgcaactcatattttggaaacatggcatgtatagacgactttatgtattatggcgtaaacaaatatatagtatgtt

SEQ ID NO: 29560 - DNA, 293 bp, Gossypium hirsutum
  unsure (1)..(293): unsure at all n locations; Clone ID: LIB3148-028-Q1-K1-D7
cccacgcgtccggaggcactgtcgctttataaattaagttataaacactattatgtgcatgaaattattgaaaggatgtaatttgtcttattgtagcagtggacattgaatgagagtgaagagtatggcatgtgcttaggtgcagcctgcaagtctccttttgcttttactagcctttaccatgctccaactaatgggggttgacatgatattccgattcataataataataatattattgaataacctccnnnaaaaaaaaaaaaaaaaaaaaaaaaaaaaaaaannnnnaa

SEQ ID NO: 29561 - DNA, 378 bp, Gossypium hirsutum
  unsure (1)..(378): unsure at all n locations; Clone ID: LIB3148-028-Q1-K1-D8
cctcagcccacaattaaaacagtttggcagtgcttattacccaataagctttgcatggaagaggatccatcctacagagcacctacctatctgcggaggcttttttggctaatgcactggcaaatcggcaagtcacgaaaagggcaatcaactcatagtaattagtatgagtctgttatctggctatatatatgtatatatatatatcatgttttcttgtatggtattaattgtttttgaattatggttgttggaatgtaatggaaagtcgtgtgtttaaagcagaacctcatccttagatgtgtgagtttgcttgtttccaaatttgcagtcagttgctgcaatatgaatcgaataaaaagttcttttcactcctna

SEQ ID NO: 29562 - DNA, 211 bp, Gossypium hirsutum
  Clone ID: LIB3148-028-Q1-K1-D9
cccacgcgtccgaatagtgttatcaacaatcaagaagttatgataattaaccttgttatcttgtccttgtctttattgagctatatgtttgccgaactcttttgacatttggtgtgtgcctgttaaaatatttgctgcgctcgtatgctcagcttaatggattattagcttaaataaagaaatatggtgctctttgtaccatctctgtggt

SEQ ID NO: 29563 - DNA, 427 bp, Gossypium hirsutum
  Clone ID: LIB3148-028-Q1-K1-E1
ggggattgtcatcaggtaatctatctcaaggttatccggatccgagatttagctatgatggggttcagtcaccgattccttggttagatatgtcaatgtcttgtaatggacaatccgaacatgctgcaaatggtgggttttcatattcaagcaacctttcatctggcaggaatcagaaccttcatcccttccctcatgtcatgaatttgcacaatgtaagaccatcatcgggtgtaggccaaggatatggatacatgtaccctaacaacatggcctacagtcattacagaggtggttcgggttttggatcatatggctatggtgctcgaaagaaaggactaggttggtataatgttggcagcaacaacaagtataggttccaaggttatggaaaagagaatatggatggtttgaatgagctaaacag

SEQ ID NO: 29564 - DNA, 65 bp, Gossypium hirsutum
  Clone ID: LIB3148-028-Q1-K1-E10
cccacgcgtccgccaaattgtatttgttttttttattgcatagcaattggatttggtagtggttt

SEQ ID NO: 29565 - DNA, 350 bp, Gossypium hirsutum
  Clone ID: LIB3148-028-Q1-K1-E11
cgaaaatagaacaatcttgtatttctagaacaaaaaagaagaagaagaagaagacgaagaaaggcataatttgtatatgtatatctgattcaactttcttgatcttgactattgactataataggaatttgaacctgaaaattgtgttggaacaagtttacaaatacaatcacctgttttgatggagattttgtaacatatattctgttttaaacaatctgactaccaatttccttttctttttgacaatatgattttgtgaggattccagaatctctgtgaacttgcggagtgcgattgttgcggtttaaccgaggagtgtacgcaagcttacatttgcttgccttaag

SEQ ID NO: 29566 - DNA, 383 bp, Gossypium hirsutum
  Clone ID: LIB3148-028-Q1-K1-E12
gctgaggaggaggaggcaccaaaggccaaaccaaagaatcctcttgatttgctgcctgggggtaagatggtactggatgactggaaaaggctttactctaacacaaagaccaatttccgagaggttgcaattaaaggattctgggacatgtatgatcccgagggatactcactgtggttttgtgactacaagtacaatgaggagaatacagtttcatttgtcacaatgaacaaggttggaggattcctgcagagaatggatttggcccgcaagtatgcatttgggaagatgttggtgatcggtgctaaccccccattcaaggtgaaaggactatggcttttccgtgggcaagagattccttaatttgtgattgacgagtgcta

SEQ ID NO: 29567 - DNA, 285 bp, Gossypium hirsutum
  Clone ID: LIB3148-028-Q1-K1-E2
ggatgcttacgggtgggtttgaagatgagaaaacactgtttcaccttcgtccgagattcggtggtggtttaggaggtggagctggatttggtgggggtgctggtgctggaagtggtggtggacaaggtggagggtttggaggtggaataggtgggggtgctgggtttgggtttggagctggaggtggtcttgggggtggtggtggagctggtgccggtggtgggtttggtggaggtgctaattgtgttgatgtattaatactggatgcatgaattcttgcaataa

SEQ ID NO: 29568 - DNA, 388 bp, Gossypium hirsutum
  Clone ID: LIB3148-028-Q1-K1-E3
gaaaattttggagaagaggtagtaaaccccacacattgaaaggggaccatagccatacatgatatttggagttcaaaaaagggttgaaactgagtgcctaccagatttattattcatggtctaatctgttcttttttttttttttgcctattattgttgttattattattattatttgtttttaggtctaccctgtatgtacgttctggaagatttgtttgttttgccaaaaaaaaaaaaaaaaaaaaaaaaaaaaaaaaaaaaaaaaaaaaaaaaaaaaaaaaaaaaaaaaaaaaaaaaaaaaaaaaaaaaaaaaaaaaaaaaaaaaaaaaaaaaaaaaaaaaaaaaaaaaaaaaaaaaaaaaaaaaaaaaaaaggggggccctttt

SEQ ID NO: 29569 - DNA, 436 bp, Gossypium hirsutum
  Clone ID: LIB3148-028-Q1-K1-E4
cccacgcgtccgaaggtccaaccaccaaagaagacggaagagggaaagctatatactcctgctgcagttgatttattcaggatactcggggagcaagtacaaattgttagggataatagcactgatgccatgctttacaggattgctttggcaataattcaggtaatgattgattttcaagcagctgaaaagcagagacttgaagaacctgcttctgatattggtctggaacctctatgtgcaatgattaacaacaatttgcgctgctatgaccttgcactggagttaagtaacagcatcatagaggctcttccacaaaactatgctgaccaggtaaattttgaagacacatgcaaaggtttcttggaggttgcaaaggaagcagtacgccaaactgttaatgtaatctttgaggatcctggagtgcaagagttgc

SEQ ID NO: 29570 - DNA, 316 bp, Gossypium hirsutum
  unsure (1)..(316): unsure at all n locations; Clone ID: LIB3148-028-Q1-K1-E5
ttaaggagagatttgcttcctattgtagcctttcatcagttcataggccagcaggatatttatgattaatgttcctccccttgatgaaagcactctggctttttaaaataagaccaagcaaataaagagtaatcctgttcaccaaaaaaaaaaaaaaaaaaaaaaaaaaaaaaaaaaaaaaaaaaaaaaaaaaaaggnatccgaaaaaaaaagaacaaaaactggcgttcacgtgcttgcgacccaatctctctttcgtagtcttgcctaaatacaattttgttgtcggcgaacttaaatttcaatgaatgggaaa

SEQ ID NO: 29571 - DNA, 438 bp, Gossypium hirsutum
  Clone ID: LIB3148-028-Q1-K1-E6
ccaactggaagtccggagtaccgccggaaaatcgttctgggatttcaaattgacctaaaagctggttaaaagaagaatggataggctatcgaatgcgttttcgttgctggatattgatgtggacgatcatcatcccccaccggcttcatcatctgcttccaaaccttcaggtaagagcaaaaacaatgggaagggcccaactgaactgaaaccggcattgctttcggaaaactacaagttaccccttgtttggattgacttggaaatgactggtttgaatattgagactgatagaatattggagatagcttgtataattacagatggctatctcaccaaatcattggagggtcctgatctggttatccatcaatctaaagagtgtttagatagaatgggggaatggtgtcaaaatcatcatgcagctagtggattgac

SEQ ID NO: 29572 - DNA, 223 bp, Gossypium hirsutum
  Clone ID: LIB3148-028-Q1-K1-E7
aacaaatttcgttgcatcatctccttcccctgcagcatctggtggcacttcagtcttacgagaggcttggcagccaagcccatggaattagaatctgtagcaaattgaacttttcttgtgacttgagcctctaagatgtgtattgcgagcttggcaacattgtaagccctttctagttcttcctgcttaatcaaagcgagaacatcggttctcaatttcatat

SEQ ID NO: 29573 - DNA, 74 bp, Gossypium hirsutum
  Clone ID: LIB3148-028-Q1-K1-E8
aactgtgcatggttttcctccatgtgaaacaggttcattctattgtcccatgaaaaggaatggaaatttctgtg

SEQ ID NO: 29574 - DNA, 405 bp, Gossypium hirsutum
  Clone ID: LIB3148-028-Q1-K1-E9
gccaaagtttgtgagtgtcttctccgaagagtgtccgctaactctacaagcgatagtcccgggccacggagctcacttcttctcaagtcaagaacagcttacttgttttgattcaacacaattgcgttcaagcttttactctcgatcaaactggtgagcatggcgatggagcaagctttggttccccactcaatcccacttcaaaaagtgattagtgtttttttttggggcggggttaacctttggttgtaatttgtaatcctctttgccgtgaaagatgttcatctgtacttctttttgaggatcttttacttttacttttcatgtaagtttttaatccatctatttatatttttggggcattccagtacctggtcccgttgttacccaattttatcataaatc

SEQ ID NO: 29575 - DNA, 432 bp, Gossypium hirsutum
  unsure (1)..(432): unsure at all n locations; Clone ID: LIB3148-028-Q1-K1-F1
ccgttgtcaaatcgatccatcctaaatttaagacggttgccggagttgttcggaattcgtttggcagcagttctagtgacagggttcattttagcgacagtattttggcaacttgataattcaccaaaaggggtgcaagaaagactagggtttttcgcattcgcaatgtcgacaacatattacacttgtgccgatgctcttccagtttttctccaagaaaggtacattttcatgagagaaactgcttacaacgcttacaggagattatcatacgtcatatcaaatgctttagtgacgttaccgggcttgattttgctctcgtttgctttctccatgacaacattttgggcagtagggctagacggtggattatcaggattcttattctatttcctaattatgtntgcttcgttttggtccggaagttcattc

SEQ ID NO: 29576 - DNA, 306 bp, Gossypium hirsutum
  Clone ID: LIB3148-028-Q1-K1-F10
cccacgcgtccgcaggattcccctagtaacggcgagcgaaccgggaaaagcccagcttgagaatcggtcgccatcggcgtccgaattgtagtctggagaagcgtcctcagcgacggaccgggcccaagtcccctggaaaggggcgccggagagggtgagagccccgtcgtgcccggaccctgtcgcaccaagaggcgctgtctacgagtcgggttgtttggttttgggtcgggcaaatttgggcctgtacagtcatatggaatgggtttgaaaacaaagctaactcgataaaaaccttaagcttat

SEQ ID NO: 29577 - DNA, 451 bp, Gossypium hirsutum
  Clone ID: LIB3148-028-Q1-K1-F11
gaaaaaaaagaggcagaaataagtatcaaatgcaattgagattcatacctgtgtttttcttccatcttttcacttaaattttgcttttagaagagaaaaaaagagagccaatttaggctctgagatgtatatgaaattcattgttcttcctctgatgcttgttgctgaaaatcaagttaaattccaagaaagggagtgggaaaaagagagataaacaaagttcctcatctaggtggactccaatggcggcatcggttatgaaagaaggtaaaaaaacggagcccgttgttattgtgaagcttgcggagtgcgattgttgcggtttaacggaagagtgtacgcaagcttacattgctagcgtaagagaaaaattcgaaaggcggtggctttgcgggctttgttcggaggccgttaacgacgagacggttagatcggaggaagatatcacgac

SEQ ID NO: 29578 - DNA, 368 bp, Gossypium hirsutum
  Clone ID: LIB3148-028-Q1-K1-F12
caacagcttccagttgatgtttggttcttcgttcgatctggcttcttttgattacaaggaagatctacaagctgttggggtcgataccatgccaaagcaggatgtttcaatctggttttgagtaacaaaggtcaggtcacaagtggtaatccccactaaggcctgccgacacatgcattagctaaaaaccttatgtttttttttttttttaacttggtggttgtatttatcttcatgcttgtagttgttagaagttggcaagttttatcaggtcttcatatgggctttcaataaaaacaaaaagtcccataatcttgcaactgatttacatagaatattactgtctcataaataagtttatatgtatt

SEQ ID NO: 29579 - DNA, 352 bp, Gossypium hirsutum
  Clone ID: LIB3148-028-Q1-K1-F2
ttaacgttgattaatttcctccaaccgagtttgtgatgtattaatgtttaatagaaattaaggtggaacaggaaatgccgagctcatcgatgacgggactaatagtttaccttcattaatgtcggtgataaagtaaggtttcctgcgttaatagaagttgtaaaaaatttcttgatgtttacagttctggaaaacaagtttgtgtgtaacttttaatcaattttttcaatagggattatctttttcttaagtacttgatcccgcatgcatgcatgcctggtccaattgtcatttgtcttgagctcgacattcttaagacattcttaagttgaaatccaatgtgtttttcttt

SEQ ID NO: 29580 - DNA, 184 bp, Gossypium hirsutum
  Clone ID: LIB3148-028-Q1-K1-F3
cccacgcgtccgcttttgtgtgaggaagtgtttgcgtgtaactcagtgggtgttgagtcaagaacgaaccgcgcttggagactccttgcatggatcgtatatcaggcttgtgactcaagtgcaaaatgtaagggtggtggttcgggtattgactcaggtcgacccttgagatggctcaacatgg

SEQ ID NO: 29581 - DNA, 200 bp, Gossypium hirsutum
  Clone ID: LIB3148-028-Q1-K1-F4
tctgcctttcgtccatcacatattgtaaaccatccactactctcctagctctatatattattatccatttcctttcatatagatttatcttttccgtacaagttgtgtttcaaattttttataggcggaaaataccattggttaaaatcatttaattagcatttttttattattttttaataatgaaatggactacaagt

SEQ ID NO: 29582 - DNA, 438 bp, Gossypium hirsutum
  Clone ID: LIB3148-028-Q1-K1-F5
acacccctctcttaagcaccgatctgcctctatcaatggtgacaaacagatttgggcctcgaaggacgacaatctcgaccacgagattccttctacgcttcgatttcaacgaagaagacggaatctcttagcacatccgcaaggtacggaggcaacgtgacggggtagttggcgcgtacggaggctattggtggcgcagctgctgctagggctagggtttgctgcaaacatgatttaggttttgggccctttttgggcttagggttttattagttttgggttttaaatttgggtttgggtttgtaatgttttgggttttaaatttggacatttaatggactgttaatatttggatttttttgtttatttttgcttttgtctgatttgggcttattgggcccggtcaaatttgggcatttacaattataattatataat

SEQ ID NO: 29583 - DNA, 60 bp, Gossypium hirsutum
  Clone ID: LIB3148-028-Q1-K1-F6
agtagtcaaaagattttactcgggcaatccaaataaaaaaaacaaaaaaaaaaaaacaat

SEQ ID NO: 29584 - DNA, 129 bp, Gossypium hirsutum
  Clone ID: LIB3148-028-Q1-K1-F7
ggaacataactttggttttggagttaaaatactccactcgtgatagtgttaaatattgtgagttgtcaaaaaatctgtgtatgatctacataagatgattagagtaaataaaaattcttttacggttgt

SEQ ID NO: 29585 - DNA, 358 bp, Gossypium hirsutum
  Clone ID: LIB3148-028-Q1-K1-F8
gggacgcgtgggggagatgaccggcggagatggatcgcatgtggagtgtacaggggcgtcaaccatgatttccgttttgaatgctcatatggttggggtgttggtctgtgggtgtccaaaaaagacgatgcattcaaaactatcatgatctactaagtgagaggacccttaagggtgctttttatggcactataaccaccctgatttctatggttgtcgacaaatattaacaggactggggctggatatggacaagttatacaactctggccttttgccgatataaacaagattcactacatgctcaggtatggtcgagatgcatgattcattggatcttagagaggtgctgctgata

SEQ ID NO: 29586 - DNA, 291 bp, Gossypium hirsutum
  Clone ID: LIB3148-028-Q1-K1-F9
aaattatgtacaattgatagagacattaacaaaataaaaaaaaaaaaaaaaaaaaaaagagagaaaaaaaaaaaaaaaaaaaaaaaaaaaaaaaaaaaaaaaaaaaaaaaaaaaaaaaaaaaaagaaagaataaaaaaaaaaaaaaaatacataaaaaagcttgcaaaaaaaataaacctaaaataaataaaataaaaaaaattgtgactgcccgttctatgaaaaaaatatatctgttcaaaccttaacctttttaaattaaataaaatttgcaggaaaattcccatttc

SEQ ID NO: 29587 - DNA, 353 bp, Gossypium hirsutum
  Clone ID: LIB3148-028-Q1-K1-G1
ccttccaaaaagggtttgcttcattcaaatcaagagatcttcaatggaagttctttaactgatggttgggttaaaaagtatgcagccgatacttcattattgttcaaggaatttgccaagtctatgatcaagatgggaaacattaaacctctcacaggaaatgctggggaaatcagaatcaactgccggaaagcaaattgaaacatgtttccatacttgcaagaaattttatttaaaaaaaaaaaaaagttatctgtctgttgtttgaagtgagtgattgagatgttcatataatttaaatttgtactatcctttttttttctctcctttttctaataaaatgtttatgcaat

SEQ ID NO: 29588 - DNA, 226 bp, Gossypium hirsutum
  Clone ID: LIB3148-028-Q1-K1-G11
cccacgcgtccgcccacgcgtccgagaaattaaagaaatgggaaaagaaaaagatgtgtgagaaaatcatagtttttaattttttattttttccactacttctaaattatggaagtaaggtagtaaaggcaaagctctattcttggagagatcaattttatgcttgtaataattgttactttgtttatagtataatatgaagtatagaggatggttttcttagcct

SEQ ID NO: 29589 - DNA, 360 bp, Gossypium hirsutum
  Clone ID: LIB3148-028-Q1-K1-G12
cccacgcgtccgcccacgcgtccgaaaaaaaaaaaaaaaaaaaaaaaaaaaaaaaaaaggaaaaaaaaaaaaaaaaaaaaaaaaaaaaaaaaaaaaaaaaaaaaaaaaaaaaaaaaaaaaaaaaaaaaaaaaaaaaaaaaaaaaaaaaaaaaaaaaaaaaaaaaaaaaaaaaaaaaaaaaaaaaaaaaaaaaagggggggggcgttttaaaaaaaaaaaatttatatttgggatttaggaaatttaaatttttttttttgggggcaaaaaataaaaaaaaaagggcgtttttttaaaattttaaagttggaaaaaatttgggcttcccaaaattaattttttttaaaaaaatttcctttt

SEQ ID NO: 29590 - DNA, 270 bp, Gossypium hirsutum
  Clone ID: LIB3148-028-Q1-K1-G2
ccacacattcggggggatttgcaatgtcatttatggggaaattatttgggggtctctaaaaaaggggatagggacagacaccatattttgtaaaatccctgtgtatatataaagggaaaaacccctttttacacccctttggggttttgagattatgatataaaaaatgttgttgtgtataggggagtacttggattaaaattcaaatttcggcaattggttcggaaaaaaaaagccctttttaaaagataaaattttaatttccctttt

SEQ ID NO: 29591 - DNA, 209 bp, Gossypium hirsutum
  Clone ID: LIB3148-028-Q1-K1-G4
cccacgcgtccgaatgggtaccattgaaaaaaaaaaattgtgatatttgatgcttgttagtgctgattgtgcccttttgatctactgtaccttttcttttataagttgttaggatacttaaactttgatgcttgttgtgaatttaatagcatatgtaactacaaatacaaaacttctgccatactttttgttaaattccttgtttcctc

SEQ ID NO: 29592 - DNA, 322 bp, Gossypium hirsutum
  unsure (1)..(322): unsure at all n locations; Clone ID: LIB3148-028-Q1-K1-G5
gcagcttgcaccttcaaggacatatgattcactcacggaagattttagttatgccttgctggtcattacaatcgtggcactcgtagcagccatcttcgtaacgtggaggttgtccgagaggaaagaactgcaagagaaatggaggtaaagtaagtttctgctcaatacatttgtgtattaacacatttgcttagatgacacacacccttaattatttatttgaattagattagaaggggtctccttctgacttgtaattcttccaagttttgtagcattccatctttaatgtctattttcattgctctgttttnacananaa

SEQ ID NO: 29593 - DNA, 438 bp, Gossypium hirsutum
  Clone ID: LIB3148-028-Q1-K1-G6
cccacgcgtccgaattttttcccttaacctttttgaaaaacataaaacatggtaaaggttcgtttagttgtgttctcattggctttggtgctctcaatccaattcgtagtgggacacgacgagaaggctttagatgaggcagcatccccggaagctgaagatgcaggtttaagttcaggggcagctaaacttgttgaaaactttaaaagctctgctggagatgattcccagagtgtggatgggccaacttctgacttagctgatgagattgcagcttctccagaatcagaagttgaagttgatactgaatctgtcgatgggccacattctggcttagctgatgagattgcagtttctccagaatcagaagcagaagttgctactgaatctgtcggcgggaggaagcgtaaaatggcatagtggaccgcgatgatgttt

SEQ ID NO: 29594 - DNA, 406 bp, Gossypium hirsutum
  Clone ID: LIB3148-028-Q1-K1-G7
cggacgcgtgggcaattgcttgcctctacactttactaatagtgcttgctacatagaatgagagcaatatttggatttgagataaagaggaatgcaataaatttagatgtttttgctttgttgcatattcatcccgcattcttggatgatgctagatgtacagaaactttactccccttggtattgttatttctgcagttgattcaaaaaaaaaaaaaaaaaaaaaaaaaaaaaaaaaaaaaaaaaaaaaaaaaaaaaaaaaaaaaaaaaaaaaaaaaaaaaaaaaaaaaaaaaaaaaaaaaaaaaaaaaaaaaaaaaaaaaaaaaaaaaaaaaaaataaaaaaagggggggcccttttaagggatcaaattttacttcccgtggcttccaaattaatagtttttt

SEQ ID NO: 29595 - DNA, 373 bp, Gossypium hirsutum
  Clone ID: LIB3148-028-Q1-K1-G8
cccacgcgtccgcccacgcgtccggattagtcctatatatttgttacggcaatgaaaaacaggttacattcacggaatgatgaaaaaaaaaaaaaaaaaaaaaaaaaaaaaaaaaaaaaaaaaaaaaaaaaaaaaaaaaaaaaaaaaaaaaaaaaaaaaaaaaaaaaaaaaaaaaaaaaaaaaaaaaaaaaaaaaaaaaaaaaaaaaaaaaaaaaaaggggggggccttttaaaagaaccaaagttaacttccccgggattgcaaggtaaaaattttttaaaagggcaacaaaaataaaataaacgggccggggtttaaaaacgggggaacgggaaaaacccggggttacccaaattaaatggcttggaaaaa

SEQ ID NO: 29596 - DNA, 256 bp, Gossypium hirsutum
  Clone ID: LIB3148-028-Q1-K1-G9
cccacgcgtccgcggacgcgtgggtttgcaaccatgaatagaataacttttttcagcttatggaaatttccttgtacagtttaaatgaatgattgcaaagtcttccaaagtttagtttaagataaaaatgtgaaacgtgggaggaatgatccacagatgcaagaattgttaaaactaggttattatcttcatgtaaagaaatgctaatttagaatccttaatcatcttattctcaatttaatcttgtctgaatgtt

SEQ ID NO: 29597 - DNA, 420 bp, Gossypium hirsutum
  unsure (1)..(420): unsure at all n locations; Clone ID: LIB3148-028-Q1-K1-H1
gcccgaaattcccgggccaaccaacccgtccaaaaaaaaaaaaattaatttaatttttccaaaattgtctgactttggaccgttttcattcctataatgtaacttttgtgttgaaaaaaaaaaaaaaaaaaaaaaaaaaaaaaaaaaaaaaaaaaaaaaaaaaaaaaaaaaaaaaaaaaaaaaaaaaaaaaaaaaaaaaaaaaaaaaaaaaaanaaaaaaaaaaaaaaaaaaaaaaaaaaaaaaaaaannnnaaaaggggggccgtttaaaaaaaaaaaaattaaaaaacccttgaatgcaaataaaaatttttttaaaaggggaacaaaaataaaatcaaggggccgggtttaaaaaacgtgggaaaggaaaaaacccgggcataacaaaaaaaaatcgcttggaaaaaaatccccttt

SEQ ID NO: 29598 - DNA, 284 bp, Gossypium hirsutum
  Clone ID: LIB3148-028-Q1-K1-H10
cccacgcgtccggatcgatactgggaactatctgcaccatggtggaaaagccagatcaaggtacctgtaaagtttgcaatgggggaccttgatcttgtgtatacaatgcctggtatgaaggattatattcacaacggtgggttcaaaagggatgtgcccttccttgaagaagctcttgtcatcaatggagtttctcattggatccaccaagaaatacctgatcaaatcaatcaattattgttcgacttcttctccaagttccattaaattttaataataataac

SEQ ID NO: 29599 - DNA, 423 bp, Gossypium hirsutum
  Clone ID: LIB3148-028-Q1-K1-H11
tctacacttactgctctatgtgatttgggtttaaaccctgaggctttggctgctggggtcaaggaacttcagagagaacctccaccatcaaccctgttgtcatcttcttcatcacaagtaccttaacttcggattttgggtagcaataattaaaaagcgatcggctctgcatatcagttaggggaaaaatgaccaaacacaaaaatgacttgaaaaattataggttaagggcattatgttactttcctctgcgtcaagccggtatataacatttattactaaaactaattgtcttgtgctttatgtttgaagcaaaaatggttaagctcaagttttacgtagaattttttgtttacttgggtggtcttatttctctcaagttcaaatcaccttgttataaattattaattactagttcattgt

SEQ ID NO: 29600 - DNA, 292 bp, Gossypium hirsutum
  Clone ID: LIB3148-028-Q1-K1-H12
ttttaaaaaaaaaaaaaaaaaaaaaaaaagggaaggaaaaaaaaaaaaaaaaaaaaaaaaaaaaataaaaaaacaaaaacctcctacataaaaaacccatcttttttatacacctcaatccaatttaacccttcacctccctacaaatttcattttcttttactacccccacatttcacttctccccccgccttttttccaaccccatatctgggaaacccctgcctttccccaacttattcgccttgcaccccttccccttttccccacctgccttatttccaaaaagccc

SEQ ID NO: 29601 - DNA, 359 bp, Gossypium hirsutum
  Clone ID: LIB3148-028-Q1-K1-H2
tccggtcgccacgcgtcgcacgcgtcggcacaagctttactcggaccgactccgttttgccagcgacaacaactgcatcgcgtgagtcacgactgcgtcgcttggttagacgagtcaattctacaacaacgggtctgactcgctctgactcgctggttcagtcaccagtcggtggcgaaaacagtcaacagcgcgcgcgaggaattcgcgtcgagggcgccgctcctgccggtcaaataccggactggtcaagatctgagaagagtaccgagatatggaggagatcggaagcacatatgactgaaccgatgatggtcgaggagggtaggattcgctacgagtttggcaacaatgcagga

SEQ ID NO: 29602 - DNA, 427 bp, Gossypium hirsutum
  Clone ID: LIB3148-028-Q1-K1-H3
gccccacccgtccgaaaaaaaaaaaaaaaaaatttaaaaaaaaattttattaaaaaaaaaaaacaaaaataaataaaggagggaatataaaaaaacgcaggcgtgcaaacaactaaactaaactatagtgacacacacaattaaattcaattgccacaactgtaacaacaaataaaaggggccggcctttttaaagacccaaatttttttgccccgtctttccaacgtattattttttttttggggcccccaaattaaattcccgcgcccgcctttttacaacggtggcccgggaaaaccctggggtttcccaattttattcgcttggcaaaaattccctttttccccggtggggtaaaaaaaaaaaagcccaccccttaccccttttcaaaaaagtgccccatttttttgggcaaatggccccccc

SEQ ID NO: 29603 - DNA, 266 bp, Gossypium hirsutum
  unsure (1)..(266): unsure at all n locations; Clone ID: LIB3148-028-Q1-K1-H4
gttccttttaattccttccagacttgactccaagagtgagaaagactggctaagcccccagaacaaggtatgttcactcaaatttgttactggaatccatttctttagatagaaatctatgatgtatatttcggacctagtgttcttagctcggtcacctttacaaaaattagatcttatccttgtcttagatggaatgatggtagactagattgtgacattgttaatagagactatagtttttggtccttgaatttgacagctna

SEQ ID NO: 29604 - DNA, 321 bp, Gossypium hirsutum
  Clone ID: LIB3148-028-Q1-K1-H5
ccggaactgactgccccgacccacccatccgtccgggtttacccgctgagtttaagcatatcaataagcggcgaaaaaaaaaaaaccaaagcgaggaacttataaaaaatgaaaaagacaaaaaataaaaaaaaaaaaacaataaaaaaaaataaaaaaatatataaaaccgcctgcgattcaaaaagattattcctttccttcaaaaatctctttgcatcaacggagtttctcattccctccaacttaaaaaaccttgttgtaatccaacaatatttcttttagtcattttccaattttcccaaattgctttttttttta

SEQ ID NO: 29605 - DNA, 105 bp, Gossypium hirsutum
  Clone ID: LIB3148-028-Q1-K1-H6
gaccggacgaatgcagagcacgacaaacacatacgtaaaaaattttttaaaaaaaaaaaaataaaaaaaaaaaaaaaaaaaaaaaaaaaaagcgggggagtgttt

SEQ ID NO: 29606 - DNA, 377 bp, Gossypium hirsutum
  Clone ID: LIB3148-028-Q1-K1-H7
cgagattccgtttaacaattttctttattgctggaacaagtcttaaccaagatcaagatcaaagtacttcactaagttatatatgcaggcattgcaatacttaggcttcatctaaaagcttgaaccagccctctgttgtatattgtttcttcttcttttctgatctttttcctttgattaatgagatgtgatgatgatttggcattattttctcactaggatgaattatgttttagaaattctaatactttgtgtgtctctgtgtgtgtttttttatgtattaaattacatattgaatcaatgtttatgtattaaatttaaattcattaatttttatatttagttttgaagtttaaattttaatggaaaatttaatt

SEQ ID NO: 29607 - DNA, 425 bp, Gossypium hirsutum
  Clone ID: LIB3148-028-Q1-K1-H9
cccacgcgtccgattttcggttaaaccgagcgaggctacttatgttaacgcactctcttgttgtgctaatttagaaaagcaaggtgggttttaccaagggaggcagatacatgggtatattttcagaaacgagggcgttatgaatgttttcatgggcacagcattgattgatttttatggaaaaagaggtcatttagagtttgcctttagagtttttaatcaaatgttggatagagaggtttgtacttggaatgcaatgatctcttctcttacatgtaatggtagagaaaaggaggctttggacttgtttgagaagatgaaagaggacggaatgtgtccgaatgaggttacatttgttgctgttctaacagcatgtgctcgcaccaagagagtggaagtgggtttacaattctttcaatcaatgt

SEQ ID NO: 29608 - DNA, 426 bp, Gossypium hirsutum
  Clone ID: LIB3148-029-Q1-K1-A1
cccacgcgtccggttgctatgacaattatctgtgtggctactaataattgaaagtcaaaaggtgtttatcgaataataataatgttaaaagcttacctttgaaaaatcattttctttttgaaagtactaatcaggctacaccgtcaaagttggatggataaaatagaaatgactctgtttagagattgaattttaccctagccttttagattacaatgttcatgcacagcaatgacatgtataagcttcaaatttaacctttgagtctgaaacataaattcctatggcaaaactggtttcaactttcaagtggcaaatcatgactgcttcatgttcagcttcgactgttgtaaaatcagccaatgccactaaatttcaatttgtttttctgtaaagtttcgatgacatggacagcatatatgcctc

SEQ ID NO: 29609 - DNA, 194 bp, Gossypium hirsutum
  unsure (1)..(194): unsure at all n locations; Clone ID: LIB3148-029-Q1-K1-A10
ctaatactctaatactaatagaataggatactattaggattagacaagcatccatctgataagacgggcaatgcatatngaggcctgctcaatggggccttaattacatcatttactcgtggcgccagatctatacgctctaatactattcctgtactaatacaataccaatctaatactctaattctaataga

SEQ ID NO: 29610 - DNA, 434 bp, Gossypium hirsutum
  Clone ID: LIB3148-029-Q1-K1-A11
cccacgcgtccggtgtgccgcaatcaattgagtctgccttggaaaaagctggtctcactgcatctaatattgactggttattgctccatcaggcaaaccagaggattattgatgcagtcgcaacacgtttagaattcccaccagaaaaggtcatatcgaatctggcaaattacggcaacacaagcgcagcatccattcctttggcattggatgaagctgttcgaagtggaaaggtgaagccaggccatacaatcgcggctgcaggtttcggtgcaagtctaacttggggttctgctgttattagatggggctgaaaaaaactgccaaattaaccaagtagaacgaaagacagattccttgcagagagcagcacttgaatccccaactaccttatcggaaaagctcacagataatccggattagcgcctgcataa

SEQ ID NO: 29611 - DNA, 154 bp, Gossypium hirsutum
  Clone ID: LIB3148-029-Q1-K1-A12
aagctttctttacctgtttcagtggaaatcaataggatttatcatcattccatctttaaatactgtcaaagcaaatgaagagaatatcatttgttgtatgaatgaagatcatttaatcatctcgatatatatatatgctctctaattttgctgt

SEQ ID NO: 29612 - DNA, 218 bp, Gossypium hirsutum
  Clone ID: LIB3148-029-Q1-K1-A2
aaatgtggatctccaaggcagagtacgatgaatcgggtccatcaattgtccacaggaaatgcttctaaatggttttcgacatgagctttgttctatcaacatatgtttattctcttgtcggataaaacgataaagcatcagagaaagagaaatgtttcatcgtgtgtggaccaattctttcaattctttttaatgagaagttggtttttttaccatct

SEQ ID NO: 29613 - DNA, 287 bp, Gossypium hirsutum
  Clone ID: LIB3148-029-Q1-K1-A3
ttacacccacagggatcttactcagtaaacttaactatagtctgcttcaagagatgcaaagaaatttgtctttttattgtctttttcatgcttattattattagtttctatcttgtaatatagcactgcagatctgcttaggtaactgcgtatggcgttactcttttttttccccagttgttttcacccttactatcatattatgtcttggataaagattttaagattacatctaggatttttggcaagcttgtaaggtgaaaaagattgatatggcaggttgaaat

SEQ ID NO: 29614 - DNA, 333 bp, Gossypium hirsutum
  Clone ID: LIB3148-029-Q1-K1-A4
cccacgcgtccgcccacgcgttcgattattagaacccatatttgctctacagatatctaggatgtgaactttattatacccattacaaagactagagtgagtagtcgcgattttgtaatttgatacaaaaaataaaatccaacatgtgaaaatattattatatactgtaaaaaaaaaaatgatttcacccttactatcatattatgtcttggataaaagattttaagattacatctaggatttttggcaagctgttaaagtgaaaaagattgatatggcaggttgaaattcttattgctggaaagtttgaatgcaacaccagattcattcatg

SEQ ID NO: 29615 - DNA, 230 bp, Gossypium hirsutum
  Clone ID: LIB3148-029-Q1-K1-A5
caggcgtccactttattactctgcttagttctcttttatgatctctctctttttctgtaaagtggtgatcctgaaactgtttgcatttgtttttaattgaactcgatattgatgtgcttctactctttaattgatcttgacattgtgcgattgtaaatttgtaatgtttctttgatcttgtttggatttcagacaaatgtttgattttaacttaaagtgagttcattttt

SEQ ID NO: 29616 - DNA, 298 bp, Gossypium hirsutum
  Clone ID: LIB3148-029-Q1-K1-A6
cggctttctcttctgtttttgcttctttgattcagctaatagagcatgtaggaaccaaatttgcagttcaaatttgaagccatgctcaaaagtttttctctaaggctcattgctttgagttcattacaagatttccttgattaagtaaatgtattatatctgttattaccaagatttacttgattaagaaaatgcattgtataatttattaccttgcatatgtattatttattttaatattgattctaaatttttatttttagttaagtattctaactgttggattttgcaaaagaat

SEQ ID NO: 29617 - DNA, 269 bp, Gossypium hirsutum
  Clone ID: LIB3148-029-Q1-K1-A7
ctgctattgtcgaacaccgcgtcgaactgaatcgtcattcttgggcattgacggaagatgtaaggactgtcttctacccaggaacagcagcggaggcatctgtcatttgcaatgactcttctgtatctaagattagctagattaggaatgaaatcccaggaaattcgccaaatagttactgtaatttttgaaggtagttgtaagccccatagtttcctgtaaaattctttaatttcgatttgtattaaataattacaaggatccgaatt

SEQ ID NO: 29618 - DNA, 293 bp, Gossypium hirsutum
  Clone ID: LIB3148-029-Q1-K1-A8
ataataaaaaaaaaaaaaaaaaaaaaaatgaataaaaattaaaaaaacaaaaacaaaagatgtaaagagactgaattatacaaaaaaaaaaaaaaaaaaagaatataaaaatttaaaatgactataaaaataaataaaattaactaaaaaaagggggggggtccttttaaaggttccaaattatttactgttttttttgaaggtatttgttttttttttgggccccctaaataaatttattgggccgatttgtataaactgattacttggaaaacccttggggtaaccaaatt

SEQ ID NO: 29619 - DNA, 436 bp, Gossypium hirsutum
  Clone ID: LIB3148-029-Q1-K1-A9
taatactctaatactaatagaatagtattctattagtattagattagtattagttagattagagtagtattagttagtgatcccggctcaatgagtcctttcttccgtgattaactgttggcgccagtcctagtcctactaatactaatctaatactaatagaatactaatctaatactctaatactaatagaatagaaaaaatagaatagaaaatactaatataatagaaagaactgtcttttctgtatactttccccggttccgttgctaccgcaggctttacgcaatcgatcggatcatatagatatcccttcaacacaacatatgtcgtcgaaaggatctcggagactcaccaaagcacgaaagccaggatctttcagaaaatggattcctattcgaagagtgcataaccgcatggataagctcacactaac

SEQ ID NO: 29620 - DNA, 115 bp, Gossypium hirsutum
  Clone ID: LIB3148-029-Q1-K1-B1
agagaactcaccacataactccgctttccaagcttgaaaatcattatgcgcagtctctgcaaggggaatttgaaggattttctgaactatgtcctcagaaaaggtattctgaatt

SEQ ID NO: 29621 - DNA, 306 bp, Gossypium hirsutum
  Clone ID: LIB3148-029-Q1-K1-B10
ggattttaagcttaaaaccctaaccctagaattttctttggaactcatcgctggtgctatttgacctcattcacaatgcctcgccgtagctctggaaggtctgcttctcgtcctgcttctgctcgcagccctccacctcaaccagctcatcatgctcctcctccagctcctgctcagagtggaagtggtggatccttgctcggaggcataggctctaccatagctcaaggcatggcttttggtactggaagtgctgtagctcacagggctgtggatgctgtgatgggtcctcgtactattcaacat

SEQ ID NO: 29622 - DNA, 431 bp, Gossypium hirsutum
  Clone ID: LIB3148-029-Q1-K1-B11
cccacgcgtacgaccatgtcatatcttaaaggagctgctgaaatgtttgaaaacggagttctagctgttgtggatgtgaagtttttagctgacgttcatattcgagctttcgaagattcatctaccatcggacgatacttttgcttcaatcaaatagtgcatactgaggaagaagctgttaaacttgtagaaaccctgagccctttgttatcttcacagcccaaatatgaatgccaagggagcgaggcctatgctgagaggttgagaaccaagaaattgaacaaactggttgaaggcactgcataattgtgaaacttgattttaccttttttcctatcgattatagcttcttaactttatcagatgatgtatatatatatatatatgtgttctcattgagaaagacgtgctgattttctcatcagcatttt

SEQ ID NO: 29623 - DNA, 352 bp, Gossypium hirsutum
  Clone ID: LIB3148-029-Q1-K1-B12
caaaaaaataaaggtgacgaaaagcgtgacaaaatatttctggtcttttttatttttttcttggctaaacactcatcgtcttctctgagaatcgatttcattgtcagatggcattgcgaggagtttggcaacttaaaaagctgattgtaagctattgtgattggggaggtagtagtaggggcatcagggcatttatggagtctgagttaccaacttttaaagagaaaaaccctcagctggaggtggttactgaactcattcgtgggcagcatccacatttgaaaggcttttacaagaacaaaacgaagcggtggtatgcgtgaagaatatgactcctgaagatatcccttct

SEQ ID NO: 29624 - DNA, 314 bp, Gossypium hirsutum
  Clone ID: LIB3148-029-Q1-K1-B2
accacgcgttcgatacagggtttggctggcaatttgggtgagagctttaaacacaactgcttaaatcttcctttagtatcttgataagatgtacacttattagtttgtatttagataaaaaaggaattgtatgctgacacgagaaaagttcgagtgacgcgtttgagtatgatatcattaactctgcctaaacgaagcggtcgttatatgacgaaaccaagatctatgcggtgaacttcaagagtcgagcaagaaaactgttgcacgtttaatagctgcacaggattcactggtggagaccgcgagggcgcccg

SEQ ID NO: 29625 - DNA, 254 bp, Gossypium hirsutum
  unsure (1)..(254): unsure at all n locations; Clone ID: LIB3148-029-Q1-K1-B3
cgggtactttaaagtcctcggaaaaggtgttttgccggagaaccaaccggtggtcgtcaaggctaagttggtgtcgaagaccgctgagaagaaaattaaggaggctggtggtgctgttgtgctcaccgcataggttagggttcttggttttattggatctgaatgacatttctgttagattattgttatgtttcgttttttttttgagttaaacttgaaatgagatttttaatatcgtttaattttggatcana

SEQ ID NO: 29626 - DNA, 170 bp, Gossypium hirsutum
  Clone ID: LIB3148-029-Q1-K1-B4
ctgtttccaatagctcctaatttagagcaaattatctaataaccaacctgataaaaatgatgctttgattggttcaaaaaccactaaaaagaaaaataaagaaggcaaaaaaaacaaaaaaactcaccgcaataggtgacgcttctaggttttattggatctgaatgaca

SEQ ID NO: 29627 - DNA, 306 bp, Gossypium hirsutum
  Clone ID: LIB3148-029-Q1-K1-B5
gggtaatggagagggttagggaggtaggggagagattggggtacagagtggagagagggaaaagaggggttatggggttagggaaagggagggtggtagtggtggtggaggtggtagaggtcgcacaggtgttcgtattggtggaggttaaggtgatggatggtggcgtagagtttgaggaatggcaatgggtggatctgtgagccggccttgcaaacatttttgtttcttgtaataatggtgcttcacgctgatggcatttttgcttggtaatgtacatcgaacgtttttttttttacctctttc

SEQ ID NO: 29628 - DNA, 234 bp, Gossypium hirsutum
  Clone ID: LIB3148-029-Q1-K1-B6
tgactaggccggcattggtttatgctacaaatattcaagaatccggtaaggttgcttggtgtatttatatatttcaaaatcggaaaggtgttcagttgcttttgatctaaagagaaacccttaaggtaagggtgctctgtgttttctttgtacgattgtaagcagagagaactcaaacttttctggctactatgaattatttgatagatgatcgaaaaaaaatttgttatttag

SEQ ID NO: 29629 - DNA, 103 bp, Gossypium hirsutum
  Clone ID: LIB3148-029-Q1-K1-B7
gtgttgaatcaagactttgattagatgtgattctctgtaattctgctgaaccttgtaaagaggtattcaaaaataaatatatgtttggatgttggtgtttttc

SEQ ID NO: 29630 - DNA, 290 bp, Gossypium hirsutum
  Clone ID: LIB3148-029-Q1-K1-B9
cgttttatgcaacaacttaaaaaggaagaattttaatattgatcacacctttaatctctagtagtttggatccttttgaagttgttcggtccatgcttttttgttttcaagcgctctttctctctttcatgtcccctatcattacttgtaaacttcatatgtatctttgtcatcttttttttcattaagcttttaaacgaacagttatgccttttaaaaaggtatggaaaaaaaaaattaaaacctagaacttatatataattttgtggtccaggcccaaaaaccaaaat

SEQ ID NO: 29631 - DNA, 321 bp, Gossypium hirsutum
  Clone ID: LIB3148-029-Q1-K1-C1
ttttttttttttttattttatatacttcaataaaaaaaaaaaaaaaaaaaaaaaaaaaaaaaaaaaaaaaaaaaaaaaaaaaaaaaaaaaaaaaaaaaaaaaaaaaaaaaaaaaaaaaaaaaaaaaaaaaaaaaaaaaggggggggcctttttaaaggatcaaagtttatgtacgcttgattgcaaattaatagtttttttatagtgtaactaaaattaaattaattggccgcggtttaaaaacttttgaattggaaaaaccttggttttacaaaattaaatggtttaaaacaaaatccctttttaaaaagttgggttaat

SEQ ID NO: 29632 - DNA, 113 bp, Gossypium hirsutum
  Clone ID: LIB3148-029-Q1-K1-C10
atatgcactctcttttatatgtataaaaaatataaaaaatataaaaaaaaaaaaaaaaataaaaaatagtaaaaaaaaaaaaaaaaaaaaaaaattaaaattaaatataataa

SEQ ID NO: 29633 - DNA, 387 bp, Gossypium hirsutum
  Clone ID: LIB3148-029-Q1-K1-C11
tgctgaagaaaccacaaccgggacacttgttcttggcgtggcaccccggaaagtgcactttgatggagctgaaatggaaactggggctgaaaatggctgcaaatgtggagataactgcacttgcaacccttgcaattgtaaatgagaaaaaaaagctcagcatattatggaagctgatctaaataatatatgatgtatttgggtctttactattagaataaagcacctatggttcattaggtgttttgcttcttgtatccatggttgcttggtttgtgtatgtgtgtgtgtatatagtgaaatgaaattattttaactagctttgttgtgttactgccatgttatataactgatgaatgaatgaaggaaagctctatttgccttttg

SEQ ID NO: 29634 - DNA, 317 bp, Gossypium hirsutum
  unsure (1)..(317): unsure at all n locations; Clone ID: LIB3148-029-Q1-K1-C12
cccacgcgtccgcccacgcgtccggattatgtggcttgcattacaattacgaactacattccctagggactgaaactaagctttccttgcaattaaaggacttcttatntttaaaaaaaaaaaaataccaaaaaaaaaaaaaaaaaaaataaaaacactttcaacttgataaaaaagaatataaagaaatatataaaaaatctaagaaatgacaaagaatattgctgtgcgacaaagagcattatgcaaaagtggattaaacttcnttggagatttaaactgattgcattttcatgaatagaccaaaaaaaccaagc

SEQ ID NO: 29635 - DNA, 76 bp, Gossypium hirsutum
  Clone ID: LIB3148-029-Q1-K1-C2
gaaaaaaaaccgacccacgcacccgtcctgcctttttttttttctaataaaaaaaatttttttttttcttcataat

SEQ ID NO: 29636 - DNA, 310 bp, Gossypium hirsutum
  Clone ID: LIB3148-029-Q1-K1-C3
aaaaaaaaaaaaaaaaaaaaaaaaaaaaaattttttaaaaaagaaataaaaaaaaaaaaaaaaggggtaaaaaaaaaaaaaaaaaaataaacggtcgtccgttttaaagggtcccccctttttgtacgcttccttccaaccttctctttttttctatagtgtcacttttttttagttcactgtccttccttttacatcgccgtgattgtaaaacctctggctttgcaaaacttattcgttttccaccttattcccctttcgccagttgcccttttagccatctggcctaatccctacgcgcttcccacca

SEQ ID NO: 29637 - DNA, 312 bp, Gossypium hirsutum
  Clone ID: LIB3148-029-Q1-K1-C4
aaaaaattaaaaaaaataaaaaaaaaattttttttaaaaaaaaaaaaaaaaaaaaaaaaaggggggttttataaaaaaaataggataatctggcataaaatttaaacggtttgggcattaagaattcttccataccacgggacctggtctttctatattgacaccttattttagttctcgggttgttcttttttttggtgataattttaaaacatctggattggtttaaactttgtcttatcccacctcatgcctttattacattttggcttaaacgcattgaggctgtaaacctgttcgttttcaactgtt

SEQ ID NO: 29638 - DNA, 307 bp, Gossypium hirsutum
  unsure (1)..(307): unsure at all n locations; Clone ID: LIB3148-029-Q1-K1-C5
gggctataaacgaggggattgagagagagatggtttcagctttggatttagaagaagaatgctacgaacagactttgaatacaaaggatcgcttggaaggcttagcagcatttgctgaaaggcgaaagccaatatataccggggaataagaaagacccagactgttactaaaaaaatggcttcttcataagtttgtttactaataacagttcttactttgttctaaatttggacctttgagaagtctttatgttggatgaactctttaatatcaattaaaatgtcagaaataataatttatatcana

SEQ ID NO: 29639 - DNA, 141 bp, Gossypium hirsutum
  Clone ID: LIB3148-029-Q1-K1-C6
gttactcttatgaacacgcatacggacttgccgcgtttggtttcagaatgcacggatcacatgttcaatgttcgagggctggtgcctgatagaagtctcaacttataaagaatggaactttcaaactttggcggcctgcgt

SEQ ID NO: 29640 - DNA, 430 bp, Gossypium hirsutum
  Clone ID: LIB3148-029-Q1-K1-C7
ccggaaccttggacttgatcgagaaaaaaattgcaaaggttacaagcattccacagagtcatggagaggcatttaatgttttgcggtatgagatcggacaaaagtatgattctcattacgatgcattcaatccatccgaatatggtccacaatcgagccaaagggttgcgtcattcttgctatatttatccgatgtagaagaaggcggagaaacaatgttcccattcgagaatggcatgagtgtcaaaggctatgactacagacaatgcgtcggtttaaaagtaaagcctcaaagaggggacggacttttgttctattcgctgtttttgaaccgcaccatcgatccgacatcacttcatggaagctgtccagtgatcaaaggtgagaaatgggttgctacaaagtggattagagaccaacaacaatttga

SEQ ID NO: 29641 - DNA, 425 bp, Gossypium hirsutum
  unsure (1)..(425): unsure at all n locations; Clone ID: LIB3148-029-Q1-K1-C8
cggacgcgtggggagtaagggaaacatcggtaaatcctgagatcgtcatgaaattggaatctgcagagacaaaactgcaagatctaaagtcaaacatggcaatattgggaaaagaagctgttgcagcaatgaccgcagttgaagctcaacaacagaggttgacacttgagagacttattagtatggttgaagctgaacgtacatatcatcaacgagtccttcagatacttgatcagcttgatgccgagatgagatccgaacgacaacgaattgaagcacctgctncgccaaatcccaactgcaattccctctattactttcttttctccaccactttctcattctactcctttgaagtacccactcttgttttatctgcggcatactggatctggcttaataaggttttagtcgacttgtgtctt

SEQ ID NO: 29642 - DNA, 356 bp, Gossypium hirsutum
  Clone ID: LIB3148-029-Q1-K1-C9
gggaaacaggcactctcggttacatggctccagaggtccttgatgggaagccttataatcggaaatgcgacgtctacagtttcagtatatgcttatgggaaatatactgctgtgacatgccttatgctgatcttagtttcgctgaagtttcatcggcagtagtatgccagaatttacgaccagaaatccctagatgttgcccgagttcattggcaagcatcatgcgaaaatgttgggatgcacaccctgaacgacgccccgacatggacgaggtggtgagattgttagaagcagtggatacaagtaagggaggtggcatgatacctgatgaccaggctcgtggatgtttctggttc

SEQ ID NO: 29643 - DNA, 425 bp, Gossypium hirsutum
  unsure (1)..(425): unsure at all n locations; Clone ID: LIB3148-029-Q1-K1-D1
gttttttgtaaaaattcctatagatggtctgtaaagcataagttctaagacttttagtcaatatttgtaatagttgataggcgcttctgaccgtgaattcacccgaccgttcgccaccccagataagaaagtcttcatgcggtgtttgtgccagaggaattctgaggattttggtggcatcatcttccgaaaagatctgcagcaattgatgccaaccaagcaccatcttggactcctctcatcatatcactactttgctccctggacaaataatcttcctgatgctttgtaatacctccaacatacgagcattgtggttgtagtttttttgatagagcatntagctttagactctcccttctaaccaacgttgattctgcttttaatgctaaagagaaaggtggatcctctttaattcagttttt

SEQ ID NO: 29644 - DNA, 236 bp, Gossypium hirsutum
  unsure (1)..(236): unsure at all n locations; Clone ID: LIB3148-029-Q1-K1-D10
gtaagataggattttcgtttttcaatcaattctttgcttgcttaagaaccaacatgtaatattactgttcccgcatgagcaattagagaattcatcatttgcttgatctannnnaaaaaagcaaagagaggatcataatttgatgagtgaaaaaaaagccaaattttgggagacaaaaaaagaagaggaaaaaacaaaaaaaagggatgaaaagttaaaaggggcggccgctttaa

SEQ ID NO: 29645 - DNA, 226 bp, Gossypium hirsutum
  Clone ID: LIB3148-029-Q1-K1-D11
atcgcgagcgccgcccttttttttttttttcttttggtctttcccttgatatcctgaaatctgcagtgcttgatactgttcatctgcctctctctttattgttcctagcttacatgaagtcttcttatgttctttcaacaagtgataagaaaaaagccagatatttgtataattcagcaatgtaagcaattaaagttaataaacatatacggagttaatatttccc

SEQ ID NO: 29646 - DNA, 414 bp, Gossypium hirsutum
  unsure (1)..(414): unsure at all n locations; Clone ID: LIB3148-029-Q1-K1-D12
cgtnnccgattaaacattnagatggaagaacannacttgtttcatatgttttatgtctaggttagaaacccttattttgagggcctgattagtcatttgatttaataggcgacagcgtatgtctttaaacttaactatttttagagctccgagntgatgtccaattctttgatgttagattganccattctcttcaaaaaaaaaaaaaaaaaaaaaaaaaaaaaaaaaaaaaaaaaaaaaaaaataaaaaaaaaaaaaaaaaaaaaaaaaaaaaaaaccaaaaaaaaaaannnatacatatttaaaatttaaaaaaaagttttttttacacttactatttcaaaaaaaaatggggggggccctttaaaaaaaccaaacttttttacccctgtttgcaaaaattttttttttttt

SEQ ID NO: 29647 - DNA, 429 bp, Gossypium hirsutum
  unsure (1)..(429): unsure at all n locations; Clone ID: LIB3148-029-Q1-K1-D2
gatgatgttggcaatttcgatctatttatcaatggaggaagtggtcctagccttccccatcaagttcattcaaaaggtttggtcactaatgcatcatatcgagctggatgtgagtgggcaatgttcggaaacagtgactggtctttctcatgtggagactacggaagggatctgattgaaccatgttttgaggatagtgtttggggaactgcaggactttcagctggtcttatcgccgcgcaagctgtttcggcacttcggattacagagaatgcagaggtaaacacggtcgtcctcaacgggatgttgagaggctagacaagcgtgtttgttgctacatcaaacctttgctctcaaaatctgaataatggctntgnatgtatatatatatatatctntgatgccctctgtagtcgagctgcttttctt

SEQ ID NO: 29648 - DNA, 312 bp, Gossypium hirsutum
  unsure (1)..(312): unsure at all n locations; Clone ID: LIB3148-029-Q1-K1-D3
gtttttcattccctaggtttatttaattgcagaaaccgtatcgaggtgatatcactatctttcaattttgtagtgaagttagcggtatctgatagtagctcgtgctgctatctagcttctattattcaagggagtatgctcatcttgctccaaatttagtaccatttaatttaactactataaccattaaataatgtaattgtacaagatactacagattacattttcatttgaatggttaaaatataattaagggnaaaaaaaaaaaaaaatgaaaaaaaaaaaaaagaaaaaaataaaaagaatgaaaaa

SEQ ID NO: 29649 - DNA, 414 bp, Gossypium hirsutum
  Clone ID: LIB3148-029-Q1-K1-D4
gagaaaagaaatggcaggaagattgagcaacgtaacggcacgtataatgggcggaactggcgtagtatcgcgctccgtcgcctcttctttgcaactccgctccggcatgggtctccctgtatgcaaacatatcagttccgacaagccccttcctgtaaatgacgagctaattagcgacaatggaactgcattaacagaaccttgcattgatcgaatcgctgataccgtctgaaagtatgaggcaatatcttggatgtgtggaggcttgagcttctttgcatcgatgggatttttggcttggtggaatgataaggcctgcgggatgccattcgcaccatacgtatatccatattacaacctgcgagtggagcttggtggagaaccgcacgtagatccatatgcagagctgtatac

SEQ ID NO: 29650 - DNA, 374 bp, Gossypium hirsutum
  Clone ID: LIB3148-029-Q1-K1-D5
ggaaaaagaaaggttctagggtcacaacaattacagaacaagctgatagtagcgccgccgcccaagaagttggtcctgaattggtggctgaaccactcaatgctaagtccaagtccttcgttggtacccacgaatacttagccccagaagtgatatcagggcaaggccatggcagcgctgtagattggtggacacttggggtgtttttgtatgaaatgctgtacgggaggacgcctttcaaaggcgaaaacaatgagaaaacactgattaacatccttaaacagccattaagcttcccgagaatcagtgttaaaagcggcaaagagtttgaagatatggtcaaagttcaagatctcatcaacaagcttgtagtg

SEQ ID NO: 29651 - DNA, 378 bp, Gossypium hirsutum
  unsure (1)..(378): unsure at all n locations; Clone ID: LIB3148-029-Q1-K1-D6
aaaaaattattgcgcggggatggcaaagccttccattacattaaagtggactgggacaaatgggtggatgaaagataaaacaagggtcttggtgatctcgacttaagaagaatggacttctcgaactttgggggaatgggcggcatgggcgacatgatgggcggcatgggcgatatgatgggcggcatgggtgacatgatgggtggcatgtgtagcatggatgagtttgacgacagtgatgatgaatggcaagaagtgacaaagcctgatgacaaggccacaggagatgcacagcctgaggagcatggcatcngatcttcaaagaaaaaggaggctgaaccgagcacgtgaaatcattttagctgaaacccggaatgc

SEQ ID NO: 29652 - DNA, 396 bp, Gossypium hirsutum
  Clone ID: LIB3148-029-Q1-K1-D7
ataatgtgggatttaggagaatattgttgagaacacaggctcttgtcttaaagaagcgaagcctaaggatgagtgaaaccttattgcgaggagttgggtttagagcaactacatgtatttcaagtaattaatattctgaagactgttgtagaattgaaataatttgaggattaatcttttcagaaaatcaagttgattggatttgttaaaaaaaaaaaaaaataaaaaaagaagacataaaaaataaaagacaagaaataacaaaaaatagataacaaggtcaaaggaaattcaatattctgaggatcatggcataaaagtgttcaaagataatagaaggttgaatcgagtcccaggaaatcatttggggggggccttttaaaagattcaaacttt

SEQ ID NO: 29653 - DNA, 279 bp, Gossypium hirsutum
  Clone ID: LIB3148-029-Q1-K1-D8
cccacgcgtccggaaaacttggttcaatcagcctgcaaggaaggctagaagaagaattgcaaggcaaaagaaggccgggaggatcttcccaaggccaactgctggacctctacgccctattgtccatggacagactttgaagtataacatgaaattgaaagctggcaagggtttcacccttgaagagcttaaagctgcgggtatttcaaagaaacttgcacccaccatcggtatatcagttgatcaccgtcgtaagaaccgatctcttgaaagtcttca

SEQ ID NO: 29654 - DNA, 432 bp, Gossypium hirsutum
  Clone ID: LIB3148-029-Q1-K1-D9
agagtactttgatccaaagatagcagacgaggagcgtgagaaagggaacgaatgtttcaagcagcagaagtatcccgaggctgtgaagcattatacggaatcattgagaagaaatccgaaagatccaaacgcatacagcaacagagctgcatgctacacaaaattgggtgcattgcccgaggggctgaaagatgctgaaaagtgcattgagcttgacccaaccttttccaaaggttacacaagaaaaggtgctgttcaaatcttcatgaaagagtatgacaaagctttagaaacataccaggaagggttgaaacacgatgccaattaccaggagctgctccatggtgttcgaagatgcgtagaacagatcaacaaagccaatcgaggtgatttgagccccgaagaactgtaggaaaaacaggcttatgcaat

SEQ ID NO: 29655 - DNA, 436 bp, Gossypium hirsutum
  Clone ID: LIB3148-029-Q1-K1-E1
gggattataggtgaagaggtgaaatttagataagatcatataactgctcagaattcagcctgtgacctgttggttggtttgggaagaagaatgatactatagctcataattgaatcacataaaagtgtttgtaaatataaatgtcattttgtttaagatgtttgagctaaccaatttaaaacactaattggagctttatatgagcattgcatggtttgctttataagtacttatctttgtcattaattaaactcaaccactgtgattttgcattctggccttaccttaatctactgatgactccgtatattttcaaaagcatatcgcttgtaattttgattggttggttgtagtgtaattactcttaaggttatacgttctctaaagacttcgggtaccttggaaatgttttaatgtgtgttttctgacgagtttt

SEQ ID NO: 29656 - DNA, 184 bp, Gossypium hirsutum
  Clone ID: LIB3148-029-Q1-K1-E10
gaatcacatcaaacggccaacgggatctggaccaagtagctggaaggattgcggttgctatctaagaaattttaactttatgtttttcatgttcctgagatttagtcgtttgaaaattgggttttcataggaagctgttttaaacattttccgttttggtatattaagttctgaatttattttg

SEQ ID NO: 29657 - DNA, 415 bp, Gossypium hirsutum
  unsure (1)..(415): unsure at all n locations; Clone ID: LIB3148-029-Q1-K1-E11
cccacgcgtccgtgccgaggcaacccggcgaatgctggttaggaagagattaagttcaaaaataaactatgatgcattggagaagctctttgatgacccggttacagagaaacccaagaaacaaagaatagaatcaaattcagatgaaaagggggagaaggcttctaaaattggcaaagaaggtgatttagaagatgaatataacgacaatgatgatgatggatatggaggaattttttacggtgacactgaatatgagtatgaggataattatgattacgatggatattgaatngtctnttatgtnggatttgggtgaattcttatattcagaactctactcgtagagcaaaagaaggcaatggcgttagtaaaagaggagttaaaactgcagtcaatagtgatagttttactc

SEQ ID NO: 29658 - DNA, 299 bp, Gossypium hirsutum
  Clone ID: LIB3148-029-Q1-K1-E12
gaagatcgagtccataccagctactgttgcaccaaacccgagtattgccgctgcaccagcttcaaatgctgagaaagaggatggcatagatgttgtttcgcccgcaacaaaattcgaatgccctgaaaccaagcctcaccggtgctacctttcggagagaaaattgggcggccaccatgcaggagccaaggaattcagcaacggatatcaacatttcgttgccagcaggttaatcttataaaatcagactcggaggctgactagacttaaatccctgatgtttttcgttcataaagagt

SEQ ID NO: 29659 - DNA, 386 bp, Gossypium hirsutum
  unsure (1)..(386): unsure at all n locations; Clone ID: LIB3148-029-Q1-K1-E2
attctctcttattttttcttttagtatattctcatgaatattttacatgtactttatcatcatttagccattcataatcaattctcccttgcttcattcataccttttacattgtaaatgctgatggagattttgcttcttcaatgtnaaaaaaaaaaaaaaagaaactaaaaaaaaaaaaacactaattgaagcataatataaaacatagaatggattgctatataaagaacttatctttgtcattaaattaaactcaaccactgagattttgcattctggccttaccttaatctaactgatgactccgtatattttcaaaagcatatcgcttgtggtgggtggattggttggttgaagtgtaattacctcttaacgttatacgt

SEQ ID NO: 29660 - DNA, 324 bp, Gossypium hirsutum
  Clone ID: LIB3148-029-Q1-K1-E3
agatgatgaaagccagttcaagagcatactttgtttcaatgttattagaggcatgttaaaactttcagcggaggtcatgtaccgtcgccggatgcattaatccgtggaggaacaaaaacagcgctgtggccattttggttcgtgattgtgaagcttttgactggacaaaacaacttgactagcatcatgatctaacctaaaacctaaaatgagttacacaattgattgacttgacactgtatatttacatagcgttcggattaatgttttagtgtaatcgtatttgatgtgttatagaaatagaaatttagcacattaattcat

SEQ ID NO: 29661 - DNA, 352 bp, Gossypium hirsutum
  unsure (1)..(352): unsure at all n locations; Clone ID: LIB3148-029-Q1-K1-E4
cccacgcgtccgcccacgcgtccggttcttccttgtatctttgatggattgatttcttgtgtctctgcatttgcttccaaagcttatgatgaatgataagatttgaaggtcatgttatttgtcaactactatttctttttatatttaagaaataaaacttaatttttttgaaaaaaaaaaaaaaaaaaaaaaaaaaaaaaaaaaaaaaaaaaaaaaaaaaaaaaaaaaactaaaaaataaaaataaacataacataaaggaaaaataatataaaaaaataaaaattacaaaagttatataaaatagaaaattaaaaacantgggggggccctttttaggggttccaacttta

SEQ ID NO: 29662 - DNA, 290 bp, Gossypium hirsutum
  Clone ID: LIB3148-029-Q1-K1-E5
tgctcacttacgctcacgcattcatgtttttcttgtatctatgatggattgattacatcgtgtctctgcatttgcttacaaagcttatgatgaatgataagatttgaaggtcatgttatttgtcaactactatttctttttatatttaagaaataaaacttaatttttttgaaaaaaaaaaaaaaataaaactaacttttaacaatatttgattaaatcaataaataaatttacttactatatatttaaattacttaataaattatatttttaaatttcttttattttta

SEQ ID NO: 29663 - DNA, 363 bp, Gossypium hirsutum
  Clone ID: LIB3148-029-Q1-K1-E6
tttggagttctcgaattagataatcaagtttcgtgcatatggatactccaaataaatgctagcgttcatggtttccgtttatgtgaaaaggtttctatgggacgtaccttcgggtgacaaaacttgaagatgatatttaattgttggtgtgggagtactggattgttacaaatatctcacattttttgtgtttgatgaacattaatggggaagagcaaataagccaattccattctcttctcacaagtcgtcggtgatattatgcttctaataatttcctctcatttgttgagaaacttattgtgtgaaatttgttaaaccgtaattggaaattatataaattagatttctgatttttaattc

SEQ ID NO: 29664 - DNA, 199 bp, Gossypium hirsutum
  Clone ID: LIB3148-029-Q1-K1-E7
gcagtaccaggagcgccgaacagatctagacagaaaacaataaaaccagaataaaacctaaagacgcataccagaggcggcagacagaaacgtgctagggtagcagactttaccattagtctacaactatatttaaaaacaggcttaatgcacattttagttattgaagtatactacttttttcactttagtccttacg

SEQ ID NO: 29665 - DNA, 357 bp, Gossypium hirsutum
  Clone ID: LIB3148-029-Q1-K1-E8
ggtaatggaaatgcccttgaaacttcaagccagaatgcaaaatcagttagtgtgcatcctattcccttagattccatcaaccatgtgcatgggaaaagcattcctatggttagctgtggatccccaaatgtttctggctctggatcatcaaaagagcatcataatcaaccttttccagggcaactgatcaaacggagaaagcggcaccgaaggaagcatgttcaaaaccaagaaccttgtctgatgaggggtgtatacttcaaaaatatgaaatggcaagctgcaataaaagtcgacaagaaacagattcacttaagcactgttggttcacaagaagaaacttgccgcttatatgac

SEQ ID NO: 29666 - DNA, 361 bp, Gossypium hirsutum
  Clone ID: LIB3148-029-Q1-K1-E9
cccacgcgtccggcttgtgaatcactgacctagagtctccctcaacttccacgcccttcaggccgagttggaatcccagatctagtgcctgataacacaccaacacctcggccgcaaaagcagacgatcaagaacaaagaaaatcgaacttagatcgagggaagtccaaaataattgaatagtcgactcgtttccatctgaaattcgtacgagttatcttagctactgaaggctcggggatagtcgaggattgtcaccatactatcgaattcattttggtacttttgaaaagtgtaatatttttaagtatagcatgtataggatagaatgtctatgtatttaaagtttgatatgtatatat

SEQ ID NO: 29667 - DNA, 436 bp, Gossypium hirsutum
  unsure (1)..(436): unsure at all n locations; Clone ID: LIB3148-029-Q1-K1-F1
gaagatttcatacttccttcgaccactctgggaatcgccaccgaaatctttccatgatatcccacattattatcatgagaatgtatcgatggaaaagctctgtaaacttcatggttggggaattcgtgaatttccgagacgggtttatgatgcagttttgtttagcaatgaggtggatatcctaacaatacggtggcaagagttgtacccttacattacacagtttgttcttctcgagtctaattcaacattttcgggaattccaaagcctatggtttttgctagccatcgagatcaattcanatttgttgagccccggttaacttatggcacaattggaggaaggtttaagaaaggagaaaaccctnttattgaggaggctatgcaacgagtagcattagaccagcttctcaaaatagctggaattactgatgac

SEQ ID NO: 29668 - DNA, 415 bp, Gossypium hirsutum
  Clone ID: LIB3148-029-Q1-K1-F11
gattatttaatgtaacaaattaatgagttcaccaccaatgtttacatttatgtatctactggcttcgttaaattaaatggtgtgagccaagttctttttcaaaaaaaaaaaaaaaaaaaaaaaaaaaaaaaaaaaaaaaaaaaaaaaaaaaaaaaaaaaaaaaaaaaaaaaaaaaaaaaaaaaaaaaaaaaaaaaaaaaaaaaaaaaaaaaaaaaaaaaaaaaaaaaaaaaaaaaaaaaaaaaaaaaaaggggggggcccttttaaaaaatcaaagtttaaaaccccttgattgaaaaataaaactttttttaaagggcaacaaaaaaaaaattaattggcccggttttaaaaacgtgggaatgggaaaaaccctgggttaaccaaattaaatggcttggaaaaaaatccccttt

SEQ ID NO: 29669 - DNA, 297 bp, Gossypium hirsutum
  Clone ID: LIB3148-029-Q1-K1-F12
gaaagcactgtaaaagtttgttcataggatgctataccttttccgttttgacaagcttcattcatgtttgttctttgtataatgtgtgccattattgtctttgaacatttattacaccaaaaaaaatgagaaacccactttattattgatcctctatttaaaaaaaaaaaaaaaaaaaaaaaaaaaaaaaaaaaaaaaaaaaaaaatttttaatataaaaaaaaaaaaaaaaaaaaaaaaaaaaaaataaaaaaaaaaaaaaaaaaataaaaaaaaaaaaaaaaaaaaaaaatttaa

SEQ ID NO: 29670 - DNA, 384 bp, Gossypium hirsutum
  Clone ID: LIB3148-029-Q1-K1-F2
cccacgcgtccgcccacgcgtccgcccacgcgttcggttccgataattaattgaacaaaaaaaaaaaaaaaaaaaaaaaaaaaaaaaaaaaaaaaaaaaaaaaaaaaaaaaaaaaaaaaaaaaaaaaaaaaaaaaaaaaaaaaaaaaaaaaaaaaaaaaaaaaaaaaaaaaaaaaaaaaaaaaaaaaaaaaaaaggggggggccgtttaaaaaaaaaaaagtttacttacgcgtgtttgcaaagaaaaaatttttttatgggggcaccaaaataaaattaatgggcgggggtttaaaaacgggggaattggaaaaacctgggggttaccaaattaaatggctttgaaaaaaatccccttttcgaaagttggggtaaaacaaaaa

SEQ ID NO: 29671 - DNA, 363 bp, Gossypium hirsutum
  Clone ID: LIB3148-029-Q1-K1-F3
caacacatcaattgcatagaaactggttctacaaaattgaagcttgccagtatccttaaattattgcaaactaaggatcttggacaatgatgtcggcatgtggcatttttggcttgacatactggtaatcagatctgttcagtggattcaatgctttcccccccccccccttatttttctttggtaatttgtgtcttttacttttctgttaatgaatattgattcttagatcactgtgtttgacgggagaaatggtttggacgtagtatttttcttcattatgggcaaagtggagcaatagtttctgctgcttttatgggtttgtaacatgtctgtgtacataatagcacattttctctcgat

SEQ ID NO: 29672 - DNA, 420 bp, Gossypium hirsutum
  unsure (1)..(420): unsure at all n locations; Clone ID: LIB3148-029-Q1-K1-F4
tgaagaaggaggggctcatcgatttggtagcacgtgtaggtagacatgtttatagcaaaaatggggttctcactggactcaaatcatttggcaccggtcaattaagttatgggattaagaaactcttcggaagatactaccaagggcaacttatgccaattacaatgatgggcacacccaatatcaacaaggagctggaatacttggacaaaggaaacaaactggtgcgttggcttttaattaaacatcgtgacacgaaatatgggctggaattccttaatgaagatgatggggaattggagcttagcaaactctctcgaggcagtatatatgaagaggacatngatgacgatgatgatgatggtgatgatgatgatgaatacgatgagaacccangcaatggcgggaaactctgatcag

SEQ ID NO: 29673 - DNA, 298 bp, Gossypium hirsutum
  Clone ID: LIB3148-029-Q1-K1-F5
cccacgcgtccggtgaaaagtcaggagatagtctgatataaatacatagttatagcagctaatgggtgttagctatgttgacaagaacttaaaggagaatcagattctctgtgttgatgtatgagttgtgagcaatgtgaaataagatactatgttccatcttcatgatggacacaacccataatcaaacaggagctgcagtacttgaacaaagaagacagactgttgcgttggcttttagttaaacaaaagcgacacgaaatatgggctggaattccttaatgaagatgatggggaa

SEQ ID NO: 29674 - DNA, 427 bp, Gossypium hirsutum
  Clone ID: LIB3148-029-Q1-K1-F6
ggagctggggctggatatggacaagttcatcacacactctgagccttttgccgatataaacaaggcattcgactacatgctccagggtataggtctgagatgcatgattcatttggatgcttaagagagtgttgctgctgtatatttgcccaaccaaggatcaaaactctaatgttttgtcctactatgtgttatatttatgtgcctacttaagctacctttcccggttatcaagagtgcccatatagaactctctctctctaaaaaaaaaaaagagagttctttatatggagttttatattatgtgatgagagaataaatgatcttgtaaaagcttgctttgttaatgaaataaattcctatgactatgattttccaaatacgaaaaaaacccaagcaaatggcggcccactttgatcaataaaat

SEQ ID NO: 29675 - DNA, 413 bp, Gossypium hirsutum
  Clone ID: LIB3148-029-Q1-K1-F8
accaaaacaaaatccaaaaataagccaatgtgtaatttttttaactatggcttcaaatcccaaggttttcttcgacatgacgatcggaggtcaaccggccggccggatcgtgatggagcttttcgcagacgtcactcctcgtaccgccgagaacttccgggcactctgtaccggcgagaaaggcgtcggtcgttccggtaaaccactccactacaaacgctctaagttccaccgcgtgatccctgatttcatgtgccaaggaggtgatttcacagccggaaacggaaccggaggtgaatcgatatacgggtctaagttcgccgactagaacttgatcaagaagcacaccggacccggcatactatccatggcgaacgccggtcccggaacgaatggatctcagtgcttatttg

SEQ ID NO: 29676 - DNA, 304 bp, Gossypium hirsutum
  Clone ID: LIB3148-029-Q1-K1-F9
cccacgcgtccgcccactcgttcgcccacgctttcgggtttggtcattttctctagtccttatcttgtgtgttaaatgggttcgcttaagtgctttgtaaaatgttctcttccaatttcctttgtaacaacagatttcatttacttttcttgcaagaaatatatataacagtatttctttttcccaaaaaaaaaaaaaaaaaaaaaaaaaaatatattggtgggtgtcgaaaaataatacaaaattaacagacgcgttccttctaagaataagttttttcttttgtgaacctcttatattaatt

SEQ ID NO: 29677 - DNA, 426 bp, Gossypium hirsutum
  Clone ID: LIB3148-029-Q1-K1-G10
gccgctgttgctaccatcaaaactaagcgggcagttcagtttgtagactggtgccctactggttggaagtgcggcatcaactatcagccaccaacggtggtaccagggggtgatcttgctaaagtacaacgtgcagtgtgtatgatcagcaataacaccgctgtggccgaggtttttgctcgaatcgaccacaaatttgatctcatgtatgccaagagagcattcgttcactggtatgtaggtgaaggaatggaggaaggtgaattctcggaagcccgtgaagatcttgctgctctagagaaagactacgaggaagttggggctgaaggtgttgaagacgaaaaagaaccggaagattactagatctgtatttttgaaaagcacaggctaatgattccccacgttcctcatctgattttacttcat

SEQ ID NO: 29678 - DNA, 397 bp, Gossypium hirsutum
  Clone ID: LIB3148-029-Q1-K1-G11
tccggcagttgtcgactcaagcgtccggccacgcgtccgcttacatcacacccacggctgaaagttttctttaggacaatctctccaaggcactaccgcaatggagattggaacaccggaggtacttgcaataataccattcccttgactaatggtagtgaggtcttgcaagatggatctaatgacaaagttgtggagagtgctgttaggggcacaaaagtaaagcttttggatataactgcgatttctgaactccgagatgaagctcacatgtctggttacagtattaggccgacacagagtgtcaatgattgcttgcattggtgcctacctggcataccagacacatggaacgaaatccttattgcacagatataggaccttccatgcatatggt

SEQ ID NO: 29679 - DNA, 296 bp, Gossypium hirsutum
  unsure (1)..(296): unsure at all n locations; Clone ID: LIB3148-029-Q1-K1-G12
accacacattcgtatatataacactgaccgttttaagttttctttaagacaaactctccagggcgcttgcgcaatggagattggaacaccctaagtacatgcaataataccaatccctggactaatggtagcgaggtcttgctagatggatataacaacaaattttaggaaagtgctgtttggggcacaaaggaaaagcgagngcatataacttttttttttttacttcgagatgaaactgacatgcctcgttacatgtattaagccgacacagagtgtcaatgaaagcttacatt

SEQ ID NO: 29680 - DNA, 427 bp, Gossypium hirsutum
  unsure (1)..(427): unsure at all n locations; Clone ID: LIB3148-029-Q1-K1-G2
cccacgcgtccgagggcaccgaaaagtctgaaattggtcatttagtaaagagaaaatcagcaggtggacgagttcctagaaagcatatgaaactgcaatcacatttcccgccatgtaaatcaacaaaagcaaagaaatctggactattgtctaagaagactcggaagctgtcttcattgactggtcagaagataggtgtaggtgacaggaaaccggtaacagggaagcccaagggtcctgtaatagcttgtgttcctataaagttagtattcagtaggataaatgaagcagtgaacggctcagcacggctaacacaccggcctctaacatctcgcaatccatgagttggtggtgatccatcgtgttgtgaaagtggtggctgattcattntaaaactattgccgcagcttgcttgcattcattctct

SEQ ID NO: 29681 - DNA, 233 bp, Gossypium hirsutum
  Clone ID: LIB3148-029-Q1-K1-G3
gttattttaacttatgttgacgacatttacaattctaaatagaactgtagacctgttgctgcaaaaaaaaaaaaaaaaaaaaaaaaataaaaaaaaaaaaaaaaaaaaaaaaaaaaaaaaaaaaaaaaaaaaaaaaaataaagaaaaaaaaaaaagggcggctcgttaaatgatccaagcgaatgtactcttaaaagcggaaaattgatttaaaaacggtgtcaccgaaatta

SEQ ID NO: 29682 - DNA, 427 bp, Gossypium hirsutum
  Clone ID: LIB3148-029-Q1-K1-G4
cccacgcgtccgacttaatggcggagctcctcttccctccgatgaattaatagatcgccggcgattcttatccaaaaccgtccgttctgttcccgttaatatcccgcttcatcaacgtagtactatcgttttcgattacggtggtgatttagatgaagatcgggaaattgtgccgccgcatgtgatattagaacggagaatcgctgcgaaaacggcgttttcggtttgtacaggtaatggaagaacgcttaaaggaagggatttgagtcaagttcggaattcgattctgaggttgactggatttttggaagtataatatatatatgtttaatttttttcatttctttttttttcatcatttcaaaattcagaaatggattgggagaaaagaatttgattttatatgttatatatataaattattgat

SEQ ID NO: 29683 - DNA, 364 bp, Gossypium hirsutum
  unsure (1)..(364): unsure at all n locations; Clone ID: LIB3148-029-Q1-K1-G5
tattgctagctttcgttacccatttgcttgtttatgttaagaacgcgaaagccaagcgtgtggccatggtttttgcgatttgcgtttctttttgggcggtgcagaaagtgattttcttggacaattggaagactggatatgggattcatggattctggccttccagttggaactgaaggcatcatcttttttgtttttttttttaggctgctataattcgaactatggtttcgattcagttgggaatttgatatcaattttagatgttttaatgtactttgggcaaaatactgagcttatagaacgttaatctgttataagttgacatccatgaaaaatccatttcctaannnanaaannnnaa

SEQ ID NO: 29684 - DNA, 349 bp, Gossypium hirsutum
  Clone ID: LIB3148-029-Q1-K1-G6
acgaaatgcttcaaattccttggagcaatatgctcctccacattaagtgcgaagagcttgaatggttttaccgatttcattctcaacaaatgccttgaagctagtaaatgcactaaatgcttctaatttctgctgtaagaactaaactaatgtttttcggcaataatcatgaatgaaaggaatgaaatattttgttacctcctttaagctgatataattcgaactatggtttcgattcaaatgggaatttgatatcaattttagatgttttaatgtactttgggcaaaatactgagcttatagaacgttaatctgttataagttgacatacatgaaaaatccatttcct

SEQ ID NO: 29685 - DNA, 338 bp, Gossypium hirsutum
  unsure (1)..(338): unsure at all n locations; Clone ID: LIB3148-029-Q1-K1-G7
gtaagttagctgtgtggttgctgcttggttactgggaaaatgtagaaacaaacatggagttatcgacagtgtgtgtattctgttttaaaatgtagattctgaatctacaatatttgcaagatgacccttgcacggtcagatggccagggtagtgcagggtctaggtgatacaattattcttgtattatcatcatttgtaaatgagtaacatcatcatcttcatcattatcataataatttataatgnaaaaaaataaaaattagaaattttaatatactttggggcaaaattcttaagctataaatcttttttttttgggtttcgttagaatatcttt

SEQ ID NO: 29686 - DNA, 306 bp, Gossypium hirsutum
  Clone ID: LIB3148-029-Q1-K1-G8
gccacgcgtccgccgcattttccctattcttggttaagcctctagctgcgatgaacacttttttggagttatttgtgccatgttttcaatgacattgcgaccattctctatgtttttttgactaggatatatatatataactgagaacaagctattttaggatagacttgtcaagctacccgaaagattagctttgaatcggttcctttttatatctattttttcacttatcagaatttcagaatatatttatttaaaaaaaaaaaaaaaaaaaaaataaatttaaaataaaataaaaaataatac

SEQ ID NO: 29687 - DNA, 297 bp, Gossypium hirsutum
  Clone ID: LIB3148-029-Q1-K1-G9
aaaaaaaatccgtagtttctttaaggcacctctgctatcttcgttgattttgactttctcgggcgattgctttatcgattggaacctgggttttggaagtcttaagtaatggcaagtgagtttggggaatcagcgagccattcgccccaaaatccatcttgctctagtaacaatggtaatggtgatgctggtaactttgagtgcaatatctgctttgaattagctcaagatcccatcgttactttatgcgggcatcttttctgcttgcccttgttgtacaaattgcttcatattcat

SEQ ID NO: 29688 - DNA, 95 bp, Gossypium hirsutum
  Clone ID: LIB3148-029-Q1-K1-H1
tttccattgtttttgtagatgattggttccatgtaattagtgggattgttgtgcttgaagtttgaaacacttatatggagattgaacttgctttc

SEQ ID NO: 29689 - DNA, 138 bp, Gossypium hirsutum
  unsure (1)..(138): unsure at all n locations; Clone ID: LIB3148-029-Q1-K1-H10
tgagagttggctagcaaatggtatgtttgtgcttagttttggtaaatggtttgtgatgctaaattgtgtaaaaaaaaaaaaaaaaagtaataatacttattttgtttaaaaaaattttaactgtcgnaagaataaaag

SEQ ID NO: 29690 - DNA, 329 bp, Gossypium hirsutum
  unsure (1)..(329): unsure at all n locations; Clone ID: LIB3148-029-Q1-K1-H11
caggagcatgtccttgaataaagtattttatttttattttaaaaaatgagaattgtaattctaggttgaataaaaaaaataactcttatgtcttcggttttttaacaaaaaaaaaggcttatattgttggagaatacaaaatgactttttaaggtttttattggaaacattgagagttaaaattttttgccagtgaatagtaaaacaccatttctttaaactttacctgaatgaaaaccaangggnaacggccggccatttttttaggaagaatattacaacccctcgaaataagaaatttcatgtggccttaaggtccaaatgtgctt

SEQ ID NO: 29691 - DNA, 260 bp, Gossypium hirsutum
  unsure (1)..(260): unsure at all n locations; Clone ID: LIB3148-029-Q1-K1-H12
tgaacttgatgtaattttgttattggaatggttatggaccctaaaattatcctagttcatgtcccatttaagggnaaaagcagcaatattcagacaaaatgagatagccgcctctttccctgaagccaggaggatatttggggctctagctgtcaccagccttatttcgaaattgcaagatgctggtatacaaaggcaagatttgtacaaaataattacagaccccaaccctgggtcgagggtggataaaccctttgaaa

SEQ ID NO: 29692 - DNA, 427 bp, Gossypium hirsutum
  Clone ID: LIB3148-029-Q1-K1-H2
cgattactctaaacagaactcggggccgttgagatccaccgttgacgccgtcgagcatgccgttaccactgccgtcggtcccgcctacgggaaatttaaggatgttcctgatcattttcttggatttcttgataacaaggtagatgaggtttcacacaaatttgacgagcatgctccagcaccagccaagcaagtggttaacctggcccacgatttggtccaaaaggcaacccaaaaggctcagaaactagtagaggaggctcgaaccaatggagcacgaggggctttgcactacgctgcagctgagtacaagaacttggtgttggtaagctcgaccaagttgtgggttaaactgaacagcaacttgactttcaactcagtgacagaaaaggttgttcccaaagcagctaatttgtgtgagaaatac

SEQ ID NO: 29693 - DNA, 422 bp, Gossypium hirsutum
  Clone ID: LIB3148-029-Q1-K1-H3
cccacgcgtccgcccacgcgtccgcccacgcgtccggccaagtcatgaagtttagaaatgggtatctcaagggttgaagtttgtttgtagaacattatgtacacttactagcctgccaacttttttttttcctataaaaaaaacccttatctgtgcaacaataggtgcattaagtcataaaaagtaatgaaaccataatactctaatcactattttgaatgtaggggggaagttgcatataaaagatgtgtgttgaagtgatggatgcatgcatttttcccaaatgtggaccagaggatgtggaaatgcatgagccttgggagggaaaggccaccgaccaatgtccacgtcccaatatatatttatatgatattaaaatagtcgtacgtcggaatacatgtatgttggtctaatttaattta

SEQ ID NO: 29694 - DNA, 112 bp, Gossypium hirsutum
  Clone ID: LIB3148-029-Q1-K1-H4
ggcacttcttttcatgatgagaaaagggattttctcaaagaaaaaggtcatgggtgatctcaacatggtgcttaaacggggcaaaatcggcggcgcccaaacccttggcaac

SEQ ID NO: 29695 - DNA, 390 bp, Gossypium hirsutum
  unsure (1)..(390): unsure at all n locations; Clone ID: LIB3148-029-Q1-K1-H5
cccacgcgtccgcttttttgccactcacggtggcttgcttttcaagatcttttaaaggggatgggcggaaacaacaatagggaaggtgacttgttagttacaggccctatgtaagggtgttgatcctgttcacccattaagtttctgtatccgtctaaactcttatagttagcgaagcttagctttagtcattgctatgtttgataggttgatatcgatgataactgagatatgggataggttgatcaccgaaaacgatcattggttatcgtgggcgagtcaaggtgggatatcgtacttntccagttctagagcagcttttgcttaattttgcaaatttgtactcgcaaacaatcttttccagcatttaccttaactgatatttgatga

SEQ ID NO: 29696 - DNA, 141 bp, Gossypium hirsutum
  Clone ID: LIB3148-029-Q1-K1-H6
gaacttgggcccctttttacttgtttaataagggaaataaaaaccggatatgtacatttttggttggagaactacggatgctaaacttttctctgttttcagttaaacaaatgcagctctagttgatggctgtttattatt

SEQ ID NO: 29697 - DNA, 393 bp, Gossypium hirsutum
  Clone ID: LIB3148-029-Q1-K1-H7
ccctgtcctaaaaacctttagcgctaacggttgatggataccaacgaatttaatgcgggggtgattaatatattgattcatgttatgtaaaaacaatgatacaggatttttaaaaaggtgtagttcctgttcacccattaaaataaatgaatccgactaaactcttatagatagcgaagacttaactttagtcattgctatgtttgataggttgatatcgatgataactgagatatgggataggttgatcaccgaaaacgatcattggttatcgtgggcgagtcaaggcgggatatcgtacttattcagttctagagcagctgttgcttaatttagaaatttggtgctcacaaaaaatcttttcgagcatttaaccataatgatattttgatg

SEQ ID NO: 29698 - DNA, 352 bp, Gossypium hirsutum
  Clone ID: LIB3148-029-Q1-K1-H8
gtggaatcgagtttgatccaattgaatctactacagcttgtaaaggcatttttggtcccggagccgcccctaaaaatcctggcaaggtctttactgatcgaaaaactgtcgagaatttcagtgctcatggaaataacgggcgcaagttcttacttcccgcaatttggaaccctacaacttctacctggtggactattacttcacgctatttttctacttgaaacatctttcatcttgtttaaaaaaactcctttttcaacttatgccaaaattaactttttataaaccaaacctaatttgtatataatattgtcttctataaaatcatcacattataaagattagatgtgat

SEQ ID NO: 29699 - DNA, 404 bp, Gossypium hirsutum
  unsure (1)..(404): unsure at all n locations; Clone ID: LIB3148-029-Q1-K1-H9
gttctgaggttgagaggtggaattattgagccttctttgatggctttggctcgcaaatacaaccaagacaagatgatttgccgcaagtgttatgctcgtctgcatccaagagccgtgaactgccgcaagaagaagtgtggtcacagcaatcagttgaggccgaagaagaagatcaagtagacactggctggtgttatcctgtctgctttaaaagaaattgaatgtcagaccaggaaaatatttccattgagttcttttgctattatattattttgctgagattttgtttgtgggttctggatctgatgttccaatgtatttttggacaatcttatgtgtnttgtcttggaattttgataacgaggtggaaattntaagtaatgctagttttagaaatattattt

SEQ ID NO: 29700 - DNA, 311 bp, Gossypium hirsutum
  Clone ID: LIB3148-030-Q1-K1-A1
cccacgcgtccgcccacgcgtccgcccacgcgtccgcaagcccaatggctaaacctgaatttggttcaatagtatggggcaatgctcaaaaccaagttaaaagcccagtttccttctcatggtcattgatgtgagagtgtcccacagtttatatataattctgggtattctttccctcaatgaacctcacacaggacaagaaatctggtgcaaaaagggaccctcatccatggccgaaacctttttcattttgtggtttgtaatatttgtttacatttggatttaagttaatgatggtataaaaatgatca

SEQ ID NO: 29701 - DNA, 412 bp, Gossypium hirsutum
  Clone ID: LIB3148-030-Q1-K1-A10
cccacgcgtccgatttttctggtggctgtagagtgagcttgctcttgttgagaggctgatcgacaggaagactgagagtgaggaggaattgcttgttacgattgctactgctagagaagaggtgaagcgtgttaagagatatgattctgttgttgataaagctaaagggaagcttgaggaggctgtaaatttggtggggtctatcattgatgctgagaaggctaaggttaggcaaagggagccaatcatttgaggtttttcttgtgaagggttctcgtgttggtattcttgaggtagttgattatctgtttgactaactctgtgttactgggaatttgtagatctgaataaagactagttacttggttcaattgataaaacaaaatatagatgaattaagtaaacaagacaa

SEQ ID NO: 29702 - DNA, 349 bp, Gossypium hirsutum
  Clone ID: LIB3148-030-Q1-K1-A11
cccacgcgtccgataatagagtaaaattaacttgcttggaaaaaaaaaaaaagaaaaaaaaaaaaaaaaaaaaaaaaaaaaaaaataaataaattataaaaaaaaaaaaataaaaaaaaaaaaataatattaaaaaaaaaaaaaaaaaaaaaataaaaaaaaaaaaataaaaaaaaaataaaagggggcggcccttttaaaaaatcaaattttatttcccctttattgcaaaaaattaatttttttttttttacacttaaattaaattaattgcccgcgtttttaaaacgtggtacttggaaaaaccttggttttcccaaattaaattccttttaacaaaatccccttt

SEQ ID NO: 29703 - DNA, 394 bp, Gossypium hirsutum
  unsure (1)..(394): unsure at all n locations; Clone ID: LIB3148-030-Q1-K1-A12
ggattttaagcttaaaaccctaaccctagaattttctttggaactcatcgctggtgctatttgacctcattcacaatgcctcgccgtagctctggaaggtctgcttctcgtcctgcttctgctcgcagccctccacctcaaccagctcatcatgctcctcctccagctcctgctcagagtggaagtggtggatccttgctcggaggcataggctctaccatagctcaaggcatggcttttggtactggaagtgctgtanctcacagggctgtggatgctgtgatgggtcctcgtactattcaacatgaaaccgtggtttccgaggctgcatctgcccctgcaccagcaactactttccataagttagctggcactgattcatgcaacatncact

SEQ ID NO: 29704 - DNA, 337 bp, Gossypium hirsutum
  unsure (1)..(337): unsure at all n locations; Clone ID: LIB3148-030-Q1-K1-A2
atatgaaaaaaaataaaataattnaccaaaaattaaagattgnnttttnnttaaaataatttnaatttnntttttttaatttaanttnaattcacaagaaaaaaaataaaaggaaaccccacaacccccgggggtttttttttaaaaaaaaaaattttttttcccactaaaacggggcaaaaagttcaaattttttttatttttggaaaaaaaaaaatttttttttaaaaattttggggggccgaaaaaaaatttttttcctttcgtggcgcggagtgcgaaaaattttttttttttttttctaaaaaaaaaaaaaaaaaaaaaaaaaaaaggggcc

SEQ ID NO: 29705 - DNA, 324 bp, Gossypium hirsutum
  Clone ID: LIB3148-030-Q1-K1-A3
attttgaatatagctaaaggactctttttttggtcttaaaaaaaaaaaaaaaaaaaaaaagaaaaaaaaaaaaaaaaaaataaaaaaaaaaaccaaaaaataaaaaaaaaaaataaaaataaaaaaaaaaaaaaaaaaaaaaaaaaaaaaaaaaaaataaataaaaaaaaaaaaaaatataaaaaaaaaaaaaaaaaaaaaaagggggggggcctttttaaagattaaaatttttttacccggtctttgcaagttaatattttttttttggggcccccaaaataaaataaatgggcctttgtttaaaaagttgggggttggaaa

SEQ ID NO: 29706 - DNA, 156 bp, Gossypium hirsutum
  unsure (1)..(156): unsure at all n locations; Clone ID: LIB3148-030-Q1-K1-A4
cccacgcgtccgggttataataaatcttagtccttttgtttaacatttgttcaatgtccaagttcttcctattgctccaatatacccaaaacccgagactgcttttttttttaaaatattttattgcaaatgcaattttttttcnnnnnaannnaa

SEQ ID NO: 29707 - DNA, 318 bp, Gossypium hirsutum
  Clone ID: LIB3148-030-Q1-K1-A5
gtttgaagatctgaacgtgctcggaaatggtgacggaaggcgtagtagtacatcaccaaacttgtcaggtagtaatacgcaaagtatggttggtggaaggaagtaaaaaaaagagtgtcgtagttttaagatttatgcaaaaggatatatatgtccattgtgaatctctggtgtaaatcacagtatctaagacatggatttgtttttttttttttagattgatttgctgtggaatttgtctttttagatttgatttgtgattcattcaaataaatgaccaaaaatatacaacatttaaaactgaaaaaaccattaatt

SEQ ID NO: 29708 - DNA, 70 bp, Gossypium hirsutum
  unsure (1)..(70): unsure at all n locations; Clone ID: LIB3148-030-Q1-K1-A6
gttacacttgctcactattgacccaagccatgttaatggtcacgtattgcagagttgatctctnnnattg

SEQ ID NO: 29709 - DNA, 248 bp, Gossypium hirsutum
  Clone ID: LIB3148-030-Q1-K1-A7
gcaaatttctagggtttcttttgctgccacccaaccaccattgttttggtgatcaagagcattcaaacagtacccatcttcctcgttgaaggcgttcgaccatgcctagagaaatttggtacagagtttgttggcatgcgtacgggtagtggaggtatggggctgtttcttggttgtggcgcattagttattgggtctaggtattagtgttttaatttgggtcaaagcctgttaatagaccgttatat

SEQ ID NO: 29710 - DNA, 369 bp, Gossypium hirsutum
  unsure (1)..(369): unsure at all n locations; Clone ID: LIB3148-030-Q1-K1-A9
taaaccccataatttcctgtaaaattacttagattcggtctgtaatacataatcagtaggatttaaagtagcctcttgtaatagtttataggcgctacgtacagaaaattcgccggataattctccattccaaacttggatgtcttcatgatctaatctagctaacggcatctgtaaaaatttctgagctattttcgcttgaaagtcctaccaaatagagattntgtctgccctacctactctccagcataatcctttttggagtagaccttttgctgtccaaatactccaccaggtttgattaccagaataacacaagcaccacttttcccagacttcagaacaagtaaaaccagaagcgtagagatc

SEQ ID NO: 29711 - DNA, 99 bp, Gossypium hirsutum
  Clone ID: LIB3148-030-Q1-K1-B1
aaaaaaaaaaaaaaaaaaaaaaaaaaaaaaaaaaaaaaaaaaaaaaaaaaaaaaaaaaaaaaaaaaaaaaaaaaaaaaaaaaaaaaaaaaaaaaaaaaa

SEQ ID NO: 29712 - DNA, 142 bp, Gossypium hirsutum
  Clone ID: LIB3148-030-Q1-K1-B10
gtacctctgtaaatgtaagaggtggtggtgtaaacgtcaatacacgaaaagggaagcctgggggtgacacccatgtgaacgttggaggcaaaagagttggagtgaacacgggaaagccagggggtggcactcatgtgaatga

SEQ ID NO: 29713 - DNA, 298 bp, Gossypium hirsutum
  Clone ID: LIB3148-030-Q1-K1-B11
gggaaacaggcactctcggttacatggctccagaggtccttgatgggaagccttataatcggagaggcgacgtctacagtttcagtatatgcttatgggaaatatactgctgtgacatgccttatgctgatcttagtttcgctgaagtttcatcggcagtagtatgccagaatttacgaccagaaatccctagatgttgcccgagttcattggcaagcatcatgcgaaaatgttgggatgcacaccctgaactacgccccgacatggacgaggtggtgagattgttagaagcagtgga

SEQ ID NO: 29714 - DNA, 413 bp, Gossypium hirsutum
  unsure (1)..(413): unsure at all n locations; Clone ID: LIB3148-030-Q1-K1-B12
cccacgcgtccggggacttccagtgggtcttcaggtttagatccccgagctgagattcgcagacaatcgacttgggaacttaaaatctttaaagagcgatggaatcaagcagtaatacaagacaaggattggattgattcatttccaagacaactaaggcggagaaaacataaacgtcaatcaaaatttgtagacctttatgactaatcacagctggtttaggttggatatccccctcatgtacagattcaatagtcatcaacatcaaccatacttgtatnttaggtttcctttacccttttttgaatgctcataatattatatatatcattattttcatttttcacaaatgcctngagttttgtccagctcttcacgtcttcttttctctttgtaatttatacttagacatg

SEQ ID NO: 29715 - DNA, 76 bp, Gossypium hirsutum
  Clone ID: LIB3148-030-Q1-K1-B2
gtcctcggttttcagcagaaaccggcaaaatacgtggagaagccggcgaagactgtgaatgctaaagtggtcgtcg

SEQ ID NO: 29716 - DNA, 281 bp, Gossypium hirsutum
  Clone ID: LIB3148-030-Q1-K1-B3
cccacgcgtccggaatacctcaagctgcaatgttatgtgaagatgatgatgatttggattttcattttaccccctaaaaaaaaaagttcaagtttgatgccataatatacttgaaaatgttttttttttttaattttagtttttatcttttttttcttttttcaattttatgttggattaggggttaaattatgatatagataatatttttgttgaaggttttaggggaggattgataatgttgtacgtggaaagtcaagggtgtggcttttccttttttt

SEQ ID NO: 29717 - DNA, 114 bp, Gossypium hirsutum
  Clone ID: LIB3148-030-Q1-K1-B4
gaataattcatcttcatttaacctttcacatagatctttaactagagaacatggaggtcttatgagttggcccgaacatttctttaaggggagacaacatacacaaaatcatga

SEQ ID NO: 29718 - DNA, 387 bp, Gossypium hirsutum
  Clone ID: LIB3148-030-Q1-K1-B5
ccggattggaagggccgggccgagcgtcgcgtcacgcgtacttgataacctctaactgcaattttttgtcaagatgatgttgactttgcatgtgcgggttaccaaataggagagagaagttcaagtttgatgccataatatacttgaaaatgttctttttttttaattatagggactatcttgtatttcttttttcaattttatgttggattacgggttaaaccatgatataaataatatttttgttgaaagatataggggaggactataaatgttgcacgtggaaagtaactggtgtggctttccctttttttatgagaatgtctgttgaattattgacattatatctagccatacatttgagaacaccacttaatttttttttct

SEQ ID NO: 29719 - DNA, 334 bp, Gossypium hirsutum
  Clone ID: LIB3148-030-Q1-K1-B6
aaaaaaaaaaaaaaaaaaaaaaaaaaaaaaaataaaaaaaaaaaaaaaaaaaaaaaaaaaaaaggtaaaaaaaaaaaaaaaattaaaaaaaacaaaaattacacaaaataaaaaaaacaggggcgccccatttagggggtccagtttacgttacccttccttgcaacgccatgtttctcctttggagaaccctaacttaatttccttggttttttttttacaccttcgtgtctggaaaaaccctgccgttccccaattaaatcgccttcctaaccttctccctttactaaagttggcttgataacaaagaggccctcccctttcgcccttccaa

SEQ ID NO: 29720 - DNA, 420 bp, Gossypium hirsutum
  Clone ID: LIB3148-030-Q1-K1-B7
cccacgcgtccgactaaatttgaattccacaaagagcatttctaattctgaggagtatacaaggggaggaaatagcattcttaccatccagggccctaactcctttctttacctagagaaataagaattttgcaataataggcccagaagacaggagccaccgtacagccttagaatagaaaaaggagatatgaaaggaaaaaaggcatttaggtctctatccctatcgttgaatacccacaaaagtgacggaagaggccatcatggtttttgggaaattaaaatcaatggtccggcgagcaagagaaatgagagttgagaggtagggcaggcctagcccattcaagaccaactttgaaaagcacaaactggatgggtttttttgcctctctcttttttccctatatttccaaattttca

SEQ ID NO: 29721 - DNA, 402 bp, Gossypium hirsutum
  Clone ID: LIB3148-030-Q1-K1-B8
gttttcgatttttgtattaagagtcgccctttggtgtttttctaattcaatcagtgaggtgaagaaaaatgtcttgctgtggtggaaactgcggttgcggctccggttgcaagtgcggcggcggcggcggctgcggttgcggcggttgcaagatgtaccctgagatgaactttgctgagcaaaccacaactgagacacttgttcttggcgtggcaccccggaaagtgaactttgatggagctgaaatggaaactggggctgaaaatggctgcaaatgtggagataactgcacttgcaacccttgcaattgtaaatgaggggaaaaaaaaaaccgaagcatattatggaagctgatctaaataatatatgatgtatttgggtttttattattagaataaagca

SEQ ID NO: 29722 - DNA, 373 bp, Gossypium hirsutum
  unsure (1)..(373): unsure at all n locations; Clone ID: LIB3148-030-Q1-K1-B9
gcccgatgtcatattcttgaaggtggatgcggatgacttgaagaccgtgactcgagattttgccgaggaggcattgcctacttttatctttatgaaacatggcaaaatagttgacaaagttttgggggcaaggaaagatgaattgcagcagataataaccttacatatgttgaaagcatgaatcaacttcaattactcttcgaattctgcaagttgtttctgaaactagaacttaacttatagatcttatacatatctgtctctcagntgcgncaaattagaaaggcttttaacaagaacaaaaacgagcggctggtatgcgtgaagtttttgactactgaagatatcctactttatggaacaaggcttatat

SEQ ID NO: 29723 - DNA, 235 bp, Gossypium hirsutum
  Clone ID: LIB3148-030-Q1-K1-C1
gcttttcttaaaaataaagaataagagaactccctcctataaccaaataaaacaattttatgtacctatttgataaagagaaaaagccaataggggcaaattcataaagtatttttgaattgccaatccaataataaatacgagtttgaacaattgctgattagtcaagaattacatacttttagatgcaattttaattattgtaaattatacatttactatttattggtgaatc

SEQ ID NO: 29724 - DNA, 264 bp, Gossypium hirsutum
  Clone ID: LIB3148-030-Q1-K1-C10
agctgcatctgtgctatcattggagtgacatattagtagctttgattaatagtaaaatacatgggcttcaagaaatgcattgattgacgtgatgctaagatgatacgaatttctcttcctatatcatcacttgatttaatgatttacggctccacatgggatgctatactatgaagtggaacgccgtgcttattcaccaaggacccacacgtgatggagatcgcggaattcgccgtgggggagtgttacaagcaatccaatgtt

SEQ ID NO: 29725 - DNA, 382 bp, Gossypium hirsutum
  unsure (1)..(382): unsure at all n locations; Clone ID: LIB3148-030-Q1-K1-C12
ttatgatgtttcatcttaatttcaaaggtggaggtaaagttggaaagcgagctgttgaacatggttactcttcagttcttgctgcacttgtactgcaacttggcagttgtcatggtctggctacctctggtcgacatgaaccactacgtgcacttttaactgcatttaaggcattttgtgaatgtgttggagatcttggaatgggcaagattttggctagagacagtgagcataatgaanagtggattaatcttattggagatttagctgattgcatttccatgaagagaccaaaagagccatgcttccaataatgtgttagatgggctgaacatgtttgatggaactgatggtcattacttccacacggggtcaaggggtc

SEQ ID NO: 29726 - DNA, 420 bp, Gossypium hirsutum
  Clone ID: LIB3148-030-Q1-K1-C2
gcttgagatggctcgtcaagcacagatgaattcccagcacacacaatctcttaccgagataagttggggcaaccagatacgtacttatgtccttaatccttatcgcttggtgaaggatctgaggaccaattatgaggtctctgatcccgattctgtgctagagggagatctagacagcttcatcttgagctatttatctgcttcattggacaaaggtgaaggtgaacaataagattagctgcaatgcaaaagatcttgtcggaatattacatctacgcatggcttgcaagctactaggcagctgtggcaacacagtcatgcacgagctttgcattgtcacatctaagatatgatgtaatagctgattctacagagccattggacctttgtgtattgtatattcattacaaggactaaagg

SEQ ID NO: 29727 - DNA, 394 bp, Gossypium hirsutum
  Clone ID: LIB3148-030-Q1-K1-C3
cagaaattggaaagaaatattttaagctcactcatttcgaggaggcattcacaactcatcattggatggttcggatatataaactgaagcctccgaagaacaggattcgagggaaggccaaaaaatcaaaatcgaaaactagctcaacaacaagcagtcctaaaagaagtggaacgaaaaagaagaatccatggcagtaagaacacaaatattttataacaatggtgaaagcatcttgtacctaattagattggattccttaaggagccttttagagagatgatccaattattccaggcaatggtaaggtaattttcctcttaggtggaattccacccaagccattcaaggtaaaccaggtttggtggaccacctgactggatcgctttaatct

SEQ ID NO: 29728 - DNA, 368 bp, Gossypium hirsutum
  Clone ID: LIB3148-030-Q1-K1-C4
cccacgcgtccgtttctatttagttttctcttcctccaattaagatgcagatcttcgttaagaccctgaccggcaagaccatcaccctcgaagtcgagagttccgacacgatcgacaacgttaaggcgaaaatccaagacaaggaagggatcccaccagaccaacaacgtctcatcttcgccggaaaacagctcgaagatggccggaccttggccgattacaacatccagaaggagtccaccctccatctcgtcctccgtctacgtggtggcatgcagatcttcgtcaaaaccctgaccggcaagaccataactttggaagtcgaaagctctgacaccattgacaacgtcaaggccaagatccaagac

SEQ ID NO: 29729 - DNA, 358 bp, Gossypium hirsutum
  Clone ID: LIB3148-030-Q1-K1-C5
acgcaattgctcaagctaaggaaaatccactgcctgaatcttctgagctcttcacaaatgtgtacgcaaaaggtttgggtgttgagtcatttggagcagataggaaagaagtaagagctatacttacataaattgggactttgctggaacgtcttcattctgttgtttagctttaccaccctcaaccttggaagaaagaagaataatgaactaacagagggtaacgagctcttccaagattcaaatatgactcatcatgggtatttgtacagagtacttattatttttcatacaaatgacgggcagaattgctccatagaaattgtcggttaacccgaccatggttttacactattat

SEQ ID NO: 29730 - DNA, 399 bp, Gossypium hirsutum
  Clone ID: LIB3148-030-Q1-K1-C6
cccacgcgttcgctttcatacaaaaaaaactacaaaaaaaatgcaaatcttaaaataagacgggtgaccagaaagaccatcacacctaaaaatcaaaagtaacaacaacgatcgacaacgttaaagcaaaaaatacaagacaaaggaaaggggccggccgttctaaagaccccatatttttttccgcgtaactgctagaaaatagcctttctttggggcgacacaacatcaattaaggggcccgcctttaacaacttcctacctggaaaaaccctgtggttccccaacttaataccctggcaggacatcccctttctcccggttggcgtatttccaaaaaggccgacaccgttcgcctttccaaacaattccccacctggattggaaaagggcaccccc

SEQ ID NO: 29731 - DNA, 411 bp, Gossypium hirsutum
  Clone ID: LIB3148-030-Q1-K1-C8
tcggatttggggacattctctttcctggtttgcttattacatttacatacagatttgatagagaaagcaaaaagagtatgggcagaagttcctgaactggttgtggacacggaaagagaaggagatagccattgttacccatagtgggttcttgtttcatacattaagtgcacttggaaatgattgtcatccattggtgaagaaagagatctgcaaacactttgcaaattgcgagcttcgttccatggtcattgttgatagaagtatgataggatttgacccttcgatgaccaattaccctggaaagactccatcaggattggatctcccaagtgatgttgtcgatgagaaggctgactaaaggacgtgatacaaattgtcctctgagcattatgtttcatgcttgtgatg

SEQ ID NO: 29732 - DNA, 423 bp, Gossypium hirsutum
  Clone ID: LIB3148-030-Q1-K1-C9
gcgaccagcactctctgtacatggctattgtggtgcttgctgggcagcctcataatcggtaatgcgacgtctacagcttcagtatatgcttattggaaagatactgctgtgtcatgccttatgctgatcttagtttcgctgaaggttcatcggcagtagtatgccagaatttacgaccagaaatccctagatgttgcccgagttcattggcaagcatcatgcgaaaatgttgggatgcacaccctgaacgacgccccgacatggacgaggtggtgagattgttagaagcagtggatacaagtaagggaggtggcatgatacctgatgaccaggctcgcggatgtttctgtttcacttgccttggtccgtgacacttaatgttgtcctacatgcttttagtttgagagagacagacagtatttg

SEQ ID NO: 29733 - DNA, 407 bp, Gossypium hirsutum
  Clone ID: LIB3148-030-Q1-K1-D1
atcagggtgactttcttcgcttgatcaatgaacctgctgaaggtggagagggaaacattttggggcaattagctgaggcgatgccacaagctgtgcaagtcacacctgaggaacgtgaagccatagaacggcttgaagcaatggggtttgaccgtgcaactgtgctccaagtgttctttgcttgcaacaagaatgaggaacttgcagccaactaccttttagatcatatgcatgattttcaggattgagttggtaaaagaaatggcttggggaagtacaatatcattttctctttcgttctttgggggtccattgtcattcatgttccccctcccctccccccaaaactttaccgactttattcttaatcaagtgatgtaagtgtttggtgtagagacaagggatgt

SEQ ID NO: 29734 - DNA, 415 bp, Gossypium hirsutum
  Clone ID: LIB3148-030-Q1-K1-D10
cccacgcgttcgcccacgcgtccgcggacgcgtgggtgagaaatcaagttggaaacctgcccgaccccaaaccccagaggaggatcacccgcctttctaaggcgctcccccaaccaagcatttggagtatcatcattgttgtagtctaaatattgccaagttttgggagacagaaaaagagatgcagaaacagataaatgtgttgaaagttagtctggtctcattcctaacagagtcagaaaccagaaatgaagtgtattcatatttggatatgggatgaggttgtattgacactaactattcagaagaaaaatgtctgaaatctgacataaacccttacttgtgtacccataggtccaaaaattttgactgtgttttgcctttctccaatacaaataggggggaaaaggagaaa

SEQ ID NO: 29735 - DNA, 339 bp, Gossypium hirsutum
  Clone ID: LIB3148-030-Q1-K1-D11
cccacgcgtgcggccactcattcacctacactttcgctcacccgtccggtaaagtaggcggccttggaataccagatctagtgcctgataacacaccaacacctcggccgcaaaagcagacgatcaagggcgaacaaaatcgaacttaaatcgagggaagtccaaaataattgaatgggcgcctcgtttacatctcaaattcttacgagctatcttagctactgaaagctcggggatagtggaagattgtcaccatactatccaattcattttggtacttttgaaagtgtaaaccatttttagtataacatgtataggatagaaagaatatccctttaa

SEQ ID NO: 29736 - DNA, 407 bp, Gossypium hirsutum
  Clone ID: LIB3148-030-Q1-K1-D12
accacacgctgctaacaagtccagctacagcgaaccaagtggctgagaatgcaaagaatcctatacagtggaaggcaaaattcgcagcggcaatggtgaagatggggcagcttgatgtcttgacaggatccgagggagagattcgagccaactgtagggtgatcaaaagctagagatttgaacacatcaaatgtgtgatgatgaagttaaaaaagtgaacttgaagctttttaaagctggatgtcacataatttgcaatagttaaaagtcataagcaccaaaatttggattagttgaaagcactatggttcgtaaaataggattatcaaggaaagtgacaaccattttcaataaaaaaaaaaaattttttttgaggttggcctataaacaaaaaaaactcttgtggg

SEQ ID NO: 29737 - DNA, 354 bp, Gossypium hirsutum
  Clone ID: LIB3148-030-Q1-K1-D3
gcgaatcataattaaatttatgtatcattgctataaatgtaaattgtttgacatgcagagatgctcttgatgctttgggattggttcggtactgctgtaagagaatgcttatgactcatgttgacctcattgagaagcttctgaactacaacacattggagaagtcggagaccagttgaggaaacatgttaaattttagggtttggtgcaatttggttgagatgcctgtcaatgattctcaattttgtttaagtggggccgtgtttgaatccagaagaagggaaggaaaggacttaaatagtactagtctagtttgttttctttagctctatgatggatcgctgtatgtacgaa

SEQ ID NO: 29738 - DNA, 207 bp, Gossypium hirsutum
  Clone ID: LIB3148-030-Q1-K1-D4
tgggtttcctgcatggggaatacagccaaactcggttctcgaattcgagattgaagtcctaagtttgaagtgagtagcaggcagttggtgactgtcgagaaataatatgtagcccgaataactcacctgtgatgaacatatatagatattatggggtagcatgtatgaatattaaatgagtatcaatatgagtcatcttattcatgt

SEQ ID NO: 29739 - DNA, 414 bp, Gossypium hirsutum
  Clone ID: LIB3148-030-Q1-K1-D5
ctgaaattgggtgcttgtgtggatctgctgggagggttggtgcacattggactaggtgacccggttgtgaaccaatgttgtccggttctttcaggactcgccgagctcgaagctgcggtctgcttgtgcaccaccctcaaacttaaggttctcaaccttaaaatttatgtgccactggctcttcaactccttgtcacatgtgggaaaacaccccctcctggttacacttgctctctctaaaaccaagttgctaggttgatggactctatatgatggaatggacatgagaggatgtcgagcttttctctttgtttcttagttggattggaaatctgatgcagtttttattgtaaaaccaattattttttttcttttaaaagattgttgcaacttgcaagtgtgtttctgtatctt

SEQ ID NO: 29740 - DNA, 292 bp, Gossypium hirsutum
  Clone ID: LIB3148-030-Q1-K1-D6
cttcatttgtaataataatacagttaggtatattaagatagatacccaatctttgtaggaaatttgttgtaactttatcacagggttatctccaatttagcattgggaggaacaaagaatgatctgcaagattgctgtttagattttctttatagatgtagctaatatacgtgtaaaactatgtaaaaggttccaagtcgtagcatgtgaaaatctcatgtaacttgaacgaagctgaaggtgaggactgtgcagtaatttatttataataaaaacttaattggttcaactt

SEQ ID NO: 29741 - DNA, 418 bp, Gossypium hirsutum
  Clone ID: LIB3148-030-Q1-K1-D7
ccaaaaggaaggcttgagaagaagaagaatgatgaagagactgaagaatgggtgtgtagaatgcttgcattttgtgcaattatcttcaaatgatcatccctagaagttgcattttcatttttctgtcttcataaaattgtgcagtgggttcaatgtgacaaatgtgaggcttggcagcatcaaatttgtgctttatttaatggtcgaaggaatgacggtgggcaagctgaatatacttgccccaattgctatataactgaggtcgaaagaggagagcgaaagcccttacctcagagtgctgtccttggggccaaagatttgccaagaacaatccttagtgaccacatagagcagcgattatttaggagactgaaacaggaaagacaagagagggcaagggttcaaggaaaaagttatg

SEQ ID NO: 29742 - DNA, 364 bp, Gossypium hirsutum
  Clone ID: LIB3148-030-Q1-K1-D8
ttctttcttccttgtattctttttccctcctctatatatgttctagagaaactattatatagataattaaacatgggggtttctttgtcgtttaaaaccttacttagaacacttatagttttggggttcatcataattgggaccctgcagcaagaggggcaagtgaaagacttgggtaaagggaagtcgactttggtgcatcaacggttggatctctattacataagcagaagaagagtttcttatggaccggatcctattcataacaagcgagctggcaactcgagacgacctccaagacaagcttaggcatcaaagtatggggaagcttcgaatcaaccgaagtgctaaaagatgatggcca

SEQ ID NO: 29743 - DNA, 396 bp, Gossypium hirsutum
  Clone ID: LIB3148-030-Q1-K1-D9
cccacgcgtccgcgacgatgtcaaggaattgttttctgaggtcggtgatctaaaacgatttacaatccattacgataggagtggaagatcgaagggaacagcagaagttgtcttctctcgccgaacagatgctctggctgcagtcaagagatacaacaatgttcagctcgatgggaagccaatgaaaattgagattgttggagcaaacgtttctactactgctgcaccttcagctgctaatggcacctttggaaattcaaatggagcccctagaggtggccaaggcaggtgtgttgggttcggcaggcaacgtggtggtgttggaaagccgtgctctggaagaggccatggacgaggaaagggccgcggagaaaaggtttctacagaagatcttga

SEQ ID NO: 29744 - DNA, 268 bp, Gossypium hirsutum
  Clone ID: LIB3148-030-Q1-K1-E10
gccagctctgcaagccaaagcgtccaaaacaccgaaacactcggctcatcgtatgatctggatacagtatccactggcaagagtttctacaccggcgcattgcttccgcacccgcttcaccgcgcatcatcacttccggtcgatgccgtggatgtgtagaggctgccaagttttttaattattgtaaagtacctacctaccccccgcccccccccccccttcctccttacattgaaagtatgtaaaaggttccacatagctttcatgt

SEQ ID NO: 29745 - DNA, 411 bp, Gossypium hirsutum
  Clone ID: LIB3148-030-Q1-K1-E11
gtcagatactaagagtgccaagctatccgtgaaatccaaagctggaaagaaatcggggaaggctgccaaggatccaaacaagccaaagaggcctgctagtgccttcttcgttttcatggaggagttccgtgagcaatacaagaaggatcaccctaaaaacaaatccgttgccgctgtcggcaaagctggtggagataaatggaagagcttgtctgaagctgaaaaagcaccttatgtagccaaggcagaaaagcgaaaggtcgagtatgaaaagaacatgaaggcctacaataagagacaggctgagggtcctaaagacgaagatgttgagtctgacaaatcagtgtctgaggtgaatgatgaggatgatgatgaagaaggcagcggagacgaagaagatgatgagtagga

SEQ ID NO: 29746 - DNA, 411 bp, Gossypium hirsutum
  Clone ID: LIB3148-030-Q1-K1-E12
atttcaggtcatatcggctaaggactattagtatctaaattctaagttatggttcttgatggcattgtatcttctccccatcggagatcaggatcaatgaggaaacaattcccaaaagatgagttggggagctggtcaacacttgttcagaggcatagattcctcttaacagctttgggactcttagcattcttatgtactatctacctttactttgctgttactctaggagctacaaacacatgttctggcttggaaggaacagagagagcaacgtgtaaactgcagcacgcaaggtcgactctatcccacgggaaactcaaattattttagcatgtttttatggaaaaatcactggttgcttttgacattctagtaatcatttttttaggcaatttgagggtttttaaa

SEQ ID NO: 29747 - DNA, 178 bp, Gossypium hirsutum
  unsure (1)..(178): unsure at all n locations; Clone ID: LIB3148-030-Q1-K1-E2
gattgtctggttacatcttttgtatgctattggtatttcagatattctagcagttctatctttaaggaaaaaaaaaaaggaaggggataaagaacaaaaaagagnnacagagaaaaggtatttggggatgcgtgaaacaaacnnaaaacaaataaaaaaaaaaaaaaaaagggcggcc

SEQ ID NO: 29748 - DNA, 121 bp, Gossypium hirsutum
  unsure (1)..(121): unsure at all n locations; Clone ID: LIB3148-030-Q1-K1-E3
naaaaaaaaaaaaaaaaaaaaaaaaaaaaaaaaaaaaaaaaaaaaaaaaaaaaaaaaaaaaaaaaaaaaaaaaaaaaaaaaaaaaaaaaaaaaaaaaaaaaagcaaaaaaaaaaaaaaaaa

SEQ ID NO: 29749 - DNA, 255 bp, Gossypium hirsutum
  Clone ID: LIB3148-030-Q1-K1-E4
cacaaaggaaagctagaggacttttacaggttatgaaaacaagtgaccaacttccatgattctagttctaaaacttcactcttttgcttgtacctatccgcatgcatattgatctgcacttcactcatgctaggcatatgataactatactaataccgatgtctttgctcgagaagatccaaatatcaattggttcctcctgttcgcactcacaagggttcagatgataaatgcttttcctgtgtaacacaggaa

SEQ ID NO: 29750 - DNA, 415 bp, Gossypium hirsutum
  Clone ID: LIB3148-030-Q1-K1-E5
cgagtttagctgcaaaatatgcaaaggtagttttcttaaaagtggatatagacgagggtagggatgtggcagcgcgatggaacattagcagtgttcctaccttcttctttataagaaatggaaaggaagttgataaggtagttggggctgataaaaatacacttgaaagtaagattgcccaatatgcaagctgattttgagcctatgcctatgaatgaaaggaagttagtctccagctacttgtaatgcccctttccttgcatatgcatgtgaaacatatcaataatgaaaagacttggcaatatcttaggaaaactgtaccatatgttttattaaactgacctgctgggggatggggttttttttaattagaaaaaaaagaagaagaaattctggtgctatatccagtcttcta

SEQ ID NO: 29751 - DNA, 402 bp, Gossypium hirsutum
  Clone ID: LIB3148-030-Q1-K1-E6
gatttgaacaaggacattttgacgaggaatgaatatgatctggaaaagtcttgttattatctttgtggggtggcttaatgggatccgatacttgaggagttgcaagaaatgggtttctgtgatgcttaaaccaacaagaagcttcttaaaaagaaccaccggagccttaaaggaggtggcaatgaacctgttaacaggagaaggtgttaaattattaattatggatgatggctcttggtttctaagcattttattatattaattaattagtgtgcgcattttaaccgtgtctttattaaatagctgccttttaatttctagtcttctgaagtatgcaggggctaaaaaaaagagctgtaaacgtttcttgttaattgactttgagcctaaaggctataacta

SEQ ID NO: 29752 - DNA, 417 bp, Gossypium hirsutum
  Clone ID: LIB3148-030-Q1-K1-E7
ttcggccaagccttcgaattccggctttgccttttgcggaaatgggtcttctatgttggagtggtgaactgcctatgacgccaagatttctccttccccattccatgctattagtcccgatgccgatctgaacgtctgactggtcaaaagctgcgttgaaatgaactgttgcccttccccttttgaacaccttgtgacacttatccgaagagtgtaaattgatttctattaaaccaaataaaccagagaccacaacagaatattcgaagttgctcatcatttccttgtccaaagattccagatttcttcatcatcatcatcaatagacagaccggcgaaatctgactccatggacaattacgtgagaaacagattaagagaattatttcagaccctttagatggtagccggcaaacc

SEQ ID NO: 29753 - DNA, 417 bp, Gossypium hirsutum
  Clone ID: LIB3148-030-Q1-K1-E8
cggacgcgtgggttcaagtccatccaaactcctatgcattggttatcagcatggagaacattaccctgaactggtacttcgggaatgatcgttcgaaacttgtatcaaactgcttattcaggatgggaggggctgcaatactgctctctaacaaatggtccgacaaaagaagatccaaatatcaattggttcatactgttcgcactcacaagggttaagatgataaatgcttttcctgtgttacacaggaagaagactccatagggaagattggtgttacattgtcgaaggatctcatggcagttgctggtgatgccttaaagaccaacattaccacattggggcctctggttcttccaatgtctgagcagcttcttttctttggtacattggttggtaagaagctgttcaaaatga

SEQ ID NO: 29754 - DNA, 252 bp, Gossypium hirsutum
  Clone ID: LIB3148-030-Q1-K1-E9
gtggaggagaaaccagctgacggggaaaagggagatgaaaaagctgatgagattcctgttgagaaagttgaaaaattgagcgaccaataccatacgtaaggtggcaaatgcttaaaggagcttctttattctataattggcggagtcatactactattatttatgattactatgttagatgtgtgatggtgagggctatcttttcctttaatggtagctactctgctctggggtttgatatttaatattgaa

SEQ ID NO: 29755 - DNA, 387 bp, Gossypium hirsutum
  Clone ID: LIB3148-030-Q1-K1-F1
gattaggcttgtgtgtgatgtatttaaggtgactttgaatatttatatatgggtgtgttgtaatggtaatctttgtttgtttttagttagcattcgatgaatgctcaactgatttagaaaaagggaaataccctataaaaacaaaacaggtttgtaactaaaatgcactcttacatttctcatgttcaactattgtatctctttgttttagtttcttttcaagttttatgtaactcgaacttgcatactgtaattagtctacaatacacccttcagtagttccttgaaaaaaaaaaaataaattaaattttatataataatttattaatattttaaaaatataatattattttttttattttaattttataaaataattaaataaaa

SEQ ID NO: 29756 - DNA, 338 bp, Gossypium hirsutum
  Clone ID: LIB3148-030-Q1-K1-F10
ctttttcgagaaatctagtaaattattttaatcggccttggtggggtttattgcatgtttagctctctcacaactgtgtaattattcaatgtcttttactcggagattacaaccacaatattaaattatgattgttattttgcgatttcatcccaaaaaacaaaaaacgatcaagaatcactaagagtggaagataaagaataatcttgtaataaaagacaggggaattctgaataataaaaggacaaacccctcttcatataaatgcaacaaccccttatactttttaaagcaaaaacaattaaaatttttggggggccccctttaaaaaaaccaaa

SEQ ID NO: 29757 - DNA, 343 bp, Gossypium hirsutum
  unsure (1)..(343): unsure at all n locations; Clone ID: LIB3148-030-Q1-K1-F11
cccacgcgtccgcccacgcgtccgaaaagtaaccctttcaaagttactaataaatcaattcattacattttttgagtgaatttaagttgttttgtttatagaaaagaaaatgtaatgagattagaaccctccttcggcagcagaattttctatttaggttattcgggtttttttgtttcgatttttgggtatgttactcagagttggatgttgatgttgagtacgggtatatcttatttagttatgttcaaatttccttgtcaaacttgnnagtacaaatggcatgatattcattccggtacaagcgaatgttcaaatatgcaaggctcttatagaggaaaaa

SEQ ID NO: 29758 - DNA, 233 bp, Gossypium hirsutum
  Clone ID: LIB3148-030-Q1-K1-F12
cccacgcgtccgtctagatcgcgaggccgccctttttttttttttgtcaatctttattgttttttcttctttatatcataaattcccttattaaattttcacatttttttctccacaaaaaataaaaacccacctttttattgatcccttatcaccaatattaacaatttttttattcgaatccccaaaaaaatttttttttctttttttataaaacaatctgcctacaaaaa

SEQ ID NO: 29759 - DNA, 412 bp, Gossypium hirsutum
  Clone ID: LIB3148-030-Q1-K1-F2
gctagtagtttttccggcagcggtaccatctccgagaggccgcctaaggtgttagcagcacccgaatccgaggcaattctaaccgtatggaaaaaatccttgctcttcaactgcaatggcttcacagtgtttggtagtaaaggtgatttggtgttcagggtagataattacatggacggtaacaagggtgagatccttctcatggatgccactggcaaccctatccttaccatccgccgcaagaaaatgagcctgggagatagctggttggtatacaaaggcgaaagtacctcaacgaatcccctactttgtgtgaggaaatcgatgaacatcttaaacaacaagtgcttggcttacgttatccgcggcgacaacactagcaaccgaagcaataacgtcgtatacgagatcg

SEQ ID NO: 29760 - DNA, 389 bp, Gossypium hirsutum
  Clone ID: LIB3148-030-Q1-K1-F3
ataaatctgtagaattttgttaatgtactttctctttattaaataataatatcataaatcataagctgtaaattttaaagtattttttcaaactggtttttattttttccccctgatgtcccgatttgcatagtagaagaaacatgtactatacacaatcataaattcaaaataaaaacaaattccaatatccaaaaaaaaaaaaaaaaaaaaaaaaaaaaaaaaaaaaaaaaaaaaaaaaaaaaaaaaaaaaaaaaaaaaaaaaaaaaaaaaaaaaaaaaaaaaaaaaaaaaaataaacccccccaaaaaaaaaagggggggccccttttaaggatcccaatttatcttcccctgggttgacaagtaaaactttttttttggggcccc

SEQ ID NO: 29761 - DNA, 73 bp, Gossypium hirsutum
  Clone ID: LIB3148-030-Q1-K1-F4
cccacgcgtccggaacaatgttatggaattttctttttagaactaaatgcttatctgtttcgaaggtaacttt

SEQ ID NO: 29762 - DNA, 366 bp, Gossypium hirsutum
  Clone ID: LIB3148-030-Q1-K1-F5
ggaccaaggagtctgacatgtgtgcgagtcaacgggctagaaagtaaaggctccagcaaagaagacagtcgctgtcaagaagccgaagagtgttaaatctccggctaagaaagcggcgccaaagaaggcaaagaagtgaatcgaaaggagtgtttgtttgtaggaggttgttcttttttatttttgttccttcctttttttcctttgcagatggtgtaaatttgatggcgaggtaggggtagtcgtggaatttagatccatatatgtagtatgtattgattatataaagcagtgtacgggttttattaaaaatattattttattttttttttttattttattatttttaatatatttctttttttt

SEQ ID NO: 29763 - DNA, 366 bp, Gossypium hirsutum
  unsure (1)..(366): unsure at all n locations; Clone ID: LIB3148-030-Q1-K1-F7
cccacgcgtccggcaaaatacgagaagctggttgacactgaagcaactcagctggatgagatcaatagtttgaaagtcatggttgcggacaaagatgaaaaaattcgcatacacgaacaactgtgccgtgagcttcagaaagaggcgaacgaattgaaagcgaatttagagaaaaccaagaaggaacatgatgtgaaagtatctgagctcgaggaaaagctcaaggccaaggaaaaggaagtaggcaaaatgatcaataaggttgaggagatggctaactcgatgacttgnngaaagctaagaaagctnngactacgctcggctccgcagttggatgacagcccanatactcatagatcaagatct

SEQ ID NO: 29764 - DNA, 99 bp, Gossypium hirsutum
  Clone ID: LIB3148-030-Q1-K1-F8
cggaatcccaaacgaccacgcgtccgcccacgcgtccggaacaatgttatggaattttctttttagaactaaatgcttatctgttgggatggtagcttt

SEQ ID NO: 29765 - DNA, 413 bp, Gossypium hirsutum
  Clone ID: LIB3148-030-Q1-K1-F9
caacgaccagcatgcctccatggaaactgaagtccattcggatgtgacattagaaaatgcagtgatacctaaaaaagatggttcatgcaatggggactgtggaagtgagaaaggcaacacggtaagcagtggtggctgcggtggttgtggtgctggatgtggaaacgtggtgaagagtggtggttgtggtagtggctgcggtagtggatgtgggggtggttgtggaagcatagtgaatagtggcggctgcggtgccggtggttgtggtgctggatgtggaaacatggtgaagagtggtggctgtggtggtggctgtggtggtggttgcggtagtgggtgcggcggtagttgttcatagcattccgtctttatagtatattacatagttatgaatatgtttctggtatatactg

SEQ ID NO: 29766 - DNA, 426 bp, Gossypium hirsutum
  Clone ID: LIB3148-030-Q1-K1-G1
aaaagttaaaaaaaaaaaataaaaaaaaaaattaaaaaaaaaaaaaaaaaaaaaaaaaaaaaaaaaaaaataaaaaaaaaaaaaaaaaaaaaaaaaaaaaaaaaaaaaaaaaaaaaaaaaaaaaaaaaaaaaaaaaaaaaaaaaaaaaaaaaaaaataaaaaaaaaaaagggggggggggttttaagggtttcaattttttttctggggtttttgcaatataattttttttttttggggccccaaaattaaaataaaggggcggttttttaaaaacttgtgtttgggaaaaacctggggtttccaaattttattctttttgagaaaattccctttttggcgggttggtttttattaaaaagggccctaacatttggcttttcaaaaaatttgccctctttttatggtattgggacccccttttttt

SEQ ID NO: 29767 - DNA, 202 bp, Gossypium hirsutum
  Clone ID: LIB3148-030-Q1-K1-G10
agattagcaaaattaggaataaaatcccatgaaattcgccagattgtaaatgtaatttttgagggcaactgtaagctccaaagtttcttgtaaaattcttttaattcggtctgtaataaataatcattggggatctgaaaaaaaaaaaaaaacaacaaaaacagaaactaataaaagcaacaaaaatcaacaaacaaaacca

SEQ ID NO: 29768 - DNA, 385 bp, Gossypium hirsutum
  Clone ID: LIB3148-030-Q1-K1-G11
gccacgcgttcgcccacacgtccgggccatccatttactggaatctgtatatccaatgccaccattgaactaacaaaaaagccaaagaagattcaatggaattgcactgaaattgctggggtttcaagcgatgttactcctaaaccctgcaatctgcttaaggatctaagatcccaaaatacctgtaatgttcccgaggacgacttaccaattgtgaaattttaaatgtaaatgtgctctcttatagaatttgacaaaatgaagaaagatatcgatacttctctgtatgaaataatatctataatctatatataatataaatatataggttaaattatactatgcttaagctgtaatataagtgacatttgaaatttgaaaattt

SEQ ID NO: 29769 - DNA, 129 bp, Gossypium hirsutum
  Clone ID: LIB3148-030-Q1-K1-G12
ctttttcgaattttaaaatttcccaattagaaggtaactattaaatctactctgctattagtcttgtattatctgtatgtatgtagtggatttactccatgtgttttaatttgatcgtttttagtcctt

SEQ ID NO: 29770 - DNA, 299 bp, Gossypium hirsutum
  Clone ID: LIB3148-030-Q1-K1-G2
aaaagttaaaaaaaaaaaaaaaaaaaaaaaaaaaaaaaaaaaaaaaaaaaaaaaaaaaaaaaagaagaaaaaaaaaaaaaaaaaaaaaaaaaaaaaaaaaaaaaaaaaaaaaaaaaaaaaaaaaaaaaaaaaaaaaaaaaaaaaaaaaaaaaaaaaaaaaaaaaaaaaaaggggggggcctttttaaaggttcaaattttacttcccggggtttgcaattttttttttttttttttttgcccccaaatttaaattaacgggccgggttttaaaaactttttgtttggaaaaaccttggt

SEQ ID NO: 29771 - DNA, 359 bp, Gossypium hirsutum
  Clone ID: LIB3148-030-Q1-K1-G3
tctcaatctacttttgtctccatacaaagttgagaagcccctgagcatttgatcccttcacgggttttggtgggagctgttaagggttgtttattctaatggggaaaggttcaaaaaacaactgcaagtcagcatcccacaagctcttcaaggacaaggcaaagaaccgggtggatgatctgcaggggatgttcttggatctgcaatttgcgaggaaagagagccgtggcgttgatgttgcaatccttgaggagcaactccatcagatgctccgtgaatggaaagctgagctcaatgaaccttctccagcttcttcattgcaacaaggtgggagtcttggttcattttcatcggacatt

SEQ ID NO: 29772 - DNA, 422 bp, Gossypium hirsutum
  Clone ID: LIB3148-030-Q1-K1-G4
aaaatgtccaagcaagctggatggggtgtgatggccagccaccgcagtggtgaaacggaggatacttttattgctgatctttcagtcggtttggccacgggccaaattaagaccggagctccatgcaggtctgagcgtttagccaagtacaatcagcttctgcgaattgaggaggagcttggtgcggaagctgtctatgctggagccagcttccgtgctccagttgcaccctattaagatgcttgtttagatgataatttgctgagactggatgcgtgcggcagagcttcagtggtttattgtgaccctaaaacatgtttcaataattttgatagcaattttgtacttgttcagaattatatcaatctccgtgttatttttgttggactttgcctgcatatatgctcgctattttcataaat

SEQ ID NO: 29773 - DNA, 408 bp, Gossypium hirsutum
  Clone ID: LIB3148-030-Q1-K1-G5
caaaacttgatccgaattcatccaataaaacggattttgtgatgccacttctcggtgacaagaaagatccaaaaccattgggtaaacccaagaaggtgagtgcatctcctcaaaaggaaaaagttagtggaaacaatccaagtttaacttcaaacccgaaaagtgataaaacaatgaaggaaaataaggcgaagaaaaataatgtaggtggtggaaacaatctaaatagtgcaaacactgtgaaaagaggttatacaaacaaggataaggaaaagaagaagacgacaaagtcaaatgtaattggaaatgattccaagtctgagattgatgatacatgtgccggcatagctagtagatgtgaagatcaaaactctttgattgcatgcgttaagggttttggaactgggt

SEQ ID NO: 29774 - DNA, 422 bp, Gossypium hirsutum
  Clone ID: LIB3148-030-Q1-K1-G6
cccacgcgtccgtttacatgcagagatttggtgtagtaccggtgccgggcattcctcctcaccatgcaatgtacaaagctgacaccggcatcggtgtccctgccagccaattacgtcgccaccctctcgtcgacttacatccggttagtagcttatactttgttatcaatgaattagttataaaacactgaaaaaaaaattaaatttcgaatcttaaacttaaacgaggattttagttatattttcaataaacaaataaaagcaaagcaatttaaaaaaaaaatttcttggataaacattaattcacatacttacgatataagataaaaattttaagcatttttaacaaaataaccctcaataattattattgacgttaaatctatgatttcatccataatatttatatctacaaattatgt

SEQ ID NO: 29775 - DNA, 413 bp, Gossypium hirsutum
  unsure (1)..(413): unsure at all n locations; Clone ID: LIB3148-030-Q1-K1-G7
aacttttacaagatttcttcaatgggaaggagctttgcaagagcatcaaccctgatgaggccgttgcatgtggtgctgcagtccaagctgctatattgagtggtgaaagtaatgagaaagtgcaagatctcttgctcttggatgtcactccattgtcttccggtttggaaaccgctggtggtgttatgaccgttttgattccaaagaacaccaccattccaaccaaaaaagaacaagtcttnttaacctactccgacaaccaacctggtgtgttgatccaagtttacgaaagtgaaagaacaaggaccagagacaacaacttgctcggtaaatttgagctctctggcatccctcctgctcctagaagtgtcccacagatcactgtctgctttgatatcgatgctaatggtatc

SEQ ID NO: 29776 - DNA, 417 bp, Gossypium hirsutum
  Clone ID: LIB3148-030-Q1-K1-G8
cccacgcgtccgcccacgcgtccgcccacgcgtccgcccacgcgtccgtgatggatcagtagttgtttcagataacttgaagcttataaaagaaagctgtgctaaatcatttgcaccatttccacctgggtgtatgttccacagtgagcaaggattgacgagttttgagcatccgaggagcaaaatgaaggcaatgccaagaattgacagtgaaggggtgatgtgtggtgccaatttcatggccgatgctcagtcgagaacaagtaggatgccccgagttggtagcgaagccaattgggcactgcgaggctccaaagcttgaataattcaatactaaatgacccacattttattatgttttttttttttttttgttgggggggggggttatttccctcgttatgaaatcgtaaaatg

SEQ ID NO: 29777 - DNA, 376 bp, Gossypium hirsutum
  unsure (1)..(376): unsure at all n locations; Clone ID: LIB3148-030-Q1-K1-G9
atctaactcttagattttgctggtcccgaaaacacatactggtctgagaaaattaacgatctttttatcccaaccgtcaaaatctgaccagacccttgggctcattactgttaacagaccaggtcggcaccatgaaccaagggggcgtagccaccacgaacggtggctcgggaagcggctcagtcggcgttcagatccatcaatcccgaaggctcccggatttccttcaaagcgttaatctcaaggcctgtgcctgggggcaatgattgtcattggagatggaatgtttggcatttgtcacaatccatggatctgaaaggcaggcactngaaaggaaaaatgtttgcgtgaaaattattgttctgaaagccattaa

SEQ ID NO: 29778 - DNA, 111 bp, Gossypium hirsutum
  Clone ID: LIB3148-030-Q1-K1-H1
cccaaccaaagcccccaaaaaacgacacttcttgagtatgtgtacttcatattgctatagctgggaagcttgcagttattagttctgtgagaagagaggaaatggatggat

SEQ ID NO: 29779 - DNA, 404 bp, Gossypium hirsutum
  Clone ID: LIB3148-030-Q1-K1-H10
ggtgagttttttatttaagaaaaactatttgctatagaaaaataaaatgatctgtgtggctggtagaacaaaaatgacatatatgactacactattttgccaaaacaagcacagatctatggttggagatcccaaaatgactggttaaggttttagttgcagtcatgttgagtcgactttctggccagagaatagtcagccaccattccgtacactgtcaatgactgtgcctcaatgtcaaactccagacaatgtttacagtatgatgatgacaagccatctaaataagaaattccagggggcctaaaggtcgagtcgtgctttaataagtcagtccaatgatggttttcattctctaaaccctactgaactttaaaatatagagtttctacaagaacttaatt

SEQ ID NO: 29780 - DNA, 410 bp, Gossypium hirsutum
  Clone ID: LIB3148-030-Q1-K1-H11
cccacgcgtccgcccacgcgtccggattttcaatggtggcaagctcttgtctttgtctttagacagggtttcagggtctggttttcaatctaagaaagagtatttgtttggaaggatcgatatgcaactcaagcttgttgctggcaactcagctggcactgtcactgcttattatctgtcatctcaagggccaacccatgagatagactttgaattcttagggaatctgagcggtgacccttacattttacacaccaatgtctttacacaaggcaaaggcaacagagaacaacagttctatctttggtttgaccctacaagaaacttccacacctattccatcatttggaaaccccaacacatcattttcttggtggataacacccccattagagtcttcaaaaatgctg

SEQ ID NO: 29781 - DNA, 428 bp, Gossypium hirsutum
  Clone ID: LIB3148-030-Q1-K1-H12
tttaccaacttagacaaattaatcagatttatctctcgatctcatcgattaatctgggactaatgaattggtgcacaataagattaccttttggtatcatttgtccggatattcccttagaggcgtcaattcctaagtttctaggtctattcaatttagtccaatttattacaatttagtcctttgtctaaaaaaatcaacttatcctcatctctatcaaccaaccccctttaaagtttagctactcattctgaaaataaaaataatggacatggaaatgaaaaacaaagaaaccatcaaatttaaacttataaaaaatataaaattttggatttttatgcaagaaaacttaaagaacatgaaattaaaggcattcaaccaagaaatctaaagcaataaacataaaatgaacaaactttagatgattt

SEQ ID NO: 29782 - DNA, 139 bp, Gossypium hirsutum
  Clone ID: LIB3148-030-Q1-K1-H3
gtggagcgaggccttaaacaagcggcttggaactaagggtcttgatctttctgatatactggtggaaatcgaaaagcgtggttcctcgtttgatcaactgctgaccgttcctgaacaagatgattggatatatagtgat

SEQ ID NO: 29783 - DNA, 419 bp, Gossypium hirsutum
  Clone ID: LIB3148-030-Q1-K1-H4
gtcaagcgtggccttaaacaagcggtttataactaaagagcaacctctttctaattatctgaggggaatcgaaaagcgttgttccttcatacctcaacctcatacccaatctaaacaagattgctggttgtataatgatgggaagtcaacctcatgccttgcgtttgtcctcgaaatgtacaaggaggcaagactttttgatcccattgctgactctattcaagtcaccgaagttacgataaaaaatgcgtatactctaaggtttttcgagaataattctagccggctgccaaagtggtgcaatgatgcagacaatgtaaagcttccttactgtcagattctggggaagtaccgaatggaactgcctggatttaattccatggacccatacccccatatgaatgaacggtgtccgtcta

SEQ ID NO: 29784 - DNA, 408 bp, Gossypium hirsutum
  Clone ID: LIB3148-030-Q1-K1-H5
aaaaaaaaaaaaaaaaaaaaaaaaaaaaaaaaaaaaaaaaaaaaaaaaataaaaaaatagagaggaaatataaaaaaatgatatattaaatacaaaaaaatacaaaaaaataaaaaaaaaaaaaaatatttacaaaattaaataaaatatataatttggggccccccttttaaaaattccaaatttttttcccccctcttctaaatatatttctttttttttttgcccccaaaataaaattaaatgcccctgtttttaaaactttttatttttaaaaacctttgttttcccaaatttatttattttgaaaaaaattccctttttccaattttttttatttaaaaaaaagcccccaccttattccttttcaaaaatttccccaccctaattttctatttatacccccct

SEQ ID NO: 29785 - DNA, 433 bp, Gossypium hirsutum
  Clone ID: LIB3148-030-Q1-K1-H6
cccacgcgtccgattaattaataacttaaaaggtcttgttgtttgaaaaaaaaaaaaaaagaaaaaaaaaaaaaaaaaaaaaaaaaaaaaaaaaaaaaaaaaaaaaaaaaaaaaaaaaaaaaaaaaaaaaaaaaaaaaaaaaaaaaaaaaaaaaaaaaaaaaaaaaaaaaaaaaaaaaaaaaaaaaaaaaaaaaaaggggggggcccttttaagggatcaaattttattaccccgtgtttgcaaggtaatattttttttttggggcccccaaattaaatttaaggggccgggttttaaaaacgtggggattggaaaaaccttgggtttcccaaatttattggctttgaaaaaaatccccttttccccagttgggttattaccaaaagggcccgaccttttcccctttccaaaaatttgcccaccttaattggt

SEQ ID NO: 29786 - DNA, 146 bp, Gossypium hirsutum
  Clone ID: LIB3148-030-Q1-K1-H7
gcaaaccctagcttcttcgttttcctccgcggctccatttctcgttccctcaatatcgaagtaaaaatgaaagtggtcgccgcttacttgctcgccgtactcggaggaaacgctttcccttccgccgatgacttgaaaggttattc

SEQ ID NO: 29787 - DNA, 424 bp, Gossypium hirsutum
  Clone ID: LIB3148-030-Q1-K1-H8
cccacgcgtccgcagaaatcgaagcttgccaatggccaacagtaatctccctcgaagaatcatcaaggaaactcagcgtctcctcagtgaacctgctccgggaattagtgcttcaccatcagaggataatatgcgatatttcaatgtgatgatccttggtcccacacagtctccatatgaaggaggggttttcaagttggaactttttttgcctgaagaatatcccatggccgctcccaaggttcgatttcttacaaagatatatcatcctaacattgataagcttgggagaatatgccttgatattctcaaggacaaatggagtccagctctgcagatccgaactgtacttttaagcatccaggcactcttgagtgctccaaatccagatgatccactctccgagaatattgctaagcactgg

SEQ ID NO: 29788 - DNA, 325 bp, Gossypium hirsutum
  Clone ID: LIB3148-030-Q1-K1-H9
ggatgtttatttaaataagtctcgctatcttttatatggctttggctgatctatacagcctgagacacacaaattagccgtatgccttcccttttttgtgcatacaacacccatctactgtcggagatcccaagtgactgactaaggttttagttgccctcatggtaatcgactttttggcctgggaatagtcatccaccatgctctaaaagaaatcgtatcgtgagaccaagaaaatatctccattcagttctttcagctatgatattatcaagccgacattataagaaatggctctggacctaatgttccaatggatctttag

SEQ ID NO: 29789 - DNA, 201 bp, Gossypium hirsutum
  Clone ID: LIB3148-031-Q1-K1-A1
aaaaaagccctctcccctgcactcccgaataccctgttgtgtgctgtctaccgaatcccgggtgtgttttgccattattactgaaagctttgaagacctttcctttggcgtgcgtgttgaaactggaaccttatgatgcttaaaagacgcataaacatcctgtttgtagaagacgtgttgctccactatctgaaaacatat

SEQ ID NO: 29790 - DNA, 299 bp, Gossypium hirsutum
  Clone ID: LIB3148-031-Q1-K1-A10
cggacgcgtggggttttcataccatgggtgacagtcagtattcattttctctcacaactttcagtccttcgggaaagctagttcagatcgagcatgccttgacggcggtcggttcgggtcaaacatctcttggaatcaaagctgctaatggggttgtaattgctaccgagaagaagttgccttcaatcttggttgatgaaacttctgttcagaaaatacagtgtctgactccaaatattggagttgtttacagtggcatgggtcctgattttcgagttttggttcggaaagtaggaagc

SEQ ID NO: 29791 - DNA, 392 bp, Gossypium hirsutum
  unsure (1)..(392): unsure at all n locations; Clone ID: LIB3148-031-Q1-K1-A11
aaaggaaccaagaattcgaggtttacagcatcgaaacaacttgcagcatcgatgtttcggattggttgatgatgaatgtaagagaagaagattacgttgtaatgaaagcagaagctgaagtggtggagaatatgaaccttctgaaagacccgaccctgatacagattatgccagagctcaggaggcccgtcgtttcatgatctatgttcatgctaaaatgatgattgttgatgatgaatacataataattgggtctgccaacatcaaccagcgatccatggatggtgctagagactctgaaatagccatgggagcctatcaaccatatcatntatcattaagggaaccagcacgaggtgaggtccatggtttccgtttgtcactgtggtatg

SEQ ID NO: 29792 - DNA, 360 bp, Gossypium hirsutum
  Clone ID: LIB3148-031-Q1-K1-A2
gcaacctatgcgccacacactgctgggaggtgcgtcagataagcgtactagaaaggctcattgccccattgcagacaggcttacaaactcattgatgacgcatggacacaacaatggagagaaactgatggcagacatgattgtgaagcatgctatggaaattatttatctactgactgatcagaacccaattcaaggcatcggtgatgccattatcaacagtggacctagtgaagatgctactcgtattggatctgcttgcgtagtgaggcgtcgacgctggagatatttctgctcttcgtcgagagaatcacgccatctatctactcaccactggtgctcgtgagtctgcattgaaaa

SEQ ID NO: 29793 - DNA, 283 bp, Gossypium hirsutum
  unsure (1)..(283): unsure at all n locations; Clone ID: LIB3148-031-Q1-K1-A3
cgtcattcatgccgctcgtaacaattactttgaagctgtaagtgtttgataagcattgcctcattggtggtttaggatatgggaagtgtcatcgacatttatgttcctctctttctatatatatgaattttaaagtaagaagcagaaagtgttgagtctgtaaatactttcggtgattggattttgcaccgcattcttttgaagatcaacattttacagatgtaacttttcataaaaagaaaaaagaaaaaaatttggaaattatgaattgaacaaannnnaa

SEQ ID NO: 29794 - DNA, 282 bp, Gossypium hirsutum
  Clone ID: LIB3148-031-Q1-K1-A5
aaatctaaggatttgcgggtggggaaaacgagagcccatctctctgcttcaaagctcctgtccaggtagaattctcttcttcccttgcgttgtgttctttcctgttcaatcgccatggcttcaaagcggattttgaaagaactcaaggatttgcagaaagatccacccacttcttgcagtgctggtccagtagctgaagacatgtttcattggcaagcaacaatcatgggaccctcagatagcccttatgctggaggtgtgtgtttagttactatccatttc

SEQ ID NO: 29795 - DNA, 224 bp, Gossypium hirsutum
  Clone ID: LIB3148-031-Q1-K1-A6
catggatctgggagatattccgagcatatgatgcctgaagttgaaaaagaccattttcgaaaaggctcacacgtgggtcttcatgaaacggcagcatgctataatagttatggctgacagcctatattacactaaatttaagtgttactgcaagccaaatatggaagggcgcaattgctatgcagatgagcattacttgccacacttttttcaatatgattgat

SEQ ID NO: 29796 - DNA, 428 bp, Gossypium hirsutum
  Clone ID: LIB3148-031-Q1-K1-A7
ggagatattccgagcatgtgatgcctgaagatgaaaaggaccatggcctaaaaggctcacagtggttctacatgacgcggcagcatgctataatagttatggctgacagcctatattacactaagtttaggtattactgcaagccaaatatgggagggcgcaattgctatgcagatgagcattacttgccaacttttttcaatatgattgatcctggtggaatagcaaaccggtcagtaacatatgtggattggtctgaacggaagtggcatcctaaatcatttaaggccgaagatattacattgaagttcctcgagaaccttacaaccattgacgacatagtccatttcacaagtgatgaaaagagaatgcttacaggaccatgcatgtggaatggaataaagagaccttgttatttattcgcaaga

SEQ ID NO: 29797 - DNA, 214 bp, Gossypium hirsutum
  Clone ID: LIB3148-031-Q1-K1-A8
cacgtgaggagcttcgcggcgcaaaggctgggggctaaagttttctcatccgagaatgtggtttaagtgttgggccatgggccttctattaatttgggttagggtttgggcccgttttaaaaaaacttagatcgataaattttattaaaagcttggataaaattgggctggcagaatgaataatcaaaaaaaaaaaaaagggggaaggtttaag

SEQ ID NO: 29798 - DNA, 396 bp, Gossypium hirsutum
  Clone ID: LIB3148-031-Q1-K1-A9
aagaaaaagaaaaaaaagcttgtaaaaatagattcggatacatatatagatgatattactacgtgtttatttacaaaaaaaaaaaaaaaaaaaaaaaaaaaaaaaaaaaaaaaaaaaaaaaaaaaaaaaaaaaaaaaaaaaaaaaaaaaaaaaaaaaaaaaaaaaaaaaaaaaaaaaaaaaaaaaaaaaaaaaaaaaaaaaaaaaaaaaaaaaaaaaggggggggccctttaaagggatcaaaattaacttccgggggatgggaaggtaaaagttttttaaaaggggacccaaaaaaaaataaaggggccggggtttaaaaaacccggaaggggaaaaacctggggttaaccaaaaaaaaaagcttggggaaaaatccccttttcccaaggggggg

SEQ ID NO: 29799 - DNA, 208 bp, Gossypium hirsutum
  Clone ID: LIB3148-031-Q1-K1-B1
aaaaaagccctcccccctacaactaccgaaataccctgggggggcctgtactaaccgaagcccgggtgggtcttgccattattgctgaaacgctttaaaaaacctgtccttcggtgtgcgggttgaaactggaaccttttgatgcttaaaagacgaataaacattctgttggcagaagacgataacacgggcgatgggaaaacaaatg

SEQ ID NO: 29800 - DNA, 295 bp, Gossypium hirsutum
  unsure (1)..(295): unsure at all n locations; Clone ID: LIB3148-031-Q1-K1-B10
cccacgcgtccgggcctgcagagctggaatgtatgatccatcgaacaaaactcctgtgcaagattcatagcaatagtttattcagacagatagaactgggaagctcttttttgtcatgtttttttatatttatttataatcttgttagggaagggaaagaaaggggtaagtaaccccattttccttctcatattttgcatcattttcttctggtgggtctttatagggtgcagatttgagttacttgtaaactacatgcatcgatttgtagtacatataaagtgaggtgttgntt

SEQ ID NO: 29801 - DNA, 299 bp, Gossypium hirsutum
  Clone ID: LIB3148-031-Q1-K1-B11
gataaatttgccaagtactatcgtgccctatgttcgggagaatggatagatcgatggaacgagcaaagggagaacggtacttttccaggtcctctgtaagacggtacttttcgggaaatccagtgaagttgtcaaatgagaaacggcattttcaggaaataagaaattttggcatgtacccgttttgactggatcatgattgataaaatggagttatatatagcctacgttacataggttcaagtgttggatattgatatctgtccgacaccaataaatttaatttctttttgttttaa

SEQ ID NO: 29802 - DNA, 179 bp, Gossypium hirsutum
  Clone ID: LIB3148-031-Q1-K1-B12
cagggatggagggtcctcgagcttctgagcatggtcaactggttgtagttgatcatcactgtccacagggaccagcctcacatgaatggggatggcttgctcgaatcgctgccttgcttgtgggtgaagatccaacacaatcttatgctctcatatgtggcaactgccatatgcacaat

SEQ ID NO: 29803 - DNA, 406 bp, Gossypium hirsutum
  Clone ID: LIB3148-031-Q1-K1-B2
acaaagtcattgatagttactctaatattcgccagtatattttacgttggaggatggatatttttgcaaaggctctcaagtggatggcaatatcccactttagccaccattattggaagtgttgccatagttgttcacattttcattgaattcaccaaaatgcctccaccaaagatcaaagctactcaaatttgtacacaataatatctacattaaagcctaagtagtaataataataataataataataataataatgataatgatgatgatgatgatgtttccgagtcggttatcgaagtaactagagttgttggactttatgggaatgtagagtagatttcatacacatatatatataattttgcaggagagagcttagaaatcaatactcaattgtatttct

SEQ ID NO: 29804 - DNA, 139 bp, Gossypium hirsutum
  Clone ID: LIB3148-031-Q1-K1-B3
cttatgcttcaattatgaaattgaggcgtgccacaatatatctacattaaagcctaaatagaataatgatgatgataataataataataatgataatgatgatgatgatgatgtttccgagtctgttatcgaagtaact

SEQ ID NO: 29805 - DNA, 389 bp, Gossypium hirsutum
  Clone ID: LIB3148-031-Q1-K1-B5
gagctcttgaacatatgggactcaagcactgaaagaaatgatccagaattgtgtggcacaagatttttcatggaagggaccatcaaggttgtgggagaagatgttgttgagcctcggggtggctggcagtgaacctggcattgaaagagaggaggttgctcctcttgccaaggaaaatgttgccacaccctgagcataatcagaaggcaactatggataaagcttagtaacctgttttcttagacaaccaagtccaagtacctgtctactctcgatagccattggcttgaccggcggaaaacaaactgacctgccatacgtgaagtcagtagtgctatttttgagggtgaaaagtcaggagatagtatgatatatatccatagttatag

SEQ ID NO: 29806 - DNA, 436 bp, Gossypium hirsutum
  Clone ID: LIB3148-031-Q1-K1-B6
gtattcagaacaggtgcaagttggttgcggtaattgcagaagttgatcgaatcctgaggccagaagggaagctgattgtacgagacaaagccgaaacgataagcgcagtggagagcatggctaaatctctacaatgggagatccgaatgatttattcgaaagacggtgaaggattgctttgtgttcgcaagaaattctggcgtcccaccgtggaagaacctataaagtctgccattgtttgaacacgatgctaaacattactcgtgtgttttccacaattaggcataatattttacagattctttttcgattcacaagcatgttatagtctgtaatccattttcgcaagtgtaaaattatgtagtcgactacgttagaatgaatcataatttttgtatcaattttccttgatggaattaaaatagctactttcatt

SEQ ID NO: 29807 - DNA, 290 bp, Gossypium hirsutum
  Clone ID: LIB3148-031-Q1-K1-B7
cacgcgtccggtggctggcctacaacttttagaaggccaggccaacatatgatcacaacaactagactagatgtcaatgtaataccttaaagtaaattaatttcttttcttttctttaaaacactacaatgggagatccgaatgatttattcaaaagacggtgaaaggttgctttgagttcgcaagaaattctggcgtaccaccgtggaagaacctataaaagactaggggggggcggtcttaaaggttccaagtttctgtcccggtgcttgcaacgaagtatttttttt

SEQ ID NO: 29808 - DNA, 369 bp, Gossypium hirsutum
  Clone ID: LIB3148-031-Q1-K1-B8
ctttacatccccagaaaatgttcggccactaataggctggtcaccttggagggtcatgcttctggtcaaattaatggtgggcatttggatgagcttggcagatacactggaactttctccacttttgctctttgtggttttgtccgtgcccagggtgatgctgacagtgcacttgacaggctttggcagaagaagaaagctgaagtccgacagcagtagtgggagttggattgctttttactacttgcttggtctctgaattttggagggaaaatgtgttttttttttttaaatcagtgacctttaagttctatcttggtttttttaaaatggattatgttgaatttgatctgatgatgtttcgtacct

SEQ ID NO: 29809 - DNA, 295 bp, Gossypium hirsutum
  Clone ID: LIB3148-031-Q1-K1-B9
cggtttttgggctctttgacggacacaatggatctgcagctgctatttacacgaaagagaatcttcttaacaatgttctaagtgccattccggcagatcttaatagagatgaatgggttgctgcccttccgagagctttggttgcaggttttgttaaaacagataaagattttcaacagagagcaaaaacgtcaggaactactgtaacctttgtgatattagaaggatgggttgtaacagtggcatctgttggtgattcccgctgtatatttgaatcagctgaaggtggaatata

SEQ ID NO: 29810 - DNA, 423 bp, Gossypium hirsutum
  Clone ID: LIB3148-031-Q1-K1-C1
cttttttttttttttttttttttttttttttttttttttttttttttttttttttttttttacaaaaaaatttttaactaatcataataattataataacaatcgggagtaagccattattatatttcaaccggcaaaatagcaacacgctttcatgatataaaatcatcatcaccggcgaaattttaattaaaattaattaaaacaaaagaaattcccttctaaaaataagaaattaacaatgggcctaaaataaaaattatcaaatccaaatcctgtcctcccccgaaaggcagatcttaatcaacaaagcagcaaaaacgactgcgacctaagaaaagtgggggtgaaattagggggatatatgtgaaagtgagcatggatggggctccttatcttaaaaagatagatttggaggtgttt

SEQ ID NO: 29811 - DNA, 377 bp, Gossypium hirsutum
  Clone ID: LIB3148-031-Q1-K1-C10
cccacgcgtccgcccacgcgttcgaaacctttcacttctcaactctctcaaattcaccatgtctgacaagtgcggcaactgcgactgctctgacaagagccagtgcgtgaagaaaggaaacagcatggtcattgagactgaaaagagctacatcagcactgtagtggtcgaggctgtggcagaaaacgatggcaagtgcaagtgtggagatagctgcagctgcacaaactgcacatgtggaactcattaagcagacatagaaccatgatgttttagtccatagaactattaggacctaaaactaatgaaatttgatttgataaaatggtggtttggtggtggtggttgagacaattgatggggtttcaaggctggct

SEQ ID NO: 29812 - DNA, 216 bp, Gossypium hirsutum
  Clone ID: LIB3148-031-Q1-K1-C11
cggacgcgtgggcaagcagccatggatgggccttttcatggcaaccaaacaagggttcttcatagggtgagcattcgatcgagtcaaaccgcgtaaaaaaattttgcgtcgagtcgagttaatgaatactattatttatacttaatgttgtgtttacatggactgattatttcatgtacccgaaatgactggatcatgattgaaaaaaaaggagtt

SEQ ID NO: 29813 - DNA, 319 bp, Gossypium hirsutum
  Clone ID: LIB3148-031-Q1-K1-C2
aaaaaaaaaaaaaaaaaaaaaaaaaaaaaaaaaaaaaggaaaaaaaaaaaaaaaaaaaaaaaaaaaaaaaaaaaaaaaaaaaaaaaaaaaaaaaaaaaaaaaaaaaaaaaaaaaaaaaaaaaaaaaaaaaaaaaaaaaaaaaaaaaaaaaaaaaagggggggcccttttaaagaatcaaagttaacttccccttccttgcaaagtaatattttttttatggggcccccaaaatcaaatccccgggccggggtttaaaaacgtgggaactggaaaaacccgggcttaccaaattaaatggctttgaaaaaaatccccttt

SEQ ID NO: 29814 - DNA, 223 bp, Gossypium hirsutum
  Clone ID: LIB3148-031-Q1-K1-C3
ccttcaatcttccctggaaagcggccaactctccctcagctgccttattgtgctctgtttacaaatcctgcaaaccttccatattagccggagcaccaaaatggggacccaatttggcttttcccttaatatccggtctaattagaatatcactccgaggggtttgctgatttttcctcttaaccaccatccatgggctggaattcaagaatttttctttttt

SEQ ID NO: 29815 - DNA, 221 bp, Gossypium hirsutum
  unsure (1)..(221): unsure at all n locations; Clone ID: LIB3148-031-Q1-K1-C4
ccgggcgacccacgcgnncgnnnnnnnaccttcttcatcatttccaaattttgatgattttcctctttttttattttatttttatttaaaatttgaaactgctaacattattacattttcattagccttaagagaagaaaaaaaaaatgtcatcgatttcaatgtctggttcatggacagccaaagcaaacaaagatttcgaaagggctttagctgtttac

SEQ ID NO: 29816 - DNA, 433 bp, Gossypium hirsutum
  Clone ID: LIB3148-031-Q1-K1-C5
ccttcttcatcatttccaaattttgatgattttcctctttttttattttatttttatttaaaatttgaaactgctaacattattacattttcattagccttaagagaagaaaaaaaaaatgtcatcgatttcaatgtctggttcatggacagccaagcaaaacaaagatttcgaaagggctttagctgtttacgacaaggacacaccagatcgttggtacaatgttgctaaagctgtgggagagaaaactgttgaggaagtgaagaagcactatgagcttcttcttgaagatgttagacgcatcgagtcgggtcgggttcctttccccgactattggaccgttaccgggaatcgtcaagcatgaaaaattacgaaggtcaaatgaagaagaaaaaatggtggacttgcatggatctcacccttatatatgtct

SEQ ID NO: 29817 - DNA, 431 bp, Gossypium hirsutum
  Clone ID: LIB3148-031-Q1-K1-C6
gccagccgtttcacacactcaagaagagcgagagctcgtaaatcatggcggaacagaccgaaaaagcttttttgaagcaacccaaagtgtttttgagctcgaagaaaggtgggaaagggaagaggccaggaaagggtgggaatcgcttctggaaaagcattggattgggcttcaagactccccgtgaagctattgaaggaacctacatcgataagaaatgccccttcactggcactgtttcaatccggggtcgtatcttagccggtacttgccacagtgccaagatggtcaggacaatcattgttcgacggaactaccttcatcatatcaagaaataccaaaggtatgagaagcgccattcaaacatccccgcacatatttcaccatgcttccgtgtgaaggaaggggatcatgtcattattgggcaatgc

SEQ ID NO: 29818 - DNA, 326 bp, Gossypium hirsutum
  Clone ID: LIB3148-031-Q1-K1-C7
gtcccgatgcaacaattgaggatgatgatgatgatgtagaaaaaaccgagacagaatcgggcacaaaagacagtgcagtcaaagatgaattgtagattggctggaacctcggggacatgccttttgagttagttttaccctctgatgacaagccgaaagaactgtaacatgcattttcaaggctgaaacttggataaagggaaacattacaaacattacttagtagaatatatgtgaaccgtagtcgactgtgaaattaatctggctgcaatttttgctcttttaatgcatcgcaatggttttaaagaaaaaaataaggaataccc

SEQ ID NO: 29819 - DNA, 443 bp, Gossypium hirsutum
  unsure (1)..(443): unsure at all n locations; Clone ID: LIB3148-031-Q1-K1-C8
cgtccgcaaacacaactctttcttttcctgctctcaaagatgacaacttttcatcattaaagctcaaggccttactttgataaatgagtttcggtcccatctcttgagctgtgaagcagattttcaaatctgggtacttctcattttttctacaaaacccgacaaacatttgtttttgtatgtattaacttgtaggtttttaccccagatcttgcaatggtctgaaactcttgagtaaagctgttttttcttttgttggggggggggtctttataaagggtagaaaatggcttatagcttagagcaaaggttttggtgtcagcgagttttaaggtttgggtttgcatttgtatgtgtgtgtttgggtgggtacattgttggtccgacatcactgttgtggcgtttgaaggacangtcaagacctaaggtctcatgtcttcctt

SEQ ID NO: 29820 - DNA, 207 bp, Gossypium hirsutum
  Clone ID: LIB3148-031-Q1-K1-C9
ctcaaccgtgctcacacgcgatcactacctgtgactgatcaacactatctgacccaccatgggtgacgagtagaagctactgccactgctcttacatgcgcctaatcgtgacggaaggacacggcatcgtcattgagactgcactgagctacaatcagaactgtgctgtcggacgtgctgcgggacaaaatgcgctatgagcgattg

SEQ ID NO: 29821 - DNA, 293 bp, Gossypium hirsutum
  Clone ID: LIB3148-031-Q1-K1-D1
cgcgtccgattctcttcccagacagggacttctagtctctctaaacaaagttgtcggatatctttgcaataaatttgctctggatatgtatgtttgtatgtgtgtgggtgatctgagatggatttgcagtcaacaaattgatgttggatatttattgttgcagtaaagttactgtatgtctgatggtctgtgacagattggattacattccccactgagatactaagaaccttcttgattgtattatctttgtgtaattattgcaagtttaataagaaaaggcatgatattcc

SEQ ID NO: 29822 - DNA, 108 bp, Gossypium hirsutum
  Clone ID: LIB3148-031-Q1-K1-D10
gaaacaaacccaaaatttggaaaaacagaaactgtttactgtatcatcagaatctagccaagtgattgcttgatactaaagtcaaaaacagaagctgtttgttgtgtc

SEQ ID NO: 29823 - DNA, 276 bp, Gossypium hirsutum
  Clone ID: LIB3148-031-Q1-K1-D11
aatacgcaggttgctaggttgatggactctatatgatggaatggacatgagaggatgttgagcttttctcttatgtttcttaattggattggaaatatgatgcagtttttattgtaaaaccaattatttttttttttttacaagattgttgcaactcgcaagcgtgtttttgtatcttccacaaaaaaaaaaaaaaaaaaaagcaatcaagaatgatgtttggcttttgtaaaaaaaacaaccttacctacatttgtatgcaacagcataactctt

SEQ ID NO: 29824 - DNA, 384 bp, Gossypium hirsutum
  Clone ID: LIB3148-031-Q1-K1-D12
gaaacacttgaaaacactgggcgctgcatgactgcacagctagaacactcgcgtctcgtgcgtgtgctaccacattttgtagccgttcctgacacgtgcttgtgttcgattatgtacctacaaatgtcatacgatatacgcaacataacagcgaaaaggcgcaacagacgggatggggagaggacttaactgtctatgagcacatttttattttcttctgcatgcttgccataaaaaagggccattccgatatttgtaaggaacaagtattcagaataaaaaaaaaaagggattttgcatgccacggcacattaaacaccgcgggtgttggggttacccccagcgtgaccccctcaattggcagggccctaacgcccggttctt

SEQ ID NO: 29825 - DNA, 346 bp, Gossypium hirsutum
  unsure (1)..(346): unsure at all n locations; Clone ID: LIB3148-031-Q1-K1-D2
ggttttgctccagaaatccctgaggatctgtaccacctgattagaaagcggtagccatcagaaagcacctcgagcggaacaggaaagacaaggattccaagtttaggttaatcttggttgagagcagaattcaccgtcttgcccgttattacaaaaagacaaagaagctaccaccagtgtggaaatatgaatctaccactgccagcactcttgtggcttagaagtggcacagtttgaaccatcttccaagcgcttgcagtgacattctcctggatgcanggctaaacttttggtatttatgcttttaaaatttaaaagactagttcatttgtggtttgaaaatgag

SEQ ID NO: 29826 - DNA, 86 bp, Gossypium hirsutum
  Clone ID: LIB3148-031-Q1-K1-D3
caaatcttctaaagttctttgtttggacgaatgccctgcaaatggtggatacgcaaaccgggttgaattctaccaaaaactatatc

SEQ ID NO: 29827 - DNA, 262 bp, Gossypium hirsutum
  Clone ID: LIB3148-031-Q1-K1-D4
aatctgcgcaccgtatttcaacagttttgaatatggacaatgtatttgttctcaatcaaagaactctggtggaggaaggtaacccaaatgcgcttctacaagatgaatcctccatattttcaagctttgctaaagcgtctacaatgtaatagatggttgatctccaaactgactaaaactaccactccaaatgtaagttttaagcaggtggaaacttggaagcagctagcacaacttgttttggtagattagttcttcaatc

SEQ ID NO: 29828 - DNA, 428 bp, Gossypium hirsutum
  unsure (1)..(428): unsure at all n locations; Clone ID: LIB3148-031-Q1-K1-D5
cgccaaatccgagctccgttcttccatctcctccgagatccgaagaactctcatgttactaaccctaaggtaattgatttgctgctgtttaagggtatggaagagctgaacaacattgttgaacatgcaaagcaacggcaccacattatcgggcagtatgtgctgggtcgtcaagggcttgcacaggatttggacaccaaggatgaaggcacgtctgagttcctcaagaatttctataaaagcaactacttttaaacattccgctttcatggacagcttctagagatttgctntcgaccttttgacttccttataataaatgttctatccgggcctattggttctgtaattccatcgatttttctcgtgttggttttcagaaatttggtgaaatgcataagtgaatcttgtgaaaaaaaaaaaaacaa

SEQ ID NO: 29829 - DNA, 280 bp, Gossypium hirsutum
  Clone ID: LIB3148-031-Q1-K1-D6
aaaaaaaaaatacaaacaacaatattatataataataaaaaaaacaaaaaagggcggaggggacaaaacgctaaaggaatacgtacggctgcttgctaaaggtatggggcgggcttaataacagttcaaaacattcaaaggggcggtgccacataatagcgctttttgtgctgcgccgaaattgactaacttaggcgttgggcaacaaagatgaatgtgggaaaacgttggtttagcataactataaaggctggtacgtcttaacattttggtctcatgg

SEQ ID NO: 29830 - DNA, 440 bp, Gossypium hirsutum
  Clone ID: LIB3148-031-Q1-K1-D7
ccctgttcagctaaatctcaaccagaattacaattacttgagccagcctgagcaggaatacttcgataccatgggtttcgtagaagagaagccactggtcaatcagtttgcatatgtggaccctgttcctacgtctatagatgctggatttaatcaatcagataatgcccccttgtacttcaattcggaccagggaagtaactccatcaattgttccgactatggctggggagaacagggtgccagaactcctgaaatatcatccattcttgaagcttctgtagtgggtgaagagtttcttgaggatgctaaccctagcaagaagctgaaaccaagttctgacaatcttatgcatgctgaagagaactccgcaaagaccttgtcggacgagctgttggctttggacaaccagatgaaatacttccaaatgccaccattta

SEQ ID NO: 29831 - DNA, 394 bp, Gossypium hirsutum
  Clone ID: LIB3148-031-Q1-K1-D9
gctgacacaggtgctcaggaaagaggtggtggaataatttgtttctttcaagaccaagccaccccacaccctgcaaatgcactctggtctcataagatgctaatctcaagttttgatcattattaattgccccgcaaggatcaattgtattgtacaaatatacatatatatatatatacacctatcgcctggcatgagctcgacactcaactgtttattttcatttttatctgccctgtttagaaaaccagtggttacaaagcaaggaaatgaaactttcctggaaacatgcagcggaatttaattatgtagtcagtgttaatctgcattcttttattcctagtatctgttataaaacaatattggaaagtatataatcagccatctatttcac

SEQ ID NO: 29832 - DNA, 147 bp, Gossypium hirsutum
  Clone ID: LIB3148-031-Q1-K1-E1
tttggtggacgcttcaatttttttacggccgaaaatgaattcaaaattgggctcatgtaaagttgttagcaatcgtgtgtaaggaaacgttggctataatttaattaaaaaaaaaaaaaaacaaggaaaaaaaaaaaaggggggggc

SEQ ID NO: 29833 - DNA, 209 bp, Gossypium hirsutum
  Clone ID: LIB3148-031-Q1-K1-E10
attggatttgtgttcccttcagcatggattttgcttttatagtaaaatccctttcctttataagaaccaacaaaaagaattccctaataaagaatgtcccctttccttaaaatgctacatcgattttgtcttgtttttattaggtttattcatcgtttgggcctgttataatacacattcattaaataaaaatatcgaatttaacaatt

SEQ ID NO: 29834 - DNA, 377 bp, Gossypium hirsutum
  unsure (1)..(377): unsure at all n locations; Clone ID: LIB3148-031-Q1-K1-E11
ggattactggtccatgcagttgcttaatggagactaaacatggacattaatttattacagtgctattgcataatgatagagctggctatagatgaggttgaaaattggactttatattccaatatgttaatttggtttaagaatggcttgtagtaggatctcaatatagtgctaaatatatatccacctatacatacatatacatatgtatatgtatgagagctttccgttnaaaaagagccatcaaatattgtaaaggaccactcattcagaatagaaaaaaaaaggtgattttgaatcccaaagaacaataaaaaaaatattaagttgtgtatactaaaaaaaataaaagggggggggcccttttaaaggatcca

SEQ ID NO: 29835 - DNA, 238 bp, Gossypium hirsutum
  Clone ID: LIB3148-031-Q1-K1-E12
cttggaatcttttccaccaaaagtttaccgcactatgggatgaacacaaaaatggctctggggaggcttatcttcctgcaatttataacaatcctgagcttcagaaacttatacaggaaaagtatatgaaggaattgttccacgatactcttgggtttggtgctgctaagatgataaggagaattgtaggtgttgctcatgtcgaggattttgaatcaattaaagaagctaacataag

SEQ ID NO: 29836 - DNA, 54 bp, Gossypium hirsutum
  Clone ID: LIB3148-031-Q1-K1-E2
cgggactaactaaaaagctctttcgtaataaataatatacaatttattccatag

SEQ ID NO: 29837 - DNA, 242 bp, Gossypium hirsutum
  Clone ID: LIB3148-031-Q1-K1-E3
tgctgacagtgcacttgacaggctttggcagaagagaaagctgaagtccgacagcagtagtgggagttggattgctttttactacttgcttggtctctgaattttggagggaaaatgtgtttttttttaaatcagtgacctttaagttctatcttggtttttttaaaatggattatgttgaatttgatctgatgatgtttcgtacctaatttgctcgcattgaacctaatatattatctttt

SEQ ID NO: 29838 - DNA, 391 bp, Gossypium hirsutum
  Clone ID: LIB3148-031-Q1-K1-E4
ggtgtcaacaagaccccacgcccaaggcatatggtggtgcatgtaagatgaaagtggacgagagggttcctagcagccctagtggagtgatcgatgctgcatttggcagtgatagctcgagcgattcttggggcacggtgtccttatcgcctgagcagcagccaccttttaagaagagcagagcccaaaagcaagtaatgcgtttgccatcactcaaccgagtctttgtagacattgatggcagcccttcttaattatatctaccttctctctcttcctcgctctctacatctctttctttggcccaaaaagatctatatttattatgcttatgttcacttttggttcaaggaatcaaatgtaaagtaaaaaaaatgaaaaaacaaagtaa

SEQ ID NO: 29839 - DNA, 400 bp, Gossypium hirsutum
  Clone ID: LIB3148-031-Q1-K1-E5
aaggcacacacataaagagaaacatgtttgagaatggccaccactaagacaacccttttgcttgctgttttgtgtcttttcctagtttgcgagattgggatgctaatggttgaagcccaagtccaaaggccagaatgcgaggggaagtgtgcatcaaggtgcagcaagtcatggaagccgaagatgtgccttaaaacatgcaacgcttgctgcaacacctgcgatgggtgtgtgccccctggccctactgctaacaaggaagtatgcccttgctatgccaagtacaagaatggcaagtgcccttgaatcacttctttctattttctaaacacgcatccgctcatggattcattctaaattatcacttgtatttatgagagggtctcttgtgtacttcaat

SEQ ID NO: 29840 - DNA, 380 bp, Gossypium hirsutum
  unsure (1)..(380): unsure at all n locations; Clone ID: LIB3148-031-Q1-K1-E6
ggnnagnnggcgtccgctagaatcttcttaaatacaatatttgaatttgttgtacaagagcttggcattgaatttgattagcaacatctgttcactaactgttacctttctatatttgtagatggatcaaaagagttttcttggtagctttgtatttgaactatatatgtatttagtctaaatacaacttaattaaacataaattcgcaaaaaaaacatgcaacgcttgctgcaacaacctgaaatgggtgtgtgccccctggccctactgctaacaaaggaagtatgcccttgctattgccaagacaaagaatggcaagggcccttgaatcacttctttctatgttctaaaacacgcatcncggtcatgggattcattc

SEQ ID NO: 29841 - DNA, 336 bp, Gossypium hirsutum
  Clone ID: LIB3148-031-Q1-K1-E8
gatcgtgatccacactttcagtggtattttgtttaagatcgatctggccaaggggtgtgaagtgaatttgatcgaggttgttggaggctcattagccttcggtgatggtctagatctaatatctccgacaaagctcgtcgtcgcctggaacccttcggggagattggtggagagctctgacggatgggagacggtttccgtggtggcaaaatttaaggggcccatccatcggttgtcaacggcggcgactgagaatgatgggaaggtttatcttaaccatttggttgggatggtgtacccgcagaaaacacatgcccttgttgaggcagctttttg

SEQ ID NO: 29842 - DNA, 340 bp, Gossypium hirsutum
  Clone ID: LIB3148-031-Q1-K1-E9
ggaaaaaccaggaagtcaagtaaactctgcccgtaagaagaaaaattctgcagtcgggctgctgcaaatagatgatgggacgaagctgttcccgcaggctagacgacgacaagcttttcctgcatcagggaataggagtgcaactttcccgtgagtgtgtctgatgataaaatcatggctctgcatgacaaatgaaaaatgaattttgcgtttcatatttaaaattttgatcaatagaaaacgatcacaatcttgtttaggaaagttttaaacgtactcctattttggagacctactaaatacacggaaaaaattagtgaattaaatatattcgtattgg

SEQ ID NO: 29843 - DNA, 294 bp, Gossypium hirsutum
  unsure (1)..(294): unsure at all n locations; Clone ID: LIB3148-031-Q1-K1-F1
acattttgtttgtaattctatctaggctttagtcatgtatcttatacttgactcgttcaagcttttgatggtttttgaaccatgaacaataagaaatgaatcagatatgttgatgaagaattgaacatgtggtttctattggatttcttctgaaattaagaaatgaatcatttttcaaaaaaaaaaaaaaaaaaaaaaaaaaaataattaaaaaaaaaaaaaaaaaaaaaaaaaaaaaaaaaattaaaaaaaattaatactattaaaaaaaanggggcggccggtttaaaagat

SEQ ID NO: 29844 - DNA, 306 bp, Gossypium hirsutum
  unsure (1)..(306): unsure at all n locations; Clone ID: LIB3148-031-Q1-K1-F10
ggtaaggtagccgtttttgctttcagaaaatctaccgcagtttgcaatttaaaagatggtgagaggtaacgttttgaataatccctcaaaacatgtacaatgccgagaaaaaggggcaacgacangtcatgatcaggcctttcctncaaagtgatcatttaagttctttttggtcatgcagaagcatggttatatnggagagnttgagtatgtcgatgatcacagatctggaaaaattgtggttgaattgaaccgaaggctgaacaagtgtggggtgattagccctcgtttcgatgtcggagttaa

SEQ ID NO: 29845 - DNA, 209 bp, Gossypium hirsutum
  Clone ID: LIB3148-031-Q1-K1-F11
ggaacgcttgccgatctagcttgtaaaaatacgcgaataagcggcaggcatttggtttctgaaagtaacctaacgacttaacctattaaaaagagcgtacattattggaaataatattcacaatggaaatggaaaaagaacggcaagaagaagatgttattagtgctaaatattatctcctatacataattgcatatgttatgtatgaa

SEQ ID NO: 29846 - DNA, 192 bp, Gossypium hirsutum
  unsure (1)..(192): unsure at all n locations; Clone ID: LIB3148-031-Q1-K1-F12
tcggccacgcgttcggccacgcgttcgagaacctgtagtagggtcaactaattagttggtcaaaaactacaccctattttggaatcggctacttgcatatttgcatatacttaataataatctcggggccgcttcnaaaaaaaaaaaaaaaaaaaggagnattaaaaaagaggggnnaaattttgggggggg

SEQ ID NO: 29847 - DNA, 205 bp, Gossypium hirsutum
  Clone ID: LIB3148-031-Q1-K1-F2
gtataaatctagtatttgctggaagttgtaagtgaactttttgggctatcttagtcttggatattatttgtcttttattttaatttatttgggtttattgatctgacttatttatttattgtaaataaataaattaaatgggcctgggcaaaatgggttatctacatattcatcaatgaaaaaataggtcatatttttcatatgg

SEQ ID NO: 29848 - DNA, 120 bp, Gossypium hirsutum
  Clone ID: LIB3148-031-Q1-K1-F3
ctcaccccgatgctctcaaggcagctttggctgagttcatctcaaccttgatcttcgttttcgctggatcgggctcaagaatggcttttaacaagttgaccgacaacggagcaacaaccc

SEQ ID NO: 29849 - DNA, 330 bp, Gossypium hirsutum
  unsure (1)..(330): unsure at all n locations; Clone ID: LIB3148-031-Q1-K1-F5
tacttggctgagttaagactggcgatgacaggaaatctgctgccgagaataccctcactgcctataaatctgctcaggacattgcagtagctgagctagccccaactcatcctatccgtttaggattggctctgaacttttctgtcttctactatgagatcttgaactctcctgatcgtgcttgcagtcttgcgaaacaggcttttgatgaagccattgcagagctggatactcttggagaggattcatacaaggatagcactttgataatgcaacttctccgtgataacctcactttgtggacctcanacatgcaggatgatgggactg

SEQ ID NO: 29850 - DNA, 315 bp, Gossypium hirsutum
  unsure (1)..(315): unsure at all n locations; Clone ID: LIB3148-031-Q1-K1-F6
nnnaatttgtggattatattcaattgatgaatttccagcctgaaaatttttgccagcaggattgttttggtgggtcacaggattaggtgaactaaggatcaaactgtattcatttgtattaatttatgaacagatagctataaactatgcttccaaagtttaatgatgattgaattaatcttattttttgttttaaggtttgcatattcaaaanncaaacaaacttgcaaaacaagctttttataaaaaccattgcaaaactggatactcttggaaaggattcatacaaggatagcacttttataatgcaacttt

SEQ ID NO: 29851 - DNA, 237 bp, Gossypium hirsutum
  Clone ID: LIB3148-031-Q1-K1-F7
tctttatctccatcttttgtactcttcgctcttttgccattatagtaaaattgtctttgcccttcgttttttaaacccaacaaaactataaaaataaataagacataataaatatatgaactggtccctactaatcctgtccccaacggatggggtcgggacgaacacagtctacctctatggggaactgcaactctcctcatcgtgcttgcagtcttgctaaacaagcttttgatg

SEQ ID NO: 29852 - DNA, 286 bp, Gossypium hirsutum
  Clone ID: LIB3148-031-Q1-K1-F8
agaagtttagataagtcctgctttcctttcttttatatttcttttattaacaaatggtttcctgtcgcctacttcgatgctattccaatcatccgaacatcgtggaatggttttaaagttgtaccttgtgcaagaaatttgaaatttatctttttttctaaaaaaaaaaaaataaaaaaaaataaaaaaaaaaaaaaaagataaaaaaaataaaaaattaacaaaaaatgtataaataaaaaatgggcggccgaattctatgttcaacccttacatccgcttaaat

SEQ ID NO: 29853 - DNA, 402 bp, Gossypium hirsutum
  unsure (1)..(402): unsure at all n locations; Clone ID: LIB3148-031-Q1-K1-F9
aactgatagcttaatatcttttggtatgttggttatctatatctcattaatgtgtgcctaaactttgtaaacctcgatctgatatgttttgtaaacatacatcacaatattaattttcatatagttcttttcaatgagaaattaataatgacgttgtagaaataacaaacttggatggattttaatccaaaacaaattaaaggattaattacatccaacattaacaatgatgtatcaatcagaatcagaatatgaaaactatntagaccaattaaatcggtttaaatttggattaatttcatctcagtattaatacgtttgcacaaaatatttaccaaataaaaggaaatcaatttttggtttatatgtaccaacctaatgcaacaagaagagggggaaaac

SEQ ID NO: 29854 - DNA, 438 bp, Gossypium hirsutum
  Clone ID: LIB3148-031-Q1-K1-G1
gttgctctccagaaagagctagaaagtgttgtcggaaggaatagaatggtagaagagtcggacctaccgaaacttgcctatttggatatggtcataaaagagagtttcaggttgcatcccgtggcgccgttattagtcccgcacgagtcaaccgaagatgtcaccgttaatgggtatttcatacctaagaagtcgcggcttttggtgaacacttggtccatggggcgaaatcccaagatatggtcgagcaatgccgaagagttctttccagaaagattcaaggataggaagatagaccttcgagggcatgatttcgaactcattccgttcggaaccggtcgtagaggatgtcccggaatgcagttagctctaatcagcatgcgtcttattttagctcaattagcccattgctttgattgggagttgcctgatgggatg

SEQ ID NO: 29855 - DNA, 70 bp, Gossypium hirsutum
  Clone ID: LIB3148-031-Q1-K1-G10
gtcgctactttgttcttattgtttatagcaagaataaattatgtgaaactcaactttcttaagcacacac

SEQ ID NO: 29856 - DNA, 104 bp, Gossypium hirsutum
  Clone ID: LIB3148-031-Q1-K1-G11
cccacgcgtccgattaaaatataattttaaaaacttataaataaacataacttatatttctcttgtactatttaaattcaacatagtaaatttttttttcttca

SEQ ID NO: 29857 - DNA, 218 bp, Gossypium hirsutum
  unsure (1)..(218): unsure at all n locations; Clone ID: LIB3148-031-Q1-K1-G12
aaaaaaaattagcaataaagaaaaaacttgatgaaaataaaattaaaggaaacaaaaaggaaatattgtagaagagatggtattgaaaataaacgtaccttaatagtttgaaaaacacatacattctttgttgaataatggaaccaaanaaaaaaaaaaaaaaaaaaaaaaaaaaaaaaaaaaaaaaaaaaaaaaaaaaaaaaaaaatattatataat

SEQ ID NO: 29858 - DNA, 146 bp, Gossypium hirsutum
  Clone ID: LIB3148-031-Q1-K1-G2
aatatctgttgagcttgtggctattaaaatgaattgctgtactgctgtgcatgtttgctaagttcatcagtatatcttcataagtacgaaattttgtcgtgttggatggactgctgttgatgttttctaaatatattattatgatg

SEQ ID NO: 29859 - DNA, 125 bp, Gossypium hirsutum
  Clone ID: LIB3148-031-Q1-K1-G3
aaatgaatagctgaactgacatagagcaatgaatgctaagttcatcagtaatatcttcataagtacgaaattttgacgtgttggatggactgctggggatgttttctaaatatattattatgatg

SEQ ID NO: 29860 - DNA, 419 bp, Gossypium hirsutum
  unsure (1)..(419): unsure at all n locations; Clone ID: LIB3148-031-Q1-K1-G4
aagtattgcgcaatgacggaaaatgaacaacactatctgttaggcaccgccccaccagacaaagttgattaactcgacccaccgctccttcatcctcttgaaaagcatcctcctcctcgtccatcaaattcaaattttccattgcatcttccatctcaccctctacaacttttcaaccaaacaagaaaagacttaaatcgtagaacaaacagggactgcaactagagaactgaagaatcccagatgcaaacacaaagaaacgtgccaataccggcagacagagaaccccgtgccaatacggcaaactctctaaaccatgatttaactntttctttgtaaattatctttgctttctatattttgactaattgtattctgaattacaatctttatctagttaatttcagttatattactgt

SEQ ID NO: 29861 - DNA, 340 bp, Gossypium hirsutum
  Clone ID: LIB3148-031-Q1-K1-G6
gcttcagcagatgatgcacgatgtttcagcaatcgcaaaagccgccatcttagacgatagttttctcattgtaagaatgtttttcactttattacgtttaacattattgtaataatatttaaaattatattttatttattaattatatcatatatctgtagttgaaaaaaaacaacaaaacaaccaaacaaaaaaaaactaaaaaaaaaaaaacaaacacggactgcaactagcgaaacggaagaatcccacatgcaaacacaaagcatgcgtgccactaccggcagacaaaagaacccccggcctatacagctaactctctcaaccatgatctaacttt

SEQ ID NO: 29862 - DNA, 443 bp, Gossypium hirsutum
  Clone ID: LIB3148-031-Q1-K1-G7
ccgttctaagatggagatatccgacttaaatgacttcgggtccgaaatcattcctgctgctgtcatggagcatgatgtccaggcatatattttcaaagactactgggaagatatcggaacgatcagatcattttacgaagccaatttggccctcactgaagagtttccgagatttgagttttatgatccaaagacacctttctatacatctccccgttacttaccaccaaccaaaatcgacaaatgcaggattaaagatgcaataatctcccatggatgcttcttacgagaatgcagtgtccaacactcgatagttggtgaacgctcgcgtttggactatggtgttgagcttcaggacacggtaatgttgggagcagactattaccaaactgaatccgaaattgcttctctattggcagagggtaaagtcccgatcggaattg

SEQ ID NO: 29863 - DNA, 443 bp, Gossypium hirsutum
  unsure (1)..(443): unsure at all n locations; Clone ID: LIB3148-031-Q1-K1-G8
nnaaaaaaggtgaagatatcttacagctttgcgataatggcgagaagtgtttgcgtttggtttgccttggctgcaattgtatgctctttatcggccatttctgctgaagaaagcagtgagtcgaaagaattcgttttgactttggatcactctaattttactgacactgttagcaagcacgatttcattgtcgtcgaattttacgctccttggtgcgggcactgtaagcatcttgctcccgagtatgagaaagcaatcattatgcatgaactagtagttactatataatattagcttcaagtaaataatcctgagagaactgattgttaagattgccttgtttgaagcagcatatatatatatatatatgcttgcttacaaggtttgtctctcagagtccttctctttgtactcttttcagcttaatgtatgaactgtctact

SEQ ID NO: 29864 - DNA, 418 bp, Gossypium hirsutum
  Clone ID: LIB3148-031-Q1-K1-G9
cccacgcgtccgcccacgcgtccgtggaaaggggcgccggagagggtgagagccccgtcgtgcccggaccctgtcgcaccaagaggcgctgtctacgagtcgggttgtttgggaatgcagccctaatcgggcggtaaattccgtccaaggctaaatacgggcgagagaccgatagcgaacaagtaccgcgagggaaagatgaaaaggactttgaaaagagagtcaaagagtgcttgaaattgtcgggaggaagcgtaaaatggcatagtggaccgcgatgatgtttagaaagcaacatagacccaaattttctttaaagatgcagcaaaagctgctaaaaataattaaaacaatgaaaattataattaaagccacatccatagtttttggtaattatgtcttgcagtaatttactttt

SEQ ID NO: 29865 - DNA, 329 bp, Gossypium hirsutum
  Clone ID: LIB3148-031-Q1-K1-H10
gcgcgatccatgccaagcgtgtcacaattatgcccaaggacatccagttggctcgtaagatcaggggagagcgtgcttaatttccagaagtgtggatcagtcgcttagaagaaactattgtttatttttaggcaaatgtattggttttttggtttttctaatcatcttttaagccattatggtagtggtaggttcaatgtgatgtggataataaatggggcgtcttgtattgtaatggacaataaactatgtctggtataagcctggttaaaatgggttttgcttaaatcgaaagtgcttttgcccaacagagtggcttttggtggttt

SEQ ID NO: 29866 - DNA, 387 bp, Gossypium hirsutum
  Clone ID: LIB3148-031-Q1-K1-H11
cccacgcgtccggaaggttttgttcgttgcattctcattggctttggtgctctcaatccaatacgtagtaggacaaaatgagaatgaggcagcatccccagaagccgtagggatatttggggctctagctatgaccagcattatttcgaaattgcaagatgctggaatacaagggcaagatttgaacaaaataataacagaccctaactttgtgtcgagggtggatacactcgttgaaaagtttaaaagctctgttggagatgattccgagaatgtggaagggccaacttctgccttagctgatgtagatactgatgaggttgcagcttccccagaatctgaagatgaaattgctactgaagttgctagtggcttgttgaaaatggc

SEQ ID NO: 29867 - DNA, 257 bp, Gossypium hirsutum
  Clone ID: LIB3148-031-Q1-K1-H12
ggcattctctgatcgaatattcaagtctccattgcttgaacttttggctaaagacggaagaaatgggaaaaacaacgggaaaggatactatatttatgagaagggaagcaaaccaaagcctgatccttctgtattgtctattatcgaggaatctagacggcttaccaatattatgcccggtggaaagcctaattccgttactgatagaaaagttctggagatgatactcttcccagtagttaatgaggcatgccgag

SEQ ID NO: 29868 - DNA, 425 bp, Gossypium hirsutum
  Clone ID: LIB3148-031-Q1-K1-H2
ccaagaatacacttcatgctttcttcatacgctccagtcatctctgctgagaaggcttaccatgagcagctatcagttgctgaaatcaccaatagtgcctttgagccctcatctatgatggccaagtgtgatcctcgccatggcaagtatatggcttgctgtttgatgtaccgtggtgatgttgtgcccaaggatgtcaatgctgctgttgccaccatcaagaccaagagaactattcagttcgttgactggtgcccaactggattcaagtgtggtatcaactaccagccacccactgtcgttcctggtggtgatcttgctaaggtccagagagccgtttgcatgatttccaactcaaccagcgttgctgaggtgttctcccgcattgaccacaagtttgatctcatgtatgccaagcgtgcctt

SEQ ID NO: 29869 - DNA, 402 bp, Gossypium hirsutum
  Clone ID: LIB3148-031-Q1-K1-H3
acatattcacacttgcaataatatttaaaatggagaaatcttgccgttcaatgtcatctttagtccttcttatgttggttcttctagcaacagagatgggatctatgacagtggaaggtagaacatgtgagaccaaaagtagtgaatacaaggggatatgcttatttgatgctaattgtgatagtatttgcaaagtatagccaggtttcgatggtgggcattgacatggcttctttcgcagatgctattgcactaaaccttgttagatgagcaatctattaagatttcattatacttaaaagattgcctgatttccgcttggtatgtgtgtgcttgagagttgagagaataagatccacaacatattggtgtacatcgaattatattactattaaatatatc

SEQ ID NO: 29870 - DNA, 436 bp, Gossypium hirsutum
  unsure (1)..(436): unsure at all n locations; Clone ID: LIB3148-031-Q1-K1-H4
gatcatcaaaacctaaacacgatcctttgatttccgaaatatgtggagaaggctacttacttcacagttcaaatatctggcaacacttccatgccgatccgcctctaaaacggcgccgcttccattcaaatctcacatttctccttccccttctgcttccctcctcgttcgccatttctccgccgagtcagcggatactgctgtgaagaagagagttgaggatgtaatgcctatcgctacaggtcatgaacgagaggagcttgagtctgagcttcanggaaagaaaatccttgaagatgtaaacaaccctgttggtccttttggcacaaaggaagctcctgctgttgtcaagtcctactatgacaagagaatagttggatgcccaggatgtgaaggcgaggatgagcatgatgttgtctggttttggctggagaaa

SEQ ID NO: 29871 - DNA, 229 bp, Gossypium hirsutum
  Clone ID: LIB3148-031-Q1-K1-H5
ccggtgtttttcttcaaattgtatgatgaatactgtgcctgaagtgtgcatatctgctctcaatgtatgcctgtatcttaaaaacatgatgaaaaaaaatggaaacatttggctgaaaactaacattcaaatcctacattatcttctttcccatcagctaaccttctaaatacgccattttatacaacaaaataaccggaacctgctgggaaaaaaaaaaattgaagaa

SEQ ID NO: 29872 - DNA, 65 bp, Gossypium hirsutum
  Clone ID: LIB3148-031-Q1-K1-H6
cgcgtccgaaaacctaaacaacgattgcttgatatacacaaaaacctgaaaaaagcaggtaagct

SEQ ID NO: 29873 - DNA, 309 bp, Gossypium hirsutum
  unsure (1)..(309): unsure at all n locations; Clone ID: LIB3148-031-Q1-K1-H7
tccgttccagtgccagtgttgttcccttcaagtagcacaatttgtttatcttttttcataagaagtttcgctttgtgagctagttttgttttgatacttatatgttgttggggtctactttagtatctaactttacaagtaggtctattttgactatgaatttatattccgtccaaatttaatgcanaaaaaaaaaaaaaaaaaaaaaaattaaaaaaaaataaactataaaaaaaaaaaaaaaaaaaaaaaaaaaaaaaaaaataaaaataaaaaaaaaaaaaaancggggcggccgttttaaaggat

SEQ ID NO: 29874 - DNA, 155 bp, Gossypium hirsutum
  Clone ID: LIB3148-031-Q1-K1-H8
cgcgtgggcggacgcgtgggctcttttctaattagagtaatgtaaagttgatggaagttcttaatttggcctattaaaatttaactgttatttcagtgcacctcttttcttcctcggttaccaacaattattacaaacaaggcaagagttgaatt

SEQ ID NO: 29875 - DNA, 428 bp, Gossypium hirsutum
  unsure (1)..(428): unsure at all n locations; Clone ID: LIB3148-031-Q1-K1-H9
tgataatatttagatttatgtaccaactatttaatagatacgaactctatatttaagtagagttagtatttattatactgatagtatactttttttattccacaagcattattnaaaaaaaaaaaaaaaaaaaaaaaaaaaaaaaaaaaaaaaaaaaaaaaaaaaaaaaaaaaaaaaaaaaaaaaaaaaaaaaaaaaaaaaaaaaaaaaaaaaaaaaaaaaaaaagagaaaaataaaaaaaaataaaaaaanannnnnaaaaaaaaaannaaaaaaaggggggcccttttaaaaaaacaaaatttttgttcccggggtatgaaaaaatataatttttttttggtgcccccaaaaaaaaataaaggggcgggtttttaaaaacattttgaacgggaaaaacctggggttacacaaaaaaaaaacccttg

SEQ ID NO: 29876 - DNA, 276 bp, Gossypium hirsutum
  Clone ID: LIB3148-032-Q1-K1-A1
acgggctttcattttacttgcacgaaatttggttctaaccaaatcccaggttgttggaagaaattaactaaatttgtgctcgttggagacaaattaaattttagttttttaaatagaagaaaaaaaatatggttaatttataaaaaaatgggtaataatggaaagggtttaaaatggggagtatattgaaaacataaattgggggggggttttagaggattaattttttcttaaccgctcttgcaatgaaattttttttgtttggggttccttaaa

SEQ ID NO: 29877 - DNA, 167 bp, Gossypium hirsutum
  Clone ID: LIB3148-032-Q1-K1-A10
gccacgcgtgctatttatttagggggcttaaacacaggactatacttgaccaacaggcaccattctcgtaaacatgcctaaatggcttgctaaaccctgcatacaaatatacagttcctgtatgaacatcctagcgttgatctgctcctatcgaacagaatcactca

SEQ ID NO: 29878 - DNA, 221 bp, Gossypium hirsutum
  Clone ID: LIB3148-032-Q1-K1-A11
acgaagtcgcatgggcggacgcactgggcgcgacttcctcgggtttttaatgataatagagagcgtgtgaaacaggctgctttgaacctctattacaccagagatgctgctatgtactttcaaacttttgctaaaaggcgggctgataatgctctgtttctacaaattatgccagagctcaagaggccacgcgtttcatgatctatgatcatgctaaaatg

SEQ ID NO: 29879 - DNA, 244 bp, Gossypium hirsutum
  Clone ID: LIB3148-032-Q1-K1-A12
gtagtaagtaagatgtttaaaagagtaagcggcagcgcagggtggtcgatgaccttatgtcattcaagattccggccgtgagcggcggcagctgctgctatattaaattattattaaataaagggaaggggtattgtacgaatgatgttgcgttagtatgtgatttgaacatcaatttattaattaattttgggttttaaaaaaaaaaaaaaaacaaaaaactagaaaaaacaaaacaaggggc

SEQ ID NO: 29880 - DNA, 387 bp, Gossypium hirsutum
  Clone ID: LIB3148-032-Q1-K1-A2
ctctcaaattcaccatggctgacaagtgcggcaactgcgactgctctgacaagagccagtgtgtgaagaaaggaaacgccttggtcattgagactgagaaaagctacatcagcactgtagtggtcgaggctgtggcagagaacgatggcaagtgcaagtgtggaactagctgcagctgcacaaactgcacatgtggcaatcattaagcagacatatatagaactgcacgatgttttagtccataattaaattaagttgaataattggtggcgtgttgcatgtttgtctccgcctcattgtataccatgatagaatggccatgtctatggactttgtctgattaatgaatgattattagcacaaaaaaaaaaaaaaaaaaaaaaattg

SEQ ID NO: 29881 - DNA, 262 bp, Gossypium hirsutum
  Clone ID: LIB3148-032-Q1-K1-A4
cggacgcgtgggcggacgcgtgggcggacgcgtgggctgttccaggagaagccattgagaagcctgaagcaagagatttgcaacctgaaaaagctgaggttgataatggagaagagaaaacagataattcaggtgttgaaataaaattggaacctgcatccacaggtaggggtaatttatcattttccgatctactccaacaatctacagaaaagaaagtggagatggctgaacgtgtgattgaagagagggaacttacagt

SEQ ID NO: 29882 - DNA, 400 bp, Gossypium hirsutum
  Clone ID: LIB3148-032-Q1-K1-A5
gcgtgaggaggactacccttacaccggcactgatcgagggacctgcaaatttgacaacaccaacgttgctgccaaggtggccaacttcagtgttgtttctttagatgaagatcaaatcgctgctaatcttttcaagaatggtcctcttgcagtggctatcaatgcggtgttcatgcagacctacattgggggagtttctcgcccatatatctgctctaaacgccttgaccatggagtattgttggtggggtatggttcagctggttatgctccagttcgcatgaaagataaaccgtcctggattatcaagaattcatggggtgaaaactggggagagaatgggttctataagatctgcacgggtcgtaatattcgtcgagtatattccatggtttcaact

SEQ ID NO: 29883 - DNA, 350 bp, Gossypium hirsutum
  unsure (1)..(350): unsure at all n locations; Clone ID: LIB3148-032-Q1-K1-A6
gcgttgcttccatcttaaaacttcatttatttgcttagctgagttggcgctgctgctgtcttctagtacccctgcctgcatattgttggtccatcgcttgccattgctattgcttggtagtttgagtatattttcttatgtgcttatagcacttttattactacttctatgaccaacggctgtaactagcatttatatacttgctgattcttttntaaaaaaaatgaactaggatcataataagtgaaatcgaatatataaatgtaatgtttaaataaactttaaatgataaataaagctttttttgtaataaatttttaaataaaaattgtgaataaaaaaacaataaa

SEQ ID NO: 29884 - DNA, 406 bp, Gossypium hirsutum
  Clone ID: LIB3148-032-Q1-K1-A7
cccacgcgtccgtagagattaagcaatggctggagaaagggccttgttcaagttccttaagcctgggcaacgtctacagcccgccgacgttcaagctgccgccatgtggggcgtcgctgccactaccggcgctctttggctcattcagccttttgattggttgaagaagacctttctggagaaaccagagtcggattagaagcaaatgggacatcttgcaactcattgcggttttgtttatcgggtttgctgatgaacaaatcatggaaagaataaaaataataatgtagtaagtgtaattttttgtggtttattgttaagagaacaagcctctttgcttttggtatcaattactgggaagttttgaacctttcaccttcagtttgaactggtggctcatttctac

SEQ ID NO: 29885 - DNA, 315 bp, Gossypium hirsutum
  Clone ID: LIB3148-032-Q1-K1-A8
ggaactgacgcgatctctcacggggacactatgcttgtggagtccaactacaggggaatcaggcatcatactggacgatcatggggcatgttctacattttgcctgcagacgagttgtccaagccaatgcacaccttgcacactgatgataaaacacaggacagttttatggtggctacatatcctgtgcgctgccgtgagctaagatcaggagaatgacctgtataccatggtgtacatcattatcgacttaaacactaaggtgaagatcgctatgaagcaattgagatctgaatgttctgacataaactatac

SEQ ID NO: 29886 - DNA, 315 bp, Gossypium hirsutum
  Clone ID: LIB3148-032-Q1-K1-A9
gccgccgctgatgtcgagttccggtgcttcgtcggagggctcgcatgggccaccgacgaccgggccctcgaagaagccttcagtgcgtttggtgaaatcgtcgaatcgaagatcattaatgatcgtgagactggaagatcccgaggctttggattcgttactttccgtgacgagaaagctatgagggacgcgatcgaaggaatgaacgggcaaaatcttgatggaaggaacattaccgtcaacgaagcccaatcgcgcaaaaatggaagcggtggccgaggattttgaagaagaaacggtggttacagcccccgt

SEQ ID NO: 29887 - DNA, 313 bp, Gossypium hirsutum
  Clone ID: LIB3148-032-Q1-K1-B1
cccaactccacaacgccaaattcaagtttaccaaccttattgtttatttgttcgagaattagagagtttttttgaatacccatggcttcgaagcggattaataaggggttgaaagatctgcagaaggacccttctgcatcttgcaatgctggccctgttggtgatgatatgttccactggcaagcaacaattatgggcccagcagacagtccttttgctggaagactatttcttggttccattcactttcccccaaactatccattcaagccctgcaagggttctttccgaacaaaggtttttcattccaaca

SEQ ID NO: 29888 - DNA, 400 bp, Gossypium hirsutum
  unsure (1)..(400): unsure at all n locations; Clone ID: LIB3148-032-Q1-K1-B10
cataaataaacctaaactattttatctgtgttttatcctatgtaatgatattatatgaatgaaaattacatgtttaccttacaaaaaaaaaaaaaaaagaactaaaaaaaaaggaaaatggaaaaagaataataaaaaaaaaaaatgaagcggaaagaaagagggaaaaaaaaaaaaaaaaagggggggggctttagaaagaataaaattttacgtgcccttttttgaaagcaaatncttcttcttttggggacccaaaataataatactgggccgcggattaaaaaagaggtgcttggaaaaacctggggtttcccaaaataaatggtttggcaaaaaaatccctttttgccagtgggggtaaaagaaaaagggccggaaccaattccctttccaaaaa

SEQ ID NO: 29889 - DNA, 223 bp, Gossypium hirsutum
  Clone ID: LIB3148-032-Q1-K1-B11
tgcttttaaaaaaaaattaaaacatttgttttataaacaatataaaaataaacactaggggagaagtttaacgtatttctcctgcttcttcatgattcatgtcctgacagaagaattcaatgttcgtcatttagactcaaatgagcgtccttcgtaattaaactttctgacctgtaaaaccacaaaactcgcccatgctagtgtccattgtatgctatatcta

SEQ ID NO: 29890 - DNA, 417 bp, Gossypium hirsutum
  Clone ID: LIB3148-032-Q1-K1-B2
cccacgcgtccggggaaacatggaaagccttcgtggactaaacggctcttacttgatgaaaacttcttgtgctcaaaaatccgggaagaagcagatgagttgtgccgaatgctggaggagaaaaaggacagttcatgcattgcctcaaaaatggcagatgtgatctaccatgctatggttttgctaaggcgcaaagatgtaaagatagaaaatgttctagaagttcttcggcgaagattctctcaatcgggtatagaggagaagcaaagccgtgcatcaaccgagagttaaatgtaagctgtacttttgctaaggtctagatttgcagcttttatcccatgcttaggttgttttcaataaattcgaaataacctatatctgtcataattactagttttttgcttttattttcgaagt

SEQ ID NO: 29891 - DNA, 402 bp, Gossypium hirsutum
  Clone ID: LIB3148-032-Q1-K1-B3
cccacgcgtccgcccacgcgtccggtttgctgcagctaataccaaacctagtttattacgaaaactggacagtgattgatggggatcacatcgagcttgcagatgagacaaagattttcctgagagagaaggggcatgagctgcgggccaagtcaagtggggctatcgtccagtttgttgttcaagccctccagaaagacatagaaaggggccgaaaatttggaaaagattcatatatatttcatggaacattaactgctgttagtgaccctagaaaagatggaaagccagcagccgtctgaataagttgagaagcattcaagcaataagccgttaaagaaaattaaaatgcaaagctttgtattcccttttcttttgtttaaagtgcaatgtatagaaatg

SEQ ID NO: 29892 - DNA, 238 bp, Gossypium hirsutum
  Clone ID: LIB3148-032-Q1-K1-B4
cccacgcgtccgcccacgcgtccggccacgtgtacgtaataacaagcctaatgtagatcaaaaggtggacagatccatgatcgcggtcacataagacaggctgctatcacacttgtccttttgtcagagaaggggcctgaactgcgaccataatcacgaagtgctatcttgcactaaccggggaaaatgctacaaactgtcattgtgctgagacgcacatgaggtgatgcaactgata

SEQ ID NO: 29893 - DNA, 249 bp, Gossypium hirsutum
  Clone ID: LIB3148-032-Q1-K1-B5
ggctctgggcagcttctggaatcgtcgatatttacagtgagtacggttccgttgccgggttgtaaattttgtgttatccatttagtttagtgaaaaaattgtacattataaatgtacacggatcaaaacagtatcccttttttaggcttaaattttatatattcgaaaagaattagataaattttaggttaaaaatatggcttttgggttcttaagaattcaataaaatccaccattttattttttctt

SEQ ID NO: 29894 - DNA, 339 bp, Gossypium hirsutum
  Clone ID: LIB3148-032-Q1-K1-B6
gcgaatcataattaaatttatgtatcattgctataaatgtaaattgtttgacatgcagagatgctcttgatgctttgggattggttcggtactgctgtaggagaatgcttatgactcatgttgacctcattgagaagcttctgaactacaacacattggagaagtcggagaccagttgaggaaacatgtagaatctaagggtttgttgcagtttgtttgagtgcctgtcaatgattctcagttttgtttaagtggggccgtgtttgaatccagaagaagggaaggaaaagacttaaatagtactagtctagattgttttctttagctctatgatggatc

SEQ ID NO: 29895 - DNA, 405 bp, Gossypium hirsutum
  Clone ID: LIB3148-032-Q1-K1-B7
ctcaatgcagagccgcgtcttaaatacatcgccgtctccgccgctccttgcggccattgccgccagtttttccaagagctccgcggtgctcccgatgtcaagatgctcataacttcctccgatgatgaaaaggaaaacaaaataagcaacacttgtaatgataaagaccaagaatttacccctttgtctcattttttacctcacaggttcggccccgatgatttgctaggaaaagatgctcctctcctcctcgagcctcgccggaacggcttgtcgtttacctccgacggctgcgagaacgacgagttaaaacacgcggctctcgatgccgcgaacatgtcgtacgcaccttacagcgggtgtccatccggagtggcgttgatagacgttgaaaggaagatatac

SEQ ID NO: 29896 - DNA, 416 bp, Gossypium hirsutum
  Clone ID: LIB3148-032-Q1-K1-B8
aagaaaaagagaaacctaagcctgaagcgaagatagaaaagccggcgccgatcacggtggtgctaaaagttcacatgcattgtgaagcttgtgctcaggaaataaaaaaacgtattcaaagaatgaaaggggtggaatcagccgaaccagatctgaagagttcagaggtgacggtgaaaggagtgttcgaaccaccgaagctggtggcgtacgtttataagagaaccgggaagcacgcgctgataatgaaggaagaggcgacggagaccgacaagaaagaaggagaagaaaaagaaaaggccaaagatggcaacaaggaagagaaaaaaggtgaggaaaaagaaggcggtgaggaagtaaagaaagaagccggtggtgaagaagacaacaaagacaaaaaagatgaaggtgatcaa

SEQ ID NO: 29897 - DNA, 249 bp, Gossypium hirsutum
  Clone ID: LIB3148-032-Q1-K1-B9
ggaaatccataggaaacaagtaggtttcatctctttttaattttcataatggcagggactggagtgttttcagacatattggatggagatgtttacaagtactatgctgatggtgaatggaagaagtcttcttctggaaaaactgttgcaattatcaaccccagcaccagaaaaactcagtataaggttcaagcttgtacacaagaagaggtgaacaaggttatggaatcagcaaaaactgcacaaaaa

SEQ ID NO: 29898 - DNA, 371 bp, Gossypium hirsutum
  Clone ID: LIB3148-032-Q1-K1-C1
cccacgcgtccgcccacgcgtccgcccacgcgtccggaccgactggacctgcagtatcacaatgttcgaatgtgaagcctaaagttagtggcaaacaaaatccagctgcatgttcttcccctatcccagcaaaacctaccccgaccgcttaatcaatagcagaggtataatgttttttgaagacgttgtaactcttataattatatttatttcgcaaaataaatttggtttttttatattctatgttataaagaatatttttcataaacttaattattttttaaaaaaaaaaaggaaggaaaaccttgttgaaaaaactggaaccctttttgaatttggttgaagaaaaacaaaaaaaaaaaatcccgccg

SEQ ID NO: 29899 - DNA, 407 bp, Gossypium hirsutum
  Clone ID: LIB3148-032-Q1-K1-C10
cccttttcaatgtttataacccaaatgtggttttaattggttatgggaaacttttcatgttgtttttcttttaagttttgtttggaaaaatctatatcaaacatggccttgttgagttgaaactatctcatactctgtgtcagtcggattatcaagaaaaagaatacagttccacattttgcctgtaagagagagcagagcttgtgctcatttttggaccacccgcggtcacctttggagctcatagttatataaagcggcattaggtaattgctttggatcggaggattgggttccaatcgagttctttatcacggctaaacacggggaaatcaccatatgcctttcatgccgtaagtcacacattggcattatgtatgttgatgtgtgtgccagcatttgtttta

SEQ ID NO: 29900 - DNA, 283 bp, Gossypium hirsutum
  Clone ID: LIB3148-032-Q1-K1-C11
gtcatccttaaacccttagtttgctcttgttttccggttttcgttttttcgccatacagctttttgatggagaaagacatcctgattctcaccctctttttcctccgaaaatcatcggagaagctcattcattgcttcttacctatggataatctcacatggggcatatttcaaatctcatgtaatcctccatggttttaaaagtgtcttaaaaagtgcagtatttgatttcaagcattttagtgtttgtttttgaagcactatgagacactatttgcagtgt

SEQ ID NO: 29901 - DNA, 407 bp, Gossypium hirsutum
  Clone ID: LIB3148-032-Q1-K1-C12
tcttgatgtgccttcgttaaaaatacaacttttagatcttggcttttatagccctattacaactgttcattctcatttttttcgttttttgctctttatttctttgtattcttctgttgcttgcattcattcttctctgcaggtgtcagacgaggccgacggctgtggtcagaagcgtgcatgagtgagcctggcagcatgcggcgcttggaggcttgggggcaagcagcagctagggttctctgttgctgaaattttttaatttcctgggctagggtttaggtttgttgtgtttaatgtaactggactgattattttttggtaatttgggctgtttcgggttctattgggccccgtgcagtcctcttctctctagaaaacaatatttggaataaaataaaacttaa

SEQ ID NO: 29902 - DNA, 291 bp, Gossypium hirsutum
  unsure (1)..(291): unsure at all n locations; Clone ID: LIB3148-032-Q1-K1-C2
cccacgcgtncgtaacaatccaactaatttcttctaaaggaccatattgttttattttcgaattatattctctctttttctttttctttttttgttaatcatccttaagattataattttttttcatttgattataaaaatggttatgatttaatttactttattattatttcatactaatattagaagaaagaaataaactcacttccaattgcttatattttatggttcaatctatccccttttagcttggtttcactgcacatgaccgcgtgcacacgccatgggcag

SEQ ID NO: 29903 - DNA, 227 bp, Gossypium hirsutum
  Clone ID: LIB3148-032-Q1-K1-C3
acattttagagctaaaaacagctagcttttggtacttgcttttacctgtatacttatttcttctattctgggtagcaactgtatattgcgtttaaaatagacatgagaagtttaatattatgtaggcctgaagaacttcataatcatatatttcttgctggtcggatcttttcaagttatgatgaaaagatatgatatggcctttttttttttgaaaaaactttcta

SEQ ID NO: 29904 - DNA, 272 bp, Gossypium hirsutum
  Clone ID: LIB3148-032-Q1-K1-C4
cccacgcgtccgcttttttttttttttttttttttttatattaaggttttttttttttttttttattttattttttttttattttttttttttttttttattttttatttaataaaaaacctttgttagatttaaaaaaaaaaaaatattaaaagggcggtcgttttttatgaataagcttatttactgaagcatagcgactcatagctgttgtatagtggaaaaaaaattgaattctgtggtaaaggttatataattaattgactgggaaa

SEQ ID NO: 29905 - DNA, 268 bp, Gossypium hirsutum
  Clone ID: LIB3148-032-Q1-K1-C5
gaattctttgggatgtaataatggatgctgttcagtggtctggaaagaaccagcagcagaatgccaattcagctttacgacaggtcaaaacatgggcaaagctgttaaattcgttctgcagcagtggaaaacttgaactggagcttatgtataaggttcagatgcaatgctatgaggatgcaaaattgatgaagctattcccggagattgtgaagtctctctatgaccaggatgtccttgcggaaacacgatctttactggttccgaa

SEQ ID NO: 29906 - DNA, 269 bp, Gossypium hirsutum
  Clone ID: LIB3148-032-Q1-K1-C6
ggtacccacgcacgtttgaaggggacacattgcccttggaggtggcccatccaactcagggtcccaattacccaaaattaactgcagagtagacacaaccatgtggaaatattccccccttgggtggttaagggaaataaccgtttgaccaaggaccaggttggtttaaaaattgccaaattccttaaaaattaccaccccggccttgtggttaggccgtttgacaccaaaaatggccaaaaaccctattttctaactgcacatgaacc

SEQ ID NO: 29907 - DNA, 372 bp, Gossypium hirsutum
  Clone ID: LIB3148-032-Q1-K1-C7
atagaaatgattctttggaaaagagaaattatttttttgaataaaaaaataaaaaaaaatgaatatgattaataaaaataaaagaataaaaaaattaaaaaaaaagagaaaaattaaataaaaaaaaaagggtgggggcttttgtagatgataaatttttgaactcgcggaattatttattatgatctttttttttgtgacccaaaattaaattaatttggccggctttaaaaaaaaaagactgtgaaaaaacagtcgtttcccaaatttatatctttttgaaaaaaaccctttttttcaaatttggtaatataaaaaagggcccgacccatatcgtttttcaaaaaattcgcacactttaaatgaaaaatg

SEQ ID NO: 29908 - DNA, 408 bp, Gossypium hirsutum
  Clone ID: LIB3148-032-Q1-K1-C8
cccacgcgtccgagaagatgctgctgcactaataaaggaaagtgggactgaaaagcccattgttgccttcattgctggacttactgctcctccaggacggcgtatgggtcatgcaggagctatagtatcagggggcaagggtactgcacaggacaaaatcaagactctaagggaagctggagtgacagttgctgaatctcctgcaaagattggtgtagcaatgcatgatgttttcaagcaaagaggcctcctgaattaacacccttttttttttcctagaaaaaggaaaactttttttcctgaataagtttcaggtggacatttttcatataattccattgtttttcttttgtccaaaattatttttatactaaaaaatgagggaaaaatcttatacctcagtcaatg

SEQ ID NO: 29909 - DNA, 331 bp, Gossypium hirsutum
  Clone ID: LIB3148-032-Q1-K1-C9
cccacgcgtccgcacgttttgtctcacacgttgttatttgaagatcttatataatacaaaatgtggataatgattcgtattacatatagtggctttgacaattcaatgcttgaagcgaaagatctaatgtaacattccaacccaccttgatcgacggcgaggtcctccattgtacttcacaaagagcatgtgataaccaggtggtgcaatgttgctgttcatgcgagttagaagaacaatgttgtttggatttagcgccacatatttgttaaatttcacaatctcaaattgaatcaatctctgaatcaatgcaacccacgtggtcacaaat

SEQ ID NO: 29910 - DNA, 105 bp, Gossypium hirsutum
  Clone ID: LIB3148-032-Q1-K1-D1
cccacgcgtccgcccacgcgtccggtcaatctagaaaagagttcagaactgtattgtcactttcttttgttctatggaagaacgcgttttgtttgtattgctgcg

SEQ ID NO: 29911 - DNA, 143 bp, Gossypium hirsutum
  Clone ID: LIB3148-032-Q1-K1-D10
cccacgcgtccgcttttgagtttgggctgttcgggctaggggtttatgaatttgggttgaaattgtatttgggctaggggtcaatgcaacatgcttgcaatcaaatcataataacggacgagaatggaattaaacttgagttc

SEQ ID NO: 29912 - DNA, 407 bp, Gossypium hirsutum
  unsure (1)..(407): unsure at all n locations; Clone ID: LIB3148-032-Q1-K1-D11
agctcctcttgcaatcttgtatggttttaatcataatttacttcccggttcaacaaatttatctccccatgctctgacactggtgagtggattcgttgctgtaatttcagtcaatatagttattgcattctacatctatatggcaatgaaggaacctgtggataagcatgagccggatccaaagtttctcgctgacgccaaagctagtgtaagccagccaacgggcgaagctccaacctcttccgagtccataaagaaacgagaatagaatagccaaagcctgagtaactacaatggagagaatggaacaatgagggtctgtgctccatactcatgtcttatgattatgaaaangagttctttctaatgtttttggtggataattagaactatttctttccgtcttt

SEQ ID NO: 29913 - DNA, 308 bp, Gossypium hirsutum
  Clone ID: LIB3148-032-Q1-K1-D2
cccacgcgtccgccggacctcggatccaatgggtcttttaaacataattcccataccagtcattattaagggctaccgcacctgctgttgtttgaaatataggatatggtgataatctttatattattgtaaaatagaggtcaataaacttcccagagtgtaagatgcgtattatggcaggctgtcctggtactacataactatgagctgccttttttcaagttgagaagcttttctgagatgccacccgctgtaatacgttcagttcaaacaactatgctttggaaatacaagctgaactagcttca

SEQ ID NO: 29914 - DNA, 413 bp, Gossypium hirsutum
  Clone ID: LIB3148-032-Q1-K1-D4
cccacgcgtccgcccgacctttggaaatggctaaccggtcaagaacaaccacccgaagcagtgaccgttaatcctgtcttctctgcagtgcaacagaaggttttgaaaaacctcaacaaccattcctctcccgagacccgagcaacccgtggccggccatgggtgagagggtgggatgatatcaaaaaaggtcgcgatagcccaatcaccggaaatcagtagcttttcttttgcctttgagataacaggttctgaaggcttgtttatttcgaaacaaattaaggtttgtaatatgtaatttcttcgatattgtatgctagaatatgaaataaggatggctgcattgctgcagtgaagctggagatgtaagaaaaccctgaatgtatttggtataggccttatttaagttgatc

SEQ ID NO: 29915 - DNA, 255 bp, Gossypium hirsutum
  Clone ID: LIB3148-032-Q1-K1-D5
gaataattgatcatgtatgcactgattccttgctgaccagagaaaccagatcgcacgcacaatctatctacaggtgccaaagctgagagcaaaatgacggtgacagacttcatgctccaggctttcaacaccccttatgcattgtggacatgctaaccgtgtattggatagattatgcttattaggggttagattatggaatatttgccagactgtaattataacatttactggcaatctgaaacgtcatcttta

SEQ ID NO: 29916 - DNA, 365 bp, Gossypium hirsutum
  unsure (1)..(365): unsure at all n locations; Clone ID: LIB3148-032-Q1-K1-D6
atttggtgatagttgttgttgttgttatagttgggggggggggttgaatagacatgagcacattgtggaagattgagaggcaggcaatgctttgtttgggagggaagaatttgaatggaaagtgaatgaaaagaaaaaaagaaaaacatgagaaaagttgaaaaagattggggggggggggtttgtgaatttattgctggcagagagaaaaagatgaatattaggtagaacaagaaatatatatatggtttattatacaaaaaacatttgtacatatatctactattaggtattaattaattaaaatggttgacttgattatttttttnaaaaaaaaaactntaaaaaattaaaacaaaaagggc

SEQ ID NO: 29917 - DNA, 411 bp, Gossypium hirsutum
  Clone ID: LIB3148-032-Q1-K1-D7
cccacgcgtccggtgaaccgaattcgatctataaagttacaattcgaccaccgagcggcacggtggttacggttgaaccggaacagcttgtatttagaagagttggccaaaaactcaacttccttgtaagggttcaaaccatggcagtgaagctctcccctggtggcactagcatgcaagctggttcaatagtttggagtgatgggaagcatgaagttactagtcccttaactgtgaccatgcagcaacctatataactctgtctgtatgttaaattgttagtgtttttgagatttaggattttcggtcaccttgttttttatatagggctttattaagaattttctgtgtaacgaaattatgctggcgtttttctatatcaaaaaaactggtggagttggcttgtaatgc

SEQ ID NO: 29918 - DNA, 298 bp, Gossypium hirsutum
  unsure (1)..(298): unsure at all n locations; Clone ID: LIB3148-032-Q1-K1-D8
cccacgcgtccggcaaactgcttcattcagtttccaagccatacaggtctttcatataacccaaatttgtggtttacttgtaactttgcagtagtgtccaagactagaaaaccaaacatccgaacgtgactcaattaggcaaaaataacgaaaagtccattggctaatgatggattgaattgtccaatactttttcttatgttggcgactattgatgcatggtcttgttttattttattacatattcctctcgnaaaaaaaaaaaaaaaaaaaaaaaagaaaaaaaaaaagggaagac

SEQ ID NO: 29919 - DNA, 364 bp, Gossypium hirsutum
  unsure (1)..(364): unsure at all n locations; Clone ID: LIB3148-032-Q1-K1-D9
cccacgcgttcagggacgcgtgggtttggtttagaagactgtttagaagggattatgtgctttgaaaccctaaatcctacccataagaacacggctcttcgatgactaggacgacgactagttgttgggatcggattatgccactactggtgttgctcacatctctgtgattttcgacataatctgtcattttgtcgacccaaagccaggtgctacattgtctataacacccattgattgcacaccacaagatagtgccattgaacttgctcttaagattgccaaaatcaatccttaaagaacatngttctttgacgatagtgttcgtaacatccaagcctgaaaacatgtccgtcttcacact

SEQ ID NO: 29920 - DNA, 290 bp, Gossypium hirsutum
  Clone ID: LIB3148-032-Q1-K1-E1
agatggagtattttattatcataataatagtttgatagactttatcatttatgatataggtggtcttttgcttggttttgcatgttatagtgtgttgccattgatgtctggtaactgatctaaatattgggtgcttgacagaccgtggcatatgtatgggtggtctctagcgctaccttgttttgattaatttactactgtatcttgtcattgacaaaaggtgcccccttggtttttcaaggtggcttgaaacttttgcttatgattttcgttgaagttgcggaattatt

SEQ ID NO: 29921 - DNA, 174 bp, Gossypium hirsutum
  Clone ID: LIB3148-032-Q1-K1-E10
tatttttagttgattgagtcagtaaatattatttattaatatttacgagactattatagtattatgctggattatggtctaataattttagtcatgtggaaagctagtcaatgtacaaatgtatcagttcaaaagttagtggttctggaaattgaggtatcagaacctcgtttt

SEQ ID NO: 29922 - DNA, 345 bp, Gossypium hirsutum
  unsure (1)..(345): unsure at all n locations; Clone ID: LIB3148-032-Q1-K1-E11
agttgaactatcgcatgattattatttacattgccaaatataaccttttatcccccccccacccaaagaagtttattgttggccatgtaatagaaattcttgcctacattattattctttggtgttaaaggcttctctataaatagggttgataagatcatcaaatggtatatcccataacacacaatcatgcatgaatatgcttgttgattcttaatttcttttccaccttggaattcaaaanaaaaaaaaagaacctactaaaacaaacaaaaaaaaaataaaaggaaaaaaaaaaaaaaaaaaatataaaatagaaaaaacaaaaaagactattaaaataaa

SEQ ID NO: 29923 - DNA, 369 bp, Gossypium hirsutum
  Clone ID: LIB3148-032-Q1-K1-E12
catgaagaaagctaaagagattaccgttctttgtgatgctaaagtttctcttatcatctttgctagttctgggaagatgcatgaatattgcagcccttctactaagttgattgatattttggaccaatatcagaaaacttctgggaaaaagttatgggatgctaaacatgagaatctcagcaatgaaatagatagaatcaagaaagagaatgatagcatgcagattgagctcaggcatttgaaaagggaggatatcacatctttgccttacaaggagcttattgctttagaagatgccctcgagaattgccttacctgtgtccctgccaaacagattgatgttcttgatattgcaaagaaaaataccaa

SEQ ID NO: 29924 - DNA, 370 bp, Gossypium hirsutum
  Clone ID: LIB3148-032-Q1-K1-E2
tcctgtcccgagagcaatacctgctgctgcatatacgagtactataactactgctttgctgggggatgctgaccactcgaggctgccacttgctgcgaagatcgctacagctgctgccctcatgactaccctgtgtgcaacatacatgaaggcacctgcttgatgagcaagggcaatcctttggcaatgaaggcactgaagcgcactccggctaaaccgttctgggcacattgaaagcctgggatagtaatgcagtagatgatgggttacaagggagaagatgaaagcttgacagtgcttaacaatcttcttgggtttaatatcggtagatggatggggacaattatgtatatagaatcctatttattac

SEQ ID NO: 29925 - DNA, 158 bp, Gossypium hirsutum
  unsure (1)..(158): unsure at all n locations; Clone ID: LIB3148-032-Q1-K1-E3
ggccaaagttgtcatttgcgcttggctccaaatgattggtttggagaaggtggtgttagttgttgtaatatgtttttttgtttcttttgaactttgcttttttgcattgtaatttgaagaagatactaatattttttagtgaagtagtttttggncgt

SEQ ID NO: 29926 - DNA, 148 bp, Gossypium hirsutum
  Clone ID: LIB3148-032-Q1-K1-E4
tgttgaagtacttgagcaaaatgtatcggtcactatgaaaaatattgaataacctttacatatccttggcaaggatgtgcaaatcaaatgaaatgtttatttacattaattgagtgaaaaataagataaagcgatggtcagtccgttt

SEQ ID NO: 29927 - DNA, 411 bp, Gossypium hirsutum
  Clone ID: LIB3148-032-Q1-K1-E5
cccacgcgtccgcccacgcgtccgcaaaaatctcaaaaaaaaatttaacaagaagagattatattcaaaaagaaaaaaagaagaggaaaatggaggcaccaaagacgattctgtatgaaatggaagcaataagctaaagatctgtttgtgagagtcggaaggtactagaacgaagctatattcacttttacgaaatctgtttgatgttattgaggaagtacagatagcacggttagaaattaggggtctgattcttactagcttccgttctccatctggtacactattatctcctctttattatgtttcttaaatttgtggttgggatgcccggggctgaaattcttgctttgagaatttgacttttgattcttttctttatgaaaacaaagtagagatgatggatgaata

SEQ ID NO: 29928 - DNA, 411 bp, Gossypium hirsutum
  Clone ID: LIB3148-032-Q1-K1-E6
cctacttttttccttaaccttttaaaaaacataaaagatggtaaaggttccttttgttgtgttctcattggctttggtgctctcaatccaattcgtagtgggacaagatgaggaggctatagatgaggaagtatcccgggaagccgatgatgtacttttgagttcaggggcaactaatctcgttgaaaaccttaaaagctctgctggagataattcccagagtgtggatgggccaacttctggcttagctgatgagattgcagcttctccagaatcggaagtagaagttgctattgaatctgccggtgggatgaagcgtaaaatggcataataatcccaatgatgtttagaaagaaacatcagacccaaattttttaaagaggtggctaaagttcgtcaaaataataaaaa

SEQ ID NO: 29929 - DNA, 353 bp, Gossypium hirsutum
  Clone ID: LIB3148-032-Q1-K1-E7
atgattataaacaagggaatacttcagacaattggggtagatgtcggcaaaggtcttgacattcctctgtaaagattcaacccaaggaaacaagcacgatagctctatctaaatggcgctttattgtgaaccaagtaaacatatttttgttgtattaaaaatcacaacacgttatgtattccatatcttaattctgtaacacttttgactatcatatgaagtacttcacgtttgccgtgttcaagcttcaaattctcagttttgaaagtacaatctaatttttgaaatcataagcttttgacatgtttgtaaaaaaaaaataaataaaattttaactaaaataaattcggctc

SEQ ID NO: 29930 - DNA, 207 bp, Gossypium hirsutum
  Clone ID: LIB3148-032-Q1-K1-E8
tcgattctcttttacgaaatttcctttttcattttggaggcttctactacaacatagggatggttgttcaggaggcttacgaacatatacacaaaggttttgataataaggcgggcatgacagaataacagctggttgtgttcagtttgcatggcgagttggtggatggctgttcttagaactctgatatgttcaagattgaaaatt

SEQ ID NO: 29931 - DNA, 410 bp, Gossypium hirsutum
  Clone ID: LIB3148-032-Q1-K1-E9
gttggggttttggttggttcctgcaagacatgtgaatgctgcgagcaggatctggagaactactgccctcgtataatatttacctacaactcttacaatccagacgggacaaaaaattatggtggttattcggatatgattgtggttgaccagcgctatgtgctacggtttcctgataacttgccactggatgcgggtgcaccattgttatgtgcagggatcacagtgtacagccctatgaagtattatggaatgaccgaggcaggcaagcatctaggtgtttctggacttggtgggcttggtcatgttgctgtgaagatcggtaaggcctttggattgaaagtcactgccattagtagctccccacagaaggagtctgaagcaatcaatagacttggtgctgactcatt

SEQ ID NO: 29932 - DNA, 372 bp, Gossypium hirsutum
  unsure (1)..(372): unsure at all n locations; Clone ID: LIB3148-032-Q1-K1-F1
aaagccaccccctggccctagaatgcctgatggaacgaggggattcacaatgggacgcggacagccactagtttctaggcaaagctagtgagctgtgcttttgcgtctggtataatcttgcctaacgtgttggttattgtgattgtggaattgtacagatgtggaaagctggaagcgggttttctattatatggtttcaaaggctaagttttgaagcccaaatatggattatttacttagtgatgctgttagcttatatttaagaactggcatcgtgataaaaataccacctacatggttcttgtttttggattatgttcatatcaattaaatttttagcgaaaataatttggctctttaacaaannanaaa

SEQ ID NO: 29933 - DNA, 358 bp, Gossypium hirsutum
  Clone ID: LIB3148-032-Q1-K1-F10
gccacgcgtccgttgattctaagaataaatttaccttgcgtgatcaatagtaatggagagagccaccctcgcgaatgatgcactcataaccatgttctatgcctctacttaaggcatgctataggtcgtcttcaggccgtgcttcaaagtgatcagtgagttgcctttggtgaatcataaccgtggttatattggagagcttgacaatgtcgatgatcacagatctgtaaaaattgtggttgaattgaactgaaggatgaacaactgtggggtgattatgcctcgatgcgatgtctgagtttaacagagtgaatggtggactgctaagctactttctttcagacagttcgggatacat

SEQ ID NO: 29934 - DNA, 127 bp, Gossypium hirsutum
  Clone ID: LIB3148-032-Q1-K1-F11
tggaattggatcctgctaatgaccatgctatgaaggccattcgtcgattggaaccattggctgcagagaaaagattcaatttgctgaaagaggatgtaatgattaatatcctttgcttttcattttc

SEQ ID NO: 29935 - DNA, 420 bp, Gossypium hirsutum
  Clone ID: LIB3148-032-Q1-K1-F12
cccacgcgtccgcaatttgggcacaatctatgtggattgtggtaaactggatcaagctgcaacctgctatatgaatgcccttgaaatcaagcacacgagagctcaccaagggttagcacgcgtatactttttaagaaatcagcggaaagctgcatacgacgagatgtccaaactaatagagaaggcacataataatgcctcagcatatgaaaagcgatctgaatattgcgatcgtgagacagcaaagaatgatctcaacatggcaacgaaactggatccacttagaacttatccatacagatacagggctgctgtgttaatggatgaccaaaaggaaaccgaagcagttgaagagctttcaaaagccatagctttcaagcctgacttgcaaatgctgcatcttcgagcggcattttacga

SEQ ID NO: 29936 - DNA, 392 bp, Gossypium hirsutum
  Clone ID: LIB3148-032-Q1-K1-F2
cttcttcttcatcatcaatatcatcatgttgagctactttgcttttccattggccccttgaaagcgtcataagacagaaagcgatatcttcttcagttgtagtgtcagagagggaactcgccggttcaagttcatcccaagtccgtctggatcgtttctgagttgggtacttggacgactcggtctcactttctttgctttgaacaacaactgagtctgcatcaaacaaatttatgatctacataccgaatgcttctctttgggtgctctctaagaccataaaactgccctttttcttccgaggaagacgatgaatatgaatgtgaagcagattcttgttcaacgttgggaggaattggaagattcaacatgttagacctcaattgagtttc

SEQ ID NO: 29937 - DNA, 228 bp, Gossypium hirsutum
  Clone ID: LIB3148-032-Q1-K1-F3
caaaaaaaaaaaaaaaaataaaaaaaaaatttaatttttttacaactcacaaaaaccaaagggaagtcctcattcgtacaaaagccttctcctcttttaatgttacgtaaattaaattacctgtccgttcttttacaaccacaatactgctaaaaccatgacgttacccatactaaatcgatttggcctcaatccctttactttggactgcgatttactaaaaatgaa

SEQ ID NO: 29938 - DNA, 379 bp, Gossypium hirsutum
  Clone ID: LIB3148-032-Q1-K1-F4
cccacgcgtccgcccacgcgtccggtctggagttacatgctgcttgcggttccctggtcagctcaactccgatctcaggaaacttgccgtgaatctcatcccctttcctcgtcttcactttttcatggtgggttttgctccactcacttctaggggatctcaacagtaccgagctctaacagtacctgagctcacccagcaaatgtgggacgcaaagaacatgatgtgtgctgctgatcctcgtcacggtcgatacttgactgcatctgctatgttccgtggtaaaatgagcaccaaggaagtggatgagcagatgttgaatgtccagaacaagaactcctcatactttgttgagtggatcccgaacaatgtgaaatcg

SEQ ID NO: 29939 - DNA, 413 bp, Gossypium hirsutum
  Clone ID: LIB3148-032-Q1-K1-F5
gccaagacgttgtccaagacatgcagtgccggcgacaacgcggagcaaccgttcgatgccacgcaaaacactttcgacaacttctacttcaacgcattgataaggaaaagtggggttcttttctccgatcaagtactgtatacgacgccgagaacaagaaacattgtgtatggttacgccatgaaccaagctatgtttttctttgatttccagcaggcaatggtgaaaatggggaaggttgatgttaaggaaggatctaatggggaagttcgacagaattgccgcaaaattaattgaagtttattatactagtttgagttctacagcttgattttctgtaatctaaattgtatcaaccacaaattctgccatttctatgtttatggttacataaaaattaaataatccataaa

SEQ ID NO: 29940 - DNA, 396 bp, Gossypium hirsutum
  Clone ID: LIB3148-032-Q1-K1-F6
gcaagtggagccattgccggacacctactcgcaacatcaattgcaattctcggaggagcatttcttgccaactatatttctgagaaactggttggttatttgggcggagcgctttttcttgtgtttgcagttgccacattttttggagttttctgattgattatacagaacatagagcaaatgtcgggctaatttccggcgcaaatgttgtgatacaatgctgagaaaacaattagggtaaaatgttgcagttaggggtattaagaggctgccatgttagttcttagaatggtttattgtatttggaattatatgtggacttagatgatttctttgtagcttttagctaaatattgaagatatgattgacatgtttttgctacaattttcttcctt

SEQ ID NO: 29941 - DNA, 195 bp, Gossypium hirsutum
  Clone ID: LIB3148-032-Q1-K1-F7
cccacgcgtccgtgtttttcctgtcttttgttatccttgggagcagctgataagaagcttttgttcaagtgagccaataatggccgaagtggaagaaacactatttattgttggggaaaggaacttggttggtctatgatttgtgttcctcatgctcactttttctgttgctaaaaaaactcatttttcttgttg

SEQ ID NO: 29942 - DNA, 336 bp, Gossypium hirsutum
  Clone ID: LIB3148-032-Q1-K1-F8
aagggattgaaaccagtgtgtgtgaattatatgatgaatggagttggtgaagaaggaacagtggtggttcttcctagtaatgaaaaagatggtgggaataatgggaagatggtcaccatcaccttgcctcaacatctattgctaaagcttaacaatagacttcaaattgattggaatattgttatttaatttaaatatttttctcatttcatttcttgtaatgcatacgtgggtgagttatcgtgtctgtaagagaataatgaatgtatggtggctctgttgttatatatgaataacattctcattatcaaatgaaaagcctaaacaataaacttc

SEQ ID NO: 29943 - DNA, 141 bp, Gossypium hirsutum
  Clone ID: LIB3148-032-Q1-K1-F9
acggccacgcgtccgggtagtttaggatgaaatttatctataatttgggaggatgtggatgtaacttttgactctattttaacctaaatttggttatcattatttggtcttatatttaggttttgaatcaatgaagtgttt

SEQ ID NO: 29944 - DNA, 420 bp, Gossypium hirsutum
  Clone ID: LIB3148-032-Q1-K1-G1
agcagcagctccagctcttcaagcgacgaggaagaaggtgaaggagaagagaagaagaagaagaaaaagaaggagaagaaggggctgaaagaaaagattgaagagaagttagaaggagaaaagaaagaagaggacacctcagttccagtagagaagtgcgatgagccagtagtccagccagagacgccagagaagaaaggtttcctcgagaagatcaaggagaaactccctggacaacacaagaaagctgaagaggccagtagcccagctccagccccagcagctgagccccatcacgaaagggagtcaaaggaaaagaaaggaattctggagaagatcaaggagaagcttcctggtaaacactccaaatcagatgaagaaaaaaaaaaagcttgagattcaagttcacataaaaatact

SEQ ID NO: 29945 - DNA, 373 bp, Gossypium hirsutum
  Clone ID: LIB3148-032-Q1-K1-G10
aacacacgtccgggtggttatagtcttagttacatacctggttccgctccatcatgaggaccggatttcagaatggctgccgctaccttgcctgttcttggatcattggttggggcctccattggttctttgttttcttacatgctacaataagctacatatatgaaaaatgaacatgtgaacgaatgttatattttattctttttgaaagaaacatgtgatgaatactgaaaaaaaaattgaataaaatggatctttgaataaaaaaagagcaaaatattaattttaataaatattaaacatgcttttgtaataaataatttttctatcactagctaataattaattgtttattcccttaatataaaatgca

SEQ ID NO: 29946 - DNA, 365 bp, Gossypium hirsutum
  unsure (1)..(365): unsure at all n locations; Clone ID: LIB3148-032-Q1-K1-G11
aataaacacagctcgaagtcggtcatatattataagtggccgcggttcttgttggaggggtgcttgagtgaactgtgctcgaactgggagatcaaaggttgcctcctatgatgaaatttttgagaggtaagangncggacttccgcgtggatggcgggggttgtggccacccattaagagaagcgtcaatagagagaaaaaagaaaatattgttttagatgaaaagagaaaaagcatcaattaagatataatatatgtagttatattttgatgattttagctttaaaaaaatatgataccattgcttattttttttaaaaaaaatatacacattctattaataaaatattaatcattattttatt

SEQ ID NO: 29947 - DNA, 419 bp, Gossypium hirsutum
  Clone ID: LIB3148-032-Q1-K1-G2
caataattaagggccattttcttcctcgttctctcaaataatttttttttacattgtccctttgatttttcttgtttaactaatttatctcttgaatttttcatatagctttcaatctaacatagttggttgcttgttttccgagattcaaccatgtctcggggtaaccagagagaacgagatcgagaaagggcacaagccagagcagcccacaaagccaaaggttccaaagacgatgggttaacccctgagcaacggcgtgaaagagatgcaaaggcattgcaagataagttggccaagaaagcggctcaagcgacggttgaatccgagcggcgaagtgggattaaaaacaagaaataacagtgggaagtgattatagattgcaggataaaagagagagtgtgattatattaattggg

SEQ ID NO: 29948 - DNA, 351 bp, Gossypium hirsutum
  Clone ID: LIB3148-032-Q1-K1-G3
gctcttcgagcctggaggaatttcagccccaaaatctttcctcaactttgatttcaacgaagaaaggagaagaaatccatggcctgttcgcacggttcggttgtacggagaagatgaccctggtgacgtggaggccgcacgcggggatctcacgtgggaagccaaccctctggccattccagtgtattccagaagcttctggcgctctcaggctgctgagcttctttttgggtcctgttgggcctcgggtttgggctatttgtaaactgggttagggatgtgggtttagtatttggattttgaaaattgtaagtggactttgtggactattttagtcatggactttatttt

SEQ ID NO: 29949 - DNA, 412 bp, Gossypium hirsutum
  Clone ID: LIB3148-032-Q1-K1-G4
gtcgtgctgcaacgctagatacgtctgttatggcaacatctctccatgatttcatcgaagttgtctttcagaacaatgaaaacaccatgcaagcttggcatcttgatggttacgatttttgggtcgttgggtttggctcggggcaatggacacctgacaagagaaagagctacaatctagtcgatgctcttactagacacactactcaggtgtatccgaattcttggaccgccatattggtctccttggacaaccaaagtatgtggaatgtgcgatctacgttatgggacaggcaatatctcggacaacaattctacctcagagtctggaatccggttcgcagccttgctaacgaatacgacattccctctaatgtcctactctgcggccaagccgtcgggcgtcacccgta

SEQ ID NO: 29950 - DNA, 263 bp, Gossypium hirsutum
  Clone ID: LIB3148-032-Q1-K1-G5
accacgcgttcgtataagcccaattttacctggccaacgactaaataaataagagcaaatgcctaatcccaaagccgggaacaacaacctacaggcccaaactataacaccggcctagcccggaaatgtaacactttctgaggaaccctagggttacacctctgcaccgcttcgctcacccacgtgacgtttggctactcttaaacaacctgtggcccattcccatgactaccaaagacctgtgaataggacaaaaggaaaca

SEQ ID NO: 29951 - DNA, 408 bp, Gossypium hirsutum
  Clone ID: LIB3148-032-Q1-K1-G6
cccacgcgtccgaacctggagttttcttctactatgacttttctccgatcaagggcacttttaaggaggagcatagttcatttttgcacttcatcaccaatatctgtgctgtaatcggaggtatcttcacagtcgcagggataattgacacgttcgtataccatggtcaaagaaggatgaagaaaaagatggaaatcggaaaattcagataattttgtctgcacatttattccgacacaaccttggttttcgacacgatagtttttcttggctttcaacacgatagttttcttttccaatggttcggatgctaaatagttggtgctttcatagggatccatccatgctgctgttttattccgaagagtgtatgacattgggcctttaaatcattgctgaaattgtctg

SEQ ID NO: 29952 - DNA, 405 bp, Gossypium hirsutum
  unsure (1)..(405): unsure at all n locations; Clone ID: LIB3148-032-Q1-K1-G7
ctggtttaggcgatggcttcaaagcggatcttgaaggagctcaaggatctacagaaagatcctcctacctcttgcagtgcaggccctgttgctgaagacatgtttcattggcaagcgactattatgggtccacctgacagtccatatgccggtggagtgtttctagtcaccattcatttccctccggactatccatttaagccacccaaggttgcattcaggacaaaggtctttcaccctaatattaacagcaatggcagcatttgcctcgatattttgaaggagcagtggagccctgccctcaccatatccaaggtattgctctcaatctgctcactnntgacggacccaaatcccgatgatcccttggtgccaaagattgcccacatgtacaagaccgacagg

SEQ ID NO: 29953 - DNA, 372 bp, Gossypium hirsutum
  Clone ID: LIB3148-032-Q1-K1-G8
cggtgtggcatctatgggtgtgatgaggtctgaattggtgatgaaatcgattgtacccgttgttatggctggtgtcttgggtatttacgggttgattattgctgtcattattagtaccgggatcaatcctaacgcaaaatcgtattaccttttcgatggttacgcccatctttcatctggtcttgcttgtggccttgccggtctttctgctggaatggctattggaattgttggtgatgctggtgtcagaactaatgcacaacaaccaaaactttttgttggaatgatacttatcctcatctctgtcgaaactgtggctctttacagccttattgtcggcatcatattgaattcccaggctggccaatctac

SEQ ID NO: 29954 - DNA, 368 bp, Gossypium hirsutum
  Clone ID: LIB3148-032-Q1-K1-G9
gattttgcttggcaaacagtgctgattcgtatttgggcaacccgaccaacacgtctggggtgttcccaaacatgtagaaattcgcagatacatgcgaaatacctgtcgatcgcattacaaagaaggaagatctgtgagaagcgatttgcaaaatgttcgaaacatccgtacctaacttcttagacgtgatcatcccgcatcaagaacatgtcttgcctataatccccacaggagggactttcaaagatgtgattactgagggtgatggaagaacaaaatattaattttaataaacatcaaacattttttagtaataatggatttacccgccctagttaataagcattgcttattttttgaacaaatta

SEQ ID NO: 29955 - DNA, 239 bp, Gossypium hirsutum
  Clone ID: LIB3148-032-Q1-K1-H1
atcaaatcgagatccccgcgaaaatgaacgacggagatgtttccaggcagattcagcagatggggagattcatccgccaagaagcagaggacaaggctaacgagatctgtgttttagcggaagaggaattcaacatcgagaagctccagttggtggaggcagagaagaataagatcaggcaagagtacgacaaaaaggacaagtaagtcgacgctcgtaggatgattgactattggctg

SEQ ID NO: 29956 - DNA, 414 bp, Gossypium hirsutum
  unsure (1)..(414): unsure at all n locations; Clone ID: LIB3148-032-Q1-K1-H10
cccacgcgtccgacgatactgagagtgttcctccaatagcaattttggctggtcttcactatgcagccataactgacattgcatggtcatatgatgcacgatatttagcattgtcatctcaagatggttactgtacattggtagaatttgagaaggaagaacagggagtacccattcctctagcagaacctaaaataatgaacgttgagggtacgagctctattgtccagaaacctgatgacgtggtgattgaagttaatgatccagtcacggtagataacaggacggtagaatgtgcagaaaagagagaagggaaacaggcatcgccaagtttggcaaatactcccatcgtaaataagccagccaagaggcgtatcactccgatggcaattgatccatgatatngtcatgtta

SEQ ID NO: 29957 - DNA, 201 bp, Gossypium hirsutum
  Clone ID: LIB3148-032-Q1-K1-H11
gccacgcgttcgaatactctgggagtgttttttcaatcacagtcttgtctagccgggacggggctgggataactgagatagaatgatcatatcatgcacgctggtgggcattgggatctcaagacgtgtactgaacactgttaaaattgtggaatgaggaacaggcaagacccagccttgaatcaagaatgacgaaacttc

SEQ ID NO: 29958 - DNA, 216 bp, Gossypium hirsutum
  Clone ID: LIB3148-032-Q1-K1-H2
attacttggtaccataagaccccataactttgtaatgaaagtagatgaaatttcattatgtaatgtaggatccccattataataacccatttgtagccacttttaactgtgtgttaaaaaaaaaaaaaaaaaaaaaaaaaaaaaaaaaaaaaaaaaaaaaaagagggaaggctacttacaaaaattaaaatctgtattactagggggtgccacttt

SEQ ID NO: 29959 - DNA, 401 bp, Gossypium hirsutum
  Clone ID: LIB3148-032-Q1-K1-H3
gtgtttttttttcccttttctcagagaaaaaaattattacaacaatgggtatttgttcatcttctcaatacacgacaaaggccgacaatcgccttacctggccgccgcccaccaccaccaaaataatatacccagatggaaaccttcaacaactaattcaacccatcaaagccagcgttgttctgtcccagaacccgagttgtttcctttgcaactcggagctcatgtatgtgaactcgtgcctgtctcaagtacccggtgacgaacaacttcagctggaccaaatctattttctaatgccactgtctatgtctcaagcaccactttcacttgaagaattatgttcgctcgccattaaagctggtgctgcattatctcgtttgaatgacgcttattctcac

SEQ ID NO: 29960 - DNA, 399 bp, Gossypium hirsutum
  Clone ID: LIB3148-032-Q1-K1-H4
gcggatcttcctccttcctcagtgttatgctgagaaacaagctcttggggaagtgagtgtagagcttttggacacccaagtgaacccggctgtgtgggaaattagtggtcatatggtgttgaaaaggaggaaggactatgatgaggcgtccgacgaaaatgcttggaggttacttgcagaggtatctctctctgacgagaggtttgatgaagtgaatgcacttatctttgaagccattggcggtggcaaagatgcaattgaaaatgttgaggagcctgataccaaagctcaatctattgaaaaagagaatggcatcaccgaaacttcccaccatgctatggtggctgggacacaacaatgccttgttctgcagtagcatttcattaatagaaccctgta

SEQ ID NO: 29961 - DNA, 409 bp, Gossypium hirsutum
  Clone ID: LIB3148-032-Q1-K1-H5
aagttttcaaaaagatcctataaattatatcaatttctctattgtttttcaaagttgcagcagatgattttcaaaatcagccattgctgatccaagctaggatgtgctttaacatatatgtatgttatatgtggtgtggttgaattgtcggatccattggtgcattcatcaagcaagtcaagaggcaaggagaaattgattagaagcgtcaatgtgagtgttctggtgtttggcttctagtaagtgtgatttcagatgttaatcaaaggcttaagaagtcttaaatgagattaaaggctttggtgtaagttttttttaccttttcttgtgttgagtaaagtatgcctatgtgatgctttgttgatgatgtgtaagtgtgtaaacttgtaagtaaatgtgatttaatata

SEQ ID NO: 29962 - DNA, 388 bp, Gossypium hirsutum
  Clone ID: LIB3148-032-Q1-K1-H6
acgatgcgaaaaagatgctataagagatataaaggacggtatcgtggtgacaagaagcgggggatgtttgtgaaaagctgtccaagatggtccgagctaggacgtgctgacacatataacattgacctatgtggagcggttgaatcggatctgactgacacgcattcatggggtaactcacatatcgtggataaacaaggacattgcaaccacactcattgcttgaatccggtgtgattcccaaaattacctattatgacaaggattatcacaggcggtttcgaatgtaagttaactgtatggcgtgcaatttttcaataccgtatgaagaaacaaaagatatgaaacacatatgaatcttctgataggcgccttagcactgaccacc

SEQ ID NO: 29963 - DNA, 344 bp, Gossypium hirsutum
  Clone ID: LIB3148-032-Q1-K1-H7
cccacgcgtccgtgatgcaagttgcagaatacagtgtggctaaaagggttttgcgtgaacatgttcgtgaatagcttggagtgcgcaatgaccatttactctttgccttaataaatagtgtttcacgaggaaaagggcaggatctctttctacgcgctttctacgaggccttacaactgatcaagcaaaagaaaatgcaggtgccaccattgcatgcagtaattgtgggaagtgacatgagtgctcatacgaaacttgaaatggaattacgagattatgttacacagaagaaaattcaagatcgtgttcactttgtgaacaaaactttgacagtagcttcatat

SEQ ID NO: 29964 - DNA, 404 bp, Gossypium hirsutum
  Clone ID: LIB3148-032-Q1-K1-H8
gaaggtgaaagaagccttggacaaagctaatattatcatgaaagatccatccaccacccccgaatacggcgagatcctctggacttgcgtcaagaacttcgaggacatcatcgactcggatcagaaagccatggaagccatcaccgagcacaacgccaaccacatcatcgaagaactctccgccgattccgcgtctgtgtctccctgcgaggacgagttggaagcggctaacatcgagtcgccggtgagggatatcgttaagtcgattcacaagacgattcgcatcaatttggccatcgctgctatagaggtccatttttgaaggcctgggaaattattattaatagggtattcctgggtcaatgtgaaagcggaatcatttggtgggaaaatatgatgacttt

SEQ ID NO: 29965 - DNA, 412 bp, Gossypium hirsutum
  Clone ID: LIB3148-032-Q1-K1-H9
gggaacttgagggaaggaccactactactgttgatggtgcagaaattctggatcaagttgtcacgacaagtcgtggagaaatccgtcgtatacagagtcccaatacatcttcagtcttcgaaaaggagtatagcccccagattaggcaactgagccccaacttaactgaaaaagggcttgaattaagtctaactcctagtcctgctgcatctacacttggacatagcagtcgtgattcatcatcaagctaaaatatacatgcatacatacacaactaaggaaaagcatgctctccatttctgattctgatctttagaagtattgtacttagtttatcacgagactaaaggtgccttactctggttctgtgcaatgaatgttgctatcaaggtaaaagcaaagcaagccacca

SEQ ID NO: 29966 - DNA, 386 bp, Gossypium hirsutum
  Clone ID: LIB3148-033-Q1-K1-A10
gctgttcataatgctgggttccatgagcaccaacctgtttggcgacctcaacgaggccttgctgagcgtgctgtaactgtacttcgagcatggctatttgaacactttctacacccttatccaactgacacagacaagcttatgttggctaaacaaactggtctatcacggagccaggtgtcgaattggtttataaatgcgagagtgagactttggaagccaatggtagaggaaatacacatgctcgaacaagctcaaaaaaattcgcaaaaggaggctagaaatccgaacaagtcaagtgaccatttgtcttccgcaaactctatcgcacccgaaaacccatctacctctttttaaagggctcaagataccccatcaaagcgcac

SEQ ID NO: 29967 - DNA, 216 bp, Gossypium hirsutum
  unsure (1)..(216): unsure at all n locations; Clone ID: LIB3148-033-Q1-K1-A11
cccacgcgtccgcttccaccaaggcactttccgaggtggctactaggtggaggaaccgtacagccatctagatttttatgtttaatatatgttttatatataaatttattttcacttctcctgtaaatggtccaggccatctgtttgtaactacagcttagcttagcctatatgtttaaatgttggagtttcttgggaaaaaaaaaannnnnnaaa

SEQ ID NO: 29968 - DNA, 278 bp, Gossypium hirsutum
  unsure (1)..(278): unsure at all n locations; Clone ID: LIB3148-033-Q1-K1-A12
ggttcattaggtgttttgcttcttgtatccatggttgcttggtttgtgtatgtgtgtgtgtgtatagtgaaatgaaattattttaactagctttgttgtgttactgccatgttatataactgatgaatgaatgaaggaaagctctatttgccttttgctttnnaaaaaaaaaaaaaaaaaaaaaaaaaaaaaataaaaaaaaaaaattaaatttataaaaaaatataaaaaaaaaaataattaaaaaaaaaaaaantggggcggccgttttaaaggat

SEQ ID NO: 29969 - DNA, 325 bp, Gossypium hirsutum
  Clone ID: LIB3148-033-Q1-K1-A2
aaaaaaaaaaaaaaaaaaaaataaaaaaaaaattttatattaaaaaaaaaaaaaaaaaaaaaaaaaggagggggtataaaataaaaaaagaggatgaaaaaaaaaaaataaataaaaataaataataaatataaatggggcggccgttttaaaggttccaacttttttttccctttcttcgcaagaaatatttttttttttgggccccctaaattcatttctttggccgtctttttacaccttttggattggaaaaaccctggggttccccaatttattccctttgaaaaaattccccttttccccacttggggtaataacaaaa

SEQ ID NO: 29970 - DNA, 268 bp, Gossypium hirsutum
  unsure (1)..(268): unsure at all n locations; Clone ID: LIB3148-033-Q1-K1-A3
tttagtttttggtttactttcttatttcgatcttttgaatcggtgttaatccagcagtggatggtttttagatttttaaattgttgagaacagtttactgatttctatagaatgggtatttttacaaaaaaaaaaaaaaaaaaaaaaaaaaaaaaaaaaaaaaaaaaaaaaaaaaaaaaaaaaaaaaaaaaataaaaataaaaaaaaaaaaaaaaannanaaaanaattgaaaaattttataaatgagaatgctnattaaagaaaatt

SEQ ID NO: 29971 - DNA, 338 bp, Gossypium hirsutum
  Clone ID: LIB3148-033-Q1-K1-A4
cccacgcgtccgtaaggtgaaaggtccaatggactacatacctgagctgtttgatgagcagaaggatcaagttgcaatagaacaaatactacgggttgttttcctagatcctgagcgtccttgtcctgctctggaaaaattgaagtgtcaattagatgaggctgatgctgcgctggaggcacgcaaaaagcctccagaggattcaggtccaaggatcattggggaaggactcgtcatagatgaatggaaagaacgaagggagagatacctagctcgacagcaggttgaaggagtagactcagcttaaagtgggcattctcatcattggcttatatcat

SEQ ID NO: 29972 - DNA, 160 bp, Gossypium hirsutum
  Clone ID: LIB3148-033-Q1-K1-A5
ctgatacgaacaactacacgctgatctttgacctctggctccaaggcaagtattctctcaagggtggtcgtcaacttgcaggagccgacaatacatgctcgtctctgcaagctaaacaacgtccaataatgagtgaaaatctacatatgttggacgaaat

SEQ ID NO: 29973 - DNA, 455 bp, Gossypium hirsutum
  Clone ID: LIB3148-033-Q1-K1-A6
cccacgcgtccgttctatcgatattttttcttgtatcatcaggagttttaaaacataaaagtggagtgaagtatatgccttcttttcaaaaaaaaaaaaaaaaaaaaaaaaaaaaaaaaaaaaaaaaaaaaaaaaaaaaaaaaaaaaaaaaaaaaaaaaaaaaaaaaaaaaaaaaaaaaaaaaaaaaaaaaaaaaaaaaaaaaaaataaaaaagaaaacagaagatagaaaaaaaaataaaaaaaaaaaaaaaaaggggggggccggttaaaaaagtcaaaagtacacctcccggggttgacaaagtttaaatttattatagtggtcccaaagttaaaaccatcgggaccggtttccaatatcataaggatataaaacccctgttccccccaaaaaaaaagatgttaaacaaaaatggttttcccacggggggtaagatcaaaaaaccccccccc

SEQ ID NO: 29974 - DNA, 441 bp, Gossypium hirsutum
  Clone ID: LIB3148-033-Q1-K1-A7
ctaaaacttatttctggtttctttttatggaattaaaaaaaaaaaaaaaaaaaaaaaaaagaaaaggaaaaaaaaaaaagagaaaaaaaaaaaaaaaaaaaaaaaaaaaaaaaaaaaaaaaaaaaaaaaaaaaaaaaaaaaaaaaaaaaaaaaaaaaaaaaaaaaaaaaaaaaaaaaaaaaaaaaaaaaaaggggggggccctttaaaaaaaaaaaaatttttcacccggggttgaaaaaataaaatttttttttttggggcccaaaaaaaaaaaacaagggggccttttaaaaaaaaccgaaaggggaaaaaacctgggtatccaaaaataaaagcctttgaaaaaaaacccctttttccaagggggggtaaaaaaaaaaaggcccaccaaaaagctctctaaaaaaattgtggcaccctttatgggaaaaggaaccccc

SEQ ID NO: 29975 - DNA, 241 bp, Gossypium hirsutum
  Clone ID: LIB3148-033-Q1-K1-A8
gcgaattcgcgttttgttagttcgtgagtgaatcaggtaataaaaggaaaaaaaacgatgggtgtgttcacatttgtttgcaggagcaaaggcggtgagtggtctgccaagcagttggagggagagattgagagctctgctgcttccacttacgagctccagcggaaacttgtccaggccgccaccgcctgcgactcctctggtggtgtcaccttctctttctctgtcgttacccctaatt

SEQ ID NO: 29976 - DNA, 402 bp, Gossypium hirsutum
  Clone ID: LIB3148-033-Q1-K1-A9
cccacgcgtccgcagttgaaattgttctgtggcatggattatcccgataacccaccgagcgtgaggtttcaaacccggataaatatgacctgtgtcaatcccgaaaccaaagtggttgaaccaagccttttccccatgcttgctaattggcgaagggagtatacaatggaggatatattgactcagctgaagaaagaaatgatatctccacaaaaccggaaacttactcagcctcctgaaggcaatgatgaggcgaggattgatcaaaagggtttagtggtgaagtgttgcatcttttaaatcttaattgtatggaacataatgtacataatatatatatacacagataattcctacaactgccttagctcaatcatatatataatataatgcttgtgtatg

SEQ ID NO: 29977 - DNA, 374 bp, Gossypium hirsutum
  Clone ID: LIB3148-033-Q1-K1-B1
taatatccacaacaggataaagatcaacatgcatgcaccttacgaaaatgctagcatcccaacccgtgcatcttcgtcacccttggccgctccaggtcctacaccaaccctttcggtgtccaccagtacttcaaatacaggttcacctgccgcaacccttttcccgatatgatgtgatagtcaaatacggacaaagaaaaatatgttaatagtccgttacttggtaagaatcaatgactgaccctacttagttttaggtcggaattgccggtaagatgcatgcttttatagagaaccggtacttgttgaaaaactcatatatggacctcatcctatatagaattaaagatggatcatggttgttttgcctctct

SEQ ID NO: 29978 - DNA, 221 bp, Gossypium hirsutum
  Clone ID: LIB3148-033-Q1-K1-B10
cccacgcgtacgttcacatatattaaaaattttatatttaaaaaaaaaaaaataaaaaacatgggaggtgaaatattactatggggaatgatcgatataaaaatataaacaaactgtttattaaaatattgggggggctccatttaatggtttctaacttatgtccccacaaaaaaaaaatacaaatttttatttttttatacccaaaattactttcaagg

SEQ ID NO: 29979 - DNA, 375 bp, Gossypium hirsutum
  Clone ID: LIB3148-033-Q1-K1-B11
cccacgcgtccgggaaggttgtttggcaaggaatgaccgaagaatttacaacgtctacaaatccaattgttagacagtttgcatctgggaatctggatggtccaatcagatattagaggcacatatatacgaaggtttcaaaagatcaaatttggtcattgaatttctttttagctaggattctcaggaaaattaagtgaaaaatgtcaattttgaatgtttggcattgtatttgcaggtcaatgttgttttagatcagtgtagctcttttcttttggggagttggttacctttgctattatctttgcaagtgttctttcctgtaaaagacacaattttctacaacagaaattaaaaaatcctgcactctgagaa

SEQ ID NO: 29980 - DNA, 371 bp, Gossypium hirsutum
  Clone ID: LIB3148-033-Q1-K1-B12
cccacgcgtccggccccttaacatttgccatgtaagagacaataaacagcttggtttttgaaggcgttgagtaaatatggaataacaatgtgatttggaaccaacaaaaaaaaaaaaaaaaaaaaaaaaaaaaaaaaaaaaaaaaaaaaaaaaaaaaaaaaaaaaaaaaaaaaaaaaaaaaaaaaaaaaaaaaaaaaaaaaaaaaaaaaaaaaaaaaaaaaaaaaaaaaaaaaaggggggggccgtttaaaaaaatcaaagttaacctccccgggcttgcaaagaaaaaatttttttttagggcaaccaaaataaaattaatgggccggggtttaaaaaacctggaattggaaaaaccctggggtaaccaa

SEQ ID NO: 29981 - DNA, 173 bp, Gossypium hirsutum
  Clone ID: LIB3148-033-Q1-K1-B2
catttgcttgggcggccgaatgccctcactttacctttttatcaaccctaagacaaaaaactcattatcatttttccactcccctactccgatgttaacttattctcttcgtcactcgctgcaactcctctggttgtgtcacctcctccttctctatcattacccctaattct

SEQ ID NO: 29982 - DNA, 188 bp, Gossypium hirsutum
  Clone ID: LIB3148-033-Q1-K1-B3
taagcaagtatggctaaggacgttgaggttggtggtgagttccaagccaaggactaccatgatcctccaccagctccattagtggacggggaggagttgacaaagtggtcattttatagggctgtaatagccgagtttattgccacgctcttatttttatacatcactgtgttgacagtgatcggata

SEQ ID NO: 29983 - DNA, 482 bp, Gossypium hirsutum
  unsure (1)..(482): unsure at all n locations; Clone ID: LIB3148-033-Q1-K1-B4
tgaattncccgggntcgacgccacgccccgtccgcccacgcccgtccgnngtttccccaaaccaagtgggtttgattgtaaaagggggattcagctttactgggnnttgaagaacgagtgcgtggtgtttcttcttttnggaaaatgcgcggtaattgggaaaattgtgatngnnaaaattnngggtaacctggtctagaagtnnaatggtangnntttagaaagaaagaannngcgtggnngttagcnnagtaatanatgggtggatgaacnnctcacatgnnaatgacgannttatgtgcttagggggcttaganngattagtgngnngcaaaaaactttagtaatannattttgaagaggtggnngtgtaaaacaaaagttcattcaagggcattgccaaatatttgtgacntttttatttcttatgtaccgannaattgannattactgtnaatgataagaatattacttttaaatgc

SEQ ID NO: 29984 - DNA, 331 bp, Gossypium hirsutum
  Clone ID: LIB3148-033-Q1-K1-B5
tcaaactgaggaagataaagaatgatcagctcatggcagaggccaaggcaaagggtgaggtgattagcacaaagaggcagcctgagggcccaaaacctggtttcatggtcgagggtgcgatgttggaaacggttactcccattccatatgatgttgttaatgatctcaagggtggctactagatctactctgttttttggtttattcttggcataacttaagtaagctttgttagttattttggatgtgttgtttacgttttgtagtttattttgaagagttactgcttctgcaaagattttaatcttatcaatcattttattttagagat

SEQ ID NO: 29985 - DNA, 292 bp, Gossypium hirsutum
  Clone ID: LIB3148-033-Q1-K1-B6
aacctttttcctatcaatgcggagttacaagaaccgttgagcttaggtttccccaacttcgaaccagcaatgatttgaatggttgcagaatgttctggttttaaggttttatcaaccctaagtcgaagggcttattagcatttctgttttgccctactttgttgtttgtgtgttttctttgtaactgttcggagcttttattgcttctcatgttccaacagtagagaataacagtttcagtgtagttgaaattattgagttgacatgtttttaataatatggcttatgattt

SEQ ID NO: 29986 - DNA, 278 bp, Gossypium hirsutum
  Clone ID: LIB3148-033-Q1-K1-B7
attacccctcttggctggcaacaggtggataatttgcgtaagcatgtccatgaatgtggccttgctaagaggattgatttagtgattacatcccctttgctaaggacattgcaaacagctgttggggtatttggtggtgatggttatacggataggatggatgtagtgccacttatggtggcaaatgcaggaaatagtggtcgtgctgcaatttcaagtttaaactgccaaccgatcgttgcagtaaaactttgtcaaaaccattgggaagtccatcc

SEQ ID NO: 29987 - DNA, 382 bp, Gossypium hirsutum
  Clone ID: LIB3148-033-Q1-K1-B8
atttaattgagtttgagagaattttatcatttttattttaattttaatgttttattttaagttaggttttaccgttttcatggaatgtttaattatgaaatcatggtgcttggtggtgttatgagaaaaagtaaaaaaaattaatccttgggttggcaaataatattgtgggtttactttccgttaaatgacaatattatgtattagctttaaaaataaggggggcccgtttaaaagaatcaattttaacgtccccttcattccaaattaattctttttttttaggtcccctaaatttaaataaatggcccaatttttaaaaccttgtgactggaaaaacccttgggttacccaacctaattggctttgaaaaaattcccct

SEQ ID NO: 29988 - DNA, 412 bp, Gossypium hirsutum
  Clone ID: LIB3148-033-Q1-K1-B9
cggacgcgtgggttcaagtccatccaaactcctatgcattggttatcagcatggagaacatgaccctgaactggtacttcgggaatgatcgttcgaaacttgtatcaaactgcttattcaggatgggaggggctgcaatactgctctctaacaaatggtccgacaaaagaagatccaaatatcaattggttcatactgttcgcactcacaagggttcagatgataaatgcttttcctgtgttacacaggaagaagactccatagggaagattggtgttacattgtcgaaggatctcatggcagttgctggtgatgccttaaagaccaacattaccacattggggcctctggttcttccaatgtctgagcagcttcttttctttggtacattggttggtaagaagctgttcaa

SEQ ID NO: 29989 - DNA, 426 bp, Gossypium hirsutum
  Clone ID: LIB3148-033-Q1-K1-C10
gtgaatattcagaggtttatatggaaagtgtagtgaagaatttgataatggatgaaagcgaggagaagcctaaggttgggctcatggtcatgcctggcttttggattggtggcagtgtcatccagagccgagtttatctttccggaatgaaggttaacgagtaaattaccaccactatgcaaatctaagagtttgatgagtaatacacgtatggactaatatagtgtgctgtttgtctttgtgatttgttgttattgctgtagtcatgcaactgtagtaattgtattacgacataggagctcactgtttgttgacaaagttcctttgtctttgtgtgcttcaactgttcttctgggtttgattgcctgcaagaatgcagcagacagtccatgatttgagcatcatctgtctctacgctgcattggg

SEQ ID NO: 29990 - DNA, 416 bp, Gossypium hirsutum
  unsure (1)..(416): unsure at all n locations; Clone ID: LIB3148-033-Q1-K1-C11
gcacatgttaccaaggcaactgccatgaagaaaacctcatcagaagccaagacagaagatgatccaacaccaggggctgaagctgaagctgaagctgaataagatgattcttacaatagggatttgaattaggtgttttctttttacgggttaagctacattccattacttttttttttctatcaccattcataagtatgacttattgaaaagtaatgaaagggatcttaacttctgtttattttcactctagttcttcccattcttcaactttgcaagcattttttaaacctactttaatgtagtgattgggagatggagggttttgataaatggaaatatattttgatttttttacttcnnnnnaaaaaaaaaaaaaaaaaaaaaaaaaaaaaaaaaaaaaaaaataattaaaa

SEQ ID NO: 29991 - DNA, 247 bp, Gossypium hirsutum
  unsure (1)..(247): unsure at all n locations; Clone ID: LIB3148-033-Q1-K1-C12
gaacttgccaatgctttgcatgtacttttatcatgaagcaatatattacttgtgtatacttgcaccacattgcttctttgtgtatattctgttgcaaccaattgttattactgccttgcagtacttgttccttgctggtatcaatgagaatggtaattgtttctcatgctccaaatcttgctgatgctgttatactaaaaccgttgtctttgtgcttnaaaaaaaaaaaaaaaaaaaaaaaaataaa

SEQ ID NO: 29992 - DNA, 390 bp, Gossypium hirsutum
  unsure (1)..(390): unsure at all n locations; Clone ID: LIB3148-033-Q1-K1-C2
tgcaggtggaggaagcctttgcaagagctcgatgaaattttacactgttggcgactatgtgatcactgaagatgaaatcaaggctcaaatcaaagggagtgaaggagtttacaaggctgttgaagcttacctcttggctaaccccgatgcctgcaactaagatatatgttggttgctttgaattctcttgcttgattttaaagaatggtgtgcttttggtattttcctttttactcttaaaacttaaaccgtcttccggttgtcttaataaaaatggcggtggtaattgatctttgatcatctttgatatatgatgaaataaaataaatatataaactaggaaaaaaattacctagtatatattttatagtttaaaaaaaaaaaannnna

SEQ ID NO: 29993 - DNA, 371 bp, Gossypium hirsutum
  unsure (1)..(371): unsure at all n locations; Clone ID: LIB3148-033-Q1-K1-C3
tggagagtcaagttcattcatataaacttgattgccccaaatttgatggcacaaactatcgaggttggtggtaaaagatcaagtagtactttgaggctgagagagtagctgatagtgttaaggttcacattgtaatgcttcatttggaggggaaggctctaaattgacaccacttctacacttagaggcaaaggggttttcatttgctaacacgggatagctactctcatagcttgaaagaatgatttggatctaacttattcaaggatcgtatggtagatttggtctctttgaagtaggtgaactctgttgatcaataccatgatgagtttgtaagtttgttgnanaaaaaaatananatannnattntt

SEQ ID NO: 29994 - DNA, 400 bp, Gossypium hirsutum
  unsure (1)..(400): unsure at all n locations; Clone ID: LIB3148-033-Q1-K1-C4
gaaaacattcacaacatgcataactttgaaattttaaatgaaaatgaagaaacataaagaaaatcgtggaggtagcaaaaaaaatgagctatctgaaagagttagtcaataaaggagttagccaaaaggctcaccaaatagttaacaaaaaaaaatgggctagctaaaagagttggttaagaaaggagaaaggaaaaaggttcataaaaaggagttagccaaaagagttcgccaaaaaggagcacttagaaaagccagacaaaatgtgaattgaaattggaaaaaggaaaaggatggttaaataaaggctgtgggtaccttatatttgtagctctaactgtcaagttattctcctttgatatggaaaaaaaaaaacnnaaaaaaaaaaaaaaaaaatatt

SEQ ID NO: 29995 - DNA, 173 bp, Gossypium hirsutum
  Clone ID: LIB3148-033-Q1-K1-C5
ctgatgctagactcagcactccgaaggtctcgtagttatgcattttaaataatttgtctaagtactattttaaaaactgtgatatgaactgttgtattaaatacatataagcgttatttagatttaggtttttgtaataccaagattttatatctgagaatttttacagaact

SEQ ID NO: 29996 - DNA, 298 bp, Gossypium hirsutum
  unsure (1)..(298): unsure at all n locations; Clone ID: LIB3148-033-Q1-K1-C6
ctcagcttaantcaacacttccaaggtttatttattatccattgtcaacaattttattgggtaggattttataaacagggagttcagactctaatataaaatacatataagctttatttacatttatttttttttaataccaaaactttatatctgatattttttacatatttttatttatattcccttaaatttttatctaatgttttacattattccattctttctttcactctcaaactaaaacataactatagtatggtttcaaaaaaattcaattcactattcatcttttaac

SEQ ID NO: 29997 - DNA, 289 bp, Gossypium hirsutum
  Clone ID: LIB3148-033-Q1-K1-C7
gctcacataacatggtggatattgcacgatggctattctcgaataattacaaaactactgggtggggatgtcgtaacactttggacatttagagtgggatccgaaggcaacctgaaaaagtaattacaccaaatggcctttggaaaattaaaataaagaacaaccgtttaagacacgttttagaaaaattctgtttgtgaaaaaatatcctggcattttggtgaaaaaaaaatggcagatattttaaatgttatcccataaccacctgttatatagaaaggatctctct

SEQ ID NO: 29998 - DNA, 374 bp, Gossypium hirsutum
  Clone ID: LIB3148-033-Q1-K1-C8
gccggattcacaggcttgctcgctactacaagataacaaagaagcttcccccggtctggaggtacgaatctacaacaggcagcgactctcgttgcttaagttaggcatgtggggtggtgcaattttgtgggaatccgggtttgatgttgatgctacggcggaagctagattgtgttttgttgttctagtgagatgtcctgatataagactttaattatagctgttaaaatttttgttatgcttggaaaagaaagtcgaaaacttgttttacttatgagattgtacttgttttcttttcgtccatttgaaattttaagcaagaaatctttgaattttgaaaataaaacctatcaatttctttttcctctttccta

SEQ ID NO: 29999 - DNA, 379 bp, Gossypium hirsutum
  unsure (1)..(379): unsure at all n locations; Clone ID: LIB3148-033-Q1-K1-C9
ggaaagttcaagagcattctccacaggggtctggttaataaggagaaggttaggatctcatgggcagttttctgtgagccaccgaaggataagatcatccttaagccactcccggagactgtctctgagaccgaacctccactgttccctcctcgtacctttgctcagcatatcgagcataagctgttcaggaagacccaggataatctgtccaactgaaactagtatttttatttgtcgcgataacctatttctttctgtactctgatgaatgctatatttcgttggggggttaaacccttggttgtggcgtctgtctccactccttggctcctctntacctgttttatttgaataatgagagctgatttggttcttt

SEQ ID NO: 30000 - DNA, 282 bp, Gossypium hirsutum
  Clone ID: LIB3148-033-Q1-K1-D1
gtcatccttaaacccttagtttgctcttgttttccggttttcgttttttcgccatacagctttttgatggagaaagacatcctgattctcaccctctttttcctccgaaaatcatcggagaagctcattcattgcttcttacctatggataatctcacatggggcatatttcaaatctcatgtaatcctccatggttttaaaagtgtcttaaaaagtgcagtatttgatttcaagcattttagtgtttgtttttgaagcactttgagacactatttgcagtg

SEQ ID NO: 30001 - DNA, 209 bp, Gossypium hirsutum
  Clone ID: LIB3148-033-Q1-K1-D10
aaaaactgatgccgctgcatcttaagaaacatactcctattcttctactcgaccttttttctttttaaatttcaattttggtactttgttcactttgtatctgtttgtcaaatgttagtgcatcagatattgatccttttcctaaaaaaaaaaaaaaaaaaaaaaaaaaaataaaaagaaaaaaaaaaaaaaaaaaaaaaaaataaaaa

SEQ ID NO: 30002 - DNA, 332 bp, Gossypium hirsutum
  Clone ID: LIB3148-033-Q1-K1-D11
cccacgcgtccggttcttctgggtgctggttttatgtccctcatggccaaatgggcttgatcattttcaaaaccatacggcgagtgaatttgatgtaataatattgggagacaaaaagaaaaacaagtgcaaaataattatctatgttgaccatatgttttgctgaaaacatgtttttgtatgttgatctttacattgctacagtcaccaatccaataaaaatcatcagtttttcagtattcaaaaaaaaaaaaaaaaaaaaaaaaaaaaaaaaaaaaaaaaaaaaaataaaaaaatataaaattttaaaatttttaatttttaaaaaataa

SEQ ID NO: 30003 - DNA, 405 bp, Gossypium hirsutum
  Clone ID: LIB3148-033-Q1-K1-D12
cccacgcgtccgcttttcttcaaggaaacatctgcaaagacagcatccaatgtcaatgagattttctacgaaatagccaaaagattacctcgagtgcagccagcacaaaatcctgctggaatggttctcatggatagacctgcagaacggagtgctagtgccacttgttgctcttaggtattggacggtttccttcctgtatcttctaagtagcttacgcaatactctttgcgactgaagttttatcttccaaactttgccatgtttatgtgctattcattatgggttgtgcatgcatgcttgttatctagacctgatgatatctaccagtcaattgtgttaaagattgattattcttgtatattaaagttcgataatggtattatgtttcacttccatggttac

SEQ ID NO: 30004 - DNA, 391 bp, Gossypium hirsutum
  unsure (1)..(391): unsure at all n locations; Clone ID: LIB3148-033-Q1-K1-D2
cttcatttcggaccattgcggagtgcttcgacgattttgccaagaagatatcagataatgaaaaagcagtgagcaagccagtgactgcaagcaacactgacatttttgtgcccactgctaaaccagaagcattggctatcaccgcgatatgcacatgagaaacatctcaccctatttgatattctaaacaataattcaatggcttcttattgttgaacggtaaagagactattggttactagtgatttgtggacaaactatctattatctaagggtgagatatattagtagttacatcatgtatctagggaatttagaataattttactacagttaataagattattagacctatcaatttgntttnntgaagngncacctaaattcaatt

SEQ ID NO: 30005 - DNA, 314 bp, Gossypium hirsutum
  Clone ID: LIB3148-033-Q1-K1-D3
ggaccagccgcgcgggcggtcaatgttaaaccattacttagctcttggacttttgtttcaagaagatatccaatcatcaaaaagctggggtcaaaccgagcagtgcgtccccacttacattttcgagcctcactgctaaaccataatcatttgctatcaccctaatgttcacatgacaaacagcataccctatatgatattctaaacaacatttcaataactgcttattgataaacgcaaaatatactattgagcactatagatttggggacaaactctctattatacacattttacatatattactaatcaca

SEQ ID NO: 30006 - DNA, 434 bp, Gossypium hirsutum
  Clone ID: LIB3148-033-Q1-K1-D4
cccacgcgtccgttttgtttaaaaaaaaccctcatgctctccaatctctcactctccccttgcttgctcgccgaaatactagcaccactaccctccaatcgcacccagcgaaggccctccgacagtgactccggtcgtgaagatgtggatgcgaacgtggagcagggcgtgcgtgcgtgacgggagtgatcgtggctgaagattatggtgcgaatgaagcttttagggatttaagatttcagttttctaattgtttaggttagagcatgagtattgggcttacgtaaacgggccaaaattatttgggttattttatgcaattgggctggttaaaaaaattaggattggctgtttttggtttattttttgtatatgtatgggcccgggctaaaaaatgggtctacatccatcaatcgaggtgtctcccctccgtg

SEQ ID NO: 30007 - DNA, 364 bp, Gossypium hirsutum
  Clone ID: LIB3148-033-Q1-K1-D5
cccacgcgtccggttccgtactacttcatccttcttcattgtcttcgtctagtgattcaccttatttgcggccgtggtatttgaatgctaacaaagtgatggcacaacatgaagatgatggtattacgaggcaaccggggtttaagtattcaccggtcgagggcggcgatatgctttacaaacgtgggatcattacttaagtaacgcttgagaaaaatattctgtaccacttttttatggtagcaatatggaaagatgtgcacataatttggaagactttcatgttattgattaaaagttaaattatgtatactttaagggatccaaaggaaaacctatatatatatatatatcaggtttcagc

SEQ ID NO: 30008 - DNA, 441 bp, Gossypium hirsutum
  Clone ID: LIB3148-033-Q1-K1-D6
cccacgcgtccggagctaccaaggacaatgaatattctgatcttttctatgctatcccatggtctgaaggaactcttggatttcttgttgctgccgaaatcaagcttatacctgttaaagaatacatgagactgacatacacgcctgtagtggggaatttgcaggaccttgctcaaggttatatggactcttttgcacccagagatggtgatcaggataatccagagaaagttcccgattttgtagaaggcatggtctactcacccactgaaggtgtgttcatgactgggagatatgcctctaaagaagaggccaagaagaaggggaataaaattaacaatgtaggttggtggtttaaaccctggttctaccaacatgcgcaaacggccttaaagaagggagagtttgtagagtacattcctacaagagaatattaccaca

SEQ ID NO: 30009 - DNA, 438 bp, Gossypium hirsutum
  Clone ID: LIB3148-033-Q1-K1-D8
cccacgcgtccgcccacgcgtccgctctttctgaatgttttcttctgttcgatttctcggggaacgaagtttaacttaaaaccacaacttctgtagaaatataaatatgatagactcaactcaaatattgagctgctttagctggtttcctcgactgtagacgatttaagttgcgatttatcaactgctgtgcttcggttggaatggctaccaagcagccaaatactggcctctttgtgggactgaacaagggacatgttgtaaccaagaaggagttggctcaacgtccctctaatcggaaaggaaaaactagcaaaagagtccattttgtgaggaacttgattagggaaggtgctggttttgcaccatatgagaagaggattactgagcttctgaaagttggtaaggacaaacgagcgctcaaggttgctaaaagaa

SEQ ID NO: 30010 - DNA, 186 bp, Gossypium hirsutum
  Clone ID: LIB3148-033-Q1-K1-D9
tatgaattcgtctttaggtaaatttgtttgtgattacaaaataaatgtcttcaaaatgttggtattttctcttcttcttttttttttttgttttttttttgggggggggactcaattgaaattgggaatccatattcttgttttgattcaaattgtacatcaataaaatctttgtggagtttaatc

SEQ ID NO: 30011 - DNA, 238 bp, Gossypium hirsutum
  Clone ID: LIB3148-033-Q1-K1-E1
ataattttaccatatcctagtagtcggaaaactacagcggaaaaaagtagctgcaagtgcaacacttccctggcattctcgaattgctgtctgcatgaaattttgtagggcattgcttaattttgatctgaggttatacacaggtaaggttcgttgccgatttgccttatgtactcggatttggatgtgaatgttagatacggatacatgtccagcacgggtatgtttcattttgtcc

SEQ ID NO: 30012 - DNA, 393 bp, Gossypium hirsutum
  unsure (1)..(393): unsure at all n locations; Clone ID: LIB3148-033-Q1-K1-E10
cccacgcgtccgcacattcggagcagagattgcttttgaagtgctaatggaggatcataatgtttcagtgtaagctagtgtgtagaaagtaacaacatgccatacaatgcaattcaatgttttatgtcagttatttttgttgaaagcaactatttttgggtacaagtatggaaggggcccctcttcaataccaagaagttcattttagtcctctacattttggaaagcaacattttaatccctgtacctttggtttatagcaaaaaggtaaagaaaatgctagttgtgcttttaaaataaaaaaatattttttattaaattatatcttaataaatttttaattttttaataaatttttctatttttatttannattatttanttttttttttt

SEQ ID NO: 30013 - DNA, 167 bp, Gossypium hirsutum
  Clone ID: LIB3148-033-Q1-K1-E12
caagtatggatgttattacaattaatggtttgagttcattcgatagatatcatgtctatgtgtatgcactttcaacttctccaagttctaggcttcatttttatgtaggtcggtgctttattcccgagtattttggggtgtttttgaattcatttcttaatctcttc

SEQ ID NO: 30014 - DNA, 391 bp, Gossypium hirsutum
  unsure (1)..(391): unsure at all n locations; Clone ID: LIB3148-033-Q1-K1-E2
cgttttgctaccaattccgctaccatgnttattactatttntgttgttattgtttggatattgtatanaatgttattttattgttaaattttgttactaattttagaggcaaanaaaaaaaaaaaaaaaaaaaaaaaaaaaaaaaaaaaaaaaaaaaaaaaaaaaaaaaaaaagaaaaaaaaaaaaaaaaaaaaaaaaaaaaagtgggatacgggcgacgttttaataattgcaaatgtttcatttaaagggaatgccactgaaaaatttttaaaaaagggaaaataaaaaaaacccttttctcacccatttaaaacggcaaaacaggaaaaaacccctttcttaaactaactaaattggccttaaaggaaaacccccttttgcccttttt

SEQ ID NO: 30015 - DNA, 378 bp, Gossypium hirsutum
  unsure (1)..(378): unsure at all n locations; Clone ID: LIB3148-033-Q1-K1-E3
cccatatcaatctcgaagaggagcgctcgttcacaagccttagcttctgcaacaaaagcatctgcagacgcctacataagggtattcctgctgagatcaatcgagagatttagagactgccaaagctgccgtaatgcaccacaaaaccacaataagtggtcaggatcctccggagcctccttgcgcagagggcaaacattgacaactcttagacttcgcttgattaagttattaaaatgaggcacataatctttaattaaccgccacatgtgtattttaattttagaaggaagtatatcccaaagtaacttgtagaactttttgtaattgtttgtagtattcgagttgtattcagacagctgaaattttcttgtnnaa

SEQ ID NO: 30016 - DNA, 426 bp, Gossypium hirsutum
  unsure (1)..(426): unsure at all n locations; Clone ID: LIB3148-033-Q1-K1-E4
cccacgcgtccgtacaagctcagctctcaggctcgatccaaaaccgaagcagcaagagtgaaggcagcacaagaggtatacagagaacttcaaaatgctaggctagaagctttgcagaaaaagaaagccgagaggaaaaagatgttagaggaggccgaagcaaagctcagtgcggaagcaattcgcaagaaagaagcaaaagaccgtgcacggcagatgaagaaggcaatgccaaaaatgaagatgacccgtgcttagatgtttttcgatcattaatacacactcttgacgccattaaccatagtagttcagggttgttcttagcatccgcaggtaaattgttatctttccttagaatttatattagttttctgttacctataaacacagctntttgtgggttttgaatgtaccacaagacaatgc

SEQ ID NO: 30017 - DNA, 389 bp, Gossypium hirsutum
  Clone ID: LIB3148-033-Q1-K1-E5
cggacgcgtggggcgttaatgtaattgcttcatttcgttgctgatgttactgtgattcttaataggtgaaatgctctcaaaggatttgtatcaaaaaaaaaaaaaaaaaaaaaaaaaaaaaaaaaaaaaaaaaaaaaaaaaaaaaaaaaaaaaaaaaaaaaaaaaaaaaaaaaaaaaaaaaataaaaaaaaaaaaaaaaaaaaaaaaatacaaaaaaaaaaaaaaaaaaaaatgggggggctcattatgaggaccaaattttacgtccgtggattttaaatataaaatctttatttatttgaccataaaataaaaatggttgcgcttagtttaaaaacgttaatagtggaaaaaccttggcatacataatataattctgttagaaataa

SEQ ID NO: 30018 - DNA, 453 bp, Gossypium hirsutum
  Clone ID: LIB3148-033-Q1-K1-E6
ttagaattcaactataagcaaaaaaaaataaaaatacatacaacaaaacctaggaaaatatttgggtcttggctttgaatattcttattttctcttaaaaaccgaaggattttaaagttgatttcagatccaaaaatagaaaattttgttaaaagcgtaaagaaagcatatgcatgaggcaaatatagcatatttcagaaaaaaaaaaaaaaaaaaaaaaaaaaaaaaaaaaaaaaaaaaaaaaaaaacaaaaataaaaaaagatcaaaaatacaaaaaaatagaaaacataaaacataaaaaaataaaagtagataaaaaaataaaaaaagggggggggcctttttaagggaccaaatttttgttccccgtgttggcaagaaaaaaatttttttttgggggccccaaattaaattcacggggcggggtttttaaaccatggggatgggaaac

SEQ ID NO: 30019 - DNA, 243 bp, Gossypium hirsutum
  Clone ID: LIB3148-033-Q1-K1-E7
cgcggagactgctgctcgatttataaggaaaccatataaacaacagtctatctatagcctggatatggcacacattttcttgggtgtagaataaatagcaactgagatttccaggctcttatatttgcattttcttggtgtgccatatcattttcctattgtatctgttaaaaggcctatggtggtcgatcatctgctccaaaataaagcattccttcgttttttattgatatcattctagtt

SEQ ID NO: 30020 - DNA, 441 bp, Gossypium hirsutum
  Clone ID: LIB3148-033-Q1-K1-E8
gcaagtttggttgctctaagaaacaacagttttcggatgttcagtaatgaggatgtgaccattggtgcatggatgcttgcaatgaatgtcaaccatgaggataatcgagcattatgtgagccagagtgtacgcaatcatctgttgctgtctgggatatccccaaatgttcagggctatgcaatccggagaaaaaaatgttggaacttcatcagatagatgcctgctctaaaagtccaactttgccatcggacgatgattagcttaattggcaaaacacagattttattaacatggaaaggtgtcagaattgtttgttctggtaagttgatcttattgccctcagacatatctcaattaccccgttcgatcatcgcaagccatttttgtcttccgccatcgttttagtctgtaatatattaagcttttttttcactgacgat

SEQ ID NO: 30021 - DNA, 363 bp, Gossypium hirsutum
  Clone ID: LIB3148-033-Q1-K1-E9
gcgagcgggccgcccttttttttttttttttttttgatgaaagacatgattttattatcttccagaaacaaagcaatgataagattgcttcccagattgttcaaatatatatgattacaagacaatccactcttttactaccagaagccagaggcttccctgcttatcctaaacaacataacactttgcacatggactgggtacattgtctcaatgcgcagcttctacagatttccattgcttcttcagttttctgtatatcatgcaggaatacgtatttgtgtatatacatagagcttattctgcaatcacttcacaatctaataagctttttgccaaggggcgtgttgttctagatcgcga

SEQ ID NO: 30022 - DNA, 428 bp, Gossypium hirsutum
  Clone ID: LIB3148-033-Q1-K1-F1
cccacgcgtccggaaattaggatcgagaatagcaattctcagccagagagcagcggctcaatgtcggagttacagatcagtggcagaaaatataacagcaatagagccgaggaacgcttgagcttcagcatttgccaaaagctagtgcagttaatgcatgggaacatctgggtagtacaaaatcctcagggttcagctcaaagcatggcgcttgttattcggtttcaactccgaccgtccatcagtataacaatcaacgagttgggagaatcatcagaccagccatgctccaactcccttttcaagggtttgcaagttttacttgccgatgacgatgatctgaaccgtgccgtgactcgaaagcttctcgagaagttgggatgcagtgtttctgccgtaacatctggattcgaatgcctcacttctat

SEQ ID NO: 30023 - DNA, 324 bp, Gossypium hirsutum
  Clone ID: LIB3148-033-Q1-K1-F10
catggagacatgggagcaaagcgcacagatatggggcgagccatgcgcgagtcgatgatcgtgcatagtgcgtggaggctgctggtggccactgctgctgcgcgaaacatatgaaaaccctaggttttccgaaattgggcctattagtgttgggccatttgtaacttgacttgtattttgggccgttttatgttttatctttgaatatatatgggcccgggctaaaaattgggtctacaccttctatttaaataacaattttatagaggaaccaaaattcaattcatggggcggcgtttaaaaacgcccggactgggaaaaacc

SEQ ID NO: 30024 - DNA, 414 bp, Gossypium hirsutum
  Clone ID: LIB3148-033-Q1-K1-F11
cccacgcgtccgctccaaagtaaagctcgcattcagatttggcttttcgaacagaaagatttgaggattgaaggccgaatcattggttttgacgagtacatgaatttggttctggatgatgctgaagaagttaacgtcaagaagaaaagccgaaagtcattaggaaggattcttcttaaaggagacaacattactcttatgatgaatagtggaaaatgattgtagatccagcagttatttggactcgtgaatgcaaaatcttcttgtcatcgtataggtcaatctactatgactatatcgtactatctttaaaaacatgccttcgtgttaggacattcaccttctaagaggtgcttctagtatttcagacagtttactgatgcttttgcttagattatctaatgatttgacatg

SEQ ID NO: 30025 - DNA, 415 bp, Gossypium hirsutum
  Clone ID: LIB3148-033-Q1-K1-F12
cccacgcgtccactaggacatgaattgcggcatgagtttcgcccgttgcttcaataacgactcaccgtaccctaacgagttaactggcgccatcctcggtggaccgaacaagcaagatatgtttaggaatctactttgaacgtgaacttacactaacccttccccttaccttaactctttagctgcggcaggttttgcaaaccttacttgcccaaagtattaaaccaaatcgcttattaaatcgcgaattggccccttttttttccccatgttggactaataaatggcccaatatactgcatgaaatatggaacgcatatagcggcgctttaaacacattttttatttcttttcctaaaggagaggcgaagtgtatataatatgtgataaaattctttaaataaatatatatttt

SEQ ID NO: 30026 - DNA, 442 bp, Gossypium hirsutum
  Clone ID: LIB3148-033-Q1-K1-F2
gttccgtcacgcccacttcttgagacgtgggcagtagaagctggcataaagtaccaagatttcccagaactgtgtggcaaagctgaaactgttagtgaagtccaaaaatcactttcaaaggtggggaaagatgcaaaactagacaaatttgaaatacctgcaaagattaaactgatggcagaaccatggacacctgaatcaggattggtcacagcagcactcaaaataaagagggaacaaataaagtcaaagttcaaagatgatctccaaaagttgtaccagtaatatacccataataaatgcattgatttaaccttggtattttcactgtcatatgctctctttcatcttctttgtaagttttcatgtatgtggagacaaaaaatcaaacagtgttgctccatagatgagttgtattagataattcggaagtttgtctaaa

SEQ ID NO: 30027 - DNA, 247 bp, Gossypium hirsutum
  Clone ID: LIB3148-033-Q1-K1-F3
cccacgcgtccggtaagtttgtgctttgattgcctttatatcaatgtttacaataagaggggttcagaagaaaaaataaaagacaaaaaatataaaaaaaataaaaaaaaaaaaacacaaaaactaaaaaaattaaaaaaaaacaaatataaataatacaataaaaacatataaataataaaaaaatgggggggccccttttaaagaatcaaattctagttacccttatttaaaacataaaactttt

SEQ ID NO: 30028 - DNA, 451 bp, Gossypium hirsutum
  Clone ID: LIB3148-033-Q1-K1-F5
cagatcacttcctccacatatacaaatcccaccccaaacacaaatatagaatacagattaacatacttaacatgctcgtatatagataacatatatatactctaacagaacaatcatacatacatatcagtgtcctattcaaatcagactatcaacatatcagatcacatgaattagggtttggttagcccttatcaaccctacggtaggtccatagttgactagacgacccatgtgaccctaaggaaaatttcagaattctgggcccagatgcctgtgtagcccacacacctagattggccttgcccgtgtggcccacatggcctgacccaaaacccatacgcctgtgtgggactacaaggccaatctggcctagcctatgtggcctaaacggcctcactcacaccgttacatggtcgtgtcttgagcacagccacaccttcgtcaaaca

SEQ ID NO: 30029 - DNA, 442 bp, Gossypium hirsutum
  Clone ID: LIB3148-033-Q1-K1-F6
ccctttctcttattgcttatatacagtagataaaaaaatcaaagaaaatggaaataaaattgaaagaaaaatgaaactttaaatcaccttaaacaaatatggttgctatatctttctgtttgttttgatattatctttatcttcaatttttttgaaaaaaaagtcccaaaaaaaaccccatacaatgaaaaatttggaggctttatagccgaatacaagcagttttcctgctattttcttgctcaaatcgcaggtcgtggagatgtgaacggacgtgggcgactaacgaacgagctgggggtcgtgcctggtgtgccacgtgtgtggtggagaggcgttgatggtcgtgggtggagaacgtgggcacatggtggctgaagcgagtcagtttctctctttgctgaaaaaattttgtgggctaggggttttttaaaaatttggg

SEQ ID NO: 30030 - DNA, 328 bp, Gossypium hirsutum
  Clone ID: LIB3148-033-Q1-K1-F7
gttgtactctaggattcttacttattgaggtccattgccgaagccttgtaccaagttgcaatgtgagcatttatgacaagccaataaaaataaagcacatatattgaataaaaaaaaaaaaaaaaaaaaaaaaaaaaaaaaaaaaaaaaaaaaaaaaaaaaaaaaaaaaaaaagaaagggagacaaaaagaaaaaaagaaaaaaaacgcgggcaaaaaaaagcaaaaaaacgaccaaaaagccacctaaaaaaaaaacaagaggcagaaggtgaacaaccgagaaaactggaaaaacccagaagttacccaacttatttgggttgccc

SEQ ID NO: 30031 - DNA, 143 bp, Gossypium hirsutum
  Clone ID: LIB3148-033-Q1-K1-F8
tgtaaatggcctttaataattttggactttattttttagtgttttgtttttttccctggtgatgcatggatttgattatatgtattagttaaaaaatatatatattttttataaatttatataaatttaaataaatttatttt

SEQ ID NO: 30032 - DNA, 383 bp, Gossypium hirsutum
  unsure (1)..(383): unsure at all n locations; Clone ID: LIB3148-033-Q1-K1-G1
gttatcttttaagtggacagggttttcaagttagtgggcacatcaaggtcactaacaactccatttgttttactggaaattacggattgaggtcattggatttattacttgtattctggatatttatgaatgaacaccactcgtgtctcagtttgaaaaaaaaaaaaaaaaaaaaaaaaaaaaaaaaaaaaaaaaaaaaaaaaaaaaaaaaaaaaaaaaaaaaaaaaaaaaaaaaaaaaaaaaaaaaaaaaaaaaaaaaaaaaaaaaaaaaaaaaaaaaaaaaaaaaaaaaaaaaaaaaaaaaaaaaaaaaaaaaaangggggggggcccttttaaaggaccaaatttatttcccctgttgttggaaattttttttttttttt

SEQ ID NO: 30033 - DNA, 424 bp, Gossypium hirsutum
  Clone ID: LIB3148-033-Q1-K1-G10
cttgagagggaagtggctctttgatgttgctctaggatgcctcatgttccctttcgtcaaccaattatctcagttcaatctgaccttgttgccccttatgccttctacacctgtaaccctttcaagtgttgaacagtcaattttagcaagagatccagtagccatggcactatatgcgatagttgtttcgatttgtgctcctgtgtgggaggagatagtttttcgaggtttccttctcccttccttgaccagatacatgcctgtatggagtgcaatactggtctccaactgaatggtacaagcaacacgaatgcgattcagttgatccaacatggctccacagaactgctccactgtttgtgtttgtccactataccagggacattaaaagcaaccgaacggaatgaagattgcatgtccattt

SEQ ID NO: 30034 - DNA, 235 bp, Gossypium hirsutum
  Clone ID: LIB3148-033-Q1-K1-G11
ctttcctttcctgtaattattattattatttagattaagtacatatggttctatcagtttgaaggcatttttattagaaattatgttgaagttccagcatgctaaatctggtgtctgcaaaagaagtgagagatgttccgagtttcgatctgtttgaagatttgaacttccctttgttactcggttgtaatttttgatactttggttcaatgattttctttcctcctttatttgg

SEQ ID NO: 30035 - DNA, 217 bp, Gossypium hirsutum
  Clone ID: LIB3148-033-Q1-K1-G12
gagaattctcagaggctcgtgaggatcttgctgcattggagaaggattatgaagaagttggtgctgagtcagctgagggtgatgagggtgaagatgatgagtactaagaagtacgtgtgattgagtgtgcttacgatgtcttttattacctgttgcttccgtgttatgcaagcttctattctttgaagcttgttaaagacttgaaatggtttactgt

SEQ ID NO: 30036 - DNA, 436 bp, Gossypium hirsutum
  unsure (1)..(436): unsure at all n locations; Clone ID: LIB3148-033-Q1-K1-G2
aggaaatgtcactgttggtgctgatggctctgcgagtttctctattgtcgacaaacagattcctctctccgggccacactccattattggaagagcggtcgttgtccatgctgatccggatgaccttggcaagggggggcacgagcttagcaaaagcaccggaaatgctggtggtagagtagcttgcggtattattggtctgcaagggtgaaattttggtcctggtgagcggaataatacattgagtggagatgcaatggcctaggagcaaactctgtatgtgaactaggaagtttgtgaataaaagtaaaagaacccttgttttgttttggttttcagacttaaaggagtgtggtctcttaacggatgctctagccatttatagtaagctgtcttttgctgcnaaagacaataanaacatattttctggcaaaaa

SEQ ID NO: 30037 - DNA, 200 bp, Gossypium hirsutum
  Clone ID: LIB3148-033-Q1-K1-G3
ggtttaaaaaaaaaaaaaaacaaaaaaaaaaaattataaataaaaaaaaaaaaaaaaaaaccgccatgggtgtggtaaaaaactcgagcgcgtgcgtgcccatacgacagctctgctttttcggtacctccaccaaaatcactttcactggccctccaacttcaccactgggactgccaatactttcccctaccccatct

SEQ ID NO: 30038 - DNA, 433 bp, Gossypium hirsutum
  Clone ID: LIB3148-033-Q1-K1-G4
cccacgcgtccgcccacgcgtccgcccacgcgttcgcaggctctgtggaaccaccctgccggacccaaaaccattcacttttgggcaccaacttttaaatggggcattagcatagcgaatgtggctgactttgctaaaccaccggaaaaactttcctaccctcagcaaatagcggttactgcaactggaattatctggtcacgctacagcactgtaatcactccgaaaaattggaatctcttcagtgtaaacattgctatggctggaacaggcatataccaactaacacgaaaaataaaacatgattacttttcggaggcagagccagccgttgcatctgaatgatgacgaaatcttctgaaatcctttgtttttaatggaacaaattatcagttatcttgccttggttttctggtaattaaaagttacactt

SEQ ID NO: 30039 - DNA, 343 bp, Gossypium hirsutum
  Clone ID: LIB3148-033-Q1-K1-G5
gccatgtctatggactttgtctgattaatgaatgattattagcacaaaaaaaaaaaaaaaaaaatgaaaaaaaaaaaaaaaaagaaagaaaaaaaaaaaaaaaaaaaaaaaaaaaaaaaaaaaaggatgaataaaataaaaaaaaaaaaaaaaataaaaaaaaaaaaaaaaaataaaaaaaaaaaaaaaaaggaaaaataaaagaaaagctacagaacatgaataaaataaaaaaaatagggggggtgttccgtgtaaacattaatttagttggaacaggcatataccaattaacacttaataatgaacatgaaaacttttcggaggcggagccagtttaaaa

SEQ ID NO: 30040 - DNA, 427 bp, Gossypium hirsutum
  Clone ID: LIB3148-033-Q1-K1-G6
cggacgcgtgggcaattttgtgttgtaaaaggtgccaacttgtttattaccacacgtaaatcacccgatggcttttggattcaatggcattcggggttctgaagagatattggctggagggtggaacttggaaggttaatttacttttacaggtttaaaaggggggactggccattaacattaacatagaacagaagatgaaatcccaaaacttgtgttgtaaagacggattacctgctatgaacctgtgcctaattctggaaatattactcagttcagctgttacaaaatctgcttcgtttcagtcacaaggaagacgcggttgcaaagatctatgttgtccgaattctttacttctattgaagtactcgtcaacaactggtcttgtcatttgatttcgaaagccgataagaacatattttctggc

SEQ ID NO: 30041 - DNA, 388 bp, Gossypium hirsutum
  unsure (1)..(388): unsure at all n locations; Clone ID: LIB3148-033-Q1-K1-G7
tttctctccaaacacactctcagtatgtctgctttaagatccaccatttcttctgggataatcagatcaacttctcccacccattccttgctgcctgcagcttcatctttcaagcccatcagaaacccttgtttacctcaaacccacaagcttttcacatcaaactccaacactttctcagctcccaagcgaggtttcacttgcaaaagccaggctattccatctgataactcagctccggaaaaagttcaagaactacatgtgtatgagttgaatgagagagatcgtgggagtccagcttaccttcgtttgatgtcagagttctatgtcgtgttgtgttgaaatcatgaaatgcagatgttaccgtagtatttcttgtnaanaaaaa

SEQ ID NO: 30042 - DNA, 412 bp, Gossypium hirsutum
  Clone ID: LIB3148-033-Q1-K1-G8
cccacgcgtccggtcgtgacacaagccagaggatgtcgcgacacagccttgaagacacgcccaaataaacgaactgccctcagtgtcgcgacataggccaaagggtgttgcgacacctacgtgatgtggtcacttactggaccaggggtgttttcatctgcacaatgaactttaacgaagattagtcaaccattttaggtcaaggacgggttgctaaccctagacctataaatatgattgctcaaaatagtttagaggatagtttttccttagtttaattttactttcatttgagtttagatttcttttgcttgtaatctttatttcagtttttattctgttcttccagagatctggattgtagctttgtcggattcattgcggagtgttgtttgcacatcaatattatata

SEQ ID NO: 30043 - DNA, 288 bp, Gossypium hirsutum
  Clone ID: LIB3148-033-Q1-K1-G9
acggcctctttgaaacatttccagtagccgaaattgttgttaatcaaccattattcaattataagaagcctcaattctgttgtttggttgtttcaccagaatctgtatttggttttgtaactaaagaaatgaaaataattgtattaaattaaaacattccttttgctgaggaaataatacaaggctcaatttctgtgtttaaaaaaaaaaacatacaaaatctttcatacctactttataaaaaatataaaagggggccctaaattcaaattatcttgcgcgtttttt

SEQ ID NO: 30044 - DNA, 457 bp, Gossypium hirsutum
  unsure (1)..(457): unsure at all n locations; Clone ID: LIB3148-033-Q1-K1-H10
naaaaaaataaaaaaaaataaaaaaaaaaatttttaatttanagaaagaaaataaaaaaaaaaagggatgggttaatttgtaaggaggagggggaaaaatttataaaaaaaaaaaataaaaattaatttaatttattttaaaaattttttttttaaattttngttgggggccccttttaaatataaaaatttttaacccccccaaattaaaaaatttttttttttttttttccccccaaatttaatttccctcccccgttttttaaaaccccttaaccggaaaaaacacctttttacccaaatatatttttttttaaaaaaaattcttttttcccattttttttatttaaaaaaaggccccaccctttctctttttccaaaaaaaattcccccccctttttatttaattttttcccccccttttttttataattttataaccgcggtgttttttttt

SEQ ID NO: 30045 - DNA, 219 bp, Gossypium hirsutum
  Clone ID: LIB3148-033-Q1-K1-H11
cccacgcgtccggtttttcttggagaataatattctgttttgtaatttcaattggagaagctcttttgtatttcatcttgtcttttgcttttccttttttcgccggcattgtttgaacatggggttgtgcgcccgtcaattccagttaaatatggtgacttttgtttttcaaaaaaaaaaaaaaaaaaaaaaaaaaaaatacaaactgaaaaaacaaaa

SEQ ID NO: 30046 - DNA, 422 bp, Gossypium hirsutum
  Clone ID: LIB3148-033-Q1-K1-H2
atgggtcctttgaatcttaatgcatttgacttgatcattctctctcaaggcttgaatcttgcaacactttttgaccgcgggaaggacaccatgaagcaccagacaagatttgtttcacggaagccagcaagggttgttctgtctagcatggaagttgttgctcaatcaatgggctataagacacacattcgcaattataagatgagagttgaaggcctttcagctaataagacttctcatttttcagttatcctcgaagttttcgaggttgctcccacgtttttgatggtggatattcaaaaggcagctggtgatgccggggactacctaaagttctacaagacattttgtagcaacctggatgacatcatatggaaaccacctaacgaatcaagcaaatcaaggatcacaaagtccaagag

SEQ ID NO: 30047 - DNA, 342 bp, Gossypium hirsutum
  unsure (1)..(342): unsure at all n locations; Clone ID: LIB3148-033-Q1-K1-H3
tttccttctgccaagcctccacttggcgtcttttttgcatccattgccccacggttgcagcctagatactattctatctcatcctcaccaaggatggcaccatctaggattcatgtaacttgtgcattggtttatgagaaaacaccaacaggtcgtattcacaaaggagttttctaatttatcggtactagaagacaacgttttggtttttggttaatttagtatgaacttgaactaaaaatactttctcctttctcaatcaagtaatcatattgttcaaaaaaaaaagaggatatncaaaaggcagctggagatgacacgggactacctaaagctctacaa

SEQ ID NO: 30048 - DNA, 318 bp, Gossypium hirsutum
  Clone ID: LIB3148-033-Q1-K1-H4
cccacgcgtgcgaaaaaaaaaaaaataaaagatttatatgtataagcaacaaaaaatggctaccgaggccggctacttttatggggagatcatatttgtcatctcaatatgcagataagttgttgatttgaaaaaaaaagaaaacttaaaaaggaaatattaaaaaaaagcaatgtactaaaaaaactaaactaacaaagcatcagattgcgttttggaaaaattgcacaaaaagaaaaaaatgcacataccaaataaatcttaaaaacatttaaacatacttgaacgggggcggttgcgtaaattcaaacagcctat

SEQ ID NO: 30049 - DNA, 430 bp, Gossypium hirsutum
  Clone ID: LIB3148-033-Q1-K1-H5
cccacgcgtccggcaacactggtttttggatatgaagcaactaaattatacaaagaacataagaagagaatgagcactgggaatgctgaaacagtttgtggagcttcaattcaatggagtccattgaacattgcattttgtgcactttgtggcatcttgggaggcactgttggtggattgcttggttctggtggtggattcattttgggtcctctcctccttgaaattggtgtgattccacaggtggctagtgcaacagcaacattcgtgatgatgttctcttcatccttgtccgttgttgaattctatttgcttaagaggttcccaatgccctatgctttgtacttgatgggagtatctattttggctggtttctggggacagtatttcgtgagaaaactaataacaatccttaggagagcttcactta

SEQ ID NO: 30050 - DNA, 439 bp, Gossypium hirsutum
  unsure (1)..(439): unsure at all n locations; Clone ID: LIB3148-033-Q1-K1-H6
gtttacttgttttttgaatttcatccctctcgttgttttgtgaaggacatcaagacagggaaggttttgctagtaggtcacattcataaagggttatatcgatttaacacatcaccacaacaaagaagttttgctggctttgatgagggctttcaatatgcacatactactaagattcaagcttgagacaccttctgttctgagttcgacttatggcacaaaaggcttggccatccctgcacaaaaattctttttcaagttcttcgaagttgtaatatttcactgaataaattcacaccacctagagtgtgtgttcctcgtcagctaggaaagtctcataagctggtgtttgataattctaagactgtatatacttccccttttcaacttgttgtgtctgatttgtggngacaatcacctatttcttctaaaggctatc

SEQ ID NO: 30051 - DNA, 431 bp, Gossypium hirsutum
  Clone ID: LIB3148-033-Q1-K1-H7
ctaaaataatggttagacatatgaaaacaatgtgcaaaaattaaggaacatttaacaaccataataataagtaattaccttattcaccaaccatatatatggttgtaatgtataatatatatgattgtaataataggatcctttttgataaattaaaacaatatatattttgctaaaaaaaaaaaaaaaaaaaaaaaaaaaaaaaaaaaaaaaaaaaaaaaaaaaaaaaaaaaaaaaaaaaaaaaaaaaaaaaaaaaaaaaaaaataaaaaaaaaaaaaaaaaaaaaaaataggggggggccgttttaaaggatcaaagtttacttccgctggcttgcaacgaaaaagtttttttttggggccaccaaaattaaattcactggccgcggtttaaaaacgtgggaattggaaaaaccttgggttacccaaat

SEQ ID NO: 30052 - DNA, 113 bp, Gossypium hirsutum
  Clone ID: LIB3148-033-Q1-K1-H8
acggggaatcattagatgtggtttctctgtgtagttatatatgtgtgcagtgcctgccatatccgtgactctttgattgtttaaatgcaggttctcagttggatccttgtctt

SEQ ID NO: 30053 - DNA, 364 bp, Gossypium hirsutum
  Clone ID: LIB3148-034-Q1-K1-A1
cgaagaaagagtctactggtatgaaaaaggtcggaagtgccgcagattggtccgctaactactaaagcgatatcagctgagcctcttgattctatccatcttaaattccgaagtttacttgattgaacttgtctgtaatttggaactaaaacagcattttaagcagtagtttgcttaccataaaaactcagcttgctatggtaacataacatggaataatattttcttgtcctaaattaaaaaaaaaaaaaataaaaaaaaaaaaaaaaaaaaaaaaaaaaaaaaaaaaaaaaaaaaaaaaaaaaaaaaaaaaagaaaaaaaaagaaaaaaaaaaaaaaaaaaattggggcggccgttttaaag

SEQ ID NO: 30054 - DNA, 271 bp, Gossypium hirsutum
  Clone ID: LIB3148-034-Q1-K1-A10
gtttagagaaaggtctaaacgtgtgacagtgatgggatgggtttgtgctgttaacagtgtggcaggcgtctgcttctcctttaggcataatgagacgtgtgataaggacaaaaagtgtaaaatacatgccatttcttctctccttttttcttacattatgttccacaatgtggttcttctatggacttttcttacaagatttatacgtggcttttccaaatgtgttgggatttctgcttggaacagctcaaattatcatctatgtgatata

SEQ ID NO: 30055 - DNA, 299 bp, Gossypium hirsutum
  Clone ID: LIB3148-034-Q1-K1-A11
gaaaaacgggccgacccacgcgtacgaaaacgaattaaaaaaaataaaaaaaacatttttttttatattcaaaagattataaaaaaaccacgggggggttttttaaaaaaaaaaaggggcaacacttccataataaaaacaaaaatattctttaatttgcgtcaaattaattaatttggtcggcgttaacaacaataaaattgtaaaaaattggattaaaagaaaaaataatttttccgtgtatacacactttttaaatgagctgaatattgagagaagattaaacaagttatctttta

SEQ ID NO: 30056 - DNA, 62 bp, Gossypium hirsutum
  unsure (1)..(62): unsure at all n locations; Clone ID: LIB3148-034-Q1-K1-A12
cccacgcgtccgccagcgtccgccacgcgtcgccacctncgccaccgtcgcaccgtcccacc

SEQ ID NO: 30057 - DNA, 239 bp, Gossypium hirsutum
  Clone ID: LIB3148-034-Q1-K1-A2
gccacgcgttcggccacgcgttcgtccacgcttccggatttttggtcaataaaaaccatgtggagattctgtttcatagtcatgaaacttgcctcgttgtttctaggatgcccatttaagcattcaccatttattccatttagccatttaagcataagggtaaattgtgctatatatataaatatatttcgctattgtcttctaatgagtgtaaaaaaaaaaaaaaatagttctgaatt

SEQ ID NO: 30058 - DNA, 269 bp, Gossypium hirsutum
  Clone ID: LIB3148-034-Q1-K1-A4
aaaaaaaaaaaaaaaaaaaaaaaaaaaaattttaataaaaaaaaaaaatataaaaaaaacggagattacttacgcgtgctttcgaagttcccactcttctatcgcgttactctaaattcaattcccctgctatagggtttccatcgtctcattctggtaaacccctttttttacccttcttaatgggtttccaccttatttccctttcttcatctgccgtaatcccatagaggccttaaccgctagcctttcccaacatttgccctttc

SEQ ID NO: 30059 - DNA, 405 bp, Gossypium hirsutum
  unsure (1)..(405): unsure at all n locations; Clone ID: LIB3148-034-Q1-K1-A5
atcaacttttagttcctcacttcaattctatcactcacctatgccattgttaatcttctttgggtgaaatagatgagaagattgaaaggaagccatttcttttgaggggaatgttgtctggctcgaggccatcaactagatctatggattttttttcatatatcaaagtttgagagatgatgatgatttaatcattaatcataggttaatgacgtcggaccaggcttcattccccccaattatttgcttccaattttgattatgttctctcggtcttttgttggtaaaacaagaagtggtgggtggtggatgataaggatgctggagctgtgtaatctccgccatttatgttttgtttttatgctngcttttatctctggttaactntggtacttactatacatg

SEQ ID NO: 30060 - DNA, 143 bp, Gossypium hirsutum
  Clone ID: LIB3148-034-Q1-K1-A6
gctggaggagttgctgtcatggaatgagctcatctgctttgcttcttttttgttgattagagataatagttgaaagaacgacttttacatgaactttgttttctatagatgataaagtttttgtgagggatagaaagaaaaac

SEQ ID NO: 30061 - DNA, 148 bp, Gossypium hirsutum
  Clone ID: LIB3148-034-Q1-K1-A8
caagaagagaatacccctttgcatacaaaatttttatttaaaaacgacaacatacaacaaagaggcagggcatttttgacattgcgaacaaccaaacctactactaagtaacctacattccattccctggctaacatatctacaaata

SEQ ID NO: 30062 - DNA, 60 bp, Gossypium hirsutum
  Clone ID: LIB3148-034-Q1-K1-A9
aaaagggccgacccacgcgtacgcccacgcgttcgcggacgcgtgggttctagttctcga

SEQ ID NO: 30063 - DNA, 356 bp, Gossypium hirsutum
  Clone ID: LIB3148-034-Q1-K1-B1
taagaaattaggcttgtggtcaaatatgtgatgtttagcagagtaaattccggtattgagatgagggttctagagtgtgtggcggctccttttgagtttctgccgctgctcatcgactttagtctgtggaatcagctcatacttcaattaaggtcacggtgcctatgtgcttgtattgttcatacttattacttattcttcttatttttattatttatcctatatgatttatcctttttttattgttggttgtttgtttttttcaattacctttgattttttttcttattactcttttatttttccttttggctttttttcttcgtcctcttttttttcccccactttttttatat

SEQ ID NO: 30064 - DNA, 342 bp, Gossypium hirsutum
  unsure (1)..(342): unsure at all n locations; Clone ID: LIB3148-034-Q1-K1-B10
aaaaaaaaaacagggccgacccacccgngcgtccacacatactattatctaaaacttttttatttacaaaaaacaaaaaacactctatcgctttgttttaattttaacaaaggctccaacacacatactaaataaaatatccctcacattcatatttcattcggatactaaacgaaattttgcccctctatatttccccatccaaggaacaaaactttaatattttgacctactatgtaatatataatatacctacttaaccttaattccccccctatcaataatgcctatattcaactcccctctctctcccaacttaaaaaaaaaaaaaaaaaagtcctt

SEQ ID NO: 30065 - DNA, 385 bp, Gossypium hirsutum
  unsure (1)..(385): unsure at all n locations; Clone ID: LIB3148-034-Q1-K1-B11
cccacgcgtccggaactttccccgaaagcctcgaataactactatgttaaataaaaagagctacattgggtaaataaggtgagacgttagattgaactaagaagtatgataacttagatgttgatgtttcctgtttctctaaagagcgagtatggtggacaaagctttatgtttctgcctgtaaggatggttgatttgccttgtatcatatgatgaaaggtatattatgttgttaatggcattggtgagttataacctttgatgcgaacaaatacctcattgcgagcacatttcgntggcatgcaatttatcttttttgtgatcaaaaaaaaaaaaaagtgagggttaaaaaaaaaaaaaaaaaaaaaaattgaaaaagatctaa

SEQ ID NO: 30066 - DNA, 344 bp, Gossypium hirsutum
  unsure (1)..(344): unsure at all n locations; Clone ID: LIB3148-034-Q1-K1-B12
ggcctggtcagtgcggccgtgctgacgggtatatcttggaaggcaaagaactggagttctacatgaagaagatccagagaaggaagggaaagggagctgcctaaagttttgttacttgagatttcatatttcagatcaaatgtgcctttttttaacctttctttcaccattttcaggagattttgagattgtgatagtggttacacttttagtatgaattttcaagtagtgaagttgtgtcttaattcaacagtattatcatataccttgagctgcatgttttttttgaacttggaatttagatgatatttaacttaatataaatggcagcctgttttgggnaa

SEQ ID NO: 30067 - DNA, 88 bp, Gossypium hirsutum
  Clone ID: LIB3148-034-Q1-K1-B2
cggaatggaatgtttgacccaacccacgcgtagcaacgcactcgtccgaaacaaacaaaagaatcattgaagaacgacaacgaacgac

SEQ ID NO: 30068 - DNA, 409 bp, Gossypium hirsutum
  Clone ID: LIB3148-034-Q1-K1-B3
cccacgcgtccgcggacgcgtgggattgaattggaaggcaaaatacggcatcgaggagatgtgcagggatcaatggaactgggccagcaagaacccgtatggatacgcatctccgaacttgaattaactcggtgccaatacttttgtcaggtcacacaatacctatgagattagattttcttaactttatacagatttaattgagtttgatttatcattttagatgatttataaagaataaggtgggaatttgttttgatcaaagctttgtgtagtcttttaaacaagttgctgccgttggtgattgttgtcaaaagggagtcaaaaatgaaaaaaccttagaactatttttagtaacactatccttgttgtcttgtgtctttattttgttcatcttttgtattgctat

SEQ ID NO: 30069 - DNA, 336 bp, Gossypium hirsutum
  Clone ID: LIB3148-034-Q1-K1-B4
caaacatgatattttatcctctttgtttttcatacaactgcagactggtaatgaagtgtccctccattaacgttatacagtatgtggaagccaatcatttgagttttagatactgtgttctcccccacccaacccccctcccccccggcccagaaaaaaaattgtatttaattcgtagcaagttggggttctatctggtttggaccatataattcactttaggatacctgaaggtaatctcaaaatttctaaggtggcgttgggatctatatttcaaaatttggattaaatttcaaaaattatggtaattatttaaaaatatatgggatatttatt

SEQ ID NO: 30070 - DNA, 103 bp, Gossypium hirsutum
  Clone ID: LIB3148-034-Q1-K1-B5
agcaaattgatcctccttttatatattttttatacaacaaaaaacaaaaaaaaaaagggggaataaataaaaagaaagaaaaaaacaaaaaaaccaataaaat

SEQ ID NO: 30071 - DNA, 246 bp, Gossypium hirsutum
  Clone ID: LIB3148-034-Q1-K1-B6
gaactattcagttcgttgactggtgcccaactggattcaagtgtggtatcaactaccagccacccactgtcgttcctggtggtgatcttgctaaggtccagagagccgtttgcatgatttccaactcaaccagcgttgctgaggtgttctcccgcattgaccacaagtttgatctcatgtatgccaagcgtgcctttgttcactggtacgtgggtgagggtatggaagaaggagaattctcggaag

SEQ ID NO: 30072 - DNA, 402 bp, Gossypium hirsutum
  unsure (1)..(402): unsure at all n locations; Clone ID: LIB3148-034-Q1-K1-B7
cctggaagtggtttcggacctggcggtgaatgtttcatcagagtcagcgcatttggtcacagggagaatgtcttggaagcttgcanaaaattcaagcagctttacaattgaatctaatagcatttgactggttacctcggtttcagacccgagacgaaaggccgtatgcttctatgatttttgttctcaattccgtaatattgcttgtaatatctcgtcagattctatgcttagaaaagactagtaatgcttcttatttatcctgtaacattcactgaaaactacctttttatttatataaataaccgcttgtattcgccaagcaaataaagcaagaaaaatctcgatttttccaaaanaaaaaaaaaataaaaaaaaaaaaaaaaaaataaataaaataaa

SEQ ID NO: 30073 - DNA, 403 bp, Gossypium hirsutum
  Clone ID: LIB3148-034-Q1-K1-B8
tagaaacagaagagcttggggtttcaattcttcaagatttgcattcacagcgactggctgggttacatgccaataacacgctccatggagtagatgacaacatcggcaagagcaagaaaattttgacagctatttctaggagggtgagcaggaacaagtggatcattggcaccattatcgccgtccttatcattgcgattgctcttgttttgtacttcaaacttgctaaatagtcaattatttgtatcttcgccctgttgattctgcttggtttggctttgtttgtccttgcgaacttgtccatggtgaattccaatataaatggatgctttggtaatcctaaggactgaatttttcgtcactacaattttatgtgctgacttccaagaaatggttttacgta

SEQ ID NO: 30074 - DNA, 291 bp, Gossypium hirsutum
  unsure (1)..(291): unsure at all n locations; Clone ID: LIB3148-034-Q1-K1-B9
cnnnaaaaataaaacaaaaatactttgggggttaactttattttcagaaatacactacttgggcattcaaaattgtggatattgtttatcattattcaaaattttgtccaatcttgtttgtttaactcttctcctcttttataacctccaacttccacaccataattttttttttaggtccccttaattaaattccccccccctctttttaaaacgccgggatttgaaaaacccttgctttaccaaacttaattgttttggaccccattccctttttccaaatttcctttt

SEQ ID NO: 30075 - DNA, 364 bp, Gossypium hirsutum
  Clone ID: LIB3148-034-Q1-K1-C1
cccacgcgtccggtaaatttaaaataaaattaaataaaaaaaaaaaaaaaaaaaaaaaaaggaaggaaaaaaaaaaaaaaaagaaaaaaaaaaaaaaaaaaaaaagaaaaaaaaaaaaaaaataaaaaaaaaaaaaaaaaaataaattgaaaaaaaaaaaaaaaaaaaaaaaaaaaaaaaaaaaaaaataaattaaaggggggggcccttttttaggaaataaatttttcccccgggtgatgaaaaataaatagtttttttttggggcccctttttctaattttttgggcggctttttaaaaccgggggatgggaaaaaccccggggtttccaaaattatttgtgttttggaaaaccccttttt

SEQ ID NO: 30076 - DNA, 387 bp, Gossypium hirsutum
  Clone ID: LIB3148-034-Q1-K1-C10
gtttttgcagccacaacacagccaaagaaagaagaaaatggcgtcgaatgcggcggttccagtctggcgtgcagccggcatgacttatataacctactcaaacatatgcgccaacctcgttaggaactgcttaaaggaaccttacaagactgaagcccttagtcgtgagaaagttcatttctccatctccaagtggacggatggaaagcctgaaaagcctactctccgctcagactcacctgaagaatgagatgcaagtttggtcatggaaacttcgaaactggaaagattttattttatttttaagaatttctgttatgtctgaaacataagaacaaatttcaagctgggatgatgttgcacattctaataataaattactttgtg

SEQ ID NO: 30077 - DNA, 119 bp, Gossypium hirsutum
  Clone ID: LIB3148-034-Q1-K1-C11
acggttttggccttaaaaaaaaaaaaaaagaaaattaaaataaagagaaggaaaaaaaaaaaaaggggggggggtaaaaaaaaaggggggctgtacaaataaaacacgtataagagcaa

SEQ ID NO: 30078 - DNA, 387 bp, Gossypium hirsutum
  Clone ID: LIB3148-034-Q1-K1-C12
caggggagcgaggagttcagatgtcaggaggacagaagcagcgcatagccatcgcacgtgccatcggtaaaagtccgcagatactgctattagacgaggcaacgagtgcattggatgctgaatcggagagggtggtacaggctgcactagatagagtagtggtgaaccgaacaacggtggtggtggctcataggctatccacaatcaagaacgcggacgttatagccgtgttaaaaatggggtgtgtaaaaaaagaaaacatgaatccttgatcaacaataaaaaatgggttctatgctttcttaagtgcactttatattaatgctttcacttgataaaaactctttaaatatatatataaattttttttggtttttaagttttggt

SEQ ID NO: 30079 - DNA, 271 bp, Gossypium hirsutum
  Clone ID: LIB3148-034-Q1-K1-C2
cgcgacttcacgaatcttccgcagacacattggctctcaagcaactctctttcttttaaagtccacgccttctttcttcctcacattaagatttcaaatcccctttttttgcggcggttaacgtttgctgatcgttgcttggtttccgaggatcaatcatgactcgtggtaaccagagagatcgagatcgagaaagggctcaatcccgagcgggcggcaaaggcagcaagaccaaagacgatggcttaaccccagaacaacgtcgtgaaag

SEQ ID NO: 30080 - DNA, 410 bp, Gossypium hirsutum
  Clone ID: LIB3148-034-Q1-K1-C5
cccacgcgtccgcccacgcgtccgggcaagaccgttagggttgtctcctttgtttcttgggagctctttgatgagcaatcagatgcctacaaggaaagcgttttaccatctgctgtatcagctagggtgagtattgaggctggatcaacatttgggtgggcgaagattgttggatccaaggggaaggctattggaattgaccggttcggggcaagtgcaccagcaggcaaaatatacaaggagtttggcttgactcccgaggctgttgttgcagcagcaaaagaactttgctaagcttgcttagaagtgtcgggagaaatttgtggttctgggttggaggttacactgaagagagaccattccatttgtgacagtctcgtttgtttttaataagaatcagaatccactta

SEQ ID NO: 30081 - DNA, 321 bp, Gossypium hirsutum
  Clone ID: LIB3148-034-Q1-K1-C6
cccacgcgtccgcccacgcgtccgtccactcgtacgaccacgcgtacgaccacgcgtacggccacgcgtgcgcccacgcgtgcgcccacgcgtccgcccacgcgtccggcgtgaggagatgtctagtgtgctccgcaagatgagggctcaccctggaggtggagaaaagaagaagtgaagctctctggtgacaagtcaccttgatgatttcattagaagaactttgttagcatatatttcaacttattggtttgagactgaaaactatgcactgaatcctcgttggttaattttataatgggtgctaaattcttgcggttt

SEQ ID NO: 30082 - DNA, 144 bp, Gossypium hirsutum
  Clone ID: LIB3148-034-Q1-K1-C7
cccacgcgtccgcccacgcgtccggaggaacttgagtattatgatgcggaggaggagcacagagatactttatatgaatcagaatgagaagtgcttactgatccagggttgattggtgtgctcagattgcagccaagggtgatg

SEQ ID NO: 30083 - DNA, 345 bp, Gossypium hirsutum
  Clone ID: LIB3148-034-Q1-K1-C8
cccacgcgtccgcccacgcgtccgcggactcgtgggcggcttttgttgagttttgtgacaggtttttgaagcataaaaggaaatttagtcaaagggacatagaggaatcctatgctaagcttcatagtggaagaagcaccattatttggaatcgtgcagccttattcatactgattatttttttgctataattttgtatatcaatattttcgccaaaggcaaacagactgaatagctccctaagttgtgtattcattgtagcaaaacctgaaataacttgggagctaacttgtaactaaatgtttgttcaagttatagctgcaataaattaatcattttttgttc

SEQ ID NO: 30084 - DNA, 331 bp, Gossypium hirsutum
  Clone ID: LIB3148-034-Q1-K1-C9
cgaaaaactggatttcttcttgaatgaattattttaaaaacggtcgacttggtatcaagggaatgtgcaacctccttgtattgcaccacaaatagggaaagcgaattgcgtttgtcctctgcacaagtgaaaaaaaatatcagcctataattcaggaattcctctatttccatcgccctggacatttggtttaaaagaaatatcgattatacacataagtttcgcgttacacatctcacattgatatgaaaaagaagagcctatctacacgtgcatatgtggactatatgtctgtctcgggcacaggctcttgtgtgcgcgttgtgacata

SEQ ID NO: 30085 - DNA, 347 bp, Gossypium hirsutum
  Clone ID: LIB3148-034-Q1-K1-D1
cccacgcgtccgcccacgcgtccggacattattatcatataaaatgtgagaaattggagtttgtttgaaaaaaaaaaaaaaaaaaaaaaaaaaaaaaaaaaaaaaaaaaaaaaaaaaaaaaaaaaaaaaaaaaaaaaaaaaaaaaaaaaaaaaaaaaaaaaaaaaaaaaaaaaaaaaaaaaagggggggccgctttaaaaaatcaaagtttatatacacgtcaatgcaacgtaatattctttttttagggtgacaaaaattaaattaattgcccgcttttttaaaacgcagtaaatggaaaaacccgggcattaccaaattaaatcgttttgcaaaaaatacccttt

SEQ ID NO: 30086 - DNA, 348 bp, Gossypium hirsutum
  unsure (1)..(348): unsure at all n locations; Clone ID: LIB3148-034-Q1-K1-D10
cccacgcgtacgcccacgcgtacgaccacgcttccgattttctctttgtttggtatttctcggggtgcgtctaaacgtagaagttgtttaatccaattgaaaatttcaacgtttcgtctaggctagaaatttccaaaatataaaggttgcgattcaatcgaagcttacgctattatcttccctcgtaccactgaaggtgagtttatctgatttgatattttatgagaacatacatggctcacttctaatcggntgctgcgatttaaaaatttgctgtgtgtgtgagctttaaggtgccatatcttgaaacgtttttccaaaacaatgggatagttcttttaatgattt

SEQ ID NO: 30087 - DNA, 56 bp, Gossypium hirsutum
  Clone ID: LIB3148-034-Q1-K1-D11
aaaaaaaaaaaaaaaaaataaaaaaaaaaattttaaaaaagggcggacaaaaataa

SEQ ID NO: 30088 - DNA, 305 bp, Gossypium hirsutum
  Clone ID: LIB3148-034-Q1-K1-D12
cccacgcgtccggatgaagggagctttgatgcccctattgctggttgtgaccttgtcttcgatgtggcgacacccgttaactttgcttctgaagatccagagaatgacatgatcaaaccagcgacccaaggagtggtgaacgttttgaaagcttgtgccaaagcaaaaacagttaaacgtgtcgtcttgacatcatctgccgcagctgtgtctatcaacacactgaatgggacagatctggtcatgacaagaaaagactggaccgatatcgaattcttatcatcaagcaaacccccaacttgggg

SEQ ID NO: 30089 - DNA, 124 bp, Gossypium hirsutum
  Clone ID: LIB3148-034-Q1-K1-D2
ggggggcatttttttaaataaccatttattccaaaacaagtgtaacactgacaacttaagcaaccaaaacttttgtctgaaaatactgttctaataaaataccaaaatcttttctaaatcgcga

SEQ ID NO: 30090 - DNA, 340 bp, Gossypium hirsutum
  Clone ID: LIB3148-034-Q1-K1-D3
ggacttcttagttaagaagtaaggaagaatatatggttttttgttgtatgtcctgtcaagtttgttgaaaccgtatgttagttctgtggtggctaatggaatgagtttccgtccatcgttctcacttgcatacgatatcagagcttgaatatgactcgacgtttcttggagtcaagtctggtaaacactgaatcaattgtcagattcaagccattcatatgtttccaactcttcgaaagtgtcaatatctattaaaaccctggccttgaaatgtatgaatgattaacttttgctgtgattaaacagtatttttattgcaatacatgcttgttttttattt

SEQ ID NO: 30091 - DNA, 451 bp, Gossypium hirsutum
  unsure (1)..(451): unsure at all n locations; Clone ID: LIB3148-034-Q1-K1-D5
aattcccgggttcgatcccatcgcagtccgatgacatcttcttagctatgatgctgttgcataacatgatactgatgccttagcttcatttcgtagttattaggatagtgagctaggttcatgaagtatagttaggtagaagagagcctaagaataggttcagaagaggttagtttcatgattggcatcagttcataaagaaaaggcttagcattagtagttctttagatgatagttagatgccccatcggggagtgcaccgccctttgatgattgagtgtgagggggaagacatatgatggttcatgcgtacctatgcttgagattagtgaacncatgcttgatgggctttgatagctcgtggaaacatcataagtccttgatggcaaccatacagtgccagacacactatgatncctgcatttattatcgtcctgggacgtctgggacc

SEQ ID NO: 30092 - DNA, 405 bp, Gossypium hirsutum
  Clone ID: LIB3148-034-Q1-K1-D6
cccacgcgtccgcccactcgtccgtggagtagaaaaacgataggatgctagacctgctgcgaggtgtgtttcaacgaaggtctaatcactatcaaccagatgaccaaaggcttcaccagggtcaaagatggactcgacgacctagctctcgactttccaaatgcaaaggataagttcagtttctatacggagtatgcccagaagaagggttggcttctgccatcctttggttcatctgcaacagaagctctgcccactgcagcagcctcttgaaaaggaaaacatattcatgtctctagtttctcatgtatgatgttgacgttccagtacctgtgttcttagcagtcatccatggcagatcagattgataggattagatgtgggatgttcggattcctgatgttg

SEQ ID NO: 30093 - DNA, 301 bp, Gossypium hirsutum
  unsure (1)..(301): unsure at all n locations; Clone ID: LIB3148-034-Q1-K1-D7
cccacgcgtccggaactttccccgaaagcctcgaataactactatgttaaataaaaagagctacattaggtaaataaggtgagacgttagattgaactaagaagtatgataacttaaatgttgatgtttcctgtttctctaaagagcgagtatgggggacaaaactttatgtttctggctgtaaagatgggtgatttggcttggattatatgatgaaaaggtatattatgttgttaatggcattgttgtgttttaacctttgatgcgaacaaatacctcattgcgagcacatttcgttnna

SEQ ID NO: 30094 - DNA, 405 bp, Gossypium hirsutum
  Clone ID: LIB3148-034-Q1-K1-D8
cccacgcgtccgaatagatcccgtcagggttgtgaatctacgtcggtaaagatcgaagaatatttcaaagcaaatgaaggcaaagaagttggaaatccattttcggaatttctggagaacttgaagagtagtgtggttgaggtggctaataaagcaactgatttcctccagtgtctctttactatacccattgcaggaatggagaaagaaaatggtggattgaactatctggagaagacgatcggagcaagcctaatgggattggcggtgatggttattatggttgtgcttttgaaacgagtctagaataaaagtatgtgaatctgttggatcaaaaaaaacaaaacaaaacattttcatttgacgggggtgataaattgcagtgctatcgtatattggcttgta

SEQ ID NO: 30095 - DNA, 389 bp, Gossypium hirsutum
  Clone ID: LIB3148-034-Q1-K1-D9
gctttcttaccttatcaaactgcccaaaaaataccgttttcatctgacaagttgccagaaggtttcaacaagttttcagtgaaacctggatcactgaaggcagagatgatgaagaacacaattaaggagtgcgaacagccagcgattgaaggagaggaaaaatattgtgcaacctcactggagtcaatgattgactatagcatttccaaactagggaaagttgatcaggcagtctcaacagaagtggaaaaacaaaccccaatgcaaaagtatacaatagcagctggagtgcagaagatgacagatgacaaagctgtagtgtgccacaagcagaattatgcatatgctgtcttctattgccataaatcagaaacaacaagggcttacat

SEQ ID NO: 30096 - DNA, 415 bp, Gossypium hirsutum
  Clone ID: LIB3148-034-Q1-K1-E1
gccaccattgctcctgcaccacagctggtggaaaaaacaaaccaacaagtggaacaaacttatcccaagtttgtttttggggattatatgtctgtttatgttcagcagaagttccttcccaaggaaccaaggttccaagctgtaaaggcagtgtaatatcaagaagaagctcaaaaccatgaatgatgtttttgattgaaagagtagagccctttctttcctggaaaataaaattgcagggaaggatatgaagagctcaagtcagtatacaatgttactagggtgtttgtttgtttgtttgtttgttgtgtttttttttttttttgttcttttccttttttggttgggagtttgtggtgatgaacatgatgagatgctcgatcaaattgctaaagttgggtgtgtaaatttgaat

SEQ ID NO: 30097 - DNA, 295 bp, Gossypium hirsutum
  Clone ID: LIB3148-034-Q1-K1-E10
gctaaagctgccgatgaactaaggaaggatgtcaagaccgttagggttgtctcctttgttgcttgggagctctttgatgagcaatcagatgcctacaaggaaagcgttttaccatctgctgtatcagctagggtgagtattgaggctggatcaacatttgggtgggcgaagattgttggatccaaggggaaggctattggaattgaccggttcggggcaagtgcaccagcaagcaaaatatacaaggagtttggcttgactcccgaggctgttgttgcagcaacaaaagaacttt

SEQ ID NO: 30098 - DNA, 271 bp, Gossypium hirsutum
  Clone ID: LIB3148-034-Q1-K1-E11
aaccacccacacctacgcattcttatacctatccatttctccaatccattaattacacgtccctgcaaacttctatctgtatcgttttattcaaaaaacacccactaaacaaccaacaaaaaaaacctataacaatcttaaattaactacttaaaaatacccaaaattcaaaaacaacctatacttacaacaatcaatatattttatgcaaaatccaaaatccattttcccccttttttactaaaaaaacatcaataatactttttaataa

SEQ ID NO: 30099 - DNA, 343 bp, Gossypium hirsutum
  Clone ID: LIB3148-034-Q1-K1-E12
ggaaaaacggaacgacccacgcgtacgcccacgcgttcaacagtattgttcataccatttagatgaacaacttgatagataccgatggacatgtacagaatgattgtgatgagttggaatgtcttaggaagaatcatagaatctataccttgttggctcgagcgtttaaccctttcgtaagaaaagattgtatatcagaggccgttattgcatcgagcacagataattacccagaggaaagcatccataatactttggagccgtttgatagaatagacaccagagcatcgtattggtcgagtgaaaggcaaaacaatccttgccgtcccgaaactttacttta

SEQ ID NO: 30100 - DNA, 313 bp, Gossypium hirsutum
  unsure (1)..(313): unsure at all n locations; Clone ID: LIB3148-034-Q1-K1-E3
accccactaaaggtcagctcgttcagcatatccagcaggcgctgatgacatggttcatataaacgcatgctcttcctttatttggtcgctttccaaatgtaattgaagaagtcgagactgcaattttagagccttctaaaatgttgttttccttgttagattgaagtgttgtttgcaagttttatctggataaagactgttagtgatttccttatttgctagcattttctattgtgtaactccttatgttatcacttgttactgttgtgttttagttctaattctaaatgaagctgttattgatatcnntnna

SEQ ID NO: 30101 - DNA, 208 bp, Gossypium hirsutum
  Clone ID: LIB3148-034-Q1-K1-E5
tccagtttaagcccaaaaataatcatcaaaactgacagaattggggctaaaaccagacaagtgccacttatgggtttgggttcaaagttgaaggatttcttaaaataaaacccaggcccattttatatggtataatttactctttttttgttctctgctactgtatggtataatatataattagcatacacacatgatagaattaagg

SEQ ID NO: 30102 - DNA, 409 bp, Gossypium hirsutum
  Clone ID: LIB3148-034-Q1-K1-E7
cggacgcgtccggcgaaaggaaagctcgcagatatagatggtatgaagacaaaaatgatattatggataaaagtatcatgcatcacttctgatggatcaaagctgtatgttagtgctggaataaccaaaaccaggaacagagatgcttatgaggttaatagggatggtataggtgtcgacaagttctagatttgttagaagtatgtctatggggaaaacctatgtatttgttttaactcctctctcatagccctttgaaccttttgtggtaaggctttttactctgttctaacattgaaggtggaaatgtcatggctcatattagttgtgtggaattggacattattaagggttaaagttgatattataccaaatttaaaagttatttgtaaatttttataattggtca

SEQ ID NO: 30103 - DNA, 267 bp, Gossypium hirsutum
  Clone ID: LIB3148-034-Q1-K1-E8
gcttcaaagcacgagtcaggcgagggacatcagtgataagttcataaaaattgttctctgtaccttatatttgcaggtttacagtacatagatgcaatgtgagttatcgtagtgggttttggttttgttttcaatgcaattcatcagcacttggaatcgtaatgatcctctgaaattatatgggctgtattattgaacgagaagaattcggtttgggttggtttggttttcacatgctagtactaaaatagtgcgtttgccagtctc

SEQ ID NO: 30104 - DNA, 406 bp, Gossypium hirsutum
  Clone ID: LIB3148-034-Q1-K1-E9
acgggaaatcattgttgaagaaaaccaagatatgtctggcgaaattgggggtggtgaaggtccagatgggattcataagagagataatgttgttcaaccaaagagaaaagtaggccggggccggccaaagggttcaaagaataagccgaaaagtagtgatgagaaacttggactgtcaagtgaacagcagacctttccagttaacattatagggggttattttgttgataaaggatttggtttagtgaggactgcccatgtaagggaggaagatatggtaatgcctgttgaagctgttacttgtggggatgctattgtcaagaagattgatggtcgaaggtggaatcgtggccgacccaaaagttcaaagaataagagaaaacgtccatatgtcttgatgaaaaat

SEQ ID NO: 30105 - DNA, 415 bp, Gossypium hirsutum
  Clone ID: LIB3148-034-Q1-K1-F1
ctttcagatattcaatctctaaacaagaaagagcactctgagcttggagagcttgaatggctagcagacatcggtctttttggtgatcaattgccacaggaggctttagcagcagctgaagttcctcaacttccgatatcgcaatcaagcagtacaaacttataccgacctaccaaatattccatggctcttaaaaagcctagaatcgaaaccccggatgaagatgacgagttcttcacagtccctgatctaggttgagttggataacgagactcgtgtgtcagtagttcgaccaaactatagtgtttcatatgttgagtacacttatgcacgtactcatcttatcacgctttactatgttgcctttgtttttaaatatccgacatatgttcaaacattgatatgttgatataat

SEQ ID NO: 30106 - DNA, 287 bp, Gossypium hirsutum
  unsure (1)..(287): unsure at all n locations; Clone ID: LIB3148-034-Q1-K1-F10
atcgtattggaagaacaggacgtgcagggaagactgtgtgtggctacaacatttttgactctgtcatggcgccgatgtcttcttcgatctcaagcanatgcttgttcaaagtggcagccctgtgcctcatgagctggcaaagcatgaagcttctaaattcaaaccaggaacaattcctgatagacctcctagacgcaatgacactgtatttgcacactgagaagctctgtactatggtattttagtttgccaaatttctttcattgctgcttacaagtgattgcttt

SEQ ID NO: 30107 - DNA, 315 bp, Gossypium hirsutum
  Clone ID: LIB3148-034-Q1-K1-F11
tttccttccattttggcttcctctatcatcttcttcttcttctttcaacctttctcctgcgtgtatggaaaaaaatcccaagaaagagaaaggtaaaagaacaagaaatcgataatgggtgcttgtgctactaaaccaaaggttttgaaagatgaaaactcaccggccaccgtccccgcaccagaaccgatcaaggaagaatccgttcagccggttgaaacaaaagacgaaccggtggtcgtgaaggaagctgatgaaaccaagccgaattctcttggttcattgcttgataatgaagaaaagagcaatgaaact

SEQ ID NO: 30108 - DNA, 409 bp, Gossypium hirsutum
  Clone ID: LIB3148-034-Q1-K1-F12
tgatatttcgcttcaatggccggatcataaagcgggttcaattataatcgatggaattgaatatggggtcctacaagttcattggcactcaccttctgaacataccattaatggcaaaaggtatgccttggaggcacatatggtgcataaagccgcggaccctaatgtgaagaccactttaactgtttctgcactactttacgaagatggtttacctaatgatttcctacacaagctcataagcaacattacagatatgattgatgtggtccaacaaaaatcaatgggggtgactgatccaaaccttatagaaattgatgacgtggaatattatagatacattggatctttgactcgccctacttgcactgaaaatgtcatttggattattaacaagaagatagcaact

SEQ ID NO: 30109 - DNA, 425 bp, Gossypium hirsutum
  unsure (1)..(425): unsure at all n locations; Clone ID: LIB3148-034-Q1-K1-F2
aattcccggagtcggacccacagcagtccagcccatcgcgtctcgctccatctcgtctcgagtgcctcctagaatgtactcnncttcaatcatacctagtatagcttcgaatagttagatatagtgaggccgatgaggtagcatatcataggcgtggagttatttcatccttatcagtcctnnctttttccttggaacaaagtgaaagcaagatgaagaatctacacaaattctgtaagtgtaatagagtaccctccaactaagagattcataggcctagatggagcttatatcttgcaagaggctatatatctatccaattcccacaagtttagctggtgtgcattctgtctgcattgataccatcagcaagcgacgatgcaatcagccttattacatctctctgttcgtgggatccttgcaaa

SEQ ID NO: 30110 - DNA, 412 bp, Gossypium hirsutum
  Clone ID: LIB3148-034-Q1-K1-F3
caagcatgtttgagaaaagtggtgctgaaaaagattctcgaactgaattagttgcgaaaaccccttcaatgagcaagactagtattgcttataagttttcttctgattatatacttagggagcagtataagaatccttgggacgagatgaggatggggaaattgcttgaggatcttgatgctcttgctggaaccatctcctataagcactgtcgtaatggtgatggtgctacaaggcctatattattggttactgcttctgttgacaagatggttctgaagaaaccgatccgagttgattttgatttgaaaatatccggggctgttacatgggttgggaggtcatcaatggagattcagctggaagtaactcaatctacgccagattctccagatccctctgattcagtagc

SEQ ID NO: 30111 - DNA, 391 bp, Gossypium hirsutum
  Clone ID: LIB3148-034-Q1-K1-F4
gcgcctagcaatcggcttaacgcgcgtagatctgcgatgacgaactcgctggtgagaattggaggagtcgaaggagatttggttaagagagcgttgtcggctttgattagaccttcctctcaccagcagcgtcgacgtgcagcgtttcagccgaggcctagccgactctccgtgatgtctaaagccgaggattgatgaaggttcctcttgagtggtattgctttattctttcaagctttttggtcaagtctccgagattttgcggtgattggagatggagctttggagtagcgcctcagatgatggcggtgaagtcagaatccgacgaagaggttggggatctggacgaaaggactcgggacggatatgatttttagtttactccgggcga

SEQ ID NO: 30112 - DNA, 336 bp, Gossypium hirsutum
  Clone ID: LIB3148-034-Q1-K1-F5
cccacgcgtccgcttcaacaggcttaaaaataacaataaaattaaatcaatggtgaaacatgccgcctagatacaaaagtgagatttatccaaaacaagtaccagctggaaatcatgagtagtatagaagtttaaaacccatatatacaaatacaccaaaattggtgtgtatatatatagatatattgaggcattctttcataattttgagtgtacagttttataatgaaattaatgctcaaaatagaaacggccaaaagcccttctacgaccctttttattgggtgagaatatatattcaatatttggaatttcaatgacatttcatattggtgg

SEQ ID NO: 30113 - DNA, 404 bp, Gossypium hirsutum
  Clone ID: LIB3148-034-Q1-K1-F6
cccacgcagtccattttagttgttaattaattgcatggatagacaatgaattctgagaaattaactacaaaaaaaaaaaaaaaaaaaaaaaaaaaaaaaaaaaaaaaaaaaaaaaaaaaaaaaaaaaaaaaaaaaaaaaaaaaaaaaaaaaaaaaaaaaaaaaaaaaaaaaaaaaaaaaaaaaaaaaaaaaaaaaaaaaaaaaaaaaaaaaaaaaaaaaatgggggggggcttttaaaaaaaaaaaaattaaaatccgcgggtttgcaaggtttatccttttttattgggcaccaaaaataaaataaatgagggggggtttaaaaaacatggaaaggggaaaaacccgggtgttcccaaaataaataggctggaaaaaaatccctttttaaaaaaatgtttatt

SEQ ID NO: 30114 - DNA, 403 bp, Gossypium hirsutum
  Clone ID: LIB3148-034-Q1-K1-F7
ggaagggccgggccgagcgacccgtaccatgtatgagaaaagcgtatctgatttagattgtggatctgaatttgctgcgaaagcccgtgcaatgagcaggactagtattgcttataagttttcttctgattatatacttagggagcagtataagaatccttgggacgagatgaggatggggaaattgcttgaggatcttgatgctcttgctggtaccatctcctataagcactgtcgtaatgttgatggtgctacaaagcctatattattagctactgcttctgttgacacgatggttctgaagaaaccgatccgagttgatttgatttgaaaatatccggggcttgtacatgggttgggatgtcatcaatggagtttcagctggaagtaactcaatctacgc

SEQ ID NO: 30115 - DNA, 312 bp, Gossypium hirsutum
  unsure (1)..(312): unsure at all n locations; Clone ID: LIB3148-034-Q1-K1-F8
gacgagttcgtcgatgctttganttcttattatcagcagcagcgccgctacagcggaaagcattgatcaactaatgagagggcaaatcaatatggtgttagcaattgacgaactataaacaacaacaaaaacaaacaaaaaaaaaaaacaaagactaaaacaactttacataataaataaaaaccaaagataggggcgggcgccttttaagagccaagcttactaacccttcaatccaactggataactcttctatattgtcgccgaaattgaatatagtgcccgggagtttccaccccgatgattgggaaa

SEQ ID NO: 30116 - DNA, 364 bp, Gossypium hirsutum
  Clone ID: LIB3148-034-Q1-K1-G1
cccacgcgtccgcaggcaacaaagctgacaccaataatggaacaagttgttcatcagctgggagaatctcaaggagatgggttttcttgaaagattttctaaggagcaaaagtgaaggaacaaacaataacaacaacaatagtaagctgtggtcaacaatttcattttcaccagcgaaggaaaagaaaccagggagcaacaaaaccaatggtgtggttcatgaatctaagaacaaaaggccaagcaagaccaaagctgtgaatgggataggtaaaaagagggttccaccatcaccacatgacttgcactatactgcatataaaacacaagctgaagaaatgaggaagaagactttttgccttac

SEQ ID NO: 30117 - DNA, 64 bp, Gossypium hirsutum
  Clone ID: LIB3148-034-Q1-K1-G10
aacgatatagcttttttatcaaagacataaatcgaatgactgggtctcggacagataacgaggg

SEQ ID NO: 30118 - DNA, 280 bp, Gossypium hirsutum
  unsure (1)..(280): unsure at all n locations; Clone ID: LIB3148-034-Q1-K1-G11
cccacgcgtccgggccgcccctatctttgttgccaaacagaaatttcgttcccccttcttgactaggtctgcgactctccctttttttctcaatttttggtacaatgtacatgttccttttttattttttttgatccagtgggtgaaatgaacacttttttttttaaaaaaggaaaagttttcttagttagcgaaananaaaaaaaaaaaaaaaaaaanaaaaaaannaaaaaaagggggaacaanaaaaagaaacaaaaaaaaanggggggggccctcc

SEQ ID NO: 30119 - DNA, 369 bp, Gossypium hirsutum
  unsure (1)..(369): unsure at all n locations; Clone ID: LIB3148-034-Q1-K1-G12
cccacgcgtccggctgttctctctttactaggattatgaacttatgctacttgatttcttgtttgggtcgctatagggggatataaacttaaggctgtgttattcacttggtaaatagcatatgcactggataaacctccttttattacaaaaattttgtactattcttggtgttcagattttatcatatggtttgccttttgtgatgcaaaacactaatacccaaaaaagctaacaggcgaaaccgtgggaaaaataaaaaactgattaaggaatgcaccaacctaaaacctaaaatgggtcggccaggggggtggctatattgactttcccaggggggtttagaacccttgaaaaaaaaaaangaaa

SEQ ID NO: 30120 - DNA, 65 bp, Gossypium hirsutum
  Clone ID: LIB3148-034-Q1-K1-G2
ctctcttgctttctacgtcgtttgtcttttcttgtgggacctaaagacaattcacgtggccgctt

SEQ ID NO: 30121 - DNA, 278 bp, Gossypium hirsutum
  unsure (1)..(278): unsure at all n locations; Clone ID: LIB3148-034-Q1-K1-G3
gaaaaaacttctgaatcgtgccaatacctctcaatccacttcttgttgaggatagtatgcatgtatgtatttcagcttttgcactgtataaatgtaagcttcatttgtaataataatacagttaggtatattaagatagatacccaatctttgtaggaaatttgttgtaactttatcacagggttatctccaatttagcattgggaggaacaaagaatgatcttcaagattgctgtttcttaaaaaaattatcngaaaaaaaaattcngaaaactttt

SEQ ID NO: 30122 - DNA, 307 bp, Gossypium hirsutum
  unsure (1)..(307): unsure at all n locations; Clone ID: LIB3148-034-Q1-K1-G5
cccacgcgtccgcccacgcgtccgcttttttccttttttgctctgtaaataaatatttatagaaaaatactatacaattttatgagggttaataattgaattttcccccaatcttaaaaaaaaaaaaaaggaggaaattttggtcggattggaagagttagggcatatatgctgtaatgagaagtatgaaatttgataagaaatgaatttgctcttttttgtaaaaaaaaaaannaaaaaaaaaaaaaaaaaaaaaaaaaaaaaaaaaaaaaaaaaaatcccaacatatactaataaaataaaattt

SEQ ID NO: 30123 - DNA, 390 bp, Gossypium hirsutum
  Clone ID: LIB3148-034-Q1-K1-G6
cccacgcgtccgggaaaagaacataacttaccgtgattccgctctttcctctcaggtcatcttcctcagttctgttctagggtgcagtaattctttttcttctctttcttccaagagctatcacattgaactgcagggatggctgaggagggtcaaaaagttatcttgaatgtgtatgacttgagccaaggacttgctcggcagctttcaatgaccttattagggaagcctattgagggaatatggcacactggagttgtggtttatggcaatgaatactattttggcggaggaatccaacattctcctgctgggacgacaccatatgggacaccaattagagtgatcgatttaagagtcactcatgtgcctaaggatgtgtttgagatg

SEQ ID NO: 30124 - DNA, 387 bp, Gossypium hirsutum
  Clone ID: LIB3148-034-Q1-K1-G7
aatatttttaactttcgatcttacgcagggctgatttatttctggtttcatatccttatgaaaatggggtctttgaagaaggaagaagaaatggggcagattggggaggaatccaaggaggctatcgtatacgttaatggagtccgcaaagtgttgcctgatggattggctcacttgactctgctggagtacctcagaggtaataatatttttgttccattttttttggttttccttgaaagtattatcggagaaaagaatcggaaagcttttttttttcctctctttttcttcctctaaaccttgcaagccaaactcactccaaggttgggttaaaactaacttccaattttttgggttttcgcgtggggaaaacccccccccccc

SEQ ID NO: 30125 - DNA, 256 bp, Gossypium hirsutum
  Clone ID: LIB3148-034-Q1-K1-G8
gggatatcaaagctgacacacactggcactcaactcactaccactgtgtgtgtgtgtgcgacaagagtgatggagaaaggaaaagaggggtgggagtaaatagcgtcggagtttactatggatttaccataccggacctgggtggatgatctttataacaggatcagtttatggtcgacatctttattactgcttgttgccaacattctggctgatgtagacacatgggctaactttattttactccatataaaca

SEQ ID NO: 30126 - DNA, 163 bp, Gossypium hirsutum
  Clone ID: LIB3148-034-Q1-K1-H1
aatcaagctatgccattttgtttttatctttaatatattatttacacttatgataaaagaaggaggactaaataaaaagaaggaaggagaactataaataaaaaaaaaaataaaaaacataaaaagattgaaagacaatagaaaaaataattaaataattcag

SEQ ID NO: 30127 - DNA, 402 bp, Gossypium hirsutum
  Clone ID: LIB3148-034-Q1-K1-H10
cccacgcgtccgattagaactttaagctaatagaggatggcgatggataagaatgattagaggaggagttggaggattcgagtaagtaaatgtttttatatctttgttaccgtagccaatctcaaatctattgagattaaggtttgttggttgatttggtttaattgtgttgtttgttgatttggcatttgcctttatatatatatatatagagagagagagggagagggagagtaaattaagaagaatgtttaattagcttgatctcaaagttaatcttacagtaattaggattgagaatttctagtgttttttactttaatttttccaggatgattcttacctggatagctacatcagtacgatcggtgttgatttcaaaatcagaactgtggagctgga

SEQ ID NO: 30128 - DNA, 207 bp, Gossypium hirsutum
  Clone ID: LIB3148-034-Q1-K1-H11
cccacgcgtccgcccacgcgtccgcccacgcgtccgcccacgcgtccgaaaaagaactgttgggttgtgagaaatggcagtaactttctgtttaggtagctttatgttaaaactagcttttattcctgtttcgtcctttgtacatcataatgtcagcttcaacttctagtctaataaaagcttgtttgagggtcccaaatttcatct

SEQ ID NO: 30129 - DNA, 424 bp, Gossypium hirsutum
  Clone ID: LIB3148-034-Q1-K1-H12
acgatttccttgtgatcctaaaaaaaaaaaaattataattaaaaaaaaaaaaaaaaaaaaaaaggggggggtgcaaaatttttatctggaaatctaaaaaatgtcgtccacattcaacgggcgatgaaactgctccttttttttggcttacttaaaaacaaatgataaccacggggggcgccctttttagaggttcaaattttaccacccctaacttgcaaaggtttactttttttttggggcccccaaaattaaattactggcccgggttttaaaaacgtggggtttggaaaaccctgggggtacccaaattaaatggctttgaaaaaatttccctttttgccagttggggaaaaagaaaaaaggcccccccctttcccctttccaaaaaattgcccaccttaattgggaattggaccccccc

SEQ ID NO: 30130 - DNA, 366 bp, Gossypium hirsutum
  Clone ID: LIB3148-034-Q1-K1-H2
cccacgcgtccgcattggagcagttcttactgctatagcacagaatgtccagactatgataattggccgcttactggctggtataggtattggtataacatctgctattgtgccactttacatatctgagatctcaccaactgatatccgtggtgcacttggatctgtaaaccaactttatatgtattgggattcttgcagcattggtggctggattacctttatcacggagcccagtatggtggaggggaatgtttggtcttgctgttatcccttcaattttattggctctaggaatgacatattccccagaaagtcctcggtggctgttccagcaagggaaaatttctgaagcagaaaaatcta

SEQ ID NO: 30131 - DNA, 397 bp, Gossypium hirsutum
  unsure (1)..(397): unsure at all n locations; Clone ID: LIB3148-034-Q1-K1-H3
ggcttctctgttacatgttgaaaatggcatctccgaaccccgcaaaacctgctgtgtgaaggaacactccctaaaaagatggtccacggactcttcctcagatctgcataccgggcataaaggattgacagccaattgacgagcttttagattatgcaaagtgggtaaatagttgttagcaattctccacataaaaatacgaattttgcatggcacttggagctcccataattttgtaaaaaaattagtaggaagttcattatgtattctagtacccccctctgtaattagccatctgtatccgctcttagctgtatatgtcccagtattatcccctcgccataccaatgcatcttgtggtctactatttgccaatggattngtgagaatgcgcttc

SEQ ID NO: 30132 - DNA, 397 bp, Gossypium hirsutum
  Clone ID: LIB3148-034-Q1-K1-H4
cccacgcgtccgggactcatcttgttcaatctttctctgttgtttttctttactggttttatgttttctcataaataaattgtcctattttaccatatatacatatatatatataataagtagttatttagcttacaatttagtctctctttttttcttttttaatggcttcttctagtggaaactccatgtccaattcaagatccgaagaggatttgcacaatcaaaggaaacggaaaaggatggaatccaaccgagaatcagcgaggcggtctaggatgaggaaacaaaagcacttggacgagttaatggcacaagtgactcagttggttaaagataataatcaaatcttaaccaccatcaacttcaccactcaacactacatcaacatggaagc

SEQ ID NO: 30133 - DNA, 283 bp, Gossypium hirsutum
  Clone ID: LIB3148-034-Q1-K1-H5
gtttgatagctcatttctagcaaagaaattttaaataaaatcatgggatgaaagttaatggatggtcaaaaaaaaaaaaaaaaaaaaaaaaaaaaaaaaaaaaaaaaaaaaaaataaaaaaaaaaaaaaaaaaaaaaaaaaaaaaaaaaaaaataaaaaaaaaataaaataaaaaaaaacaaaaaaaaaacaaaaaaaaaaggggcgggccccttaaaaaaaacaaaccataattccccgacatagaaaagtataaatttttttatgggtcccccaaatttaa

SEQ ID NO: 30134 - DNA, 170 bp, Gossypium hirsutum
  Clone ID: LIB3148-034-Q1-K1-H6
cccacgcgtccgccagggctcactgttgttaccgtggtgcttcatagtatctctgcttaaacaaggttttaatgttcatgttggctagccctggctgcactacaatttgctttgcatttttatttattttattttcctttttattaatgaaatttgggatttgtatggtt

SEQ ID NO: 30135 - DNA, 406 bp, Gossypium hirsutum
  Clone ID: LIB3148-034-Q1-K1-H7
ggaagaaaagcttgacgacggttcatggcctgaggcatgacctgagctacgagaaaatcgtcaagagtctcaagaaggacttttgttgcaacggcaacgttgttaaagacaaagagctcggcaagatcattcaactccaaggcgatcaacgcaagaacgtgtcgcagttcctcgttaatgccggcatcgtcaagaaagaccaaatcaagattcatggtttttaaggataacccaagttgctatttatgaaaaaaaaaatcagcactgttccttttttagcttaaaataaaacactagtgctgctggctctttaatttatacacccttggggggttttaactggcatgggatatgggatttcctttataaaaaatggggtttttaaaaaaaaaaaaaataataaaaa

SEQ ID NO: 30136 - DNA, 352 bp, Gossypium hirsutum
  Clone ID: LIB3148-034-Q1-K1-H8
ctttcgtgcagcaattgattcctgtttgactagaaaagccaaatcccacaagaaaataagcggcattgttcttttggtcctcgcttaaagacccaggtgaaccacacccaaatactctgaatactattgttaagcacccaagagaagtttaaatacctccaaacttctgtcgatataggacatattctgaaaacatggttgctatcttcctctaactgccgacatctggggcaccaggcttcatttgcaactcgcttcaatttcaaattagctagcgtagggatataattccaggaaattttccagattgtaactttaattttcgaaggaatgtgtaaatcccatagttttc

SEQ ID NO: 30137 - DNA, 132 bp, Gossypium hirsutum
  unsure (1)..(132): unsure at all n locations; Clone ID: LIB3148-034-Q1-K1-H9
tgtttttggactttgccccgccattggaagttgtaataaggaacagtgtgatatagctagtgtacaggcatgtgaaaaacatatttaaaaaacttcttgtaggttataatattttggattgtcagcnnnnaa

SEQ ID NO: 30138 - DNA, 203 bp, Gossypium hirsutum
  Clone ID: LIB3148-035-Q1-K1-A1
aaaaaaaaaaaaaaaaaaaaaaaaaaaaaattttaaaaaaaaaaaaaaaaaaaaaaaaaaaggggaaaaattaaaaaaaaaataaataaaaaatatattaaaaatacactattaaattaaataaaaaaaacaaaataaaagggccggcccttttaaaattcccaatttttcttccccttccttcgcaaaaaataatttttttt

SEQ ID NO: 30139 - DNA, 144 bp, Gossypium hirsutum
  unsure (1)..(144): unsure at all n locations; Clone ID: LIB3148-035-Q1-K1-A10
gccacgcgtccggtaaaacttctcctttaaatatggccaaaatgaaacgcgatcgggggcgggttgtagctgctgtgcgccgcacccataaaaacccgcgggnggactatgacacatctctgtttgttcggagatagatgaaat

SEQ ID NO: 30140 - DNA, 173 bp, Gossypium hirsutum
  Clone ID: LIB3148-035-Q1-K1-A11
tcataacacaaaagtcctttgggggctaactgtattttcagttttacactacttgaacatgcaaaattgtggatatttttatcattattcaagattttgtccaatcttgtttgtggaactctgtatatcatacaaatttggaactggtaattataaacttgtattcaactttg

SEQ ID NO: 30141 - DNA, 338 bp, Gossypium hirsutum
  unsure (1)..(338): unsure at all n locations; Clone ID: LIB3148-035-Q1-K1-A12
ccacgcgtccgaaggacacaagtgttaatggtaaaaccaaaaattccgcaagcgggacccagacctttcccaaaagccgcaaactttcattaaataaattatccatcagattggtattggttgcgacattgaacttgaattggacccggattccattcatttcgaanggaaatggtgttttcattgatgcacacagttgggatataaacaaggatttttgccggtaaaacaaccaggggatatattgcttaatcttcccaacaaaaaacctccaaccaaaaaaaaaaaaaaaaaggccggccctttttaagaatccaacttaacttccccttccttcc

SEQ ID NO: 30142 - DNA, 412 bp, Gossypium hirsutum
  unsure (1)..(412): unsure at all n locations; Clone ID: LIB3148-035-Q1-K1-A2
cccgatgcctgcaactaagatatatgttggttgctttgaattctcttgcttgattttaaagaatggtgtgcttttggtattttcctttttactcttaaaacttaaaccgtcttccggttgtcttaataaaaatggcggtggtaattgatctttgatcatctttgatatatgatgaaataaaataaatatataaactaggaaaaaatttacctagtaaaaaaaaaaaaaaaaaaaaaaaaaaaaaaaaaaaaaaaaaaaaaaaggaaaaaaaaaaaaaaggaaaaaaaaaaaaaaaaaaaaaacaaaaaaaggaaaaaaaaaaaaaaaaaannggggggggcccttttaaaagatccaaattttactacccgttttttggaaatttattttttttttttgggtccccaaaatt

SEQ ID NO: 30143 - DNA, 260 bp, Gossypium hirsutum
  unsure (1)..(260): unsure at all n locations; Clone ID: LIB3148-035-Q1-K1-A4
gctacttctccttgtccttcaaaaatctatccttttttatttatctcaggcgccgccgtattctctaagccggcggtaaatacccatttcttcctccacccttccctctcctccattaaaaaaaaagccaaaaaaaagagaaaaatattcacaaaagacaagaaagtttgctactttagtaaggtttatcgaacgcacttgggattttagtttgtttcatttattatcttctctaggattttttaattaatacccganga

SEQ ID NO: 30144 - DNA, 391 bp, Gossypium hirsutum
  unsure (1)..(391): unsure at all n locations; Clone ID: LIB3148-035-Q1-K1-A5
gggtcttgttactctgttgccttgcgaggtaatcatacttgtgtggagaattcgatgcagcatcactgccccatatgttacgagtacctcttcgattcgttgaaagatacgactgtgatgaaatgcggtcacacgatgcactatgaatgttaccatgagatgctaaagcgtgacaaatattgctgtcccatatgctcaaagtcggtgatcgatatgtcccgagtctggaagaggatggacgaagagattgaagcgaccctaatgccggaggattaccgatataagaaggtttggattctatgcaatgactgcgacgacactaccgaggtttacttccacataatcggacagaaatgcagtcactgtagatcttacaacnacccgacgatcg

SEQ ID NO: 30145 - DNA, 390 bp, Gossypium hirsutum
  Clone ID: LIB3148-035-Q1-K1-A6
aaatcttacaatgggcttggacactatacaatcccaaatgaaatggaagaggcctgtgcgtggttaacttcaaaactggagaacaacggacggtctacatgacgaatgtacatgcggaaatggatatgcattaatcgaagcaaatgtgtgatgtatgacgatgcaaaacatggatatagactagtgaacatacgccgagggaatgaaagtattctaaatgggttccggatcttggctggtaactcaattgaaacatgataacttgtaccgatccaaatcgtaaactgggcggggttgaatataataatgtggaaggcaatgtgcgtgtgtaattacaaaataagcaatcgaaaagggaaccctattataatttaacagcacccgaataaa

SEQ ID NO: 30146 - DNA, 390 bp, Gossypium hirsutum
  unsure (1)..(390): unsure at all n locations; Clone ID: LIB3148-035-Q1-K1-A7
nccacgcgttcggagtttggaaaaagaattttttgaagaatggtggaaaatggaagaacagggatgttttagatatgaacactccaccatggtggtaccgcaaaggattcaagcaacaatggaattacgtgaacgatgaaaggaggatgacgaaagacaatgatcgcatgacagcatataggacagctcaaacaacatgggccaaataggtagattcacatgtggatactaacagaactaaagttatatgtcacggaatcactgcatcacactacaatggctaagaatggaatgagccaagggagagaaagtgctgcaaggagatggaaccattcaatgagtcatcagcttatacagttgggctgcctgaggcagcatatgtggataaag

SEQ ID NO: 30147 - DNA, 396 bp, Gossypium hirsutum
  Clone ID: LIB3148-035-Q1-K1-A8
ggaatttgcaaatgtaggtactgcaaactatgtaacacaggaacttattatatacgggatgctggcacgctaaaagactataaagatgatggggttagtgaggacataacctaaagttggacatggatggtcaagacagatacgatgtcaatgataccgacagctatgtaaaaggggaagccaatctaaaagagacatgctggcgtaggccggcaaggaaagtaaaaggtaaactttaggggaagctaaaagaaattaaacgggcgatgtaaaaaaacggctagaaagggaaaaacgtgggtggaccaaaaataataaacttgaaagaaatgcccctttgggcaggaaacggaataatgaaaaagcccgaaacgtttgacctttccaaaagttaag

SEQ ID NO: 30148 - DNA, 434 bp, Gossypium hirsutum
  Clone ID: LIB3148-035-Q1-K1-A9
gttcgggccacgcgccacgcgtgccgatttgagatttggatccaaccttttattgatttcagagatttttaatggcaggcggaggaggcaaaacagcagatgcacagtttttccacctcctttccaatctactccatcaggtagaagcattgactaaccaggaagaagttgaactgcgttcgaaaatcgaagcccttggattggaggttacaaaagttccttccatgtctacacacagacttgatgagctggaaattgcgagagagttggacaagttatcggctaagttagacggtgtggatgagatgatatcctcagccatggcagcagacccgcaagtgcgatcccttttgagtggcactgctgatttatggatgccggttattactgccaatgctgatgagcgacacaatttggctgcatcaatcagtact

SEQ ID NO: 30149 - DNA, 183 bp, Gossypium hirsutum
  unsure (1)..(183): unsure at all n locations; Clone ID: LIB3148-035-Q1-K1-B1
tcttggtcttgttggaatgttttgttattgaattttgatcaatgtgtctagtgttgatgcttctcttttgagtattcaatttagaaaaggactctgtcaagctttgcatttctttcctatttccccctattctgaactattactaaaaaaattaaggtttttgttattgaattttgatcanna

SEQ ID NO: 30150 - DNA, 342 bp, Gossypium hirsutum
  Clone ID: LIB3148-035-Q1-K1-B10
cccacgcgtccgaggagctggggctggatatggacaagttcatcacacactctgtgcctggggccgatattaacaaggcattcgactacatgctccagggtataggtctgagatgcatgattcatttggatgcttaaggaaatgttgctgctgtatatttgcccatccaaggatcaaaactctaatgttttgtcctactatgtgttatattatgtgcctacttaagctacctttcccggttatcaagagtgcctatatagaactctctctctctaaaaaaaaaaaaaagagaaaagagttctttatatggaagtttatattatatgctgagagaataaatta

SEQ ID NO: 30151 - DNA, 407 bp, Gossypium hirsutum
  Clone ID: LIB3148-035-Q1-K1-B11
gatcttttcagctcccctgatgtggtcaagcagatcacctctatcaccattgaacctggtgttgaggtggaggttaccatcgcagattcttaaatatgcctcacttatgctttttggcaaccactagttttagtcaattagaagacttccatctgatatagccctcgatgtcctaaataatcttaagcttgagtggttggttacagggcttttgtagtttgtgattttcccatgctagtattaaagttaaagttctattttgtcctgtggctctggattctctttcctttttgttacctaaaaagatcatgtctggatgattttgtttattgcattatttgacattaaatatcacgaagctagctgcttcattttcattttgcttaatggagggtcgattatgggaa

SEQ ID NO: 30152 - DNA, 287 bp, Gossypium hirsutum
  Clone ID: LIB3148-035-Q1-K1-B12
cccacgcgtacgcggacgcgtgggcaaaactttctggtggtgtggctgttttgaagatcgggggagctagtgaagctgaagttggtgagaagaaggatagagttacagatgcactgaatgcaacaaaagcagctgtagaagagggtattgtgccaggtggtggtgtcgctctgttgtatgcattgaaagagttggacaagctacctacagctaactttgaccagaagattggtgttcaaataatacagaatgctctaaagacacctgtgcacacaattgcttcaaat

SEQ ID NO: 30153 - DNA, 239 bp, Gossypium hirsutum
  Clone ID: LIB3148-035-Q1-K1-B2
aaagtgtgaaggtgcccattgcgatattgggagctgagcaggaccatatatctcccccagagcttttaaaacagtttgatgagatcttaaaagcgagtgaggttgatagctttgtgaagatatttcctaaagttggccatggatggtcagtcagatacgatgtcaatgatccgacagctatgtcgagtgctaacgaagctcaacaagatatgctggcgtggttcgcaaagtacgttaag

SEQ ID NO: 30154 - DNA, 384 bp, Gossypium hirsutum
  Clone ID: LIB3148-035-Q1-K1-B3
cccacgcgtccgatcatttccacttttttcccttatcatgtatattttgagctactgtagtgtaatatattaataaatttgaactactgtagtataattatattaataaaatgaaataaagccggtaatggctggtaaattattaaaaaaaaaaaacaaaaaaaaataatacaacagatatataaaatagatacaaaagctcaacaagatatgctgggggggttcgaaaagtacgttaagtgaaaaaactaattcaaaagggggggcggttttaggggatcaaatttaatttccggggcctgggaaggaaatattttttttttggggcccctaaattaaaattcctgggcgggtttttaaaaaggggggaatgggaaaacccgg

SEQ ID NO: 30155 - DNA, 405 bp, Gossypium hirsutum
  Clone ID: LIB3148-035-Q1-K1-B4
tcggcccaacattattgaactggccggcccgggagtctttacgccgcaacgaaaaaagccggtggggaaatcgctcacacttataaccatatataccggctttccctcaccggacttagatttttcacacgtttatggtgcatggggaagacccgatatggcttacttctttttcactaaagatattcttcaagggaaacccattgatatctacaaacaccaaaatcaaaagcgggggcccgtgctttaacttaatctaccaccttttgaaaaggtggtttagaaccgttaaaaacgcgggaaaaaacacccgttggcgcgggaaaaaaaaaaggcccgcttcattaaagggtttcaacttggggaaaaatttcccttgttcccgcgggcgattaatcttcattt

SEQ ID NO: 30156 - DNA, 382 bp, Gossypium hirsutum
  Clone ID: LIB3148-035-Q1-K1-B5
gctatatatcaagcgcgcgctctagaggagacacacttacacgcgcgcgcatgcgacacgatagatctcttatatagtgacataaatataaaacacagtgcgcggcgttacaccacggcgactgtgaaaacactgtcgtgacacaaatcaatagcgtcgcacaacatatccctttcgccagatgtcgtgatatcgaaaagaggcgcacagagagcgcttttcaacacatgcgcacactgtatgtcgaatgtgacacgcgctgtgtcgccgcatataacgcgccgggtgtgggggggacacgcacagtgacagctacactcttgagagcgctatagcccgctcttttggctttctttcctttctttatcgcgacatgtgccgg

SEQ ID NO: 30157 - DNA, 283 bp, Gossypium hirsutum
  Clone ID: LIB3148-035-Q1-K1-B6
ggtgcatgagggtccccaatgtggagccactagttaagacaaacacgtacgagagaggttgatgccactattttgatcccaactctgctactgggggatgccaacaatcaagccatcaaagctcgggtagaagaccatgaagcacaccttgaacacaaaaacgatgcgcttctgtgctgcaaattaaaccaacctactactttcaactattggatttcgtatattgattcaaatttaaaataagactggtatacataccttatttgtggaccaaaagggggac

SEQ ID NO: 30158 - DNA, 398 bp, Gossypium hirsutum
  Clone ID: LIB3148-035-Q1-K1-B7
cccacgcgtccggccaataatcttctctttgtctccggtgttctcggtcttattccagagactggaaagttcatctcagacagtgtagaggatcaaaccgagcaggtactgaaaaatatgggagaaatactgaaagctagtggtgctgactattcctctgtggttaagacgacaattatgctagctgacttgaaagacttcaagaaaggtaatgagatctatgctaaatactttccttcaccagcaccggctcggtcgacttatcaagtagctgcattgccattggatgccaagattgaaattgaatgcattgcggcactcaaggcatgatgacaggggagtttgaagttataaagtaggaaactaagctcttaaagaggttatgtctcatttgcagg

SEQ ID NO: 30159 - DNA, 397 bp, Gossypium hirsutum
  Clone ID: LIB3148-035-Q1-K1-B8
cccacgcgtccgagaagtagaaagagaaaaatcaaaaatggggagaggcaagattgagatcaagaggattgagaactcaagtaacaggcaggtcacttactcaaagagaaggaatggaatcatgaagaaagctaaagagattactgttctttgtgatgctaaagtttctcttatcatctttgctagttctgggaagatgcatgaatattgcaacccttctactaagttgattgatattttggaccaatatcaaaaaacttctgggaaaaagttatgggatgctaaacatgaaaatctcaacaatgaaatagatagaatcaagaaagagaatgattgcatgcaaattgagctcaagcatttgaaaggggaggatattacatttttgccttacaaggag

SEQ ID NO: 30160 - DNA, 419 bp, Gossypium hirsutum
  Clone ID: LIB3148-035-Q1-K1-C1
atgacgtaaaaaacaagaatgaacttcttgtcttgattcggaaatatattgaaggcattgctgttattgatctcaaggatgcatacccgaatgtgatggaggacttgcagggtctgaaagctgcaggtcagatttggctgctatcaaattttgattctcaggaggacattgccttcccaaatgatcccagggtgcctattaaggttgatgatgaccttaaagagctatttcggtctattgaattgccacgagacatgctcgacatcgaaaaaaatctcaaaaaaaacggatgaaaacttcgtacaaccaaagaaaaaagaaggcttgtggacaaagtcaaaggattaacttcaaacccaaacccagacagaaaaacaaagagttcttcaagaagggcaagcttaccaatgcacattttt

SEQ ID NO: 30161 - DNA, 235 bp, Gossypium hirsutum
  Clone ID: LIB3148-035-Q1-K1-C10
cccacgcgtccgcccacgcgtccgcccacgcgtccgcccacgcgtccgggtctgacgagtggtgatttaagcaatgagcaaagccaaccttgtgcttagctcatcttcaggttgtcatgcctcatttctcacccaaaaaaaaaaaaataaaaaaataaaaaaaccaacaaaaaaaggagggggggtatatgctatttccaaaaaaaaaacgcaggccgtatataacgcgggtaaa

SEQ ID NO: 30162 - DNA, 407 bp, Gossypium hirsutum
  Clone ID: LIB3148-035-Q1-K1-C11
ggcccgaaaaccccggtccacccacccctccccccaccccttccaaaaaaaaaaaatttaattattaaaaaaaaaaaaaaaaacaaagcggccgggtaaatttaaaaaagacgccaaacaaacctcccgccccttttatagacccaacccaacttaccccttcctcccccctaaataactctgccccacgttcacataatttcaacttacctgccctaattatacaccattatatcttttaaaaccctgccctaacccaaactaatccccctcgaattaaaccccctttccccatgcaacccttttctctaacaacctctaatcccatccaccatacataccatatccccactttatctcaaacataaaaaccccccttcttttcccctttaaaataaattacaaac

SEQ ID NO: 30163 - DNA, 246 bp, Gossypium hirsutum
  Clone ID: LIB3148-035-Q1-K1-C12
cccacgcgtccggtcggaaatttggtgggaatcaagttattgctgtctactatccggagaacaagtttgcagagagggagtacgatggctaattttcatataaactcttcttagtattgtgattctctatgttcagttgattcacattgtgacataatatatgttaaaactagttgagatgattgtggagattatttctgattctgaaacctttgttgaacaatatatttcaaaaggttcatttcg

SEQ ID NO: 30164 - DNA, 392 bp, Gossypium hirsutum
  Clone ID: LIB3148-035-Q1-K1-C2
atgcaatggttgaaagataaggtttattccattcgtgatgctgctgctaataacgtgaagcgcctggctgaagaattgggaccagattgggcaatgcagcatatagttccacaggttttagacatgattaacaatcctcattatctgtatcggatgaccattctacatgcaatttctctacttgcccccgttatgggctcaaatataactggctcaaaactactccctgtggttatcaatgcttaaaaagatagggtcccaaacataaagttaattgtggccaaggggctgaagtaattatttctaatggtggataaatttgggttggaaaaaacattccgtcattccttagttgattgaagtaaggatcttaatggggttgtaaggttttt

SEQ ID NO: 30165 - DNA, 308 bp, Gossypium hirsutum
  unsure (1)..(308): unsure at all n locations; Clone ID: LIB3148-035-Q1-K1-C3
cccacgcgtccgaaaggatcacaagctacaaaagagcttgtttaacaagaagttcaacctcaccttaagcagactattgttattctgcgtggaaggaaattagcctctactgtactccagtgtagcgtagcatagcatagttatattaattttagaatgcttgcttttagtttgttcatacaggtgttgcaattaaaattattaagctgatattcaactgttaaattattctgtaatcataatgttccaagttgttagtcgtctnanaaaaaaaaaataaaaaaaaaaanaaaaaaaaataataataa

SEQ ID NO: 30166 - DNA, 350 bp, Gossypium hirsutum
  Clone ID: LIB3148-035-Q1-K1-C4
tatacatttaatcttcagattagcaaaagtaggaatgtaattccaagaaattcctcatattgtaattttgactttcgaggggatttgtaaattccatagttttttgtaaaaggctttattttcggtttgtaaattaataggattttgagtaccctcctgtaatagtttaggcgcttctaaccgaaaaattaccagatggttctcctctccacacttggaagtcttcatttactgacgttgcaaaaggaatctgcaaaatctttttagcaaaaaaaaaaaaaaaaaaaaaaataaaaaaataataatagtaaaaaaataaagaggggtggaaaaaaaaaaacaagggattg

SEQ ID NO: 30167 - DNA, 377 bp, Gossypium hirsutum
  Clone ID: LIB3148-035-Q1-K1-C5
ctgaatttgcccctctttggggaggtttcaattgtctcatttgtggttgcattgtgctggtggagttttgctgttgtctgggctgtcaatcggcgagaatcatattcatgggtgggccaagatattcttgtaattctccacatcgccactttgcattccagtaatggatgttttgggaattgatcatactttctaagatacaaatatttaccactctctctagtgtaaaatcttggcttaataatatgtggaatttgtggatgccaatttaaggacaagaaagatggtttaataaactgggcaattaactgattttatggctgggaaacaagtagggttttgagatttaaatttaatggtgaatgatgttaaaagtt

SEQ ID NO: 30168 - DNA, 405 bp, Gossypium hirsutum
  Clone ID: LIB3148-035-Q1-K1-C6
atcccccattgttgttctcatatatagatcacgccattaacgaagttccccctcaaccctcgattccaccaatattttgtaatctggtaaacagagatgagtaattgtagaaaaaataacatttccctattgtaaaaaaagaaaaaaaaaaataaaaaaaaaaaaactaaaaaaaaaaaaaaacggaaaatctttctaaaatgggaacttcttcctgtaggtaccaatggataaagaagattgggaaacctataatgcagattaaatatggccaaggaaatgcaattaaattgttcctattgttgatcaatttggggtggaaaaaacaaggcggacatgattaattgcattgagttaagatcctgatgtggatgagaaggtttttggcacccaagccctaaagtt

SEQ ID NO: 30169 - DNA, 403 bp, Gossypium hirsutum
  Clone ID: LIB3148-035-Q1-K1-C7
ggaaaagttccgtgctggtcagatctgggcactgtatggtgatgaggatggcttgccaaagtattatggtgagatcaagaaagtcgagtcctcccctgttttcaaagtacatgtgagatggcttttttcttgcccattagaaaccacgactcagtggcaagattcagacatgccaacttgttgcgggagattcgggattagaaggggttcccagacctacacctccaccgattccttttctcatttgttaaaagccgagcctacagatacgaagggcaaatacaatatcatacctagaaaaggtgaggtatggggattgtaccggaactggacgcccaatatcaaatgttcggacttggagaactgggaatatgacatagtgcaagttttggaggaaacttat

SEQ ID NO: 30170 - DNA, 188 bp, Gossypium hirsutum
  Clone ID: LIB3148-035-Q1-K1-C8
gacgagttatgatatgccctgggggaaatctttagactttgaaacttttaaaatcatattcggttctttttaacgctcagaactgctgttatccattcgatttatcatttcattgataattccctgatcgagggcaagtaataccatggaagagcgaatggagttcggtcttttctttttcttttttc

SEQ ID NO: 30171 - DNA, 126 bp, Gossypium hirsutum
  Clone ID: LIB3148-035-Q1-K1-C9
ggagaatcttccaaaaattgcatcttgaaattattaaaatggtcaaaattcttggggcctgggtttttcaaaagattcccttttacaaattaaaacaacggtaaaaacaaattttttttataagga

SEQ ID NO: 30172 - DNA, 418 bp, Gossypium hirsutum
  unsure (1)..(418): unsure at all n locations; Clone ID: LIB3148-035-Q1-K1-D1
cccacgcgtccgcccacgcgtccgcccacgcgtccgcccacgcgtccgggcaaaggtgagcgcatatgtcactcatggtgttttcccgaagcgttcctgggagcggtttactcagaagaacaacaggtcggagaagggatttgcctacttttggatcacagattcatccncccagactgtgaaagccattgaaaacacagctccttttgaaagtcttagtcttggaggatcaattgctgatgctcttcaaatttaaattcaatctccaaaaagcttcatatgaactttttttaaaccgaaagtttaaaaagtatgtgccaatttcatcttaatatgaaatgacgaaataaatgtattatgttttgaggataaaagtattatttagtatgaaaaggtgcatactaatttatataattta

SEQ ID NO: 30173 - DNA, 157 bp, Gossypium hirsutum
  Clone ID: LIB3148-035-Q1-K1-D10
acgcggacgcgtgggcggacacatgggcttacttattggcggacgcatgggcggacgcgtggtgtgacgcatgggcagacgcgtttgttaaatatgaaaaaaaaaaaaaaaaaaaaaaaaaaaaccaaaaaataataaaagggtttgaaatctttag

SEQ ID NO: 30174 - DNA, 128 bp, Gossypium hirsutum
  Clone ID: LIB3148-035-Q1-K1-D11
gtcataatgtatttacgagcactagtcaataagcattgctaattttctgaacagattatggatgcatgcaagtatgtacacatacatatgaatgtacgttgaatgaagtcttctcactatgttttgtc

SEQ ID NO: 30175 - DNA, 315 bp, Gossypium hirsutum
  Clone ID: LIB3148-035-Q1-K1-D12
acgggcatccctcctgctcctagaggtgtcccacagatcactgtctgctttgatatcggggctggtggtatcttaaacgtctctgccgaagacaaaaccactggacaaaagaacaaaatcaccatcacaaacgacaagggccgactctacaaagaagaaattgaaaagatggttcaagatgcagagaaatacacatccgaagatgaagaacataaaaagaatgtcgaggcaaacaatgcattggaaaactatgcatacaatatgaggaacacagttaaggacgaaaaagatggtgcccaacttccaacaactgat

SEQ ID NO: 30176 - DNA, 401 bp, Gossypium hirsutum
  Clone ID: LIB3148-035-Q1-K1-D2
tttaagagatgcggtttcacgatccaccacacaggtatatcctaaatcatggactgctatttacatggctcttgataatgttggaatgtggaatgtgagaagtgagttttgggcaaggcaatatcttgggcagcaattttacttgagagtttatacacctgtgaactcactcaaggatgaatatctcattccaaagaatgctttgctttgtggcagagcccaaggaagaagcacaaggcctctttgaaacatttccagtagccgaaattgttgagaatcaaccattagtcaattataaaatatgcctcaattcttttcattttttggttcaccaaaatctgtatttggttttgtatctaaagaaatgaaaataattgtattaaattagaacattctttttg

SEQ ID NO: 30177 - DNA, 270 bp, Gossypium hirsutum
  Clone ID: LIB3148-035-Q1-K1-D3
cccacgcgtccgcggacggtgggtcaaaatctgcaaagggcttctccgcttcaccacaatttgttgatcgatcaatcacaaaagacaaatgtacggttcaaatatgtgatcaaatgtctagcaagctcaattatgatgatgaatggcagggaattcaacgcagcacgtttctggtagatggagatgctctaactaactcctctgatcaaaatgcaactgctggggcatctagccgcacctcatcagatacacgaagacgaaggtttgacc

SEQ ID NO: 30178 - DNA, 128 bp, Gossypium hirsutum
  Clone ID: LIB3148-035-Q1-K1-D4
ccccgacgacccacgcgtacgcccacgcgtccggcgaacggtagacactcaactcgcgaaagccaatgactgcaactacgaacggaacataccgaaatcggagcctaccaaacgacccgaggaagaca

SEQ ID NO: 30179 - DNA, 54 bp, Gossypium hirsutum
  Clone ID: LIB3148-035-Q1-K1-D5
ctatttcaatgccctgtaatagtttttaggcactatgtactgtgaattctcccg

SEQ ID NO: 30180 - DNA, 395 bp, Gossypium hirsutum
  Clone ID: LIB3148-035-Q1-K1-D6
cccacgcgtccgaaaagcccatatccatggctacgttttctcctcctcctctacctacatctttctctgtcagaccacacttaacccacaattcaagtctttctctccctttcaagagaccctttcttctactatccactattcccaagtctttaccagacaatggagctggggtttccgcttctgttgctgctgtcgaaaacccaacatccaaccagattgaaaacgccgcggaagtctcttcttggtctaacggaaccgctattgccacattggcttcaaatgcttaaggtttgaacaaatttgattaccctaagttgattggaagcacttgggaattggaaccagtttgaaaaaaatgaaccaactacctggattcttgtatttaatcctaa

SEQ ID NO: 30181 - DNA, 183 bp, Gossypium hirsutum
  unsure (1)..(183): unsure at all n locations; Clone ID: LIB3148-035-Q1-K1-D7
cccacgcgtccgatttttgatggacttgattagacgatatggaaaattgctaaaacatcacatgaaaatagttatgaacattggctatttgcggttggnaaaaaaaaaaaaaaaaaaaaaaaaaacatatactaacaaataaaacaaacaacaaaaccaaacaataaaacatccctaaatcaa

SEQ ID NO: 30182 - DNA, 410 bp, Gossypium hirsutum
  unsure (1)..(410): unsure at all n locations; Clone ID: LIB3148-035-Q1-K1-E1
gcccctcacaattctagggtttttgccgcaccaccaacagaagaaatgggtaaaggaactggaagctttggaaagagaaggaacaagactcatactctctgcgttcgatgtggacgtcgaagcttccatctccaaaagagccgttgcggtgcttgtggctatcctgccagccgcatccgaaaatataactggagtatgaaggctattagaaaaaaaccaccgggactggccgcatgagatatcttcgtcatgtgcccaagaaattcaaaactggctttagagaaagtactgaagcagcttcaaagaagaaggcaacttgagctgcttcataagtttaattgtggtgttttcttttcaaattcctataaacacaagttttgtgtttggattaactggngtacttttatttt

SEQ ID NO: 30183 - DNA, 348 bp, Gossypium hirsutum
  Clone ID: LIB3148-035-Q1-K1-E10
tgctgcaacaaattattattacatctttaaatatccacaggctggcatttccagctaaccgaatggttccatttgctcaaccacatgcgaataatccatttggtggaagcacaggcctattgtagtgttaaatacgaagagttgatgggtgtgtattttggttgggagatgagaagagtgtgtagaaagcacctgtgttttgcacttgtatgggctgtaaaagccagcctgtggatatttaaagatgtaataataatttgttgctgccaccaattcatgaaaaaaaaatgattaccccgacgactaaactttagaaaaacaaaataaaatccggtttaaggaacaaaa

SEQ ID NO: 30184 - DNA, 282 bp, Gossypium hirsutum
  Clone ID: LIB3148-035-Q1-K1-E11
gttcaactgataaaagattcattatgacatgaagtaacaacgttgtttctgatttttgctgtgttcttctagttctacgcattttcagacatctcttgtacaagtaaacttcataaataaacttcataaatagagaaagaatcaagacaccgcatgtatcaagatattgatacttttatgtggtgtaatattatgcacttggacaatgttgttactatgtggtgtactactaattatgtattttgataatattatttctagtactcattcgggtttcgaagt

SEQ ID NO: 30185 - DNA, 281 bp, Gossypium hirsutum
  Clone ID: LIB3148-035-Q1-K1-E12
gtgatttttgttatacattgattttgaattttaaatggaatcttactgggaaaattttatgcgtgcttaaaaaaaaaaaaaaaaaaaaaaataaataaaaaaaaaaaaactaaataaataaaataaataaaataaagaaagaatcaagaaaaacgcatgtatcaagaaattgatacttttatgtggtgaaatattatgcacttgtacaatgactttactaagtggtgtaatactaattaagtatttggatcatcttatttataatactcattgcggtttcg

SEQ ID NO: 30186 - DNA, 302 bp, Gossypium hirsutum
  Clone ID: LIB3148-035-Q1-K1-E3
aactgcttgaaggaaccttataagactgaagccctttctcgtgagaaagtccatttctccatctccaagtggactgatggaaagcctgaaaagcccaccatccgctcagattcgcctgaagaatgagttgtgtggttggtcatcaaagtcgccaattgggaaggactcgaggagtttaatttttgttatttttgtaattcttgtacaatgcctgtgaacagatttcagggtttgagatgctgctgcattttcataataatctctactttgcaaataatagactgaggtttcattggactgct

SEQ ID NO: 30187 - DNA, 369 bp, Gossypium hirsutum
  Clone ID: LIB3148-035-Q1-K1-E4
cccacgcgtacgcccacgcgtacgcggcaacctctgttcctaggcaacaatcataccgttcatcgcccctgatctgaaccgagaccccccaaaaatcgtcgaacacccaaagaatttagcaacccatcaccacctcaaaagtaacccaccgatctttgtacccccaccctagatagtagtagccctcaatacccttccccccttaaaaccccgttaaagtttcttgcgatcccttcaaaaaccatctccaccattcttttcccttcccccgacctgccgtccgccccggccgtggccaatggcttccttggaaaagtcaacacacaaccttccaaattaagacttccaacttttattaaaccctttttt

SEQ ID NO: 30188 - DNA, 346 bp, Gossypium hirsutum
  unsure (1)..(346): unsure at all n locations; Clone ID: LIB3148-035-Q1-K1-E6
cccacgcgtccgcccacgcgtccgaaaaaaaaaaaaaaaaaaaaaaaaaaaaaaaaaaaagggggaaaaaaaaaaaaaaaaaaaaaaaaaaaaaaaaaaaaaaaaaaaaaaaaaaaaaaaaaaaaaaaaaaaaaaaaaaaaaaaataaaaagaaaaaaaaattgnaaagggggggtgggtaaaaaaaaataaattataagaagggggaattgaaaaagaaaaattatttttttagggaaactaaaaaaaaatgaaaggggcgggaattaaaaaaagtggaaaaggaaaaacccgggggaacccaaaataaaaagccctaaaaaaaattcccttttttccagggggc

SEQ ID NO: 30189 - DNA, 404 bp, Gossypium hirsutum
  Clone ID: LIB3148-035-Q1-K1-E7
ggaaaataaaacagaggttatgcaaaagttaacttccctttttttttcacgtagagcaggttttccctcaatgtagaggccttataagttgcctaggtactccccagatcgcgagtactgatagatattgggtctatccatcggccttctctaatagggcactcaaccatcccatggtcaagtgcgcaagaaaaaaactaaagcaagaaccagacccgatccaccaatcaaatcagtgaaaaacgctctccattttcacttggcttgaaggcttacacaaacaaaagaagtgaaaaataaatttcgacaggacggactgaaagcaccaagtcagaaagaaacgagcaagtgtcgtgtgcaagtgtggctttcaagcttgtctccctgttgccttaagcctggag

SEQ ID NO: 30190 - DNA, 297 bp, Gossypium hirsutum
  Clone ID: LIB3148-035-Q1-K1-E8
gaacagggaaaaaactgctcatcaagaggcattaaaagatgagctctgaagaggggacttgagaagagaagaggcataaatagtgcattgtacgttaaatacgagaattgctattgactaagcggatgactgatctcccgtttttccttagctttacatttaaaaaagacctagctatgaataatgcaagatgtatttttatttttagaaaggttaaaccaaggtataataagtctgtaacaagtaaatttgctattagaaacattcgagccaaaactaaagaggatattttaattt

SEQ ID NO: 30191 - DNA, 410 bp, Gossypium hirsutum
  Clone ID: LIB3148-035-Q1-K1-E9
gggagcttcccaaggttttgggtcataattcagtcggtagagtgttgttggattctgcttgtggtggtactggggttataactaaagatccatcggttaagacctctaaaagtttggatgatatacaaaaatgtgcccatttgcagaagcaactgatacttgctgcaatcgatatggttgatgcaaattccaaatccggcggatacattgtttactcaacatgctcaataatggttccagagaatgaagcggtcatcgactatgcactcaagaagagagatgtcaaagtagtaccgtgtggacttgactttggatgtcctggatatatccggtttaaggaacatcagtttcacaccttcttagaaaaccaaagcggttttatcctcatgtccacaatatggatggatttt

SEQ ID NO: 30192 - DNA, 416 bp, Gossypium hirsutum
  Clone ID: LIB3148-035-Q1-K1-F1
cccacgcgtccgcccacgcgtccgcccacgcgtccgcttgcacctgataggagcaaattgtcaaaacgccatggtgcggcttcagttggtcagtacagagatatgggttatctgcctcaggcgacggtgaattacttggcacttctaggttggggtgatggaactgaaaatgaatttttcaccattgatcaacttgttgaaaaattctcaattggtcgcgttaacaaaagtggcgctgtttttgactctaccaagttaaggtggatgaatggtcagcacttaagagcgattccctttgaggagttgtcccagcttattggtgagcactggaagagtactgggcttctcacagagtcagaagggccatttgtagatgatgcagttcagctgcttaaggatgggatcgacttggtaac

SEQ ID NO: 30193 - DNA, 404 bp, Gossypium hirsutum
  Clone ID: LIB3148-035-Q1-K1-F10
gacaagtgcaaggcttgcgacatgactgtctatgtggtatatatgatgacactcgaaggggtgccataccataaaacttgttttaaatgcatccattgcaagggtaacctacagatgaccacttattctgggatggatggaatactgtattgcaagcctcattttgagcaactgtttaaggaatctgggaatttcagcaagaattttcaaacagggaccaggccgactgaactgaataggactcccagcaaactttcatccctgttttctggaaccctagacaagtgtgcagcttgcgagaaaacagtgtacccgttggaaaaggttactatggaaagtgaatgtttccacaagacatgttttaagtgcgcccacggtggctgtccactgacacactcatctta

SEQ ID NO: 30194 - DNA, 361 bp, Gossypium hirsutum
  unsure (1)..(361): unsure at all n locations; Clone ID: LIB3148-035-Q1-K1-F11
tgatattgcacctctgaaattatggttgtcggtttccttattcgccttgtatattaatttgtggaatgatgtatgcaacttttattccaactaaaattcaaaaaaaaaaaaaaaaaaaaaaaaaaaaaaaaaaaaaaaaaaaaaaaaaaaaaaaaaaaaaaaanaaannnnanggggcggccgatttaaaagaaccgggcgtcccttctcaagcatccaacttaataactcttttatacaaaaaaataaatttaatttactggcccccaatttaaaaaaactggccggggaaaaacaaggcggtacctaaaaaaaccccgttgtaacaaaattaaatttcctcgaaagaataataattaaa

SEQ ID NO: 30195 - DNA, 305 bp, Gossypium hirsutum
  Clone ID: LIB3148-035-Q1-K1-F12
cccacgcgtccggagttttgaagttgaattcaatgaggaatggcgatcattggaagaacagtgatgttttagttttcaacacttggctatggtggtaccgcagaggattaaagcaacaatgggattatgtgaatgatgaagggaggattacgaaagatattgatcgtatgactgcatttcggacagctttaacaacatgggccaaatgggttgattcagatgtggatactaacagaactaaagttatatttcaaggaatctgtccatcacactacaatggctcggaatggaatgagccaagggtg

SEQ ID NO: 30196 - DNA, 368 bp, Gossypium hirsutum
  Clone ID: LIB3148-035-Q1-K1-F2
gccttgcaatgggttatgctaaggggaaattgactttcttcctcggtgatgtggactcagttgttgacctgataccagctgacatggtggtgaatgccatcatcgtagccatggtagcccatgcatcgaaccaaccatcggagacgatctaccaagtgggttcgtcgatgaggaacccggtcaagtaccatagcctccaagactttggctaccgatacttctccaagaaaccttggatcaacaaaaatgggaaagctgttattgttggtaaaattcgtgtcatggatagcatggccagcttccatagatacatggctcttcgatacttgcttcctttgaagggactggaatttgcaaatacagcattt

SEQ ID NO: 30197 - DNA, 278 bp, Gossypium hirsutum
  Clone ID: LIB3148-035-Q1-K1-F3
cgacccacgcgtacgggaagcgcgcacacgaagtcgatatgcaatgttcatgtgcaagtaagtttttgttgcttgggcacaaaacgtgaagcagctgaaatgcttaaaagctgctaccgggtcttcaattcaagaaaactctgagcatcacccttcggctgcaattcaaatggtgagagtgttgcgcaatgcatctgctactgacgagattcatcctgcccacgtaacatactgagctgagctgaaaagcaatggaaccatacttcagaaattattta

SEQ ID NO: 30198 - DNA, 411 bp, Gossypium hirsutum
  Clone ID: LIB3148-035-Q1-K1-F4
cagactctaccaagggtagccccatcaaggtcccataccttaaccagccatggaaaaggatattgtccccgttggaatccaggcggatgcaggtgagagctgcacctgatcgcttatcggagaaggtggagcagagcatcaaggaagcacaagaggcgtgctcggatgacccggccagcggagagtgcgtggctgcttgggacgaggtggaagaactgagtgcagcagccagccacgccagggataggctgaaagataacgatcctctcgagaattactgccaagacaaccccgagacagatgaatgcaaaacttatgataattgaaactatgggtttttttttttaagtttatgaagatccttctgttttagatgatgaatatgggtgtaagactactcttatgtgaaac

SEQ ID NO: 30199 - DNA, 117 bp, Gossypium hirsutum
  Clone ID: LIB3148-035-Q1-K1-F5
agattttggttttcctcgtctttttttcatttttttggtgtaaattctagtagtagcaacagttttttcctgggattctctccaactgtctatttatcttcaaatcagttgaatctc

SEQ ID NO: 30200 - DNA, 227 bp, Gossypium hirsutum
  Clone ID: LIB3148-035-Q1-K1-F6
ggaaattcagagcttggaggaaatagagaagagatacaaggacgagtagtgttgttaactggaacatattgggatgagctgctgctaaagaaaactcatgtatgtagtaccccctctagacttgagactgttattttataaaaagcatatttgcggtatttgtatgatgtcatgtttcctttatagcttaaactctcctgcatctctaggctacaatggagggtttt

SEQ ID NO: 30201 - DNA, 113 bp, Gossypium hirsutum
  Clone ID: LIB3148-035-Q1-K1-F7
ataaaaacaacaaaaggcgcagaatgaaaatttatgaacagaagccaaggagaaagcagcggtaggaagcctagaaagcaaaacaaaaaagaacaaaataactagacagcggc

SEQ ID NO: 30202 - DNA, 383 bp, Gossypium hirsutum
  unsure (1)..(383): unsure at all n locations; Clone ID: LIB3148-035-Q1-K1-F8
ctctttttgttttcattttccttttgtcctttttctctttcctaggttttcggttttctgagccaaaggctttcgtgtagcttcatcaatggcacaggaggaggttcagaacggaggaccggagaaagtagcggaggtgagcttcacggcgctgaaaccgcagctcatggtcgaagcacccaaggcagctgatgcggtgcagttctacaagaccgcgtttggcgctgttgaggctggccgtaccgtgtaccctaagcgcaaggctgagcaagagcagcctcacgtnctctccgctcaacttgagcttgctggctctaccattctcgtttctgacatcgctgataactctacttcggggaaaaccgaagggactggatgtgtgc

SEQ ID NO: 30203 - DNA, 411 bp, Gossypium hirsutum
  unsure (1)..(411): unsure at all n locations; Clone ID: LIB3148-035-Q1-K1-F9
ctccgagggagggtatggggccgagaaccccaccgaccaaatggcttcatcaccaccgtgtgtctgtggatcaccgccgagcagggcgtcaaatccggtaatccaagatgcccgattcaacgacgagcagccggtgctacctncactaacatccccgggaccctactcaaagggaggatgcgtgagggtgaaattcgggcagatgccagctgctgtacgaatcgagggatttgattgcctcaccagagatggccgccatcgcagaatctccgccgtggcttaagaaataccgacgggaagaaaattttgatatgagaaaaaaaaattgagaggagagagggagatgataaaattaagttacaacttggaatagtgtgggtagtgttggatttgtaaatagaagattaaaat

SEQ ID NO: 30204 - DNA, 364 bp, Gossypium hirsutum
  Clone ID: LIB3148-035-Q1-K1-G1
gtgtggtctgatcgaacccagtgacgtgaatgtctctctaatggaacacgagctagaaacaaattgcacagaattcccccatcccgacctgcttataaggacaagtggagagtacagaattagcaatttcatgttatggcagctggcatatactgaattgtactttgcacagtcactatggccggatttcggaaaagccgaatttttgaacgcattgcttgcctttcaacaaaagcagaaacgttacggtgtatgaagttatttgtgtacgactgttgacacttaattattgtggaatgggaaagaattgatggtgacacgcgaaggggcttaacaagaagctggatttggccattggagtatt

SEQ ID NO: 30205 - DNA, 405 bp, Gossypium hirsutum
  Clone ID: LIB3148-035-Q1-K1-G10
caattcaagattcaagcgtgtatgcgtcttctgtggtagcagtcctggcaagaatcctagcgtccagcttgctgctattcaacttggccaacaactggttgaaagggacattgacttggtttatggtggaggaagcattggcttgatggggctcgtctctcaagcagtctttgatggcggccgtcacgtgttgggggtaattcccaagacactgatgccaaaagagctaacaagcgaaaccgtgggaaaagtaaaaactttatcaagaatgcaccaacgtaaaacttaaattgctcgtcaagcttatgcctttattgccttaccaagtggttattgaaccttggaagaactgctggaagtgatcacttgggctcaacttggaattcatgacaaacctgtgggatt

SEQ ID NO: 30206 - DNA, 137 bp, Gossypium hirsutum
  Clone ID: LIB3148-035-Q1-K1-G11
gttttagagaaatctggtggacggttctcacatgatcaatcagggaatgtggtaaagtggggtcatttgtacgactgggttgattaattacttgaccattctgtacgaaaggcatactcataatagtttattccatt

SEQ ID NO: 30207 - DNA, 79 bp, Gossypium hirsutum
  Clone ID: LIB3148-035-Q1-K1-G2
aaaaaatcaccattttgtgattatatatgtaatttcttttaagtttttaattgtgaaaagaaatggaagtaacttaact

SEQ ID NO: 30208 - DNA, 325 bp, Gossypium hirsutum
  Clone ID: LIB3148-035-Q1-K1-G3
cccacgcgtccggcataaaacacagcgagctacatcccgtacgtgctctctgctgttctgtggtgaattatggcgcgggccgctcatagaggatgcccctaatgtgaaaatggaggatatggtatacagaaatgcagtcctgtgcctccttagtatgaaaccagagacctgcattaaatattgtatagcattatcaaaattaattgatctctcctaatcatgaatagaaaaatgtaacttgatgaacatgaaaaaattaaccacgttgcccatgtatggggccacaaataaaatatgcgggcttctgtaccagtccacttttttt

SEQ ID NO: 30209 - DNA, 284 bp, Gossypium hirsutum
  Clone ID: LIB3148-035-Q1-K1-G4
gagagtccagataccaaaaacaatgtgcaggctaaaatccatgacacggagggtctacccccagaccaacagaggttgatctttgccggtaagcaactggcagatggtctaactgtccctgattacaacatgcaaacggaatacaccctacacttggtgtcttgtctctaaagtgaatgcatatccttgtgaagacaattaccgggcaaaccatcaccttggaagtcgacagctactacactattgacaatgtcaacgtcaaaatcctggacaaagaaagtata

SEQ ID NO: 30210 - DNA, 396 bp, Gossypium hirsutum
  unsure (1)..(396): unsure at all n locations; Clone ID: LIB3148-035-Q1-K1-G5
cccacgcgtccgcccacgcgtccgcaaaattttcctaatcagatgcaaaatttatagcacagtgcactgagataggatgttagtatcgagaaactagtaggattgtgtatccagaaatgcagtcctgtgcctacttagttttaagccagtgatctgcatttaatattgtattgaattatagaaattaattgatctctcctaatcatgtattgtaaaatgtaacttgatgaacatgagttgattaaccacttttaacatgtatggcgctcgaataaaatatacggaataatgtgccagtcactganttnaaaaaaaaaaaaaaaaaaaaagaaaaaaaaaaaacaaaaaaaaaaaaaaaataaaaaggaaaaaaaacaaaaataagggtgcaaaata

SEQ ID NO: 30211 - DNA, 397 bp, Gossypium hirsutum
  Clone ID: LIB3148-035-Q1-K1-G6
cccacgcgtccgcaagattcaacccaaatctaaacacacagagctcagcagaaatctgctgggttttaaggtttagggttttagtatttgagttgcaaaggtctcaatataaaaaaacaaagtgaaaaaaccctaaaattgatacaccataaattagggataaaataaaatatggtgggatgacaaattaatggaaaggccatcaccttggatggtcaaaacttaaatgcttgtaaattagtgcgctaaccaaattttaagggtgtgggtttttgacttaaaaccgctgagttccgcatcagtgggccaactttattggggttaagggactaattttttagttgaacatttaaaaaaaataaacattccagtcggaacaacctttccttcccccttt

SEQ ID NO: 30212 - DNA, 150 bp, Gossypium hirsutum
  Clone ID: LIB3148-035-Q1-K1-G7
tatatcgaaaacatttcatagatggattaactctttttttttgtgtcaaatccttaaattggtagaataagctttaaacattgatttcaattagtgaaaaatgctattactattatgttatataataaaatggataagggattcattgag

SEQ ID NO: 30213 - DNA, 185 bp, Gossypium hirsutum
  Clone ID: LIB3148-035-Q1-K1-G9
atttgtttgagggattacagtatgtaattttagttaacttctatggtttcagtcagttggcgttggatagtttagttcatctcaccattatcagtacctaaagtttttagtggttgatatttggtgttaattttgttataatattaatatatgaatctaaaactcccaagtaattttttttttcc

SEQ ID NO: 30214 - DNA, 418 bp, Gossypium hirsutum
  Clone ID: LIB3148-035-Q1-K1-H1
cccacgcgtccggttaagccacccattgacctccctccggttacggtccctccaattaaccttcccccagggacggtgcctccagtaactaagccaccaagtgggaaaccctgcccaacaccaccaaccaaggacacttgccccattgacacactgaaattgggtgcttgtgtggatctgctgggagggttggtgcacattggactaggtgacccggttgggaaccaatggtgtccggttctttcaagactcgccgagctcgaaactgcggtctgcttgtgcaccaccctcaaacttaagggtctcaaccttaaaatttatgtgccactggctcttcaacttcttgtcacatgtgggaaaacacccccttctgggtacacttgctctctctaaaaccaaattgctagggtgatggact

SEQ ID NO: 30215 - DNA, 230 bp, Gossypium hirsutum
  unsure (1)..(230): unsure at all n locations; Clone ID: LIB3148-035-Q1-K1-H10
aattttgaagaaaaaaaaatccatcaccgatctaagttccccaaattctgttcaaatcgccggcgaaattttgatctgaaaatctaaaaatgtcgtccacattcagcggcgatgaaactgctcctttttttggcttcctcggtgccgctgctgccctcgttttctcctgtatgggagctgcgtatgggacggctaanagcggtgttggtgtggcgtcgatgggagtgatg

SEQ ID NO: 30216 - DNA, 143 bp, Gossypium hirsutum
  Clone ID: LIB3148-035-Q1-K1-H11
ggccgcccttttttttttttttttttttttttttttttttttttttttttttttttggggggttttttttttttatatcccactgttttggaggttgtgttttaatgttaaattagtgttttgttagagtaacaaaagtgaat

SEQ ID NO: 30217 - DNA, 330 bp, Gossypium hirsutum
  Clone ID: LIB3148-035-Q1-K1-H12
aatcatttgaggactgtaaaaaaccagtggcagattatatgcacaattcggggtgaaagtggttttggatgggatgataacatgaaaatgatcacttgtgatagagcgacatatgatgcaacagtgatggcatacaagaagtatgaaccatttttgaataaaagcattgatcattatgataaaatgtctttggttgttggcaaagatatggcaacagggagttttgccagaacatttgctgacatagatttggctgatggtaaccaaaatttaatgcctatagactacgacaatgaagagactaaagagataagacaccacatctttatg

SEQ ID NO: 30218 - DNA, 403 bp, Gossypium hirsutum
  Clone ID: LIB3148-035-Q1-K1-H2
cccacgcgtccgcaacacgggtcttgaagaaaaaaaagctgaagatcaatgttcataggcctgtggggacaagggttgtctttgatgaggaaggcaacacacaagctccacttgctatgttggctgacaagacaagtggcgatatactgcttgaccaaggtattacattatcccttctgttggcctatgttgctgcgattttttattattcttgaaatacctgagtctggcacccatgtttgactcatgtttggacatgatgggtatagaagtatgacccttcaaaagtatggaaaaacttggaaaaattggatatatctgggtcaaacacatacctggattcaacattcacaacccaatataagttattggctactcttctgcaacttttaatggataaatt

SEQ ID NO: 30219 - DNA, 381 bp, Gossypium hirsutum
  Clone ID: LIB3148-035-Q1-K1-H4
acgacccacgcgtccgaaaatcctctcatagcgccgctgtcgatctttaacctttcataccgcaaacaatggttctccaaaacgacatcgattggttgaaccctccggccgagctcgagaagaagaagcacaagctcaagcgtcttgttcaatctcccaattccttcttcatggatgtcaaatgtcaaggctgcttcaacataacaaccgtatttagccactctcaaactgtggtggtgtgtggaaactggcagacggttctgggccaggccaccggcgggagggcttgaattaaccaaggctggtttttcaagaaaaagggggacttaattctattcagcggcaaccattcgaggaagagggtttttttggatgaaccca

SEQ ID NO: 30220 - DNA, 383 bp, Gossypium hirsutum
  Clone ID: LIB3148-035-Q1-K1-H5
gcagcaggcgttagattcaggaatgatgttccggatggcggacttgcgaatgtggctgcaactgtcatgaacctccatggttatgtagctccaaatgactatgagccaacactcattgaagtagtgaacaattaggcatatgttgcagtcgctgaatgggctaaacgagtttataataaggatatatttggttccaaaaataggttggatttgggaaaacatatgtggttttaagttttttccccaaatgggtgggaaaaattttgggccttaatggccccattttaaaaaaacccgatccaattgtgaaaatatttggaattataaggctttttattaatggtccaaaattttaattgccaaaagttggaataattttggtc

SEQ ID NO: 30221 - DNA, 393 bp, Gossypium hirsutum
  Clone ID: LIB3148-035-Q1-K1-H6
cccacgcgtccgcccacgcgtccgcaaactgggatctgaaaaggacaagcgcaaggatgctgataaagaagaaaaagtcaaaaagtctgtgagcatcaatgagttcctgaagccagctgaaggggagaggtactatggacctgggcgtggacgaggccgtggccgaggtcccagaggtgggtatggaggcaacacagccagcaatgtgcaagctccctcaattgcagatcctggacacttcccctcattgggtggcaagtgatgtccggcaccacaatctacgcaatgggtttcacttggaatccggtgtgaattattctatagtcaggagtccccccaccttccctcaaaaaaactcttaagacaaatcaccattatccttggtagaaacca

SEQ ID NO: 30222 - DNA, 404 bp, Gossypium hirsutum
  Clone ID: LIB3148-035-Q1-K1-H7
cccacgcgtccgcccacgcgtccgcttgttgcttccctttttttaaaaaaataaaaaataaaaatcgccattaaggcttgaactgttcttcagccaaaatgggtatttctcgtgattcaatgcacaagaggcgtgccactggtggcaaaaagaacgcttggaggaagaagagaaagtatgagcttggaaggcaacctgctaacacaaagctgtcaagcaacaacagtcacgaggattagggttcgtggcgggaatgtgaagtggcgtgctctgaggctcgacaccggaaactactcatggggaagtgaggctgtgactcgtaagaccagcattttggatgtggtgtacaatgcatccaacaatgagctggttgcgactcaaactctggtgaagagtgctattgt

SEQ ID NO: 30223 - DNA, 207 bp, Gossypium hirsutum
  Clone ID: LIB3148-035-Q1-K1-H8
attggatggaagagtattcttttaagactgggcttgtcgaggtaggaaaggggcttgctgctagagtgacctgctttcaactcatggtagtagtaccaggatttgttacctatgacatggttcgatttgtttatcagatgttttcggactgttgttctgtgttctcttctgtttaaacataattgaatcggttactttatagtcttt

SEQ ID NO: 30224 - DNA, 436 bp, Gossypium hirsutum
  unsure (1)..(436): unsure at all n locations; Clone ID: LIB3148-035-Q1-K1-H9
aaaaaaaaaaaaaaaaaaaaaaaaaatataaattataaaaaaaaaaaaaaaaaaaaaaagggagtgtgaaaattaaaaaaaaaaaaaaaaaaaaaaaaaaaaaaaaaaaaaaaaaaaaaaaaaaaaaangggggaaaaataaaaaaaaggtattttttattgaaaagtgaatgttaaattaaaagttttttttaaaaaaaaaattatttaaaatgaaatcccttttttttaaaaaaaaattattatttaaaaaaaacattccatttttcaaaaattttttttggttaaaaaaaaaaatatactttttggcgaattttttttaaataataaaaaggggaaaaaatatgggagttttaaaaaaaatttttctttttataaataaacatctggttttnnccttttatatagaaaaaaaaaatttgattgtttttttttt

SEQ ID NO: 30225 - DNA, 318 bp, Gossypium hirsutum
  Clone ID: LIB3148-036-Q1-K1-A1
ctcagtgaaatctagcctaaatatcagtcccgatgcaacaattgaggatgatgatgatgtagaagaaaccgagacagagtcggagacaaaagacagtgcagtcaaagatgagttgtagattgcctgaaacctcggggacatgccttctgagttagttttaccctctgatgacaagccgaaggaactgtaacatgcattttcaagtctgaaacttggataaagtgaaacattagttagtagaatatatgtaaaccatagtcgactgtgaaattaatctgtctgcaatttttgctcttttaatgcaccgcagtgctcttt

SEQ ID NO: 30226 - DNA, 409 bp, Gossypium hirsutum
  Clone ID: LIB3148-036-Q1-K1-A11
ttcgtcgagcactactactccacattcgatgccaaccgggccggtttagccaatctctaccaggaaggttccatgttgaccttcgaaggtcaaaagatccagggctctcagagcatcgtggctaagctcaccagccttccttttcagcagtgcaagcacaacatcaccaccgtcgattgccagccttccggctccggcggcatgctcgtattcgtcagcggtaacctccaactcgctggcgagcagcatgctctcaagtttagccagatgtttcatttgatgccaacgccacagggaagcttttatgtgttgaatgacatattcaagttgaactacgcgtgaagacgatgattaatcaagggatgggagtacaatgcctgaggatttaaaacacgtttttgcctatttt

SEQ ID NO: 30227 - DNA, 201 bp, Gossypium hirsutum
  Clone ID: LIB3148-036-Q1-K1-A12
gtgcctaataaggtctatgttttcttggcctcggctattaatatagattgctttatttagcacaccttttatggtattgttaataataaaatacgtctcttggaggatgtaagatcgaacgtgtttaagagcgaatatgttccgttttgtatcgaagaaccatgttccgttttgtgtcaaagaaccaattacttctttctt

SEQ ID NO: 30228 - DNA, 379 bp, Gossypium hirsutum
  Clone ID: LIB3148-036-Q1-K1-A2
gtcgtgatcgtgaccgagcacgtgaacgaggccgggatcgtggtcgtgattatgagcgcgatagagaaagagaccgtgacagggacagggacagggacagggattatgatgctggtgactatgaccgtgaccgtgggcgttccagggatagggatagggaatctgattatgaccgtgtcgagtccaaacatgagagagatcggcacagtgagagggattatgatcatggtgagccagatgaggatcatgggtggtttgagcagcatgatcatgggcataggcggtcggacctagatgaccaacactatgaatactatgatcatcatcgaggtcgaggagaatatgatctggatgctcatggggatcgctatgatcaata

SEQ ID NO: 30229 - DNA, 98 bp, Gossypium hirsutum
  Clone ID: LIB3148-036-Q1-K1-A3
tctaactataatctgcagtaggattgatcaaaaactacacccaattttgtaatagtctacttgcatatttgtatatatttaataataatctcgtgtcc

SEQ ID NO: 30230 - DNA, 386 bp, Gossypium hirsutum
  Clone ID: LIB3148-036-Q1-K1-A4
ggctacttggacctctatttaaggttactttagaaggctgccctaccacaaccttctcgaatgtgttgcctaacaaatgttgggaaatggtgctacagcagttaaatcaagaaatcttgaggaggaaaaacctaggagaaagtgggctcctacctttgcaatctctgcagagcatcaacgggctcgaaatgtttggatttctctcaccacccataattcaggcaattgaagctctcgatcccaatcatcaatgttcggagtactggaatcacaagactgcttgtgttaacaatgaagttaaaaagtatgcgcttggattgagttgctcggtaggcgaatcaaaagcaaaaatttttggtgttgatttgacaaagcaagatcatgaa

SEQ ID NO: 30231 - DNA, 245 bp, Gossypium hirsutum
  Clone ID: LIB3148-036-Q1-K1-A5
atggcatatgaaatattttttattattaattttgaatggaacacagagggtgccttctctgagctctaacaaccatgcttatgtatttatttatgtttatttgaccctgttggtttggattatcattttgtgaagaaattcaatggtaatgttgtaacttaaaaaaaaaaaaaaaaaaaaaataaaaaaaaaaaaaaaataaataaaaaaccataaaaaaaacaaaaaaaaaataaaaatccaaa

SEQ ID NO: 30232 - DNA, 400 bp, Gossypium hirsutum
  Clone ID: LIB3148-036-Q1-K1-A6
tgatgatgttttggctgatgtaaagcccttttcttttaacgctagaacgaaacctgcttctgctgtatctcatggttcgaactctgaaaagtccatgcagttcgatggtcaagctgagaaatgtgcgaaaagaaagaggaagaaccagtatcgtggaatccggcagcgcccatggggtaaatgggctgctgagatccgtgacccaaggaaaggggttagggtctggttaggaactttcaatactgctgaagaagctgcgagagcttatgatgctgaggcacggagaattcgtggtaagaaagctaaggtgaacttccctaacgagactccgcgtacctctccaaagcatgcagtcaagacaaattctcagaaaccactttccaagtcaaatttgagccct

SEQ ID NO: 30233 - DNA, 432 bp, Gossypium hirsutum
  Clone ID: LIB3148-036-Q1-K1-A7
ctgaaactaacatgtctcggacctgacctgggagattatcagcaggtgcaatatacggtacctccatatgtttggtttggtgcatttccaaccaaggattttcatatttccagtgacggcagagcggccatagctgaaccaagggatgctgagtgtcactattccctcgttggatgcacctgcgcacctgcctttcaatttcaagactttgagctcagaaaacattccgagcttgtttccacctttccgaattatgagcctatcatttcttttctcaccaatactgattgacttgccatctgatttctcctgttctcagctcattggtgccaagaagttttcatgtttttgatccctagattgctacttctgtaatttacagtttttccacagctgaaaaaagcgttaagctttgtatcaaatgctgttttc

SEQ ID NO: 30234 - DNA, 210 bp, Gossypium hirsutum
  unsure (1)..(210): unsure at all n locations; Clone ID: LIB3148-036-Q1-K1-A8
cccacgcgtccggtttttcatttcaatttccatttatttttactttgatttttaaagtagtttcatttataatttttaatttatgtgcggattaagttttagctcaattagtataggcattgtagccaaacgcaggagaacgtgagtttaagtgcgttgaaacgcatttttaactcaggtttaatttaatgaatcttaatgttcaacana

SEQ ID NO: 30235 - DNA, 153 bp, Gossypium hirsutum
  Clone ID: LIB3148-036-Q1-K1-A9
cttttaggcattttaatcatactaagaatcttgtatcaccttaagttatgtatgacttttttttgtctgttaaatgtgaaaaattgaatgtataagtagtaaaaccgaaggtttgcaactagtggcaacagccaaatcatcaaatttgacgtg

SEQ ID NO: 30236 - DNA, 354 bp, Gossypium hirsutum
  unsure (1)..(354): unsure at all n locations; Clone ID: LIB3148-036-Q1-K1-B1
gtttgattagacaaccaaagtatggtcatctaaaggagctccatanggctattaagatgtgtgagcgagctttagtttcagcagatcccattgttacttcacttggagacctccaacaggcttatatgtatacatcggaatctggagattgtgcagctttcctatcgaattatgataccaaattcgctgcaagagtgctatttaacaacatgcattataacttgcctccttggtctatcagcatccttcctgattgcaagaatgcagtattcaatactgctaaggttggagttcagacatcacaaatgcagatgttaccgacaaattctgagacattctcatgggaaagtcatg

SEQ ID NO: 30237 - DNA, 446 bp, Gossypium hirsutum
  Clone ID: LIB3148-036-Q1-K1-B10
atttacaacaacaaaaaaaatctttccagtttctattttctaaaaacaaaactgaaaatgtcttgctgcggaggaaactgtggctgcagctctggttgcaagtgtggcaatggctgtggaggatgcaagatgttccctgacataatagagaagactacaactgagactattgttcttggtgtgacaactcagaaaatgcactttgagggatctgagatgggagttggggttgagaatggatgcaagtgtggagacaactgcacttgcaacccttgcaattgtaaataagagggggggaaaatgaacaacaaagagaagcagagaggcctttgtctttttaactaaataaattctattactttagtatgtatcagcaaatcttcatgaggatttggttcttaattatgtgtaatgtgggcttttctgctatgtcagaatgtattatg

SEQ ID NO: 30238 - DNA, 104 bp, Gossypium hirsutum
  Clone ID: LIB3148-036-Q1-K1-B11
cccacgcgtccgcccacgcgtccgttttattttatcttattttttattttttgtaagaaacatgtgatgaatattgaaaaaaattgaaatggagctttgaattg

SEQ ID NO: 30239 - DNA, 409 bp, Gossypium hirsutum
  Clone ID: LIB3148-036-Q1-K1-B12
catacatctgtgttaagaaattgcacccattcactgcctcttcattttcctaccaaccattgccgtatttgtaactatttttgagaatttagtagatgcttttcttcagtcatggttttatgaactaagtagggttcactctcgagtttttgtataataattacgaatagaaattttttattgcattatggatttcaaaaaaaaaaaaaaaaaaaaaaaaaaaaaaaaaaaaaaaaaaaaaaaaaaaaaaaaaaaaaaaaaaaaaaaaaaaaaaaggcaaaaataataaaaaaaaaaaaaatgccccccacctgaaaagataaaaaattttctttaatttgggggggcgccatttaaaggaaccaagttttccttcccgggggttgggaaggagatttttttttttggg

SEQ ID NO: 30240 - DNA, 72 bp, Gossypium hirsutum
  Clone ID: LIB3148-036-Q1-K1-B2
tcgcccacgcgtgcgaccagcgttcggagtctttaaggctcgatgatggccgttatatattttttatttgac

SEQ ID NO: 30241 - DNA, 210 bp, Gossypium hirsutum
  unsure (1)..(210): unsure at all n locations; Clone ID: LIB3148-036-Q1-K1-B3
gctatatgtttgccggattcttttaacatttggtgtgtgcctgctaaaatatttgctgcgctcgtatgctaagcttaatggattattaacttaaataaagaaatatggtgctttttgtaccaaanaaaaaaaaaaaaaaaaaaaaaaaaaaaaaaaaaaaaaaaaaaaaaaaaccannnnaaaaaaaaaaaaaaaaaaaaaaggggcggc

SEQ ID NO: 30242 - DNA, 422 bp, Gossypium hirsutum
  Clone ID: LIB3148-036-Q1-K1-B4
cccacgcgtccggcagcatcaacaagcaatgcaaggtcaaatgggaatcaggcctgggggacccaataatagcatgcatcccatgcattcagaggctagccttggaggcggcagcagtggtggtccccctcaaccttcaggcccaagtgatggacgtgctggaaacaagcaagagggctccgaagctggtggtaatgggcagggcagcacaactggtgggcatggtggcggtgatggagcggatgaggcaaagtgactgtcctaatcagtcattttgtttggataccatgtggctgttgatagtaggtttctcttacaataggatttgtattcccctggtgatcttctcatagactgttgtaaaatgaaaattcttcttattgctttttaatgtagcagtttaggtagttttaactcttttt

SEQ ID NO: 30243 - DNA, 173 bp, Gossypium hirsutum
  Clone ID: LIB3148-036-Q1-K1-B5
aatgatttgatgtaaagggggctgatttgtggatacttgctccaaactgtatttatcttgcatcttcattattgcctgagcataacattgaaataatgactgacattctttgcaacttatgacaacttcaaattcttagggaaatgaaaattgatggaaaagttgttggttta

SEQ ID NO: 30244 - DNA, 376 bp, Gossypium hirsutum
  Clone ID: LIB3148-036-Q1-K1-B6
gtattcggcgtggtcataaggggttatgtgttatagctggaaatatatctcccattgatgtcataactcatgttccaatcctgtgtgaagaggctgacattccctatgtttatgttccctcaaaagaggatcttgcaactgccgggtctaccaagagaccgacatgctgtgttctggtgctaaccaagcccacaaaaggggaactaagtcccgaggaacaacaaaagttaaaagcagattatagccacattgtagaggatgtatctgagctcacatcctctatgttttaagttaacaaaaaagttgtcattataacatttgatattgacatcctcttattttacttccagggggggaatatgctttactacttgtt

SEQ ID NO: 30245 - DNA, 436 bp, Gossypium hirsutum
  Clone ID: LIB3148-036-Q1-K1-B7
caagattctagtgggtaataaggctgacatggatgaaagtaaaagggctgtccctacctcaaagggccaagctcttgctgacgaatatggcatcaagttctttgagactagtgcaaaaacaaacttaaatgtcgaggaggttttcttttcaatagccagggacatcaagcaaagacttgctgacactgactcaaaggctgagccacaggcaatcaaaattaaccaacaagaccagggagctggggctgcggcagctgctcaaaaatcatcttgctgtggagcttgaacaaactacattgcggatgagatctgaagggtacattttcttctctatggtgccattttgatcctgggaaaactaatttgttacaactattttgtttatattctcctgcatatcattattttacagctgctactgtctggtgtgaaatgt

SEQ ID NO: 30246 - DNA, 425 bp, Gossypium hirsutum
  Clone ID: LIB3148-036-Q1-K1-B8
ccagcgtccgccagcgtccgccagcgttcggacaacgagtatgtgtaatgcgtgagcatggatagggtcataaggtcatgggctttctagtgttttcaactcacgagatgatccctcttaatcaaggatattgactcacgaggtcaagaaaacgtgtggtataactagatcaaagaaagcaacaactaccattcgtccaccagagcttatagcaagagaatcaaatcttgcaaagatggtttcagtcacttgacaaggaaaaccctagtcatcacgttggtaccgataaggaagcaggcaatgaaaatgctaacagtgaatgaacaagcaaacaccccttaatcaaaggaattggggtcaaaacaaagcatgatgatcggcacaaaacctggcaaccccaaagttgaaagaattggggtcaaaat

SEQ ID NO: 30247 - DNA, 354 bp, Gossypium hirsutum
  Clone ID: LIB3148-036-Q1-K1-B9
cccacgcgtccgcccacgcgtccggcagacgccaccgggcagaatgaagagggtcttgacgagattgtggacgcaatgtcaccggaaatggcaccagcaagttcacccacaatggcatttgaagagtcttttggacccggaccagctatgaccattgaagaaggtgcggcggagggagaggcagaggcggagggagcgccagaaagttagatacgcagtaccagtatatttaaataaggatctcgatccatatgttcgttatcttactattttggtatttcatccctcataaaagaaagtgaaccataaatgtaaagttcacgaccataaataatatatatttatttatttacc

SEQ ID NO: 30248 - DNA, 395 bp, Gossypium hirsutum
  unsure (1)..(395): unsure at all n locations; Clone ID: LIB3148-036-Q1-K1-C1
cccacgcgtncggtgaaaatagcggaaaccaagatccatggngtaaggcatcatcaacaagtacttggggacaagggagtggtggtagcaagggaggatggtaattttaacctttgcttactgaacaaggtttttagtgctgtagatacttctattttgggtctgttctgcagtttctacagtgtagagagccggaatggaacaaggtagtgtttccgggcagactggtagtagtgaagacatttgctgtttagtgtttactagaacagctttatgtttgttaatattcctttccgagttagtaatgctaccatattatgtagggcttcctcattgggcatagtaatgcatagatgttgctcaaaactacatcaactgataatattatgactact

SEQ ID NO: 30249 - DNA, 454 bp, Gossypium hirsutum
  Clone ID: LIB3148-036-Q1-K1-C10
tcccctatatgttttgatgaaagctgtggtcttgcgctggtgaataatttaataatatattgcattggcggtttcttatgggcccacttgaacgcaatattggaaaaactggatcatgaggaactgaatcaactaaaaatcatatgccctttatgatccattagttttaaagaaccggttatatggtatttaatttactttttattgaaccactggtgagtggagatatcaccattttaacattcaatccgggggtttattctatgcattgatctctgaaaaggaaaccaattgataatcttcttgtgaagaaagaattattttgtaattaagaaatgtctttattaaaaaagctggatggaatggatccttcaagttcaagtttttattcctttttttttaaaaattaaccaaatgtatgccaatttaaatgggattttttttaattaaatat

SEQ ID NO: 30250 - DNA, 298 bp, Gossypium hirsutum
  Clone ID: LIB3148-036-Q1-K1-C11
cggacgcgtgggtgttgaaggcatggatgtggtgaaagccattgagaaagttgggtctagcagtggaagaacttccaagcccgttgttgttgctgactgcggacagctctcttagagaagaaaaagagaactatgtgttaagttgggatgttgtctaatgtctagaatatttaatgtctgtcatttagactcttttatggtgctgtttttatcgtcactgggtttggtggttttcaagaacttgctttatgtagtttttacgattaactaccattaaataagatactctttttcgtca

SEQ ID NO: 30251 - DNA, 357 bp, Gossypium hirsutum
  unsure (1)..(357): unsure at all n locations; Clone ID: LIB3148-036-Q1-K1-C12
atggaaacaagggtgttgaaataacagaaaagatgcaaaaaggagatatggagggctcagtgggggatataaatccatgttttccagatcatgaacaagaaatcaaagagattacaatcgttattgctgagaaaccagttgaatccgacgaaatgaaagcttgattttgattcaatttgtggaaactgcagaaatcgaagcttttaaagacgaggatgcatagatagccttcttgggagagaaaagtaataatttgttattaagatatgtacgaactacttaaataattcaagagtctttatgaactaaaaaaataaaaatccaaatttaaaaatgtatccaaactattatttcnna

SEQ ID NO: 30252 - DNA, 347 bp, Gossypium hirsutum
  Clone ID: LIB3148-036-Q1-K1-C2
gccaactttcgggttgctaaagaaagggaaggaagtggatagggtggttggagcccaaaagaatgatcttgagaagaaaattgagaaacacagggatctggtagctgctacttgaactttcagcttgtattttctccattaataatgtctaatgggatttccctgaatttgattatgtttaaacactttgttgtggaacaatgattgggtcctttctcttgcattcattttcttttcatcgccccacaatccctcttatgtgttgctttaatgttaacatgttgatttttatgtatcctgtctgatgttgagtgaatctaagtttggaaagtatattatccttttcc

SEQ ID NO: 30253 - DNA, 162 bp, Gossypium hirsutum
  unsure (1)..(162): unsure at all n locations; Clone ID: LIB3148-036-Q1-K1-C3
ctagttcactaattatggcctgcttcactctgtactgtggaaaccccctctggtacactgctctcttaaaccaagttgctagggtgatggactcttttgaggaatgggcatgaaaaggatgtcagcttttctctttgtttcttagntggattggaaaatctg

SEQ ID NO: 30254 - DNA, 377 bp, Gossypium hirsutum
  Clone ID: LIB3148-036-Q1-K1-C4
aatctgagttggatttttagttgacaaagcagtgaatttgaattagcatttgctggagttttttaaatttccgaaatagttacaattgctttggtttccattttctgttcctttaaactgctgaatgaagtatattaataaatatgaagaattacaatctgattagaagaagaaaaaaaaaaaaaaaaaaaaaaaaaaaaaaaaaaaaaaaaaaaaaaaaaaaaaaaaaaaaaaaaaaaaaaaaaaaaaaaaaaagggggggcctttttaaagatatcagattatgttccgcgggcttgcaagttaaaattttttttttggggcccccaaaattaaattaatgggccgcggtttaaaaacctcggaattggaaaaac

SEQ ID NO: 30255 - DNA, 278 bp, Gossypium hirsutum
  Clone ID: LIB3148-036-Q1-K1-C6
gtcacttgggcttatcgtatttgggctcgggtttatttgtaaatgggttgatttgggcttgtatagggtcatgtattaattttgggttttggactgtaaaaaggatatttaatggactgtggttatttaaaaaaaaaaaaaaaaaaaaaaaaaaaaaaaaaaaaaaaaaaaaaaaaaaccccccaaaaaaaaaaaaaaaaaaaaaactatccccacccatacaaaaaaaaccctctttcccttcacccccaaaaaaaaataaaactcatcttatcttt

SEQ ID NO: 30256 - DNA, 435 bp, Gossypium hirsutum
  Clone ID: LIB3148-036-Q1-K1-C8
cttttggtcaccaacccaaagagggttgcgaaggctattgctgaaaaaacttgcaatgcccttcttctcaaggtcaatcaaattggatctgttactgaaagtattgaagctgtgaaaatgtccaagcaagctggatggggtgtgatggccagccaccgcagtggtgaaacggaggatacttttattgctgatctttcagtcggtttggccacgggccaaattaagaccggagctccatgcaggtctgagcgtttagccaagtacaatcagcttctgcgaattgaggaggagcttggtgcggaagctgtctatgccggagctagcttccgtgctccagttgcaccctattaagatgcttgtttagatgataatgtgctgagactggatgcgtgcggcagagcttcagtggtttgttgagaccctaaaacatatttc

SEQ ID NO: 30257 - DNA, 300 bp, Gossypium hirsutum
  unsure (1)..(300): unsure at all n locations; Clone ID: LIB3148-036-Q1-K1-C9
ggatgtgaagaagtcgaaagatgccgacatggtccctaattcaacatccttcatttaccacaatcggaaaatgcacataaaataccacgcacaagattggcttctccctctcatctaatctataataatttacgagcaaaataaaaggaagaattagttgtttcgtatgttgatttgttccttattgttgtgacccacgcatgccagaaacatgtccttgaataaagtattttatttttatttcnnaaaaaaaaaaaacaaaaacaataaaaaaaaaaaaaaaaaagaagaactaagaag

SEQ ID NO: 30258 - DNA, 72 bp, Gossypium hirsutum
  Clone ID: LIB3148-036-Q1-K1-D1
gacgcgaaatgtagcgggggattaaacgcagggggtgtggaggatacccgcattttgaccgctgcacttttc

SEQ ID NO: 30259 - DNA, 165 bp, Gossypium hirsutum
  Clone ID: LIB3148-036-Q1-K1-D10
cccacgcgtccgcttttttcttatggaggataaggttaggatgtcgaaattaatagtttaattttttttatgtttactttattatttatgtttgtttgaattggaccgacctatttttcattaattaataaatttttgaaatgagtcgacccatttttcattttc

SEQ ID NO: 30260 - DNA, 391 bp, Gossypium hirsutum
  Clone ID: LIB3148-036-Q1-K1-D11
cccacgcgtccgataaaatagtggtcggatctgtgatgtctggccgtactacaaataaggtatggatcctgacttgcgtagaaagccaccatagcctcttttgccataccaaagtttatttcttcagggttggaacagtatctgttggtatacgtttagaatacaatacagtcaaatgaatgattgaaaaaaaaaaaaaaaaaaaaaggagagatggcgtctgtaataaaatctgcaatcttaattctgtcggtgtttttatctgtacgcttcagttcgggtgttaggttgctccaagaacagcccaatgatgaccccaaaaacatggacgctattcctcccattgatgcactcaaccctaccgagttgaatggacccggcgttggcattc

SEQ ID NO: 30261 - DNA, 443 bp, Gossypium hirsutum
  unsure (1)..(443): unsure at all n locations; Clone ID: LIB3148-036-Q1-K1-D12
cccacgcgtccgcaagatccgaccattgtggagacactatttccaaaacacgcaaggacttattttcgtggttgatagcaatgatcgtgaccgtgtggttgaagctagagatgagttgcacaggatgttgaatgaggatgagttgagggatgctgtgctgctagtatttgcaaacaagcaagatcttccaaatgctatgaatgctgctgagattaccgacaagcttggccttcattctctccgccagcgtcactggtatatccagagtacatgcgccacatctggtgaaggactgtacgagggactggactggctctcaaacaacattgcaaacaaggcatagatggcgtaattgacttgtctgtctcagaaaatgccagcccctttcggaattattgatgtttctacgtccgntaaaatgttttggtttttcatgttctttt

SEQ ID NO: 30262 - DNA, 451 bp, Gossypium hirsutum
  unsure (1)..(451): unsure at all n locations; Clone ID: LIB3148-036-Q1-K1-D4
catgatggatatgagtaatgaaattcaagagaccttangcagaagctataatgtgcctgatgatattgatgaggatgaactcatgggcgaacttgatgctctggaagcagacatgggaactgaagctgatggtgttccctcttatcttcaacctgataaggaggaaccagatttggatgcagagctcaatttgcctacagctccatcaggaaatgcaacagcagcagctggcagggccaatgcccaggttgaggatgaacttggtttccctgctgttcctcgagcatctgtccgcagttaaaagatttgctaatatatatactgtaagatgaagttggatgaagcacgtccttgtaaacatattgtgcagaattaactttcaattactagtgcaatttaattgatttttaatttttcgggttgggagctatataatattataactgatttg

SEQ ID NO: 30263 - DNA, 132 bp, Gossypium hirsutum
  Clone ID: LIB3148-036-Q1-K1-D5
cccacgcgtccgcccacgcgtccgaaaaaaaaaatctgggaaatatggttttgttgtaaaaatcattagctttttgtaggtcttcctgttatttgcagagcttaaatggaaatttaatcatattttgaattt

SEQ ID NO: 30264 - DNA, 441 bp, Gossypium hirsutum
  Clone ID: LIB3148-036-Q1-K1-D7
cccacgcgtccggaaaaatggagtccaacaccaaaatgtcagctcttcttttgctttgcatgcttttcatttcttcagtgacaccaattcttgggtgtggttcatgtgggaaagcaccacacaagcatcgaaagcctaagggaaagtcccctaaaggtcccatcactttgcctccccttgtgaaacctccaatcaagttgccaccggttgttcctccaatagttaagccacccattgacctccctccggttacagtccctccaattaacctccctccagggacggttcctccagtaactaagccaccaagtgggaaaccctgcccaacaccaccaaccaaggacacttgccccattgacacactgaaattgggtgcttgtgtggatctgctgggagggttggtgcacattggactaggtgacccggttttgaatcaatgtt

SEQ ID NO: 30265 - DNA, 441 bp, Gossypium hirsutum
  unsure (1)..(441): unsure at all n locations; Clone ID: LIB3148-036-Q1-K1-D8
cccacgcgtccgatttcctcgaacccgacattccttggcgcgaatacgcccctgaaacccaccacgcttccgccgcccccgtctctgctctcctcatccgggaactcctacccgtcgtcaagttctccgacctcgtcgacccgccggagagctgcgccgtgtgcttgtacgacttcgaagggcaggatgagatcaggcggctgactaactgccgccatattttccatcggagctgtttggaccgttggatggggtatgatcagaaaacatgtccgctttgtagaacaagtattgttcctgatgatatgcaacaaacgtttaatgagaggctgtgggctgcctctgggatccctgaagtctttggtgattattctcaaattactgctttgtagttatacctgtgcttcccaacaaaaaaaaagaggctnttttgtttatcat

SEQ ID NO: 30266 - DNA, 352 bp, Gossypium hirsutum
  Clone ID: LIB3148-036-Q1-K1-D9
aacaacctgtcaagcagatattttacaagctgttttggtagcaaaagcgctttgcgagccgcttggactcatctgaacagaattcacttgtgacggtgatacatcttctacaccaagtcactatgtcatattctgggagattaagccaaaagaaggcaacatcaacaacaagaacggcaaagaacttagacacaaaggtaatgggacaatgttgctctaaaatggaagattcatcgcattgtacatatagaatgtgtatgaaggaaaacatgattgcagctttggagattatggttgttatacaaagatctattgaatcattaatgaaatactgtgtgactcaaaggagctt

SEQ ID NO: 30267 - DNA, 420 bp, Gossypium hirsutum
  unsure (1)..(420): unsure at all n locations; Clone ID: LIB3148-036-Q1-K1-E1
cttccacctggcgtcgtcgtctctcctcccagacctcgtggtcgtccgcctaagccgaaggacttattggctccccccaagcccaaacccgtcagcaccggaaggccgcgtgggcgccccactaagaaggccaagactggtaccgncgccgctcctccacctcctcccggcgtgaagcgaggccgcggtcgacctcccaaagtgttaccgtcggtgggttttcagtaaagtagccaagttaataaacgaaagagaatggagaaaaggactcattccgtcactgctcctaccccagccgcgttaggtttaatatttttttaaccttaattgtttaggtgtggtttagttatctgctaattgacgttttagctttttcggttttttggtgtagttaacttttggtggagtactgtaatgaat

SEQ ID NO: 30268 - DNA, 322 bp, Gossypium hirsutum
  Clone ID: LIB3148-036-Q1-K1-E10
agcttctttaaccatgatggttaattattacgagttttgtagtgttaaaaaaaaaaaaaaaaaaaaaaaaaaaaaaaaaaaaaaaaaaaaaaaaaaaaaaaaaaaaaaaaaaaaaaaaaaaaaaaaaaaaaaaaaaaaaaaaaaaaaaaaaaaaaaaaaatataaaaaaaaacaaaaaaaaaaacactataaacctaatttaaccgggggggcaactaaaaaaaaccaacttttatcccaactcacatgcacatcaaaaacttttcttattggacctctaaaaaaaaaatatcaagacctctttttaaaaacacgcgtaact

SEQ ID NO: 30269 - DNA, 235 bp, Gossypium hirsutum
  Clone ID: LIB3148-036-Q1-K1-E11
ggagctgacttgcctcactgttaattaattatagtaaatacaaagagctgcccaaggagaaaaaacgaaattagctatagaccatgtatctcacagatagtgatgatagattatataagctgctgatatgttatttagataagagatgaatatggtcatttatatgtaactttgtacaaattggacatcacttaattaattaataattaattattgagtctttttctgttatttc

SEQ ID NO: 30270 - DNA, 254 bp, Gossypium hirsutum
  Clone ID: LIB3148-036-Q1-K1-E12
gcaagggtaaccttccaaagggtggtgcacccaaaggtcccaagcttggtggtggtggtggaaagcgataagtttacctggttattatctgtttttacataggtagtatgttgattttgaaggcatttgtatggactgaatggccattcggccgtgtatcttttttgctttttatgcgttgtcataaaccttgaactatgtattgaagatgagtgatcaagttattttatgcttgactttgtttttcagccttt

SEQ ID NO: 30271 - DNA, 316 bp, Gossypium hirsutum
  unsure (1)..(316): unsure at all n locations; Clone ID: LIB3148-036-Q1-K1-E2
aatctgagttggatttttagttgacaaagcatgaatttgnttagcatttgctggagttttttaaatttccgaaatagttacaattgctttggtttccattttctgttcctttaaactgctgaatgaagtatattaataaatatgaagaattacaatctgattagaagaagaaaaaaaaaaaaactaaaaaaaaaataacaaaaaaaaaaaaaaaaaaaaaaaaaacaaaataataaacaaaagagaatggtttagggggactcattttgtgactgctcctaccccagccgcgttaggctaaatatttttttaacct

SEQ ID NO: 30272 - DNA, 162 bp, Gossypium hirsutum
  Clone ID: LIB3148-036-Q1-K1-E3
cccattcaatgggtgggtatttgggatgattagaggaattgtcggcctgttgctagtgctaaggctttcaaagaggttaagtcatctgcgtgtttggtttgtcataaggagtttgtgtttccaatccgggtgttcaagcactccgccctgctttagcctttc

SEQ ID NO: 30273 - DNA, 384 bp, Gossypium hirsutum
  Clone ID: LIB3148-036-Q1-K1-E4
caaaaaaaaaaaaaaaaaaaaaaaaaaaaaaaaataaaaaaaaaatataaaaaaaaaaaaaaaaaaaaaaaaaaaaaagggaaaaaaaaaaaaaaaaaaaaaaaaaaaaaaaaaaaaaaaaaaaaaaaaaaaaaaaaaaaaaaaaaaaaaaaaaaaaaaaaaaaaaaaaaaatgggggggggcctttttaaagaaacaaatttttctccccgtggttggaaaagtttttttttttttttggggcacctaaaattaatttactgggccgggttttaaaaacggtgaagggggaaaaccccggcgtttccaaatatatatcttttggagaaaatttctttttttacgagggggttaaaaaaaaaaaggccccgccccaaacccttt

SEQ ID NO: 30274 - DNA, 396 bp, Gossypium hirsutum
  Clone ID: LIB3148-036-Q1-K1-E5
gtgatcttttggcaattccaatatcgactatagctttcaaatcgacttttagcatgggtaagaaagttatcacacctgaggagttcacttaagccaaaaacggttcaagccgttgtttgcttggatgattggatgcgagctaagggattttcagcagaaattggttgcaaaaaggacgatgaggacggtgaggccgacgacgacgatgaggacaatgaggatggtgatgtttctttggtagctttttaagatactttctttctaaatgtttaaaatttaatttagcttacaatttatattttgttatgaaattaaatatgttaatggattaatgtatgaatattatgttttgttgcttaattttccaaagtcattttggactttggaggtatgtgt

SEQ ID NO: 30275 - DNA, 170 bp, Gossypium hirsutum
  unsure (1)..(170): unsure at all n locations; Clone ID: LIB3148-036-Q1-K1-E6
aaaaaaaaaaaaaaaaaaaaaaaaaaaaaaaaaaaaaagggaagaagaaaaaaaagaaaaaaagaggaagaaaaaaagaaggaaaaagaaaaagcgcaaaaaaaggggagaccaaaaagaaagacacgggcagggggnncnacaacgaggagacagggaaaaccaagggg

SEQ ID NO: 30276 - DNA, 441 bp, Gossypium hirsutum
  Clone ID: LIB3148-036-Q1-K1-E8
cccacgcgtccggctacgtttcagtgccccataaccgggctcgaattcaatgggaagtataagttttttgcgttgaggaattgtgggcatgttgttagtgctaaggctttgaaagaggttaagtcatctgcgtgtttggtttgtcataaggagtttgtggagtctgataagatggtgattaatggaagtgaggaggagatggcagccttgagggagaggatggaggaagagaaatcgaaaatagtgaaggagaagaagaagaggggaattgatgttgtggatgggaaaaaagattgtggtaagttggaagggaatgaaaagcttgagaatgggaagaaattgaataatggtggggtgaagaagtttcgagctacggatgtggcaccagctaatgcaacaaaagaagtttatgcttccctatttacttcttcaaagaagtcg

SEQ ID NO: 30277 - DNA, 390 bp, Gossypium hirsutum
  Clone ID: LIB3148-036-Q1-K1-E9
gaaagttcttaaatatttgagtttagatcttctttgagagtgccgttgggagtgaaggttttgtgaagagcatacctaatcgggccgggtgttcgacccacccgttgatttgatcaagtcgatgcactccagggtgaaagccatgttcccaatccggctgttcaagcactcgcctgctttagcctttcagacaaccctactaccacctctctgctatccacatgcctctccgcggcgcgtgtggacctgtgccacggatcaagatcttcggaccgaagcgtcgctgtctttttctggcgtcttgtaccgtctccgcaacccttattcaccacccgatgggacttcgacatctaaacaaagggctgataagaaccaaacatgcctttcgcg

SEQ ID NO: 30278 - DNA, 86 bp, Gossypium hirsutum
  Clone ID: LIB3148-036-Q1-K1-F11
gtggtttctgagtgtgttaaacgtttgatatcagagttctatgtcgtgttgtgttgaaatcatgaaatgcagattttactgttagt

SEQ ID NO: 30279 - DNA, 438 bp, Gossypium hirsutum
  Clone ID: LIB3148-036-Q1-K1-F12
aaagaatataatcgcattggaggccaaacgagaccgattccttttctctgccagggagagagatttgagacgatgactgaaatttcaagaaatagatcgctccgtttcttactgtttttcgcttccgtttctctacactttatctcaggtttttctgatgactctaaaggttcaaacaacagctcaaagacaaaatctaatgcgattaataatactgggaccaaggtaatcttcatagtgcttggacttgttgcagttgggttgttttcatttttccttttcaagttgtggcaaaagaagaaacgagacgaacaatatgcccgtcttttgaagttgtttgaagaagatgatgagctcgaggtcgagcttggcctgcgggactagcagcacattgagaactgagctcgtcctaattgaggcttaaatggcaacaatggc

SEQ ID NO: 30280 - DNA, 115 bp, Gossypium hirsutum
  Clone ID: LIB3148-036-Q1-K1-F2
cggtcgaccacgcgttcgaccacgcgttcggttgaatgtcatgtttttcttagtaaggctttttactctcaaatgaaaaagatagaaagaaagaggagagaatattagaagactg

SEQ ID NO: 30281 - DNA, 438 bp, Gossypium hirsutum
  Clone ID: LIB3148-036-Q1-K1-F4
aaagaagggctcagctgttcagaggccacgcagccgtacactgactgccgtacacgaggcaatgctcgaagatgttgttttacctgctgagattgtcgggaagcgtactagatatagaatcgatggatcgaagataatgaaggtctttttggaccccaaagaacgaaacaacacagaatacaagctcgaaaccttttcagcagtttaccggaagctcgcagggaaggatgttgtgtttgagttcccagttacagaggcataaagaaggcctttttaaaagatatgacaccttctgtctggtccttttacccttgaaacttctttttgtgagggtatttaaaattttgacatcgacatttattttctttgtgtcatggggaatttattttctttgttatgaacgtatatttcactattgggtaatggcatttaattatg

SEQ ID NO: 30282 - DNA, 250 bp, Gossypium hirsutum
  Clone ID: LIB3148-036-Q1-K1-F5
atatgttactaagttgaaaaggagaatagtaggatcgaggtaggatggcgataatgataaaggtgtttgatcttaattgctgctttcttcttgctccatccgtgttttccttgcacttattatttttgctcaatggtattttccaaaacatgatattctctctttatatataataataacaacgaaaattctctgaaaaaaaaaaaaaaaaaaaaaaaaaaaaaaaaaaaaaaaaaaaaaaaacggcggc

SEQ ID NO: 30283 - DNA, 445 bp, Gossypium hirsutum
  unsure (1)..(445): unsure at all n locations; Clone ID: LIB3148-036-Q1-K1-F6
cagattcgcaaccaaatcgatcgaaagagagatcaattctgtcaacgacaaccctttgatcgacgtttcgaggaacaaagcattacatggtggcaatttccaaggtacacctattggtgtttcaatggacaatactcgtttagctatcgcagctattgggaaacttatgtttgctcagttttcggaactcgttaacgatttctacaacaacggtctcccatcaaacctctccgctagtaggaacccgagtcttgattatggtttcaaaggtgctgaaatcgcaatggcctcctattgttccgagctccaatacttagctaatccggtcactaaccatgttcaaagtgccgaacaacacaatcaagatgtgaactcattaagactaatatcatcacgaaaaacagccgaagcagtcgatatcttaaaactcatgtnctctacatac

SEQ ID NO: 30284 - DNA, 443 bp, Gossypium hirsutum
  unsure (1)..(443): unsure at all n locations; Clone ID: LIB3148-036-Q1-K1-F7
caaaaatatggctctcaaatggtttctcagttcggcatttactcaagtttttggccataccgatggcggtaacttgcatgccaaggcagtggtatcgtgcccaaacgaaggacttatcggttgcaaggaaatggaaagagggattaccagcatcaaaacctgcaaggaagactaccctaatggcttccaaatgccagttcattatcctcgatactcgaaggccgattacgagaagatggaagaatggaggatcgatatgttgttgaaggaatatggattcagctntaatggtggcaccgtcgatgagaaaagggcttttgccatgggagcttttctttggcctgaccaactntaagttacatatatacatgtatgtagattatgtttgtttggtagattgtgtgattaggaagtgcttgcaaaagggatgcttttatttatgc

SEQ ID NO: 30285 - DNA, 425 bp, Gossypium hirsutum
  Clone ID: LIB3148-036-Q1-K1-F8
cacaataccaactaaaatttgcaagcatattttaaagtattctttcaagcttaggatgatggaatctatccttcacataacataatttacacggctaaaagtgaaataacaaaaatattagagtcagaccttttatattgataacagctttattttcttttttgtatttatcaatttggccttattttaggtttgaaattgagacagttgaggatgaaaaatctgacttgcaaaacagactcagagaagagattgaaggtaataccaaactaagccagtgtggaaaaacgaaagaagacattgcaagggtgtcaactatgtcttgagaaagaagtagcaatattaaaggaagagttacaaagggagagagataagaggacaactttggaatccgttcttaactcatctcaagaacaacccacagc

SEQ ID NO: 30286 - DNA, 223 bp, Gossypium hirsutum
  Clone ID: LIB3148-036-Q1-K1-F9
cccacgcgtccgattagaaatcttactttaagttctaaacgtcggataaatcaactacttttgaatctaaaagttgcattcgaaaaggcattctcattggtaatgccatctgaactctctgattgtaatgttcatataactgaacaccactcggctcgaatagcttatacgtctaattgaacttatattttattaaatgaatgtaatggagtatgttggaatt

SEQ ID NO: 30287 - DNA, 366 bp, Gossypium hirsutum
  unsure (1)..(366): unsure at all n locations; Clone ID: LIB3148-036-Q1-K1-G1
cccacgcgtncgcgatntgtcagaaattcaagaagctgaacaatagcataatctgatggtcccataatctgccatttttattttgctcggtagctctggctgatatgttatattgggtaattttagtttggtcaccttggacactacttttactcagatgaattggccattcgtccttgatgtaccagttcattggattggaaataccctttcctattcgatgattaaacagagattggagttactgaactaattccatatgcagaaaaggccccttctggtggtgaagagaggttggtacaaaattttcaatacttcgctaggcccgcaatgcaaaaagggagggggttggggggggggttgggt

SEQ ID NO: 30288 - DNA, 354 bp, Gossypium hirsutum
  Clone ID: LIB3148-036-Q1-K1-G10
tcaccgtgcatataatcccaacctctgtccctgtatccgtaaggaacatcatcgcggacagaaaggattccttcccgaatttctttacaacaactaagacagagttcatatgaacattttgggcagctacgatgaaggtcgaagattgaagttgcacagtggtcactgttccaattttagaaagacggtcaatgataacttatgaataacagatacaatcacatgaaaaattgtatgcctatgtagagaggaaatgcttaccaatagatacgttcatcggcataacaaagtgtttgttgtatttcaacttcagaaggcagtaatcctatataaagaaccatttgtcaggaaaaa

SEQ ID NO: 30289 - DNA, 437 bp, Gossypium hirsutum
  Clone ID: LIB3148-036-Q1-K1-G11
cggacgcgtgggcggacgcgtgggcggcgatgtagataaagatggatatctggactacggagagtttgttgccatttcagttcacttgagaaagatgggcaatgacgagcaccttaaaaaggcctttgagtttttcgatagaaaccaaagtggttatattgagattgaggagctaagagatgccttaaccgacgaagttgaaacaaacagtgaagaagtcattagcgccatcatgcatgatgtggacacagacaaggatgggagaataagttatgacgagtttgcagtgatgatgaaggctggtacggattggagaaaagcttcaaggcaatattctcgagagaggttcaacaatctaagtctgaaattgatgaaggatggatcattgcaaatgaacaatgagcccagaagaccaaacaccattgacaaagttctac

SEQ ID NO: 30290 - DNA, 229 bp, Gossypium hirsutum
  Clone ID: LIB3148-036-Q1-K1-G12
ctggttttctttttcttttttttttcgatccaaacaggggatcgggattcgggtgtggaggctgagatcccaactctgttgactgaatgaaacgattgtgcttagttctggggggggggggggtctttctttgctttatacagaatcagagtatatgattttggttttcatttcaaagaagagagaaacctactttttttttcatgttacgttttaaaaatatattgaa

SEQ ID NO: 30291 - DNA, 286 bp, Gossypium hirsutum
  unsure (1)..(286): unsure at all n locations; Clone ID: LIB3148-036-Q1-K1-G2
cttccgaggcctttaaggaatggggcctttttggtggaacccagggggtttttttttcggatttcttccggaaaaagggatggccaaaaatggtggtttctggattgggttttttctttttttttttttctaatggtactgctgcccttgtttctgggaggtgattgtgtaaacatttgtgtactttaattattgtaaagaatatttttaacattgttaattntaatatttttgtaagaatattcagttatcaatttatatcatatatcttttattggaaaanaaa

SEQ ID NO: 30292 - DNA, 78 bp, Gossypium hirsutum
  Clone ID: LIB3148-036-Q1-K1-G3
agccttccgatggtaacaaggtaaaaaacgaataaagcggaaaattggctggatttaaggaaaggaattaatccttcc

SEQ ID NO: 30293 - DNA, 291 bp, Gossypium hirsutum
  unsure (1)..(291): unsure at all n locations; Clone ID: LIB3148-036-Q1-K1-G4
gttgtgtgctagtcaattctggaatttgttgatcagtaaatgtgatgaatgttgcttcactatggatgcaaagggggaaaatttggcgcggataatgtaaatgaaaagaaatagtgggtatttatattatggttactgttgactttgggggtgggcggtttaagggatcaaagtttgcgtacgggggcttgtgatgggataggttttttatgggggctgttggatttattttgcgggctgggtngnatgcctatgttgagaggtaatgctttggtgtttttaaggttattg

SEQ ID NO: 30294 - DNA, 406 bp, Gossypium hirsutum
  Clone ID: LIB3148-036-Q1-K1-G5
cccacgcgtccggcgcctcacagtgcaaggggctgcgttgcgaccaagaaatccagaaaacaaagcaatggttgttaatgaagtggagaagaatgtttggccagaaatcgtggcgggcaaggtgaagcctatcatctacaaatcatttcccttatctgaggctggggaggctcataagctaatggaaagtaatgagcatattgggaagatactgcttgttccatgatgctgctaatggttttatcttatattgtgacaatggtgtgtcttttgataatacaatggagccacttgttactgtgtagtgtgtaccaatttgaaatcatgcagaactgatgtgaaagatttctaatacttgccaatggcattgtctgataaatataataagaacaagttaatttccccc

SEQ ID NO: 30295 - DNA, 421 bp, Gossypium hirsutum
  Clone ID: LIB3148-036-Q1-K1-G6
ggagatctcaaagtcggcgctttctactttcagagccaaagaagaggagattgaaaggaagaagatggaggttagagaaaaagttcagcttcagttaggccgtgttgaagaggaaacgaaacgtttggccacgattcgtgaggagcttgaagcactggcagatcctatgaggaagaatccttgtgcccattgctgtgccatcttttctgaggcgaaggttttgcagttgcgttttggttaagactctcctctgatttgatcagtctgtgattttttttaaaaggaaaagaaaaaaaagagtttacaatggttttgaggaggaaggtacgatgatggaacgaatttggatatgaatggtagggaagggttagatgtttacgtaaaagaagagcttgaaagataagcaaatgccctttttttg

SEQ ID NO: 30296 - DNA, 442 bp, Gossypium hirsutum
  Clone ID: LIB3148-036-Q1-K1-G7
cccacgcgtccgagagggttaacttacaggaacaagtttctgcaccaaattagtatggagaaacgttttaacgagctctagtaaactgaggccgacctatagaaattttcaggaaccctaagagcttctcaagggaaaaaaacataatttgatcaactaggatagatttcagtttgtgggatctgaataatcaagttttggtataagttgtatttggagtgttgaatgaagactttgattagatgtgattctctgtaattctgctgaaccttagtaaagaggtattcaaaatttaaaaagtaaaaaatgattttgaagaagattgtacaaaaatggaacgaaaatatgattaaaatgttccgataggtttaaattttttctttaatcaagagcttgtaatataaaaaaaagcctattttttgttgaatgttaataacattgg

SEQ ID NO: 30297 - DNA, 443 bp, Gossypium hirsutum
  Clone ID: LIB3148-036-Q1-K1-G8
ggtgatctcgacttaggaggaatggacttctcgaactttgggggaatgggcggcatgggcgacatgatgggcggcatgggcgatatgatgggcggcatgggtgacatgatgggtggcatgggtggcatggatgagtttgaggacagtgatgatgaagggcaagaagtgacaaagccggatgacaaggccgaaggagatgcaaagcctgaggagcatggcatcggatcttcagagaaaaaggaggctgaaccgagcacgtgaaatcattttagctgaaacccgaaatgctgttaactatagttatgggtgatattttgctctttccctgtcatggatgggggagaggggatcaaagcctgatgtgtttttaactgcgtgagattaaaaaatttgcggaaaagatatgtgttgttgtgttaggtggagaaacaatgttagctctt

SEQ ID NO: 30298 - DNA, 439 bp, Gossypium hirsutum
  Clone ID: LIB3148-036-Q1-K1-G9
cagtagatgacgctgatgctcggctggctctttataggttgatagacataagcatgggtgtcattacacctttatcggaacagctaacaaagccattgccaaatgctatggctctagtaaaccttaaggaattatcaactggagcttacaagcttttgcccgaaggtacacgcttggttgtatctgtacgtggtgacgagccctatgaagagctggaaatcctgaaagacattgatgctacaatgcttcttcataatataccttttgatgaagaaaagattggtcgagtgcatgcagcaaggaggttatttgagtatctatcggagaacagtcttgatttccctgtaatccatcatattcagtttccaaatgggactcacagggatgacttagtcattaatgctggcaccaatgcttgagcccttcttgtggatggact

SEQ ID NO: 30299 - DNA, 339 bp, Gossypium hirsutum
  Clone ID: LIB3148-036-Q1-K1-H1
cggtctgaaggatgaagattcggtatggcaatacaaagttatatggtagtggaatagaagtatgtagttggagtatcaaaattcgagttagcaagcaaatcaagctaaattggaacacaagcaataaaagggggccgaattgaaaattttgagaaatttatgtttgattagatttttttatttaactttgtaaaagttagatttaaaaaatttttgatataaaatctgattttatatggttggttgttagatgaattaagctaaatttagcatatgaaatgtatataaataccttgtatggtggctttgagaaacaattgagattgaataaaatataat

SEQ ID NO: 30300 - DNA, 245 bp, Gossypium hirsutum
  Clone ID: LIB3148-036-Q1-K1-H10
aaaaaaaaaaaaaaaaaaaaaaaaaaaaaaaataaaaaaaaaaaaaaaaaaaggaaaaaaaaaaagaaaaaaaaaaaaaaaaaaaaaaaaaaaaaaaagggggggaagaaagggggggaaacaggggggggcccgtgtgaaggaaccaaaggaggggaccgagcgagccacctaaaggggtgccaaagggggacacaaaacaccagggaaacggggggagcccaggggaaacccagggggaaacc

SEQ ID NO: 30301 - DNA, 428 bp, Gossypium hirsutum
  unsure (1)..(428): unsure at all n locations; Clone ID: LIB3148-036-Q1-K1-H11
cccacgcgtncgcccacgcgtccgcagctgcacaacttccaggtgattgggtgtctataggacacagtgagcaatggctttggtattctgtctacgcaagcaagcaagtcagttggcgcacaagggcattggtggtctcagactggataaggcgttttattttcgggagggataccagtggcatttaaaaggtccctgggcaacttacaaacattaagatgtctacagtttgggattgaatgctgtagaaaaattttggtttttcctttaccatttaccaattcattcatttgataataattgctgccttgctttggcggttttgaaatgaattttgttacaagtttatactggtttttgaactttatatctgagatccgtgaaaaatatacctatttgcatattggtatctcttctccaagttctta

SEQ ID NO: 30302 - DNA, 423 bp, Gossypium hirsutum
  unsure (1)..(423): unsure at all n locations; Clone ID: LIB3148-036-Q1-K1-H12
gtctgcccaaaaccacgtcgtttgggtctcttaaacgcctctttcaacgaccagccagttcggtccctcagatggcaacttagccatcaaactgagctttgtgattcgaaagcagggagtgatattttggatatgattcttacaaagggtggttgtagagcagaacaagtagcgtcgtcgcccccatttttttgtgggtcgccgccgagtagagtagctaacccattaatacaggatgctcgatttggggatgagaagatggtcaacccgccgtctccaaatccgcctcctccttcgtctccgtcatcatcttcaaggaaaggagggtgtattcgggccaattntggtaacaaaccancagtgagagtggaggggtttgattgttttgcactggcttagaacccatttctatcaacaaaagag

SEQ ID NO: 30303 - DNA, 274 bp, Gossypium hirsutum
  Clone ID: LIB3148-036-Q1-K1-H2
cccacgcgtccgaaaggtaattaattgggtagaggtggagcagtgtgatgcaaacaagcggccggttcatccaaaagcagcacaaatagctaggaagctaaggattaagatgaaaaacccttgagttaattacacaatctgtgtttttgtaagcagatattaaagtgcattattttttgttggattgttttggtttccaatcactttcggaggttgtctatctctcacatcatcatgtattcgattgttttcacccataagtataacaatattg

SEQ ID NO: 30304 - DNA, 456 bp, Gossypium hirsutum
  unsure (1)..(456): unsure at all n locations; Clone ID: LIB3148-036-Q1-K1-H3
cccacgcgtccgggagctcacagttagcccgctgtttatggacaaacacacaagacatgggacatgtgaaggaaagtgcagctctggtagccaagttattgggtcttgtggaaccaagtcaagcacccaaggaagtagttggactcagtatcttgccccgatccgtaacccgaagatccagcagctggaaaaatgtcattcctcctctgttatagaagaaggtagagcgcagcacaccatattacggataaaactttagctccagtcaccagcagccttaacgagaccttgctcatgcgcggattgtgacatatacactatatagattgatatatatatatatatactttgcaaggtggtggtgaaatgaaatcatctcaatttctaaattgggagctgcacattgaccagactttttagtaatggattcaaatttgtggattntattttttacta

SEQ ID NO: 30305 - DNA, 400 bp, Gossypium hirsutum
  Clone ID: LIB3148-036-Q1-K1-H4
tcgcccacgcgttcggcaaggcgtgcgtgtgattgtatctttggtaaacaagctgcgactcaaccgtatcatattccagctctggataccagcagtgctataaacgtagccataactgcttacgcatcttacgctcctaatgcttgttctcccaggaacgcattagcgcctggtcccaacaagtccccactggcatccctccctattactacccgaagcgacataccagctgctgatgctccttctacaatcaccgactctgatgctcctgataatacttctgctgcttctatagcttctgcctatgccatccttttcattttcgcttcggctcgcttcatgcttaccatgatgtgagtgcatgaattattggttagcactcaccccactatgatgggat

SEQ ID NO: 30306 - DNA, 448 bp, Gossypium hirsutum
  Clone ID: LIB3148-036-Q1-K1-H5
ccaaatccttcattgacctattgcttaaaccatccgaagaagatctcaaatgctggccccatagttttgagtttcgtctgagagtctcacttgcggctgatggaagtcttgcattaatatcacgaattaggaatgtcaacgggaagccatttagtttctcttttgcctatcatacatacttgtcagtttcggacatcagtgaagtgaggatagaagggctggagacgcttgattacctagacaacctttgccaaaaagaacgctttactgagcaaggagatgccataacattcgaatccgaggtggatcgagtctatctcagtactccaaacgtagttgctgtacttgatcatgaaaggaagcgaacatatgttattagaaaggatggactacctgatgttgtggtatggaatccatgggagaagaaatcgaaatcaatggtagattt

SEQ ID NO: 30307 - DNA, 360 bp, Gossypium hirsutum
  unsure (1)..(360): unsure at all n locations; Clone ID: LIB3148-036-Q1-K1-H6
ggatttcaaggattttgctgacgcctttgatgccgttaaagacaacggatttgccggtgcggtggcatcgccggacgatgtcgaaactgctaacaaggagcgcctgaactttttccaagtgaagaaagccctataaatatacacgtaagaatggcttcgatcctaaatcgatctcaataccatttctcaaattaagtgaacgatactcgaaaaacacattatttcaatctttgtcacactatgaatagttagacaggaagtccattgcatgaactcttattagttttttaaaatatcaaaggtataatacagacttttagccatttcgtataagtcaaggatttgtttggttnanaaaaa

SEQ ID NO: 30308 - DNA, 432 bp, Gossypium hirsutum
  Clone ID: LIB3148-036-Q1-K1-H7
gggcacgcaatcattctggtgaccctgagattgaagctgccattcaaagaggagaggatcccgggttaggtctggtgacaaaagcttataactacattcacaaatatggacataaatcaaagcttatggctgcagcagttcgaaacaagcaggatttattcagtttgctgggggttgattatatcattgcaccgttgaagatattgcagtcgctgaaagaatcaattactgctcctgatgagaagtactcttacattaggaggctttccccacagtctgctgccaaccacgatttcactgctgaagagctcacaaagtgggaccaattaagccttgcatcagctatgggacctgcatctatgcagcttctggctgctggacttgaaggatacgttaatcaagcgaatcgagtcgaggaattacttgacaaga

SEQ ID NO: 30309 - DNA, 218 bp, Gossypium hirsutum
  Clone ID: LIB3148-036-Q1-K1-H8
cccacgcgtccgcccacgcgttcgtccacgcgttcggaagaaagccttaatgtactaaatatcattattagcaatcaataaaaaaatgattttattttatggtactacatagtttccgaaaatgtgttgtgttgtgttgtgttgttgcttcaatcaactggaatggtagtgcaaccaaatgcctttgtaagtgaaaaaaaaatgctctgtttcccatg

SEQ ID NO: 30310 - DNA, 423 bp, Gossypium hirsutum
  unsure (1)..(423): unsure at all n locations; Clone ID: LIB3148-036-Q1-K1-H9
ctttttacagtttctgaattactgatcgcgagtcactttcaatctcatcctctctcaaccctagagataactgaagatggacgcctagagacatgccatcgcttccgcagcaaaaacagaagcatcaaagttgattcaaacccacggatcagtcgcgcgacccatctacccgtctgaagtcgattcactgaacactccctgaaaacatgctccttcgtttctgtcccattttggcacctttgacaagttgcggacgccatcagtcttctataatgtagattaccaaaagtaggcaaaaaattacaagaaaacctccagtttgtaattttaatttttgaaggtagatctaggctccacaatcttttgtaaaattgtttgtagtctgtttgcatttgattctnnnnnaaaaaaannnnnnnnnna

SEQ ID NO: 30311 - DNA, 145 bp, Gossypium hirsutum
  Clone ID: LIB3148-037-Q1-K1-A1
ataaaaataaaaataaaatgaaacaaacaaaaacgtaaataaaaaaaatcaccttcaaaagtctgttttgttttttttttatttcaataatcgtaaaagcaaaggaagaagaagttcttccttacagtagattcggttttaaccg

SEQ ID NO: 30312 - DNA, 356 bp, Gossypium hirsutum
  Clone ID: LIB3148-037-Q1-K1-A10
cttctccagctgtaggcgtacagccatctcatccgatttttgtggtacttgccccagttgtatcatttctattgccaagataccaagtcagtatcaccaataagaagaacatgccagtttgtagggacccagaggcgctggtggccaagtattcggatccactggtgtatacaggacctctccgagtgagaactggttatgaaattcttagaactacatcctacttgcagcagaatatgaacagattgagggttcctttgcttgttctccatggcaccgatgacactgtaactgatccctaagcttctcagaaactgtatgaagcagcttggctaacagacaaaacgatcaaattg

SEQ ID NO: 30313 - DNA, 440 bp, Gossypium hirsutum
  unsure (1)..(440): unsure at all n locations; Clone ID: LIB3148-037-Q1-K1-A11
cccacgcgtccgaaacacgagataaaccgcaagccggggtttcaaatgtgggaagggcaggaattgatgcaggagaggagaatttccataaccttgagaaagctgtgccaggtcgactagcttatcatcaaacatgtgcttctttgttttttttcttttaatagttccgtttacttatccaattttggacattctctaatttcttctgtttgccagctttgaatgtggaacactaaggaacgtgttccatgcttgaatacttgaatgttttgggctcctgggagttgattgacatgtgtttgggaataacaattggagcttcttttttttttccaaaaaaaaaaaaaaaaaaaaaaaaaaaaaaaaaaaaaaaaaaaaaaaaaaaaaaaaaaaaaaaaaaaaaaaaaaaaaaaaaaangggggcggccgttttaaaggat

SEQ ID NO: 30314 - DNA, 163 bp, Gossypium hirsutum
  Clone ID: LIB3148-037-Q1-K1-A12
cccacgcgtccgtgttgctacatgtactttgcatttgaagttgaatggcgtaagataggtaaatccttttctagagaaaaaaaaaaaaaaaaaaaaaaaaaaaaaaaaaaaaaaaaaaaaaaaaaaaaacaaaaaccaactaaaaaaaaaaaaaaaaaaataa

SEQ ID NO: 30315 - DNA, 283 bp, Gossypium hirsutum
  Clone ID: LIB3148-037-Q1-K1-A2
cacaaagataaggatgctgaaccaacagaatttgaggagtctgttgcgcaggcattctttgatttggagaataccaatcaagatctgaaaagtgaccttaaagatctctatattaattcagcagtccaaattgatgtttctgggagccggaaagctgttgttgtccatgtcccatatagattgaggaaagctttccgcaaggttcatgttaaaccttgtgagggaacttgaaaagaagttcagtggcaaggatgtgattcttattgccacccggaggatatta

SEQ ID NO: 30316 - DNA, 435 bp, Gossypium hirsutum
  Clone ID: LIB3148-037-Q1-K1-A3
cccacgcgtccgctcatgatgagtgacacactttttggtactctcatggaaaaggacaagtgaatacgtaaatattcttttgtaagaactttgataagaaaaatatgacatacactatcatcatctttgttccaatacacttggtaagatttcctatgctgatagttgacagctgccatgcaacttactaaatattgggttggaaatagtagtcaaggctagtttgcccgtttggtagatgctatagttgtgttcaatatgttatggccgaaacggtttgctatagtatgtgcttagctagttgttgtggtatacttttcaaatctctgtggccataaaagctttcttttgagtttctttataaatcctaagaattcgttgcaagccctataggggtgtataatactttgtgctgatgtccattgtagatgtttc

SEQ ID NO: 30317 - DNA, 321 bp, Gossypium hirsutum
  Clone ID: LIB3148-037-Q1-K1-A4
cccacgcgtccgtttcatccaatcgaccaaattcagagcttacaaaagaaaaatggccggaatcggacctttaactcaagactgggagcccgtcgttattcggaaaaagcccccaaacgctgccaccaagaaggatgagaaagtcgttaacgccgcccgtcgagccggtgccgagatcgaatccgtcaagaaatcgaatgctgggacgaacaaggcagcatcgagtagcactactttgaatacaaggaaacttgatgaggaaactgaaaatcttgctcatgaacgagtgccaactgaactgaagaaagccatcatgcatgc

SEQ ID NO: 30318 - DNA, 312 bp, Gossypium hirsutum
  Clone ID: LIB3148-037-Q1-K1-A5
ggataggtatcctcagttatcccaggttcagtctggtagtcagcttgcaagaatagcaaccaatgtgaattcgaacacttcggtttcacaagctaaccgtcataattatccatttctacctcaaaattgcccatctggccatgaccaattgatgaggatggaaactaacactccatcgaactctggtcaagtttaccccctttattatggaattcactatcaaaatgcagagtcccaaacaggttctccagtgcaggaaaatctagtgtctgatacgataatagttgggagacctattggtacatcccgttt

SEQ ID NO: 30319 - DNA, 311 bp, Gossypium hirsutum
  Clone ID: LIB3148-037-Q1-K1-A6
gtaaaaagtagaaaaactaacatattcatgtggaatacatacccgtactcaatacttgcactcgaagttgagtaaacatgacatgatcctccaaagatccttttgatacatgaaaaggaaaaaaaaaacttagacaatacccattttcaacactcatacctgaattcaagtaacatctcccttttttgttgttctagtcttggctttttctagatatcataatgatctggggcatgaaatttcattctcatattttctacattctagttactcaagtataacaacttttttttcttctagcactttttttt

SEQ ID NO: 30320 - DNA, 413 bp, Gossypium hirsutum
  unsure (1)..(413): unsure at all n locations; Clone ID: LIB3148-037-Q1-K1-A7
cgtncggccacgcgtacgtgaaacctccaatttatttgtcaccggttgctcctccaatagctaagccacggattgacctccctacggttacagtccctccaattaacctccctacagggacgggtcctacagtaactaagccaccaagtgggaaaccctgcctaacaccaccaaccaaggacacttgccccattgacacactgaaattgggtgcttgtgtggatctgctgggagggttggtgcacattgaactacgtgacccggatttgaatcaatcgttgccggttctttcaggacttgccgagctcgaagctgcagactgcttgtgcaccacccttaaacttaaggctctcaaccttaaaatttatgtgccactggctctttaactccttgacacatgtgggaaaacaccc

SEQ ID NO: 30321 - DNA, 431 bp, Gossypium hirsutum
  Clone ID: LIB3148-037-Q1-K1-A8
ctttttcccgcgtgtatttggggtggcaactcttgagaaaacagctcatgatgacatcaaaaagcttgcctcagctgtatatttgcaagtgagcattataagtcaggccctaatatttgtaactcgatctagaagttggtcctttgttgagcgtccgggtttactactattggcggcctttgtcatagctcagttgattgctactcttattgctgtgtatgccaattggagctttgctgcaattgaagggatcggatggggttgggctggtgtgatctggctttataatattatcttctatatcccacttgatttcatcaagttcttcattcgctatgctttgagtggccgggcgtgggatcttgttattgagcaaaagattgctttcacaaggcaaaaagatttcggaaaagagcaacgtgagcttcaat

SEQ ID NO: 30322 - DNA, 430 bp, Gossypium hirsutum
  Clone ID: LIB3148-037-Q1-K1-A9
cccacgcgtccgcccacgcgtccggttatgatggacgtgtgattatttggaaggaaggcaatcagaatgaatgggctcaggctcatgtatttgatgaccataagtcatctgttaattcaattgcttgggctcctcatgaactgggactttgtttggcatgtggttcttctgatggaaatatatcagttttcacagcaagggcagacgggggctgggatgtatcaaggattgatcaggctcacccagtgggggtaacatctgtttcatgggctccatcaacagcacccggtgctcttgttggttcgggtttgctggaccctgttcagaaactttgttctggtgggtgtgataacactgtaaaggtgtggaaactctacaatggaatctggaagatggactgctttccggctctccaaatgcatactgattg

SEQ ID NO: 30323 - DNA, 401 bp, Gossypium hirsutum
  Clone ID: LIB3148-037-Q1-K1-B1
gcgctatatatccttaggagtctctatgacagttacagtgagagccaagaaaacaaagtgaggtgcattatctgctatttccaaaggatatgtttgcaaatgccgacaggatctgtcttatttgagctcaagcttctctctttagaatatcatccttggcaatcattcctctcttatccgtatgctgatttttggaccaaatcaaatatccccctctgcccttttcaggtccacagctcaggcttgatagaagatcacgctattgaggctcttgaagtggattttgctaataaatatcttggtggtggtgctctacataagggctgtgtgcaagtctgatttttccttttctgcttcattgactccattattgacattatggactactcttttcattttcc

SEQ ID NO: 30324 - DNA, 363 bp, Gossypium hirsutum
  Clone ID: LIB3148-037-Q1-K1-B10
cccacgcgtccgctgtatctggtgactctgtcacattatctgttctggcagccatgctgcaaattctgtggtgtgtagcggttgggtgggtcgagttgtctccccacatggtgtaaggttggtacgggggtgtatacggttggatatggttgggtttctgcataaacatgtaatatctgttctgttctgttatgggcttatgggctttattctgaattatgttctgggctaaggccaacttattctatttctgtggtttgagctgatataggctatggttgggttaatttacacacttaattttcccaaacttaacccttttattttcattcacgcaagaaatccccaaccatagtgggcttg

SEQ ID NO: 30325 - DNA, 227 bp, Gossypium hirsutum
  Clone ID: LIB3148-037-Q1-K1-B11
cccacgcgtccgcccacgcgtccgcccacgcgtccgtttattattaatgtcctctttcattggtgtataaagcgatgacatgattacaataattggttttaatctatgatgctcagacttgagatgcttggctgagtaattctatgaaaaaaaaaaaaaaaaaaaaaaaaaaaaaaaaaaaaaaaaaaaaaaaaaaaaaaaaaaaaaatttctgctttcctttttcc

SEQ ID NO: 30326 - DNA, 438 bp, Gossypium hirsutum
  unsure (1)..(438): unsure at all n locations; Clone ID: LIB3148-037-Q1-K1-B12
gtttgttccaaagctaaaccctaatttggacgaggcatttcactgatcatacctaaaaagaatttcattcaaattccaagaattttgacaattccgagttattaggtgcagggacataaaataccatttaagttttgtatgtataagaaatttaacatcatgaatcgagattgtttatagtcaaaaaaaaaaaaaaaaaaaaaaaaaaaaaaaaaaaaaaaaaaaaaaaaaaaaaaaaaaaaaaaaaaaaaaaaaaaaaaaaaaaaaaaaaaaaaaaaanaaaanaaaaaaaaaaaaaaaaaaaaaaaaaaaaagggggggggcctttttaaaggaacaaagttttcgtccgggggtttggaaagtaaaaatttttttttagggcccccaaaataaaattaacgggccgggttttaaaaacctggggatgggaaaaac

SEQ ID NO: 30327 - DNA, 402 bp, Gossypium hirsutum
  Clone ID: LIB3148-037-Q1-K1-B2
cccacgcgtccgaattttgaatggacattgggatttacaattaggtttggccttcaccatgttgatttcaccactctcaagagaacaccaagaggatcagcaacttggtacaaacagttcattgccaaccacactgctgagaagattttaatgcctcaacattatccagggaatcaactgggacaacatttcaataccatttgaaaaactttgttcaaactttatcttattagaattggtccataaccaatgatcatggctgctgatttctgaaccccgaaaattatttattggaaatctagagtcggctattagggctaaagaagacaaaaaagggttctaaattctgtacaaagcagattatttggagataatatgcatcttatcatcgagttttcgaat

SEQ ID NO: 30328 - DNA, 396 bp, Gossypium hirsutum
  Clone ID: LIB3148-037-Q1-K1-B3
gtggatttctgagcaggataaaagaatttttccttccgagtctctggtcacaaacacctgaggctgaccggttctgaatctgattatatgcaccatcaaaattaatctttatggattcccactgtgggtgtgtccatctcttatttcctttcattatttctgagtttatttgttcaagaccagttaactcaatgatgtaattactaacaaagtttgcaacatctattccattactaactttgccttcatgtatgtttctgtttctgtctctgtctccccatatggcccatagtgcacagcaaaagagtcgactttgatttgggtttaactgctctagcgcccagtcacggaataagtgattcatcgtttcagcttcttctccacatcggggacacc

SEQ ID NO: 30329 - DNA, 395 bp, Gossypium hirsutum
  unsure (1)..(395): unsure at all n locations; Clone ID: LIB3148-037-Q1-K1-B5
cccacgcgttcgcccacgcgtccgcgccgaattcatcgctactctccttttcctatacgtcaccatagccaccgtcatcggccacaagaaacaacacgatgcatgcatgattttcattcttgtttactgcaccgccggtatctcaggtggtcacattaacccggcggtgacatttgggttgtttttggctaggaaggtgtcgcttataagggcggtggcttacatggtagctcaatgtttgggtgctatttgtggtgttgggttagttaaggcattcatgaagagtgaatacaactcccttggcggcggtgctaacacggtggcgactgggtataacaaaaggactgctnntggagctgagattattggacattcgtgcttgttacactgttttt

SEQ ID NO: 30330 - DNA, 339 bp, Gossypium hirsutum
  Clone ID: LIB3148-037-Q1-K1-B6
cagaaagttctccctcaattgcccttggaacttaggagtgatttgccactagatctgtcagagggagtgcttaaagccctttgtttgcaagcattaggccagggtgttgagattcaactgggaatggcaattgatagcattaaggccactctggccgtgaaaaggaggctagcatgtgagatggttaaatactggcatcaggctgaggaatacataaaggaacttccagtagcaaatggatggggagaaaagcacaagcttttcattcagtggaagcacattgaagctaaggctattgcatactatcttcacggattaatcctcgaaaaaaggaacaca

SEQ ID NO: 30331 - DNA, 117 bp, Gossypium hirsutum
  Clone ID: LIB3148-037-Q1-K1-B7
aaaaaaaaaaaaaaaaaaaaaaaaaaaaaaaattaaaaaaaaaaaaaaaaaaaaaaaaaaaaaaaagaaaaaaaaaaaaaaaaaaaaaaaaaaaaaaaaaaaaaaaaaaaaaaaaaa

SEQ ID NO: 30332 - DNA, 428 bp, Gossypium hirsutum
  unsure (1)..(428): unsure at all n locations; Clone ID: LIB3148-037-Q1-K1-B9
cccacgcgtccgaacatgatttacattttttgactaagattttccaactgacaagcatgcctgcttttgcaactgatgggatgtctcgcagagagagagctaatgtgttttgtgaagccatatgtgctgtggatgcgacagatatttctgcaaatagcattcgtgatttccttcttccttcaattcaaaacttattaagagaccccgatacactagatcctgcacacaaagaggccctcgaaataatattgaaagaaagatccggtggaacttttgatgctttgagtaaggttatgggagctcacatcgggattccatcatcaatgactagtatctttggtgagggtgggctgctaggcaagaaagaaagcactgcaccaacatctncagttggatcttcgagagcttgggcatcatccgcacatgga

SEQ ID NO: 30333 - DNA, 365 bp, Gossypium hirsutum
  Clone ID: LIB3148-037-Q1-K1-C1
cggacgcgtgggtgctaagtgggattgatttagattctggaatgagggttattgatgatacattcagattgtcaaaatgtgtccaaattgcccgtctctatcttgaggatgatgattctgttaatgcagaagcttttattaataaagcttcattcttggttagcaacagtcagcatgaagttttgattttacaatacaaggtatgttatgcaaggattttggatttgaagaggaagttcttggaagcagcattgcgatactatgacatatctcaaattgagaagcgacaaataggagacgaaacaattgacgaggatgctctggagcaagctctatctgctgctgttacatgtacaatattaact

SEQ ID NO: 30334 - DNA, 327 bp, Gossypium hirsutum
  Clone ID: LIB3148-037-Q1-K1-C10
cccacgcgtgcgatcacgcattcgtcccagctgctgcctctgagttgtttggcttgaaaaagtttggggctctgtacaatttcctcacgctggcaaatcctgcaggttcacttgtcttctcaggtgtaattgctagcagtatttacgaccatgaagcagagaagcaagctcatcaacatcatatccagctgcagatgtcaggcttacttttctcagggttgtatggtcaggatgaagtgctcaagtgtgaaggttctgtatgcttctttctgacttccatgatcatgtctcgattttgtgtcattgcagcttgtttaagcatgatac

SEQ ID NO: 30335 - DNA, 344 bp, Gossypium hirsutum
  Clone ID: LIB3148-037-Q1-K1-C11
agcgaacatggcgataggagttaaggccttgcacttgtcgtttgtgcctcatgccctcgcgattgccggcgctgttatggtattggtttggtgcattcacttcaggggtggattagcttgggaatcttctaacaaaaatctcatctttaatctccatcctgtattgatgttgattggcttcattatcttaggaggtgaagccattatgagctacaagtctttgccactgaagaaggaagttaagaaagtcatacatcttgtgctccatgccactgctctgattctaggcattattggaatctatacggcattcaagaatcataatgagaattcaatacctaatc

SEQ ID NO: 30336 - DNA, 435 bp, Gossypium hirsutum
  Clone ID: LIB3148-037-Q1-K1-C12
cccacgcgtccgcccacgcgtccgattatttattgcatgatacagaagttcctgccccaagttcgagggatccagcacagtctgatctatcgacccacaaggaatccgtgaaacaagatttttctcaatcggcagctcatctaaacttaaacgatgataaggcaagcaatacattgaactctggcactgaagttctgaaaggaattgaagctgtgagtgctggtttctctgtaaacttatctccaaagcaagatgagaggagaccaaaaaccttggagcacaacaatcccgagaaaccgatatgaccagtgaacaatctttaactccattattgactacaagacataaccgaaacgagcaagccatgtgtacatttattgctttaaagtggttaattgatgcatgttatgttactgctgtataaatactggatct

SEQ ID NO: 30337 - DNA, 333 bp, Gossypium hirsutum
  Clone ID: LIB3148-037-Q1-K1-C2
cggacgcgtgggcttttcttatttttcgttttaatttctcgagcttttacggttcaaaaatggcggacaaagctaaaaccgaaaacccatcttttctccatggaaaatacgagcttggccgtatgttgggtcatggaacgttcgccaaagtctaccatgcgaagaaccttcaaacagggaagaatgtcgccatgaaagtggtgggcaaagagaaagtgatccaagtcgggatgatggagcagatcaagcgagagatctccgtcatgaaaatggtgaaacaccccaacatcgtcgagctgcacgaagtgatggcgagcaagtccaagatttact

SEQ ID NO: 30338 - DNA, 440 bp, Gossypium hirsutum
  unsure (1)..(440): unsure at all n locations; Clone ID: LIB3148-037-Q1-K1-C3
gccgatcataatgtgtatatatttatcagagggaggtttgatgactgaagtaatggaaatccaaattgacaggatttacttaaaaaaaaaaaaaaaaaaaaaaaaaaaaaaaaaaaaaaaaaaaaaaaaaaaaaaaaaaaaaaaaaaaaaaaaaaaaaaaaaaaaaaaaaaaaaaaaaaaaaaaaaaaaaaaaaaaaaaaaaaaaaaaaaaaaaaaaaaaaaaaatnaannaaaaaaaaaaaaaaaaaaaaaaaaaaaaaanaanannnnnnnngggggggggggttaaaaaaaaaaaaatttatacccccgctaatcgaaaagaaaaattttttataatgacccaaataaaaaaactctcccgcggcgtttaaaaaaactggaaaaagaaaaaaacctccggtcaaaaaaaaaaaaaggacggtgaaaaaaaccctttt

SEQ ID NO: 30339 - DNA, 331 bp, Gossypium hirsutum
  Clone ID: LIB3148-037-Q1-K1-C4
ggcctcaaatcccaaggtcttctttgacatgacgatcggtggtcagcccgctggtcggattgtgatggagcttttcgcagattgcactcctcgcactgcggagaacttccgtgccctctgtactggcgagaaaggcgtcggccgcagcggtaagcccctccactacaaaagctcttctttccatcgtgtgatccctaactttatgtgccaaggaggtgacttcaccgccggaaagggtaccggaggtgaatccatctacggatcaaagttcgctgacgagaacttcatcaagaagcacactggtcccggtattctctcaatggctaacgct

SEQ ID NO: 30340 - DNA, 181 bp, Gossypium hirsutum
  unsure (1)..(181): unsure at all n locations; Clone ID: LIB3148-037-Q1-K1-C5
ggacgcgntgggtatatattcgtctctccatataaactattaaaattattaaaaatacgaaatcgggtgtggaatttttataaaatttaataatttaattttgattcataaaaaaaaaaataaactgaaaaaaaaagaaaaaaacaaaaaaaaaaacaccatacaaaaaaaaaactattat

SEQ ID NO: 30341 - DNA, 139 bp, Gossypium hirsutum
  Clone ID: LIB3148-037-Q1-K1-C6
ccgaattcggtcgacccacgctccgaaagccgttgaactgttactatgaacttcggatgcggatttgattgcggagcaacatatatgggcggcggtggatccctaccccaaaaaccaaaccttttacctgacttatggg

SEQ ID NO: 30342 - DNA, 395 bp, Gossypium hirsutum
  Clone ID: LIB3148-037-Q1-K1-C7
cacaattacatgctctttagaatgcatattatgattgatgaaagacacatagcacctaacgacacacacagtcttgcttgaaattctctaattgtgaagacctaatgtgtactttttgtctggttgtagtttgagtttgatcagaccttttttgactcttatgaatttgatggagtggaattcctggcttcagctaactggattttcaagtgttttctgcaaagtctagaggatattgagctaactggtttccaatcaagttcttgggggtccgaatttttagtgaggttcatgagatttctgctcaacaacacaaaagtgctcaagaaggtgactatctatgaacagggtggcactcttcttgaatcctggcaattttctggaccaaacatgaa

SEQ ID NO: 30343 - DNA, 437 bp, Gossypium hirsutum
  unsure (1)..(437): unsure at all n locations; Clone ID: LIB3148-037-Q1-K1-C8
cggacgcgtgggcggacgcgtgggcggacgcgtgggcggacgcgtgggcgagatgattgttttcaggcaactcaccaagttagaagtgaaggaaattgccgatataatgctcaaagaagtgtttgacaggcttaaaagcaaagaaattgagctccaagtgaccgaaaggtttagagaaagggtggtggaagaagggtacaacccaagttacggagcaaggcctttaagaagagccataatgagacttctggaagacagcatggctgagaagatgcttgcaagggaaatcaaggaaggtgattcagtaattgtagatgttgactctgatggaaatgtcacggttctcaatggtagcagtggcacttccgagtcattgaccgatccgattccagttgtgtaagccacataagccactctagatatgtntgtttgtaccc

SEQ ID NO: 30344 - DNA, 193 bp, Gossypium hirsutum
  Clone ID: LIB3148-037-Q1-K1-C9
aaaaaaaaaaaaaaaaaaaaaaaaaaatttaaataaaaaaaagaaaaaaaggaataaaggataaaagggtacaaacatataaatgcagaaataaggaatggggtgttgttttatcggagctaaattaattgagtcgttggttcgcaagttttctgtttgggaatatggttaaattaattgaatttactgactt

SEQ ID NO: 30345 - DNA, 263 bp, Gossypium hirsutum
  unsure (1)..(263): unsure at all n locations; Clone ID: LIB3148-037-Q1-K1-D1
cccacgcgtccgatttaactgctctagcgcccagcacagtcacggaataagtggttcatcgtttcagctccttctccacatcggggacaccttgtgttggctgctaatttcctgtgttgtagatttacctttgtaggcagatagttccatgatagccgccatattgtgatctttattttttatggtatattcaggctccaaagtgttttgtaaaattttctgtagaggttttgtaaagcataagctctaggattatcanttna

SEQ ID NO: 30346 - DNA, 118 bp, Gossypium hirsutum
  Clone ID: LIB3148-037-Q1-K1-D10
cccacgcgtccggtccaattagtgctttggaaaaggtcttttagccttaattacacgatctgaatgtatcaaatgtcgtaaaatatgcgaatatgaatacataattgggttggagtgg

SEQ ID NO: 30347 - DNA, 425 bp, Gossypium hirsutum
  unsure (1)..(425): unsure at all n locations; Clone ID: LIB3148-037-Q1-K1-D11
ctttgaagtcacactggattggaaaggagtattacaagagagggcctaatggaaatgagatacagaggacaaatgtacctcatatccggctggaatttcgtgacaggatctggagagaggagatgcagctggtgtacctgggtaaggccattatccctgaagaagtggagaagtaatgtgcaaccatactgcacaaaattccattgtttaacactacacatcacatatactgaggaggaggcggcaaagaagagaagctggcctttggacctgaatcctgcatgaaagaagggatatgacgatcaacatgggaagctgatggatggtatttacaaagccactggttgggcaaagcaaaagcaaaagcaaagcttaacttgtangtggtggtggtgggaggaaacatcttgcaagatgacaaacac

SEQ ID NO: 30348 - DNA, 64 bp, Gossypium hirsutum
  unsure (1)..(64): unsure at all n locations; Clone ID: LIB3148-037-Q1-K1-D12
naaaaaaaaaaaaaaaaaaaaaaaaaaaaaaaaaaaaaaaaaaaaaaaaaaaaaaaaaaaaaaa

SEQ ID NO: 30349 - DNA, 379 bp, Gossypium hirsutum
  unsure (1)..(379): unsure at all n locations; Clone ID: LIB3148-037-Q1-K1-D2
aaggaagaggggttcaactgctggggttatggtatatatatggatggaggaagggcctatcttccccatcaacttcacccaaactgtcaaggctgggtctcaaatgcatatagaactggggacggtgactggtccttctcatatggaagggaggtgcaagcaccatttttggagaatggaaggttaggaagtggcggacttccagttggtctgattgcagcacaagctatttcagcactccaaatcacagaggatgcaaaggtcctccactgaggctagacaaagcgttttgttgtttggtcataattctgaataataatgactctctggnatatgtatatgtatatgtatatgtatatgtatatgtatatggatatgg

SEQ ID NO: 30350 - DNA, 377 bp, Gossypium hirsutum
  Clone ID: LIB3148-037-Q1-K1-D3
gccaaactgttgctgacatgatcaagggaaagtccccagaagagatcaggaagactttcaatatcaagaatgacttcaccccggaagaggaagaagaggttcgtcgggagaaccagtgggcattcgaatgaagggtcaatttcgagtgccggttcaattgtatcaaacttctctatatataaaaatgtagtttgttgctctgacttttcatctgtacttttggatattctgtgagctcttttgaaactcttcaaagtgtcatcttctatgttctttgcctgtcttcactaaaaaccagtctgttgtatccaagtaatgtcttttaatcgtggtctgtgatatgaatgaaaatggtgtctaaattatgcttgccattt

SEQ ID NO: 30351 - DNA, 444 bp, Gossypium hirsutum
  unsure (1)..(444): unsure at all n locations; Clone ID: LIB3148-037-Q1-K1-D4
cccacgcgtccggtgaaggttaaacttaaacaaagaagacccaagaaagcagtgcaggtatctaccacttaagtgcatttatctggctgtcctgataatatattggctatgttttcggttcattctaaagttctcgagtttgctaaatgaaatcactgtcctaatgatgcaatattaattcatagcaagtagatgcttgttctttctgtttcatggtagaaaggatcagtagttctacagattttctgccctagtaaatgtacatatgctcactttgtaaatgtttgattatttgcgggttaattgatgaagcagcttcttcttttttttgttgaannaacactngcctggggggttcaattgcaataataggttgaatcaataatggttcaggggaaaatggtgatgcagattttcgatatgttggtggtgcttcaggaaaaa

SEQ ID NO: 30352 - DNA, 233 bp, Gossypium hirsutum
  Clone ID: LIB3148-037-Q1-K1-D5
cccacgcgtccgatcattgtggaagtgatatccattattgttatatgtaatttagcttttagactgttagcgtaagttttcaacttagtttcatgttccatccttaagatgcaagtgaaagtaatttctttctgtggatgttggttttaatgttaaatgtagttctaaggcactctgaattccatgattacttgcatttggcatttgagagaaaagtaactcttatcattgtc

SEQ ID NO: 30353 - DNA, 375 bp, Gossypium hirsutum
  Clone ID: LIB3148-037-Q1-K1-D6
atcagttttttagtgttactcatgctatgtttgctgcaggcaatgctccaagtccctatatgccatcaacaccaagtggtcagcctatgacaccaagctcgggaccctatattccgggtacacctggagggcagccaatgacaccaggaactggtggtcttgatgctatgtctcctgtaataggtcctgagagtgaaggaccatggttcgtgccagatattttggtcaatgtgcacaaatctggggatgagacacttggcgttatccaggaggtgcttccggatgggtcatgtaaggtggcccttggatcaagtggcagtggggatacagtaatcgccatgcccagtgagatggaaatcataccaccgaagaagt

SEQ ID NO: 30354 - DNA, 429 bp, Gossypium hirsutum
  Clone ID: LIB3148-037-Q1-K1-D7
ggaagagcttgatggatggatcacggcggctggcttgcctaaatcctctgatgtaagaggtgtaattgctccgcatgcaggttattcatattcaggtcgtgctgcggcctatgctttcggaaatatagacccaacaaacatttctcgggtattccttcttggtccatctcaccattattacactccaaaatgtgctctgtcaactgctacagtatacaagacaccaataggggacctacctattgatttggaagtcatcgaagagctgaaagctacaggaaaatttgaactgatgaatcttcgtgttgatgaagctgagcatagcatggaaatgcacttgccttatcttgtaaaagtatttgaagggcattcaatgaaagttgtaccaattttggttggtgctcttagtgcggaaaatgaagcaatgta

SEQ ID NO: 30355 - DNA, 408 bp, Gossypium hirsutum
  Clone ID: LIB3148-037-Q1-K1-D8
cccacgcgtccggaattacatgacgcagatgcagcaacagcagcagcagcaaaacggcgcagttccgggaggagcgggaatggggatgtgtttggatggggggttcaggaatcttatggctgtgaaccgagtcgggatgagtaagatcgagtgaaaggttaaaaatgagagtaaaagatgagaaaaaactgggctgtgttttttcttggtatgggaattaggcggtgaataattttgttcattttacggagagagagatgggtgaaaaagctaaaaaatgacaagtaaaagaaaaaaagggcgacttttctaattaaaatttacctgtctcttagccttgtttttagtagatattagtgaaagaagaaaacggaaaaagaaaggaaaaaatttcctttagaaatttcc

SEQ ID NO: 30356 - DNA, 434 bp, Gossypium hirsutum
  unsure (1)..(434): unsure at all n locations; Clone ID: LIB3148-037-Q1-K1-D9
gataaatcataattgatagcaacaggaggaggaagaaagaaaaaaaaaaaaaacccttactatggcccctttcttgtcgcttggtcgtcttcgggttgccgtacgaagtaggaaaggtttcaatttgcttgggccatttgggctaatttcgaaattgggccattgggtctataaattaaatttagcttgggtaataatttgggctaaaaacttgtatttgggtctggtgaaaattgtaatgaattatttcggattttgggctttaatttaatttgggcttttattttttttnaaaaaaaaaaaaananaaaaaaaaaaaaaaaaaaaaaaaaaaaaaatanaattaaaananaaaaataaaagaagaaaaataaaaaaaaaaataaacaaaaatttataaaaaaaaaaggggcggcccttttaaaggaaccaac

SEQ ID NO: 30357 - DNA, 416 bp, Gossypium hirsutum
  unsure (1)..(416): unsure at all n locations; Clone ID: LIB3148-037-Q1-K1-E1
cggacgcgtggggttgaatatgctttaagggatgatgatgagagggataacagattcgatagtcctaaaagaggaggttacgatagacgtagagatagtccatatgggaggtccccaagtcctgtataccataggcgacaaagtcctgattatggtagagctcgtagtcctgtttatgaacgttataatggtcctgcttatgacagacgcaaaagtcctgattacgggaggcataggagtcctgaatatggcagataccgcagccgatcacctgttcgaaggtcccgaacatagaagggcatcagattaacggtgaaaagtatttcgtagctctatgcctagctntctatgtantttggtatgtactttaaagaccctatngntcatngtaatatatgtacttggctttggtttna

SEQ ID NO: 30358 - DNA, 446 bp, Gossypium hirsutum
  Clone ID: LIB3148-037-Q1-K1-E10
cggacgcgtgggattgggcaattgtcccagctgctgcctctgagttgtttggcttgaaaaagtttggggctctgtacaatttcctcacgctggcaaatcctgcaggttcacttgtcttctcaggtgtaattgctagcagtatttacgaccatgaagcagagaagcaagctcatcaacatcatatccagctgcagatgtcaggcttacttttctcagggttgtatggtcaggatgaagtgctcaagtgtgaaggttctgtatgcttctttctgacttccatgatcatgtctggattttgtgtcattgcagctgttttaagcatgatacttgtgtaccgtactaagactgtttatgccaacctttatggaaagtctcgcacttgatttcaagaatgcaatctaggaaggtctctcatggatgttttgtcccttttaagtggcattttt

SEQ ID NO: 30359 - DNA, 257 bp, Gossypium hirsutum
  Clone ID: LIB3148-037-Q1-K1-E11
agaggattcaatctcttcaagttggaaaagccaaagcttagcacttcaagtgggagtgttatttaattttccattccatggtcgtttatcttagtcggaacttgaatttggtgttattgaaatagggttttgtagctaccttgtgtactagcttctttaaccatgattgttaattattacgtgttttgtaacttcttttatatttggccgagttaatataaatcagatgagctgtgaggtagattgctcatttattt

SEQ ID NO: 30360 - DNA, 385 bp, Gossypium hirsutum
  Clone ID: LIB3148-037-Q1-K1-E12
cccacgcgtccggaccgattgtcctatgttatataactcgtcgaagcctcaaaaggtgttgggttgcatttgtatctgtaaaaaaaaaaaaaaaaaaaaaaaaaaaaaaaaaaaaaaaaaaaaaaaaaaaaaaaaaaaaaaaaaaaaaaaaaaaaaaaaaaaaaaaaaaaaaaaaaaaaggcccgccaaaaaaaaaaaaaaaaaaaaaaaaaacgccggcaaacaaaaaaaaaaattttttaaaagggcggccggggccctttttaagggcccaatttttaacaccgcgtttattaaaaaaaccctgtttttaaacagctaacatattttaaaacatcccccccttttaaaaaactggttaaataaaaaaaaccccccccccccc

SEQ ID NO: 30361 - DNA, 345 bp, Gossypium hirsutum
  Clone ID: LIB3148-037-Q1-K1-E2
taaaatccgggtcaacgcaatatctgctggccctctaagaagtcgtgctgcgaaagcaattggatttattgacatgatgatcgaatactcgaaggccaatgcacctctccaaaaagaactatctgcagatgaagtggggaatactgctgctttcttggcatctccattggcttcggctatcacgggtgccgtcatatatgttgataacggtttgaatgcaatgggtatcggagttgacagtcgcatatttaaagacctcaacattccgagcgacaagcactagaatcgggtacagcaaggtcgagacccgaaattcaatgccgaatgtttagtatcgatgtttaa

SEQ ID NO: 30362 - DNA, 278 bp, Gossypium hirsutum
  Clone ID: LIB3148-037-Q1-K1-E3
cccacgcgtccgaaggcatatgtactgtaatgctcctaccacacttcgattcaataaaaataaagggagccaaatatataaattaaaataaccaaaacatacaaacataattctactaaaattaatactaaaattgaatcatgaaagtcctttgtttcattcgatagattctcatcattctaatatcggatctcaagtgaagttcatggatccggggggctttttttaataatcataccttaccaacactctctattatctgcaaatatttttttttc

SEQ ID NO: 30363 - DNA, 410 bp, Gossypium hirsutum
  Clone ID: LIB3148-037-Q1-K1-E5
cccacgcgtccggccgatcagaaggtacccaaggaagagcgacgccacattcccaacgagaccaatgtgggtgtacggatcaatatgggatgcgtcatcttgggctaccgagaatggtaggtacaaggctgattataactaccaaccctttgtaggccggtacacgaatttcaaagtaagcgcctgcaccgccaacagtcccgccccttgccgcccgccttctgcctctccgtacgggtccagcagccttagcccacagcaagctttggccatgaattgggtcaaaaacaactatttggtgtatgactattgccatgatcctaagagggatcacactcagatacccgagtgctaattaaatgtgagtcatttaaaactttacaaaaaggaaaatgtaacaattgttgatc

SEQ ID NO: 30364 - DNA, 155 bp, Gossypium hirsutum; identical to SEQ ID NO: 27915
  Clone ID: LIB3148-037-Q1-K1-E6

SEQ ID NO: 30365 - DNA, 229 bp, Gossypium hirsutum
  Clone ID: LIB3148-037-Q1-K1-E7
aggatttcgatcctattgtgttggccttcgggatcggagtaatgattaacagggaagatgatttcatggacttctaaatgttgtcattcttttttcttatcacaatattggagcttcgattttcagatgacattggtgtgctgtaaaactaacagacaaggggacaaacaccatttttaatgaataaacacagaaaatcaaatgaattatggctttcttttttcttctc

SEQ ID NO: 30366 - DNA, 363 bp, Gossypium hirsutum
  Clone ID: LIB3148-037-Q1-K1-E8
gccacgcgtaccgaaggaacaggttactgccatgcaggatgctgcggatattatcggtgctcacggtgctggtctaacacatatagtgtctgcaacaccaaacaccgtgattctcgaaattattagcagctttttcagacggcctcactttcaattgatcgcccaatggaaaggattggaatatcatgccattaaccttgacggatcgtatgccaatccaggagttgtcatcgatcggcttaacaagataatgaggagtctcgggtgctaagaaattattattttttccagattttatttccaatccggcacttatggaagaaacttagaagagattgttttcctttcaacagactgttttca

SEQ ID NO: 30367 - DNA, 343 bp, Gossypium hirsutum
  Clone ID: LIB3148-037-Q1-K1-E9
gctctacagcacaacaaaaaaggcaactagacttgagaaagaaaaacagtctcaaaatgcagcagaagtcaggcttcctgatcctcttgctctccctcattttccttcctctcatcttctccgacgccagaaaggaggctcccctcggaggatggagtccgatcaaagacaccaaggacccacacgtgataaagatcgcggaattcgccgtcgaggagtataacaagcagtcaaatgggagtttaaagttggttaaggtggtgaaaggcgagacccaggtggtggccgggacaaactaccggttgattttgcaggcgaaagaaaggaccttcgataacacgta

SEQ ID NO: 30368 - DNA, 326 bp, Gossypium hirsutum
  unsure (1)..(326): unsure at all n locations; Clone ID: LIB3148-037-Q1-K1-F1
cccacgcgtccggngagtcagaaggaggcttcccttatgaagctcatatgtttcctgaaatggaatttgtgtgaatgcttcccagtatcacaaaatcatgaccatggacgtatctgatgcttttcctttcctgcaagctatcatctggtcccatacttgaggcactacatgttgaccctgcatctggtgtgtctcttgataaagaaaagagcaataaagtgtcaaaaccagcagtaagtggattaccaacattagccaagttgacaaaagcaagtgcctccggaggaccctcaaaacaggggcagattgagaagaaagaaacttct

SEQ ID NO: 30369 - DNA, 402 bp, Gossypium hirsutum
  Clone ID: LIB3148-037-Q1-K1-F10
gaatgaattaaagtgctagaaagaacctacgttcatgagttaaataaaaaagataatgcacaaccaagcaacggaggaaaaagggaaaaaaaacttacaaattttaagagaaaagtaaaaaaatctattttacttttaactaatttgtaatatatgttaaaatattcacctttgtattcgattggctactggtattgtaagtcgatattactgtgctctgttgaatttgtttgtatatttctctcttcgtaaatcgtgtgtatattattgtctttgtaaaaaatcgggatcccttttacaatgaaggtattcgggctttatagccactgtttacagtgtatttacatctttattttacttccttgccatatttgttggttctgctgcctcttgttttctttt

SEQ ID NO: 30370 - DNA, 422 bp, Gossypium hirsutum
  Clone ID: LIB3148-037-Q1-K1-F11
atacagaaaccaaactcccaattcccaaagctcaaaatcaaaaaacctaaatcagatctaacatttttttgtcaaaatttaccgcaaaagatatggctctagaatgggtagtgctaggctacaccgccggcgctgaagccatcatgttgctcctcctcacagttccaggcctcgacggactccgcaagggcttgatcgccgtcacacgtaacctcctcaagcccttcatgtcggtggttcctttctgcctcttcctcctcatggatatatactggaaatacgagatgcgtccaacctgtgacgccgatacctgtaccccttccgaatatctccgtcaccagaaatccatcatgaagagccagcgcaacgcgcttctcatcgctgccgctcttattttgtactggcttctttactctgttact

SEQ ID NO: 30371 - DNA, 429 bp, Gossypium hirsutum
  Clone ID: LIB3148-037-Q1-K1-F12
cgttttagtaatatggtcgggtctcagttaataaacacattgtgttcgaagattggtcggtttcctcgagctgattgtcgtgtgcttgaagacattgatgcattgatcgacaaagatttgccggagatgaaactccggtgtgtgatggcgtatgaagaagaaggggaagggattgtgtcggagatcggaaacagcatattagaggcgttggtacatgaaacggcagctgatttcgaattttgttttgctggtttcaattttcaaaagtctcgtcttttagaactaaacggtgccgtttaatgtttgaatagtggtgaatgagaacatatcacatgggtgattcacgtgatgagatgctattcgttggggtctttgtaggactgtacacgtggataagtatagctgttggaccttttttttatatatata

SEQ ID NO: 30372 - DNA, 335 bp, Gossypium hirsutum
  Clone ID: LIB3148-037-Q1-K1-F2
gccatgttgtaaccaagaaggaattggctccacgtccatctaacagaaaaggaaaaactagcaaaagagtccattttgtgaggaacttgataagggaagttgctggttttgcaccgtatgagaagaggattacggagcttttgaaggttggtaaggacaagcgagctctcaaggtagctaaaagaaaattgggaactcacaagagagccaagaagaagcgtgaagagatgtcgagtgttctccgcaagatgagggctcatcatcctggaggtggagacaagaagaagtgaagcttttatttttgttgatttatggacaagcttgaaaggttgatt

SEQ ID NO: 30373 - DNA, 344 bp, Gossypium hirsutum
  Clone ID: LIB3148-037-Q1-K1-F3
cccacgcgtccggttggggttgagggtggatgcccgtgtggagacaactgcaaatgcaacccttgcacttgcgggaagtgaacaacaaagagaagcagagtggcctttgtcattttaactaaataaattctattactttagtatgtatcagcaaatcttcatgaggatttggttcttaattatgtgtaatgtggcttttctgctatgtcagaatgtattatgatatttaagaaagtttgttttctattgaaaaaaaaaaaatcataaaaaaaaaaacatcaaaaaaaaaaatatataatatttctttaatttatttacaaactttaatttataataatattaag

SEQ ID NO: 30374 - DNA, 67 bp, Gossypium hirsutum
  Clone ID: LIB3148-037-Q1-K1-F4
gttttttaagaagttgcttgatgtagctttttcattaactgccataaataagataggctttattttc

SEQ ID NO: 30375 - DNA, 215 bp, Gossypium hirsutum
  Clone ID: LIB3148-037-Q1-K1-F5
aaaaaaaaaaaaaaaaaaaaaaaaaaaaaaaatttttaatttaaataaaaaaataaaaaaaaaaatgagagaaggggggaagccgttaatgatatatactaacttacttatatatgcatgcaacagtctagttttttttttattgtcacctagtttaattgcattgcgcctccgatttccaaccttcttattgggaaatccatgtcgtttcctat

SEQ ID NO: 30376 - DNA, 266 bp, Gossypium hirsutum
  Clone ID: LIB3148-037-Q1-K1-F6
cccacgcgtccgcccacgcgtccgccaaaatgcacgctgttagccggagtgactatgataacgtgattggcgccttgccgtatctcaaagtaaatagaaatgccaagtgaagagttgccatgtgatgagttatttatgttgctttcttgtgatttctcacaattatgttagagaaagttgtgtttattgctttaatctatggtgcacttagtggccattgataaaattcctagttgaattttatttatttcaatcattttggcact

SEQ ID NO: 30377 - DNA, 367 bp, Gossypium hirsutum
  Clone ID: LIB3148-037-Q1-K1-F7
cccacgcgtccgcaagccatccatcaatggttgaggaggaggaagaggaggatcttgggtgggatgaaattgaggatctcagcagcattgatgataagaaagaaactcatggtgggagcccgagctccaatagggatgagctgaggaagagactaagtacagctgaagaagaggaggatttaagctgggatattgaagacgatgacgaaccgattaaagcttgatgaaaagccttaagtttcatctgaaattgttgatgtttattgctcataatttgctgcattgtttccttttttttcccttgtgttcctcatatttgtcccctggattcatttctcgtttgaaatgcaaacatctattatcgtgt

SEQ ID NO: 30378 - DNA, 404 bp, Gossypium hirsutum
  Clone ID: LIB3148-037-Q1-K1-F8
cccacgcgtccgcccacgcgtccgcccacgcgttcgcaaggtgtgggacaagccatggatggatttcaaggagttacaggatttcaaggttattggcgatgctcccgccggttgtacttccaccgcttaaggtgactggagattgtagaggaaaggatatcaggataccgaatgcgggttttaaataaatgtaactgtcttatgttaatttggatttagactactaaattcagtggtattgaacttaagcttatctagaacaatgaatgaataacgtctattgatgcaaagtacataatttacctgtgtcccttgtaccctatttcttctgtaattttagtatgataccattaatctgaagtaaatctacattttgggggatttattctcatgactgtctttct

SEQ ID NO: 30379 - DNA, 97 bp, Gossypium hirsutum
  Clone ID: LIB3148-037-Q1-K1-F9
aaaaaaaaaaaaaaaaaaaaaaaaaaaaaaaaaaaaaaaaaaaaaaaaaaaaaaaaaaaaaaaaaaaaaaaaaaaaaaaaaaaaaaaaaaaaaaaaa

SEQ ID NO: 30380 - DNA, 279 bp, Gossypium hirsutum
  Clone ID: LIB3148-037-Q1-K1-G1
cccacgcgtccgcaaagctggaaagaaatcggggaaggctgccaaggatccaaacaagccaaagaggcctgctagtgccttcttcgttttcatggaggagttccgtgagcaatacaagaaggatcaccctaaaaacaaatccgttgccgctgtcggcaaagctggtggagataaatggaagagcttgtctgaagctgaaaaagcaccttatgtagccaaggcagaaaagcgaaaggtcgagtatgaaaagaacatgaaggcctacaataagagacaggc

SEQ ID NO: 30381 - DNA, 450 bp, Gossypium hirsutum
  unsure (1)..(450): unsure at all n locations; Clone ID: LIB3148-037-Q1-K1-G10
cccacgcgtccggtcgagaacccgttgttccgtgaactggcggaacgatccggagatcaaaacgacgccgtcatcaacgtgccgtgcgaggttgtgttgttcgaacacttgctttggatgctcgaaaacgccgatcctcaacctgagtcattggaggagctcgtcgagttttacgcttgttgattttttttttctttttttatttttgaaaatcagaagaaatgctcccgtgtggtcgttcgcatggtaccaaagttgtacattatgtgataatgttgagaacggcgatgaaaatttggaggatgatcagatagttaacgagagaaagtcgatttcaatggcgaggatttaaccgagttcatgccccggtgaagagatttatatttgtgtatgtcgntgntctttgtcatttttcttaaaaaaatttttaagagattaatgaatgttcat

SEQ ID NO: 30382 - DNA, 415 bp, Gossypium hirsutum
  Clone ID: LIB3148-037-Q1-K1-G11
ctttgattgctgaatgcttcaggaaacatcacaaaatgctttacagacgttgctagattcatatatatatggtattgagtttattttgttattttccatttctttctcaaggaaaaagcatatggtaaatggagcctgaatattcaaaatacatatacttttgaattttgagtttatttaaatatatataatcaaaattgtgatctttgcctcaaaaaaaaaaaaaaaaaaaaaaaaaaaaaaaaaaaaaaaaaaaaaaaaaaaaaaaaaaaaaaaaaaaaaaaaaaaaaaaaaaaaaaaaaacaaaaaaaaaaaaaaaaaaaaaaaaaaaaaaaaaaaaggggggcccgttttaaaggatcaaagtttcctccccggtgataaaaaaataaaattttttttttggggcccccaa

SEQ ID NO: 30383 - DNA, 165 bp, Gossypium hirsutum
  Clone ID: LIB3148-037-Q1-K1-G12
tggataaaaaaataaataaaaaaaaatttatttttcggacgatctaaaagaattcaagcgggagggcgcgtaattgcgaacgtcctacttctaatatattgtaacacaaaattcaattaactggctcgcgttttacaacttcattaactgggaaaaccctaaaat

SEQ ID NO: 30384 - DNA, 151 bp, Gossypium hirsutum
  Clone ID: LIB3148-037-Q1-K1-G2
catttgcaaccaaattatgggtgagtggtgaaagaagagatgggcgtatggctgtgagtgattacttttaaatttttttaaaacttccttttatgtaattagctatgtttttgcagagtaaacttttgcacaatccaatgttttcagaatg

SEQ ID NO: 30385 - DNA, 302 bp, Gossypium hirsutum
  Clone ID: LIB3148-037-Q1-K1-G3
gccacgcgttcgggttttctattccgccaactctccctccaatttagatgcagatcttggttgggaccctgaccggcatgaccatcacccttgaagtcgcgagttacgacacgatcgacaacgttcaggcgaaggtccgggacacggcagggatcccaccagacctacaacgtgtcatattcgtcggaaaacagctcgcatatggccggaccttggtcgattacgacatccagaaggagttcaccctccatctacgtctccgtatacgtagcggcatgcaaatcttggtcagaaccatgatc

SEQ ID NO: 30386 - DNA, 427 bp, Gossypium hirsutum
  unsure (1)..(427): unsure at all n locations; Clone ID: LIB3148-037-Q1-K1-G4
cggacgcgtgggcggacgcgtgggctctagcatacttattgtagacacaaatttagagatttggtggagctgggttggcatgaaatcacaagaatgatacatgtcttgagaatttttctgtattgagaaagtgacctttagaaactacagatataatgggtatttccattgacaatggtgatgctcttttcttatttatatacatatatacatgtaacactttttacccgtatccgttgtcggaatagagtacgaggcattattgnaaaaaaaaaaaaaaaaaaaaaaaaaaaaaaaaaaaaaagaaaaaaaaaaaaaaaaaaacaaaaaaaaaaaacaaaaaaataaaaaaaaataaaaaaaattctaatnacacctaaaataaatatataaaaaagggggggcccttttaagggacccaagtttt

SEQ ID NO: 30387 - DNA, 444 bp, Gossypium hirsutum
  unsure (1)..(444): unsure at all n locations; Clone ID: LIB3148-037-Q1-K1-G5
cggacgcgtgggcttttcttatttttcgttttaatttctcgagcttttacggttcaaaaatggcggacaaagctaaaaccgaaaacccatcttttctccatggaaaatacgagcttggccgtatgttgggtcatggaacgttcgccaaagtctaccatgcgaagaaccttcaaacagggaagaatgtcgccatgaaagtggtgggcaaagagaaagtgatccaggtcgggatgatggagcagatcaagcgagagatctccgtcatgaaaatggtgaaacaccccaacatcgtcgagctgcacgaagtgatggcgagcaagtccaagatttacttcgccatggagctcgtccgcggcggcgagctcttctcgaaaatcgccaaaggtcgtatcaaggaagacgctgccagggtttacttncagcagctcgtttccgccgtcgatt

SEQ ID NO: 30388 - DNA, 409 bp, Gossypium hirsutum
  Clone ID: LIB3148-037-Q1-K1-G6
gctaagggggatacggccaagcgcattgttctggatgcaaagatagactatcctgcagcatgtaacgctatggaaacgcttcttgtacacaaggatctgtctagtaatggtttgctcaatacacttaccaaggaactccaacatgaaggtgtgaccctttatggtggaccaagagcgagttccttgttaaatattcctgaggcacattcatttcatcatgagtacagttcaatggcctgcacagttgaaattgtggatgatgtgcaggctgctattgaccatatacatcaacatggaagttctcacactgattgcattgtcactgaaaatcatgaagttgctgaaattttcttacatggagttgacagtgctgcagtatttcataatgcaagcactcgattttgtgatg

SEQ ID NO: 30389 - DNA, 388 bp, Gossypium hirsutum
  Clone ID: LIB3148-037-Q1-K1-G7
catatagaactctctctctctaaaaaaaaaaaagagagttctttatatggagttttatattatgtgatgagagaataaattatcttgtaaaagcttgctttgttaatgaaataaattcctattactatgattttccaaaaaaaaaaaaaaaaaaaaaaaaaaaaaaaaaaaaaaaaaaaaaaaaaagggcaaaaaataaaaaggaacaaaaaaaaacatactcatgcctgcaaaataaaaaaaaataatataggggggccgttttttaataaacagacattaattcttccaccttcgggactgggaaatcctttttttttgcccaaataaaaaaaattgcggcgcagtcttttttacccagccgggggaaaaaaaaaaaagcccccac

SEQ ID NO: 30390 - DNA, 231 bp, Gossypium hirsutum
  unsure (1)..(231): unsure at all n locations; Clone ID: LIB3148-037-Q1-K1-G8
cccacgcgtccggtgaaaatcggacaatcattgtgataaaaaaaaatcagagaagcatgtttaaatgctgtaagcaccattgcaatatatgttcattgctcatacaaaacaatgtattcaatgtaaattttttaaattcaactttgaaattgantgaaaaaaaaaaaaaaaaaaaaaaaaaaaaaaaaaaaaaaaaaaaaaaaaaaaaaaaaaaaaaaaaaaaaaataatg

SEQ ID NO: 30391 - DNA, 302 bp, Gossypium hirsutum
  Clone ID: LIB3148-037-Q1-K1-G9
cggagaagcacattctctgaaagttgaaagcattttgtacaaagcaagttcagactatcaagaggttcttgtttttgagtcatcaagctacgggaaagtgcttgttcttgatggtatagttcagctgactgagaaggatgaatttgcatatcaggagatgataactcatcttcccctttgctcaattccatcccccaaaactgttctggttgtgggaagtggtgatggtggggttcttgcagagatttctcggcacagctctgttgagctcattgatatatgtgaaatagatacgatggtta

SEQ ID NO: 30392 - DNA, 283 bp, Gossypium hirsutum
  Clone ID: LIB3148-037-Q1-K1-H1
cccacgcgtccgcggaatttcttttcttcaattacaaattaatcaaattttctttctttctttttttaattttaaaattaaataccttaaaatccatggcggtattcagattggcgccggaagagtcaccggatccaacccaacaacatccaccgccgcaacaacagctgcaggccggtcgagaagtggcgtccgacgacgagcggtcggtggctgcagattcctggtctataaagagcgattacgggagcacacttgacgatgagcagcgccacgctgatgc

SEQ ID NO: 30393 - DNA, 309 bp, Gossypium hirsutum
  unsure (1)..(309): unsure at all n locations; Clone ID: LIB3148-037-Q1-K1-H10
cccacgcgtccgattttacatgaacccgcaacgtgccaccaccatctggtatgtcccccgcaagaagagtattttcagccagcaagatgacattctaactgctgccgagaactacattgaagagcatggcactcacgaatttgaaaggcttataaccaaggctgagaaagaagaaagaatccgacgcagcaacaactacatgatctttgatgacgattatatatattgacttgttttgtaaactagcaactttctttgttgtaagaaatgctatttaatgatgtatcatcttggcttaattatcacana

SEQ ID NO: 30394 - DNA, 450 bp, Gossypium hirsutum
  Clone ID: LIB3148-037-Q1-K1-H11
tgagattttagggttaaattagtgaggagagaatgaggaagccttgctgtgataagcaagacacaaataaaggggcatggtctaagcaagaagatgagaagctcatcaattacattcgaattcatggcgaaggttgctggcgtactctccctcaggctgcagggctccttcgatgcggtaaaagttgtaggctgagatggataaattatctaaggcctgaccttaaaagaggcaactttactgaagatgaagaggatcttattatcaagcttcatgcactcttaggcaaccggtggtcgttgatagccggaagactacctggaagaaccgacaacgaggtgaagaattattggaactctcatctaagaaggaagcttataaacatggggatcgatcccaataaccatcgtttgatcactcacaatcatcttcctcgcccacatgatccca

SEQ ID NO: 30395 - DNA, 464 bp, Gossypium hirsutum
  Clone ID: LIB3148-037-Q1-K1-H12
cgcgccacgcgtacggcaattcacttggaaatacggcaatacaccaccaaagaagagcacctaggtttaaaaacagagttttatgcgtgctggtgaacagaggaaactgcaaccactgaaagagtggaagctcgtatcgatgcagtacaaaagctttggattgccattaatggagggttcagtgagaggtgaagcctgtatttcccaaataaaacaaactcttgcctgtggtttgtagctagtaatctcccaattcatgtattactgtggtttatgtctttattctaatgttattgtgtcatgttttgtatcgcgttcgaaataatcaagtccaagtttctacttagctttacttggacgaataaggttttacctgttgtttgataagtatacctttctattgttatactggtctctcataataatataatcccatttatatgggtgaattctgtataagttaa

SEQ ID NO: 30396 - DNA, 258 bp, Gossypium hirsutum
  Clone ID: LIB3148-037-Q1-K1-H2
ctagttttaatggggtgactatcttttccaacttcaaacttttctcaaatcctgcgtagacacaaatctgattttttcccctttagtatttctaatattttccccagttgcatgcgacttatatgctaaagcacggaagaatttagtaggatgttttttgttaaagcacttttgcattcagctgctagagctttgtatataaaattagggaggaaaatgaataaaataatgatgaaattgttattcctttttcttttt

SEQ ID NO: 30397 - DNA, 51 bp, Gossypium hirsutum
  Clone ID: LIB3148-037-Q1-K1-H3
aaaaaaaaaaaaaaaaaaaaaaaaaaaaaaaaattaaaattaaaaaaaaaa

SEQ ID NO: 30398 - DNA, 454 bp, Gossypium hirsutum
  Clone ID: LIB3148-037-Q1-K1-H4
ggatatatggctccggagtacctagcccatggccagttaaccgagaaagcagatgtctatagtttcggggtgcttttactcgaaatagttacagggaagcaaaacaacaagagcaaagcaacagaatattcagacagcatagtaacagttacttggagacactttcagttagggactgtggaggagatttatgacccaaatctaatgttacacaatgacaaccatggcagcaactttaggaatgaaattttcagagtggtacaaattggacttctttgcacccaagagatcccatcactaaggccatcaatgtcgaaggtactacacttgctaacaaagaaagatgaagacctctctgcacctactaatccaccttttttggatgaaaagatggaattcaatgagacaagtgacaacgaatgctatcccctcaaccgagctgataatgattcaa

SEQ ID NO: 30399 - DNA, 440 bp, Gossypium hirsutum
  Clone ID: LIB3148-037-Q1-K1-H5
aggcacgcgtccggtttcatcatcgtcgcttgaagtaggaacagttccagatgggaattaccacgcaacacaagtgggtggttcaatcgatcgagaagctagggttttaaggtacaaagagaagagaaagaacaggaaattcgagaagacaatacgatacgcttcaagaaaggcttacgctgaatcaagaccaagaatcaaaggtcgattcgctaaaagaacagaaacccacaacgatgatgtcgatcacatgttcaataactcgtcttcttttgctgttggtcctgctggtttcatggcggaaacagactatggtgtcgttccatcgttttgaatgttgatgttttatgtttggtttaattctgtaatgtattaaattatttaatccaatttccagcaaagtagaaataaccttatggccattgaaaatcaaggaagat

SEQ ID NO: 30400 - DNA, 99 bp, Gossypium hirsutum
  Clone ID: LIB3148-037-Q1-K1-H6
gtaccatagtcaataagaagctcccgtgaatgtgacacaattattgtactatataataaatccaatcctggggtcatctgattccaacaggtttattct

SEQ ID NO: 30401 - DNA, 338 bp, Gossypium hirsutum
  Clone ID: LIB3148-037-Q1-K1-H7
ctgtcgcgaaagaaatgagagagaatggaactgtctgtggcattgatggtcctgtaactggaattactttttctgctgattctgggaagaaaaagatccttctcctaaaaccaaaagatcgagaggcacctaatgtgccagagggtgcatctgaacagcagggtgcatcatctcctgtagtaaattcacctggttcatctgcttcaagacagggtcaaagacgcaaggctggtggaaagttaataaggagcatacttttgagaaatgaagcgggccaaaatcaatcttcagcggcagtccagcctcaacagaaaactcaaagtccggacactgtcaaa

SEQ ID NO: 30402 - DNA, 308 bp, Gossypium hirsutum
  Clone ID: LIB3148-037-Q1-K1-H8
caaaattgttccatctcatgcattcatagaatttttctgtcttttgcgtttctttggggtatacaactgtttttccttttgctgttcttttttttataaatgtatttttggttagcactgcttagagaaaagtgatactattataatcacaatttgggcatatgacattaaacacagtttactgaggcaacttatttctgtgttgccttattattataatattattattattggttttaatgaaattgacgctataatgcatgtagaagataaaatacaccctgaaagtggtgctccccgtaatggag

SEQ ID NO: 30403 - DNA, 397 bp, Gossypium hirsutum
  Clone ID: LIB3148-037-Q1-K1-H9
cccacgcgtccggttcttccccacatcgagggcataatgtactgtttgtcagtttcctacaaagaatgttcactcgagtaggcagataattccatgaaatcttccagatggtgattaaaattttatgtggtagatcgaggctccataattttttataaaattccttgtagttggtttgtaaagcgtatgctctaggatctaagctttgtaatagtttataggcactacgaactgaaaattcacccaaaggttcatcgctccaaacctgaaagtccctatgaagttcttttgccaatgggaatcccgagatcttacctgctgcttcttctgaaaaggtattgaccattaaactcctggtccattcttttaccgtattattggttaaactaacattctt

SEQ ID NO: 30404 - DNA, 143 bp, Gossypium hirsutum
  Clone ID: LIB3148-038-Q1-K1-A1
tccgccaaggcgtccgcccacgcgtccgatacttttcataaattttaaatttaatccttgtacttttatttatagaaatttaaaccatttacttattttattagattatataccgatgacttacggattttatatattattta

SEQ ID NO: 30405 - DNA, 389 bp, Gossypium hirsutum
  Clone ID: LIB3148-038-Q1-K1-A10
cggacgcgtgggttttttttctctgtctttctaaaaaaaaattcttccttaacaaacacagagaccacattttgaaacaaaaatggcacgccaacttgttgttcttgctttagttttgattgtccttgccggcgtggttttcgccgacgcctcatccgccggtggtagccctgcaagtgcaccggctggagcttctacaggtggcagtgctgctagttcctcccctacttctcagcctaccactccaagtcttagcggcgatatccctattgatgatccataaaatgattgtcaagaaaatgccgacaaaacattaaacaaattaccatttaataacatggtgggatttttgaaaataaataattagttctataaatagaatgttatga

SEQ ID NO: 30406 - DNA, 143 bp, Gossypium hirsutum
  Clone ID: LIB3148-038-Q1-K1-A11
gtaaacgaggcttaaaatttaaatgtgtattgtaaaaatatagacccttaaagggctaacctcgctcgagtccagatccatactcgccaccgccagcggcagctcccgacgaagttttcctgacggaatgaactttacggcac

SEQ ID NO: 30407 - DNA, 426 bp, Gossypium hirsutum
  Clone ID: LIB3148-038-Q1-K1-A12
gcagtgtgaaaatcgaaattttgtctctgtgcttacaccagatcactaggtttcatgaagacattcagtttgagctccattcatcatgtacttaatatttcaaactagaagttggaaagatgtgaaatataagggctgattgtctttgcattcccgatgatttggatccctcaagcacattgaattttgggatggaacatatacaagttatttggttagctttcaaattatgactttagttgcttaagttttagcatattctttctgaggcatttggtcctaaaataaaaaaattcttgtgccatagtgagtgtagaaataatttgagaatttattgacgattccccaattcagtgcattttatgttgtttttaggcactatttttgggtccctcttgaggcctcgactcttctgtttggtttttt

SEQ ID NO: 30408 - DNA, 333 bp, Gossypium hirsutum
  Clone ID: LIB3148-038-Q1-K1-A2
gatggttgacaaatgacctttcagcatttgatatgaaactaattagactccaaaaaaaaaaaaaaaaaaaaaaaaaaaaaaaaaaaaaaaaaaaaaaaaaaaaaaagggaaaaaaaaaaaaaaaaaaaaaaaaaaaaaaaaaaaaaaaaaaaaaaaaaaaaaaaaaaaaaaaaaaaaaaaaaaaaaaaaaaaaaaaaaaggggggggggtttaaaaggaaaaaaagttaagtgggggggggggggaaggaaaagttttttaatgggggaaccaaaaaaaaaaaaaggggggggggtttaaaaaaggggggaaggggaaaacacggggggtacc

SEQ ID NO: 30409 - DNA, 196 bp, Gossypium hirsutum
  unsure (1)..(196): unsure at all n locations; Clone ID: LIB3148-038-Q1-K1-A3
cccacgcgtccgtnaaaaaaaaaaaaaactttttttatttgatataaaaataaataaaaatacggaaaaataaaaaaaaaaaaaattcaaaaataaaattatgggggggctgttaaggggtccatttttctgttcccgtgctttccaacatatgggctctttttttggggccccttaatttaatttcctggcccgg

SEQ ID NO: 30410 - DNA, 372 bp, Gossypium hirsutum
  Clone ID: LIB3148-038-Q1-K1-A4
cccacgcgtccgcccacgcgtccgcccacgcgttcgcccacgcgtccggaacagagcaacaaaacgaaggaatattcaatgtttgttccctgcaatggcggtttcaagcatagacactcaaaacccacccagcaaagcgacagctccgatcgaaattcactgcgttaaatgtgagtcctgcggcttcacagaggagtgcacccttgcatatatactgcgtgtccgggaacgttaccaaggccgttggatttgtgggctgtgcatcgaggccgtcaaagatgaggctctgagatcggatacgcttatttccaccgaggaagcactggaccgacacatcaaattctgcaatcagttcaaggcgtcgagttcttt

SEQ ID NO: 30411 - DNA, 174 bp, Gossypium hirsutum
  Clone ID: LIB3148-038-Q1-K1-A5
cccaaccctccggactttttctctattcgacttgtatcaaatatgttgctttgactattattattagtacttatgtctaagattcgaacacatctagacatggttatacagatatgaccttcaaatgtatgaaactcttattttcttgaaaaacttgaacaaaccgtgttagat

SEQ ID NO: 30412 - DNA, 279 bp, Gossypium hirsutum
  unsure (1)..(279): unsure at all n locations; Clone ID: LIB3148-038-Q1-K1-A6
gaagatccttttcttagccttctattcttttcatatattgcatcatttttcccttttactttaaagtcgccatccagtcctgcagaattgtaactttttatttaccatgatgtgtgtgtatgtatgtatcggtgcatgtaaattgcacaaggtattgggaaaatggctgaattattccttttttaaaaaaaaaaannacaaaatactattaattttttaaattaaaattaaaactaaaaaaaaaaaaaaaaaaggggggtcgttttaagggatccaaat

SEQ ID NO: 30413 - DNA, 388 bp, Gossypium hirsutum
  unsure (1)..(388): unsure at all n locations; Clone ID: LIB3148-038-Q1-K1-A7
ttctactaaaccagatgaactaaaggctacaacagaaaagttgaagctgctcttcattacctcgatcaaaaacccagggtactgaataaaaatatgccagctattttcttcggcacaaccgcacctgggacaaagagtgttcatcactaccctctttattttaaggttgacaaaggaagggataaaatcccaagaaatcctccaaattgtcatctgaatctttgaagggatatgtaacttccataatttgttgtagaaattttttgtctcggtatgtaataataaatcattagggtccagattagaaccatgtaatagtttataggcactcctcaccgagaactcccctatcggttctcctctccatactngaagatcttcttgttct

SEQ ID NO: 30414 - DNA, 403 bp, Gossypium hirsutum
  Clone ID: LIB3148-038-Q1-K1-A8
aggttcttagtattataccacaatcccttgttcttttttctggaactgtgcgattaaacttggatccatttaatgagcacaatgatgatgacctttggcaggctttagaaagggcacatttgaaggatgtgatcttgaggaacactttccgtctggatgcaaaggttttggagggtggggagaattttagtgttgggcagagacagttattgtgtcttgcccgagcattgttgcgaaggtcaaagattctggttcttgatgaagcaactgcggcagtggatgttaagactgatgcttttatccagaaaaccattcgtgaagaattcaaatcttgcaccatgctgattatcgctcacagactaaataccatcatagactgtgaccggattctcgtactagatgc

SEQ ID NO: 30415 - DNA, 365 bp, Gossypium hirsutum
  Clone ID: LIB3148-038-Q1-K1-A9
aattctttcccaatttcatgaattcgggaggtattgcacgatagaactggcatcggcacaaattgcatggagtcaggatcgaagataacctgtaaatgttgctgccacatttaccatttcactgtgggtattcctggaaattcaggggggtagggtggggggatctgctgattgtaatgctatatatatagagggatatatattcattagcctccggtgtagatggtcttacaaatgtttggaaaaaggaatcgtatcctgcagatatttcatggatgggggggctttggcaaataatttgttcttataggtgcatgtaaatagttttcccattattatttcatccttcagtgtgttcattgttc

SEQ ID NO: 30416 - DNA, 296 bp, Gossypium hirsutum
  unsure (1)..(296): unsure at all n locations; Clone ID: LIB3148-038-Q1-K1-B1
agccttccggcctttcgaattccgagtgcagccaatgcaaccaaacttacaagagaggatgtgatgaacattgtgagggttatccaatagctaaagctgcctatatgagctataaggtcaaaaatggagggggtgcttagtttctgaatgataataacttttaagttctacgagtattccagtgtttatgacaatcttagtaatatagatatcaactatgaatttgatattatgaacaattattgtatctactttgagcaacttatatgtgtctctatgaaccatagtgtgttntt

SEQ ID NO: 30417 - DNA, 255 bp, Gossypium hirsutum
  unsure (1)..(255): unsure at all n locations; Clone ID: LIB3148-038-Q1-K1-B11
cccacgcgtccgcccacgcgtccggctcttcagagcaatgtcaactattgccgttgcttgttcaaaaatgtatggggagttaagggccatatcancgttcaagggaatccacaatcatatgcttcattataaacttatatatgtatcgtgttaaaacacatanttctatagtataaaagtgtgtccagatgcgctatatatggacacatctcgcacccacagaagggtatagagtgctctctaaagtggtgtgtt

SEQ ID NO: 30418 - DNA, 405 bp, Gossypium hirsutum
  unsure (1)..(405): unsure at all n locations; Clone ID: LIB3148-038-Q1-K1-B2
cccacgcgtncgcgaatatgattatctgttcaagcttctgcttatcggcgattcctccgtcggaaaatcctgcttgcttctcagatttgctgatgattcttacgtggatagctacatcagtaccatcggtgttgatttcaaaatcagaacggtggagttggatggcaagacaatcaagctgcaaatttgggatactgctggacaggagcgttttcggactattactagcagctactaccgaggagctcatgggataatagtcgtctatgatgttaccgagatggagagcttcaacaatgtcaagcagtggttgaacgagattgacagatatgctaatgacagtgtatgtaagcttctggttgggaacaaatgtgatttagttgagaacaaagttgtcgacacgca

SEQ ID NO: 30419 - DNA, 409 bp, Gossypium hirsutum
  Clone ID: LIB3148-038-Q1-K1-B3
tgcttctctattgttaaatacaataaaccttagagaaaaactgcatttctccatccccaatctttttccttttcaataaaccccaacaaaccaaaatggcccgccaaattgttgttcttgctttggccatcatggtcctctttgccttggtttccaccgctgtggcggcccccgcccccgcacccggtggcagctctttaggttcacctggagatgctagctcccctcctcctcaggcaagcgctcctagtcctagcagtggtgccgcacttgaggtctcggctattgccgcaagagcagccgccgttgctagctattttatgttctaaatacgatttatctcaaaggtgtctagcagcggcttttctaagtttgatatcatcacgaaagctgccttattaattatttt

SEQ ID NO: 30420 - DNA, 182 bp, Gossypium hirsutum
  Clone ID: LIB3148-038-Q1-K1-B4
agaaatgcagcaaatttaacttttaatcatgtctttgagggaatagatcgtgtagtaattgtatggatgttgagtattgagacagaggcaagggtttcgggacttgtaaattccttcatcatatcgaaaagctctttcgggagaactcagattgaatgtaaattcttgccaattttctcttc

SEQ ID NO: 30421 - DNA, 193 bp, Gossypium hirsutum
  Clone ID: LIB3148-038-Q1-K1-B5
aaaaaaaaaaaatagggtatacggtcgcctgatttcagggggctgcccttcttttggccaccatcttccttgcgaatgctttcaccgttactcatttttttttggcgtgccgtaaattcatttaacggccggtggtgtaataactttgaggttggaaacctttggcctttcccacactttctccctttgaatg

SEQ ID NO: 30422 - DNA, 235 bp, Gossypium hirsutum
  unsure (1)..(235): unsure at all n locations; Clone ID: LIB3148-038-Q1-K1-B6
cccacgcgtccgcccacgcgtccggctcttcagagcaatgtcaactattgccgttgcttgttcaaaaatgtatggggagttaagggccatatcacgttcaaggaatccaaatcatagctcataaaacttaatagtatgtttaagcaattttctatgtataatgtgttcgatgtgctttatatggatacanctcgaccaacagaaaggtatagaatgaactctaaaatggtttgtt

SEQ ID NO: 30423 - DNA, 274 bp, Gossypium hirsutum
  Clone ID: LIB3148-038-Q1-K1-B7
ggagttgcagtgcatcaatggtgggaatgaaaattaccaattaagtcacgattagaagacagatggtgtcttttcgtactatgaaactgcatctactgcttgtgtgtgtgtgtgtgtgtgtgtgtgtgatgttttaggagggtttatgtgggggagtttagatgtgatttttccccaaataaaaaccatattatctctttaagcaaggtggttgatgttgattgttgttttgatgttccttttcttaataataaagatgcagtgtggcaattta

SEQ ID NO: 30424 - DNA, 372 bp, Gossypium hirsutum
  Clone ID: LIB3148-038-Q1-K1-B8
cgccaacattggggttttattctctccttttttttaaaaaaaatttcagtatggaagaatctgttaagctcaggagggatagcgccatggatgatccatctttcaagctttcatgcatgtattttatttgatcctcatatagcgctatccatcctgagtttcatcggttcttcttgcttgctgtcgctccgttagctgaaaaaggaacacacaaaaatcttgtgggttccacgaatccactagaaagggggagaaagtgttgaagaaaattcccctttgttgtataaattggagaaacaaacaaataaggggccttatatttgtggacataattagtttggtcctctaatgcacatgcggaaatgatgcttc

SEQ ID NO: 30425 - DNA, 309 bp, Gossypium hirsutum
  Clone ID: LIB3148-038-Q1-K1-B9
cggacgcgtccgcccacgcgtccggtgtggaaaccctcatgccatcatcaggaagtacgggctcatgtgttgcagacagtgcttccgtagcaatgccaaggaaattggattcattaagtaccgctgaggaatgtttatatggctagaagttggaaacactttttggctagtatgaacctttgtttcgaaattgtagcaacttttaagataacattgctgttttttgttgaatttagtttaagagcttgaagttttggttctgcaaaggataatttgttgttttctcaatgaagtaatcatactgttttt

SEQ ID NO: 30426 - DNA, 422 bp, Gossypium hirsutum
  Clone ID: LIB3148-038-Q1-K1-C1
gcaaaatcgaaaaatggggcagattcaatactccgagaaatacttcgatgatacttatgagtacaggcatgttgttctcccccctgaagtggccaaacttctccccaagaatcgcctactctctgaaaatgaatggcgtgcaatcggagtacagcagagtcgtggctgggtccattatgcaatccatcgccctgaaccacacatcatgctcttcaggaggcctctcaactatcagcagcagcaggagaatcaggcccaacaaagtatgcttgctaagtaattacatcagtatttagcatccaaaacaaaaagggtgaaaccaaagctactttgctagtgtttatcctcttcctaaacagtttgggtgttgtggattcctggattgttttgtattttagttctccactttggagaaatccatg

SEQ ID NO: 30427 - DNA, 421 bp, Gossypium hirsutum
  Clone ID: LIB3148-038-Q1-K1-C11
cccacgcgtccgagctgtttgcttactctctctcgtttgtttcaaaacccctagccgcttccttaaatctctgtgtctctctcataattttccttgttattcttccccttcaagtgaaagcattataatggcattctctagcaaacttggaagcctttttaggcaaaatgggcaaaccccaatgatatcttcgatgcttaattcacttcgttgcatgtcgacatcaaccaagaagcttttcattggaggtctttcatatggaactgatgaccaaagtctcagggaagcattctctggattcggtgacgttactgaagctcgggttatcgccgatagagacactgggaggtccaggggcttcggttttgttaactttgctgacgatgaatctgccaacaatgccttgtcagccatggatgga

SEQ ID NO: 30428 - DNA, 330 bp, Gossypium hirsutum
  Clone ID: LIB3148-038-Q1-K1-C12
attattttttgggtttatatttaatgggcctgccaaatttgggcctatacagacggttatagcttaaaaatgtttgttcaaattaactcaaaaataattattatactgggtgaaataagttcgtcgcttaaatatatctttattttaaaactgtaacaaatgaacttaactcattgggttagaaaatgcattgatgaatgggacaacttggtcgggccatatatacgatccaagctgacaagatcgttcctacgaggttataggtgtttgatagagtagctgaatgtaatatactggacatgggagtaaaacggccatacatgaaaaacc

SEQ ID NO: 30429 - DNA, 218 bp, Gossypium hirsutum
  Clone ID: LIB3148-038-Q1-K1-C2
gaatcattcactaaagatttcgatccagagccaaatgtctccgcttacaataactaattaaaagcgaaaccaaagtaccagtggcttagacccacatcttccaataatttcgtcatcagattgtgtgttgtactcttgcgtgtgaagctttatgttttatatttgtgaaaaaaaataagtgggttgttatgaatatatatgattatgtgaccactatc

SEQ ID NO: 30430 - DNA, 418 bp, Gossypium hirsutum
  unsure (1)..(418): unsure at all n locations; Clone ID: LIB3148-038-Q1-K1-C3
cccacgcgtacggccatgggacgatgagacagacatgaaaaagcttgaagaagcagtaagaagtgttcaaatggaaggactactttggggagcttgtaagcttgtgcctgttggttacggaatcaagaaattgcaaattatgatgacaattgtggatgatttagtgtcggttgatactctgattgaggaacatcttacagtggaaccaattaatgaatacgttcagagctgtgatattgttgcatttaacaaaatataaactattttgggatgctgcaatagtagtttcttgaggagtccttcaaatttaagattttcatgttttcttgttctgctagaactttaatttattgcgttggttattgttttttgttttgctagaactcaaattatcgngctggcttttattatcttattt

SEQ ID NO: 30431 - DNA, 209 bp, Gossypium hirsutum
  Clone ID: LIB3148-038-Q1-K1-C4
gtcaggagatagtatgatatatatccatagttattagcagctaatgggtgttagtaatgttgtcaagaacttaaaaagagaatcagtttctctgcatggttttatgagtagtgagcaatgtgaaataagataaaatgttcaacttctacttaaggtgtcttcttacgtgaatgaatgcttgcatcatatttgagctttatatatgtcct

SEQ ID NO: 30432 - DNA, 377 bp, Gossypium hirsutum
  unsure (1)..(377): unsure at all n locations; Clone ID: LIB3148-038-Q1-K1-C5
cccacgcgtccgaagaagactgagggagagtttttcgaggctgaaaaagaggataagaaaaaactgcctgaagacaagaaagaagaccagaaagcagtcgacgcctctttgataaagtccatcgagggagtcccagacttgaaggcctacctcgccgcaaggttttctctcaagtctggcatgaaaccgcatgagcttgtcttctagaggatattttgcattcccttatgttaaagggcttttacttttgaattcttttggtttagattatctatggttttattatggggtgctattgctatatgtccagaacctaaattttggatagtatcttctgttatgcaagaacttaaagtttccttcaaaaaaaaaangga

SEQ ID NO: 30433 - DNA, 88 bp, Gossypium hirsutum
  Clone ID: LIB3148-038-Q1-K1-C6
caaaccaaaagacatggcttcatcatctcctctttctcccattctcctctctctgtttctagtattcatttgtggggtgtcagctcaa

SEQ ID NO: 30434 - DNA, 362 bp, Gossypium hirsutum
  unsure (1)..(362): unsure at all n locations; Clone ID: LIB3148-038-Q1-K1-C7
caagttttgaggtagaaaacaagagaccatggcaagagggcgaaccattctgacttgtctcatgtggcttttactcgttttctccattactttgtgtgcaagtgcaactgccggttctcgtctgggaacatcccaacaagttgtttatccccaagggtgtcgctgctgctatttcgttgggaaacctttcatgcttcggtgtggcaaagtatgctgcgatgatgattgctgttagctatgttagcatgagatttaaggttgaatcattatgtgcatcatcttttttcccctttgttgaatgtaatgtaattgtaccaaataaaaaataaaaataaggcttatccaannnaaaaaaannnnna

SEQ ID NO: 30435 - DNA, 415 bp, Gossypium hirsutum
  Clone ID: LIB3148-038-Q1-K1-C8
gcatcggttacccaaacggtgttcgaccaaaaccccgttgccattttcggggtttccaaggttttgttgcctagagagatttttgggaaagactcggctggagtaacatcgaagccggggaatgcggtggtggggacgacagttcagccgccggaaacatctccatcaccggagaattcggccgggtttagtggtccagcgtcacatctttcatcgccgccgggatttcgtgaagagataacatcgaagggtggaagatatagaatgcaaagctgcattgttactgtatgttgtataggattggttctagtggtatgagagcttcagccttgaaacctatttactagcttcaattgggttgaattccttgtataatttcctgtatgagatgttggtcaacaacttgtttttttta

SEQ ID NO: 30436 - DNA, 403 bp, Gossypium hirsutum
  unsure (1)..(403): unsure at all n locations; Clone ID: LIB3148-038-Q1-K1-C9
caagctcaattatgatgatgaatggcagggaattcaacgcagcacgtttctggtagatggagatgctctaactaactcctctgatcaaaatgcaactgctggggcatctagccgcacctcatcagatacacgaagacgaaggtttgacccctcatcattccagcagcgtgctgaggcattggaaggattgcttgaatttagtgcaagattgctgcagcaagagaggtatgatgagcttggtgtgctactcaagccatttggacccggaaaggtgtcccctagggaaactgctatctggctgactaagagttttaaagagaatactgcaaagcaagaggattaacgctgatgaaccttcaccgnttgtatcatatccatagctgtaatctttaccaatttttta

SEQ ID NO: 30437 - DNA, 414 bp, Gossypium hirsutum
  Clone ID: LIB3148-038-Q1-K1-D1
ggaaaatcgaatcacgaagctatgggcaatgaatggctgcaaaacgggaactgtccgattgcaaagtcgtatagggcggtcagcggtgttttgccactagttgcgaaggttttgcagccgccaccggggatgaaatacaggtgcccacctgcagttgttgcagcccgggcagcactagcacaaaccgcatttgccaagaatctccgcccacaatccttacccacaaaagtactggtgatcggggtgttaggcatggcggcaaatgttccgttagggatatggcgggaacacactgaaaaattctcaccatcttggtttgtggctatccatgcagctgttccattcatagccatgctccggaaatcagtgttgatgccaaagacagctatggcatttaccattgcagcgtctgta

SEQ ID NO: 30438 - DNA, 420 bp, Gossypium hirsutum
  Clone ID: LIB3148-038-Q1-K1-D10
agatatgaagactgagattaatgtggtgctgccagttcttgaagcaagatcagcagaagatattgatttggcttttaagcaactgcatgaaggagctgatgttgaggaagtaattgttccaagtatgattgtggaaccacaggatgacacagataacaaatcaaaattacctgttgtggaggcaagatctctgaaggaattacataatgctgtccaacaaggccgggaatctgatccagctaagctgccgcattcttcaggtgtaaacaatgctggtggatcaagaccttgaaagtaagaaggcaaaaactaatgactcaagttccagctctagctctagctctagctccagtgataatgaatgaaagcaacaaaacatagttcagaaagttagaagagagtttgtgggttcaagtttct

SEQ ID NO: 30439 - DNA, 157 bp, Gossypium hirsutum
  Clone ID: LIB3148-038-Q1-K1-D11
tctttttttaaaaaaaaaaaaaaaaaaaattaaaaaaaaaaaaaagaaaaacaaaaaaaaggaaaaaaaaaaaaaaaaaacaaacatggggcggcgggatcgggggtatcgagttaccggggctccggcttgctggccgtcacttttcttcttgggg

SEQ ID NO: 30440 - DNA, 188 bp, Gossypium hirsutum
  Clone ID: LIB3148-038-Q1-K1-D2
gtagaaccccgttgaagctttttagtcattctgtttcttcaaatgaaatctctctctttttgtcaagtgaaaaatatacatattttgtacttccacataaggaaatgaaatgacggtaaagaagtacttatgtatcaaaaatgaagggaaaagaaagataaggttgttcataaggtgcaggtccaatc

SEQ ID NO: 30441 - DNA, 396 bp, Gossypium hirsutum
  Clone ID: LIB3148-038-Q1-K1-D3
cccacgcgtccgcccacgcgtccgcccacgcgtccgtggcttaagcttactcaaatgcatcctgaccttgcaggattgaaagggcagtcaaataggaggcttgtttcaatgagtgaagttaagcaaaatcaaaaagaaggttccatgtggactgttctgaaaggacgtgtctacaatatatctccatacatgaagtttcaccctggaggtgttgatatgctcatgaaggcagtggggaaagactctacatctttattcagtatcctttttctttttttaaaaaaataaaaaaaatctatttggggagagcaccgagccatactcaatggagatgcttgaaagctaggcttaagatatatgagggtcatgtttttcagtggtattggtgccttggac

SEQ ID NO: 30442 - DNA, 258 bp, Gossypium hirsutum
  Clone ID: LIB3148-038-Q1-K1-D4
aggaccttcaatttttcatcggagagagcatgcacgatgatggatgtttggtatttgcttactacaaggatggtgctgttgacccgacatttttgtactttgcgtatgcattgaaggaggtcaagtgctgaggtttgaagcaaagaaaaaaaaagtggttgctgaagaatttagtcctttttattattgcttttgtctcttattttcagtactctgctaaagacataaattatttatggtttttgatgtttttgattt

SEQ ID NO: 30443 - DNA, 419 bp, Gossypium hirsutum
  Clone ID: LIB3148-038-Q1-K1-D5
gtttggctactcggcagcctcagcccaaggatcttgtgaagtatgctgagcactgcatgtacaatcctgcctaccaaagctaccggtgaaggtagttagaacacctctgcttttaccatattatttattaaaaaaaaaaggaagcccactttaaccattccttgaagtcttgtatttggtcttttttgtttgatatctttgtcattcttgaagttttgttcctccctgttcatctttgctgtcttgtaaggtacttggtgggtaagaaggtgaatggtgggtggtgtagttagatcaaatgaagtcaaaaatagcatttttttttctgaaaaaaaatgtggttatgaactggaaaatgtttcacattacatgaaatagaaacttgaaaggtgtcaatgagtgtgactttgcttgccaat

SEQ ID NO: 30444 - DNA, 340 bp, Gossypium hirsutum
  unsure (1)..(340): unsure at all n locations; Clone ID: LIB3148-038-Q1-K1-D6
aatttttaaaggacagtcacacttcttcggatatgaaggtcggtgtggtttgcctactaactttgatgcgtcatactgctatgctttgggctatggtgctggtgctctcctccacagtggaaaaaccggattgatatcatcagtaggaaatctgtgtgccccagttgaagaatggactgttggagggactgcccttacatcaatgatggaagtggagaaacaaattttggtatcgaaattaaattttatacttttataattttaaaaaattaaattaaattattattattttataaattnnnnaanaaaaannaaaannaaaaaaaaaaaaaaaataaaa

SEQ ID NO: 30445 - DNA, 276 bp, Gossypium hirsutum
  Clone ID: LIB3148-038-Q1-K1-D7
aaaaaaaaaaaaaaaaaaaaaaaaaattatattataaaaaaaaaaaaaaaaaaaaaaaaaaaacccactcatacattacttttattctaaagggctgccgttttggaggctccctcctgtcccccgctttctttcgtgtttccgtccttttttttatttccgcttctcttttttttactgggccggttttttgcaccgccttttgtttgaacaaccttggttttccctccccttttttgtctttcatcacatccgtttttcccctgctgttttctt

SEQ ID NO: 30446 - DNA, 350 bp, Gossypium hirsutum
  unsure (1)..(350): unsure at all n locations; Clone ID: LIB3148-038-Q1-K1-D8
cccacgcgtccgtgtggatgtagctataggaaaaacaacaaaatgttggcattgtatagagggtaaggtgggagattctttaagactgggttggcttatgatattattacgatcatgtttactaggttcttcattcagcttagtgtatgttggtgttagttaaaaaagtggggagggataaaaattttgtaggcaattgagttgagtgagtcaatattttcccctttttctttttttaaagaaacaaacttctattagctaactggggggactaactcattatgtattctttaaatattcagggaacataaataaattgttatgatataaaaattgatgagttctcttna

SEQ ID NO: 30447 - DNA, 241 bp, Gossypium hirsutum
  Clone ID: LIB3148-038-Q1-K1-D9
cccacgcgtccgcccacgcgtccgaaattttctgaggacgtttatattcataaagagctgataccatcaaatgacagtcttacttttggagagtattcagagatgctccttgacaaatattaccacaagaaaacataaagaactgtaaatattttcctcttttaccaactttaatctttattttatcctataacgctataggtacactctaaaatacaataatcaataatattgctttgtg

SEQ ID NO: 30448 - DNA, 321 bp, Gossypium hirsutum
  Clone ID: LIB3148-038-Q1-K1-E1
tcggccacgccttccgccaaaccaaaccaaaaaaaaaaggcttttgaaaaggttggagtttggggtttcaaagtctccaacatcctcaagtgaaattgcattaagtaaggcagtggaagagcccaattttttagggaatatacatatcttaaacatgttggaagatgtgaatgatattccccattcggagatttgtacatggctccaatgtattggattttttttagtattttatttccatctgagtaaagggacaattagaactattatccagtgtgttatgtagataaataatataaacggcatttgaccctttgtttc

SEQ ID NO: 30449 - DNA, 188 bp, Gossypium hirsutum
  Clone ID: LIB3148-038-Q1-K1-E10
gacaactgtaatttgttttccctttgtgttttccaaatcaaaattcactgcttgtatgtattttgtgttacctttctgaaagagaatgttcagaaagttgtgtttttaccataaaaaacttgttaaacacaactcgttggagtactggtttttgatgtttaatgggacggatggattaatctggatgc

SEQ ID NO: 30450 - DNA, 374 bp, Gossypium hirsutum
  Clone ID: LIB3148-038-Q1-K1-E11
ggtgtcattgtagagaaaggaaaacatgacaccttgataaatatcaaagatggtatttatgcttctttggttgcacttcacatgagtgcttccgcttcataaaactattttctttttttggtaaccataaggatcattttcttattcttttctctgctagcaaatctgatcttataagcattgtatcttataataaatttatggttaaattacctaaatggtccttgtactataggttgaaatgtctattagaaaattgaggaatttaactttgaagcaaactgttaaatttacttgatggataatttggtcttactattgcatataatatgggaataaaatatcatgaattcaatgaaaaaaaaaaaaccccc

SEQ ID NO: 30451 - DNA, 413 bp, Gossypium hirsutum
  Clone ID: LIB3148-038-Q1-K1-E12
caagattcgacctttgtggaggcactatttccaaaacactcaggggctaatctttgttgttgatagcaatgaccgtgaccgtgtggttgaggccagggatgagcttcatcgtatgctaaatgaggacgagctgagggatgctgtgcttcttgtgtttgcaaacaagcaagatctgccgaatgctatgaatgctgctgagattactgataagcttggccttcactcccttcgtcagcgccactggtatatccagagtacttgtgccacctctggcgaagggctgtatgagggactggactggctttccaacaacattgctaacaagggttgagggttggttgaattccagtcatatcttcaggcagctatcctattattttctgggtccttttttaagttttacaggaaatgta

SEQ ID NO: 30452 - DNA, 328 bp, Gossypium hirsutum
  Clone ID: LIB3148-038-Q1-K1-E2
cccacgcgtccgacaaaacaataacaaaaattttttgtcttatgaaaatgtttgagttttgagtgggagaagtcttcaacatccttaagtgaaattgcattaggtaaggcagtgaaggagcccaattttttagggaatatacatatcttaaacatgttggaagatgtgaatgatattccccattcggagatttgtacatggctccaatgtattgtattttttttagtattttatttccatctgagtaaagggacaattacaactattatccagtgtgtaatgtagataaataatataaacggcatttgaccctttgtttcattataaa

SEQ ID NO: 30453 - DNA, 399 bp, Gossypium hirsutum
  Clone ID: LIB3148-038-Q1-K1-E3
cgttgaaaccatttctactgttggcaaaatttgtgctgaggcagagaaggtattcaaccaggacatgtatttcaagaagactgtcaaatatgttggagagccaatgacccacttggaatccattgcttcctctgcggtacgagcagcaattaaggtgaaggcatcagttattatatgtttcacatcctcaggaagagctgctagattgattgcaaagtacaggccaacgatgccagttctctcagttgtcatccctcgccttaagacgaatcaattaaagtggagcttcagtggggccttcgaggcaaggcaatcccttattgtcagaggtcttttccctatgctcgctgatccacgacatcctgcagagtctacaagcgcatcaaatgagtcggtttt

SEQ ID NO: 30454 - DNA, 372 bp, Gossypium hirsutum
  unsure (1)..(372): unsure at all n locations; Clone ID: LIB3148-038-Q1-K1-E4
cccacgcgtccggttcaagaatggcgagaggtagagattcgtgggatttacggtcctgagaagactaaaacaagtcctccaccatcacagttcatggaatcatgagtaaaaaaagtactgaagagacattttcttgggaggtttgtataaaagctgaacatagaaggtaactctagttgccacttattaaattgaacctgtactaaaagattgcttttctctttgaacctacatacacatatatattgtatttgtatgtaaattagtgagattattaatggagattgaacatatgttgttgttgtatgagaaactgattttcatttnnnaaaaaanaaannaaaaaaaaaaaaaaaaaaaaaaaaacccccc

SEQ ID NO: 30455 - DNA, 406 bp, Gossypium hirsutum
  Clone ID: LIB3148-038-Q1-K1-E5
gttaattgggtcatcaactatgatcttcctgtaaaacacgacaaccgtgtggagcctgattgtgaggtttacttgcatagaattggcagagcaggacgttttggccgcaagggagccgtgttcaacttactctgtggtgatatggaccaaatgataatatccaaaatcgaaaatcattttgacagcaaaatagcagaggttcctgactggaggaatgaggaagactttaaagctgctctccgatcagccggtttattatgaaaggaaacccttctgtcaaagctatcttggtgaaatgctagagaagaggaacaaacagattgtgcttatagtatgctgtatactcgactatttgtgcccgattctgttggtttgattttgatttttggtactttgcaccatgttt

SEQ ID NO: 30456 - DNA, 409 bp, Gossypium hirsutum
  unsure (1)..(409): unsure at all n locations; Clone ID: LIB3148-038-Q1-K1-E6
ctcaactttgcgccgctctccagccttaaacccgatcggactccgattcagacggagcaaaacaggttacgatggcgcctactctggtatacgggcgtgagggtgcgcatgtacggagttgtggcagagtgcaggcagaaggcgtggtccctggtggtggcgtggctcggctcggaggcgctacacgagtgagggggaagcctggctcagttgcggcgctggaggcttaccctagctgctagggttttctgattttggtctctgctaggctaggtgttgggccatcaggctattaggtgttgggctagtgttagggtagtttaggttaaaagtggtttgggccacgtaattgggtctgtaattggacattttgggacatttaattatttttggttttnaaaaanaaaaa

SEQ ID NO: 30457 - DNA, 421 bp, Gossypium hirsutum
  Clone ID: LIB3148-038-Q1-K1-E7
atccaatagttaaagttccggcattactgataatgggttgcaaagattatgtcttgaaatttcctgggatggaagaatacataaagtttgggaaggcaaaagaacttgtacctgatttggatataatatatttgcctgaaggaacccactttgttcaagagcaatcacccgagctcgtgaacgagctaattctggacttcctccggagccatatgtgatagtgtgccgtgtctaagatttgaatggtgtttgtatggatatgaaacacagttactgtaatgtaattaggggacaacaggctatgtgtatggttttattgactggaataaatcagagacccactggtagtggagaccctgaatgcaagaataccattaattttagatgaatttgattctccgcgttgggttgttatttttat

SEQ ID NO: 30458 - DNA, 159 bp, Gossypium hirsutum
  Clone ID: LIB3148-038-Q1-K1-E8
ctttcatattttctagaaaatgtaacatttttccttgtcgttaagagtcaatacttttatcgtacccggtgtcagtagaatccttgttttattcggcgcagctcccttcatatacaagctcgcaatatacatatactcagtaacgaggatttcagtttc

SEQ ID NO: 30459 - DNA, 283 bp, Gossypium hirsutum
  Clone ID: LIB3148-038-Q1-K1-F1
agccttccgccaacccgtccggtggtgcgcagagagtacaatgcgctcagcaatgataaaaaagccgaatgtccgagacacagacggtggtttttggcgatggaatgtactgtggttaaaaaaaaaaaaaaagaacatttgagagtaagattctcaaacattgttgtgttttggtagtcctttattttttgtttttaatagtgcaagtattttagtaattgcaatggtgttatatgttctgaaacctgatactaagtatgcaacgatttagatttggaacttg

SEQ ID NO: 30460 - DNA, 166 bp, Gossypium hirsutum
  Clone ID: LIB3148-038-Q1-K1-F10
caccttttgaagactgttttcccttttcatcaacaccataaaacttataagtgctaggaagatgctacattattcggtaccttactttgttcgaagtgaggcatattttgtattattccggtatggatgataaataaagttgacaaaagtagctttttacttgacc

SEQ ID NO: 30461 - DNA, 78 bp, Gossypium hirsutum
  Clone ID: LIB3148-038-Q1-K1-F11
caaatcttttatgagataaatttgtacatgtaaatgagataaaagttatatattttttatgaaattatattaccattt

SEQ ID NO: 30462 - DNA, 288 bp, Gossypium hirsutum
  Clone ID: LIB3148-038-Q1-K1-F12
cgcggaatgaatggcccgaccgacccacgcggccgggcattttagcggatattactttgctttctacattaagaaaagacagtaactctacaagatactcgcggtacgcgagcctctaagcgtcatatatgtgcagccatctggagattgcgaggcagactgatacttggagataactattagctccaaccatgcctacaagcgtagacattctatattatataatgcaggcagagaaagtatcaactaacgtactcccacattggttgtttcttatggtaagggaat

SEQ ID NO: 30463 - DNA, 417 bp, Gossypium hirsutum
  unsure (1)..(417): unsure at all n locations; Clone ID: LIB3148-038-Q1-K1-F2
ggaattattacaaagaatgcctagatgtcgatggggtttctttcatgttgttaacaatgactacacacattggaaaatgtatgctattggtggtagcatgcatcccaccattatcagccaaggtaacaggttcattgctccgcatgaccccaatgccaaagaggtaacttataggctctatgcatcagagtcagaatggaaaaattggatatggagatcagaaggagacgtactccttaatggagccatctttagaacttctgggccactctcgccaccccatttgaaattcaacagaaaggaaatgatcaaatccaagcctggagcatatgtcagaagactcactcgtttcgcagggactcttaattgtaaaaaaagaatcaaatgttagatgtgatgttcaatntaccaatcttt

SEQ ID NO: 30464 - DNA, 239 bp, Gossypium hirsutum
  Clone ID: LIB3148-038-Q1-K1-F4
cggacgcgtgggcggacgcgtgggcggacgcgtgggcggacgcgtgggcggacgcgtgggatgggcttgttgggtggtataattatgtttgggtccctttaacctcttatgtttttcatattttccttttttgaatgatgatagttgtagatattgttaaagtggagactgtatctttgggttctactgccccatttccaatggggtttccaatgttaaattattgatatctatggtgc

SEQ ID NO: 30465 - DNA, 428 bp, Gossypium hirsutum
  Clone ID: LIB3148-038-Q1-K1-F5
attcgatcctaatgaccgtccatccgctgaagaggcattagctgatccatatttccatggattggcaaatgtggacaatgaaccatccatgcaacccatttcaaaattggaattcgagtttgaaagaaggaaattatcagaagatgatgtccgagagctaatttatagagagatattagagtaccatccacagatgcttcagcagcaccttaaaggcaaagatcagattagcttcatgtatccaagtggagttgatcggtataggcaacaatttgcttgtcttgagggacaaggcaaaattgaaagaggcattctgctccaaaggaaacatacatccttgccaagggagcgagtctgcaatgatgatactgatcgcattgatgaatcaaaaaaacgtacagtggcttttgcttgtcgtgcaacccttc

SEQ ID NO: 30466 - DNA, 271 bp, Gossypium hirsutum
  unsure (1)..(271): unsure at all n locations; Clone ID: LIB3148-038-Q1-K1-F6
cgnatattcaatgacattactttgctttctcagttaagaaaagacggtcattcttcagtctactccggagccggccctaagctcattgattgcagacattggagacttgctggcatgcctgatacttggaatcaactattatatgcagccttcttctcaaagctaagctattctttttcttatagtgtggggcgaaaagttacctactctcttacaaccacattggttgtttcttatggtaagggaatcaaaggctagctacaataaaaag

SEQ ID NO: 30467 - DNA, 179 bp, Gossypium hirsutum
  Clone ID: LIB3148-038-Q1-K1-F7
ggaataaccgcggtcgacccatgcgttcgggcatgcgttcgggattttataagagtatattttggttcaataagagagagaaagaggggggttttttaattgggagtatgtgaagtttaataataaaataaattgagttattattggaaaaaaaaataagggggaagggaataattaaa

SEQ ID NO: 30468 - DNA, 279 bp, Gossypium hirsutum
  Clone ID: LIB3148-038-Q1-K1-F8
gcttgccaatagatagagtgaagtactaatatttacttgtttttctgtccagtgtgagcatctctgctatctcaggatatattgtgactattacataattaatgtaaggaagtgagtcagattcctaatgaatgagaagaagctcctatttcgtttaaaaaaaaaaaaaaaaaaaaaaaaaaaaaaaaaaaaaaaaaaaaaaaaaaaaaggaaaaaaaaagatatacaaatactatgataaacaaaacaagatagaaaaaaaataaaaaaaaataatgg

SEQ ID NO: 30469 - DNA, 248 bp, Gossypium hirsutum
  Clone ID: LIB3148-038-Q1-K1-F9
ggaaatgttgctgctgtatatttgcccatccaaggatcaaaactctaatgttttgtcctactatgtgttatattatgtgcctacttaagctacctttcccggttatcaagagtgcctatatagaactctctctctctcaaaaaaaaaaaaaaagagaaaagagttctttatatggagttttatattatatgctgagagaataaattatcttgtaaaagcttgctttgttaatgaaataaatttctatt

SEQ ID NO: 30470 - DNA, 406 bp, Gossypium hirsutum
  unsure (1)..(406): unsure at all n locations; Clone ID: LIB3148-038-Q1-K1-G1
gtttgatcttatttctatataatatgtaattattaatctatatctttaactttataagtagaggtttttgctaataaatcaagtggagagatttcttaagcctaccattacttctgaactatagagtttgcatcgctttccgatgggaaagaagcggtggcaaaaagcagctaatgtactttttatgaagtacttgaaatcaggttccaccagctcatatcagggagagcaaatcttcaccgaatctcaaatgggggaggcgctcaaaactgttggcggcaacgggccagaacctgatcttttattagtatatggacctgccaagtgccacttangtttccctgcctggagaattcgatacaccgagattcaacatatgggacccttgagtctatgaaatatgggt

SEQ ID NO: 30471 - DNA, 254 bp, Gossypium hirsutum
  unsure (1)..(254): unsure at all n locations; Clone ID: LIB3148-038-Q1-K1-G10
cccacgcgtccgcccacgcgtccgttccaatccaggtcttagcgatggtatccctattgatgacccatagaatgattgtcaacgaaatgtcgataaatcattaaacaaattgcaatttaaaagaatagtgaggttttggaaaataaataattagttctataaatagaatgttatgtttttcattaagtttatgaactgattttcaaaanaaaaaaaaaaaaaaaaaaaaaaaaaaaaaaaaaacaaacaaattt

SEQ ID NO: 30472 - DNA, 285 bp, Gossypium hirsutum
  Clone ID: LIB3148-038-Q1-K1-G11
cccacgcgtccgggcttacgggggcgatgatgctggtcttaaaggacagaaagaatcattcactaaagatttcgatccacagccaaatatctccgcttacaataactaattaaaagcgaaacccaagtaccattggcttagacccacatcttccattaatttcgtcatcagattgtgtgtgaagctttatgttttatatttgtgaaaaaaataagtgggttgttatgaatatctatgattctgtgaccactatcattacagtagaatggcaaaggaactgtgacc

SEQ ID NO: 30473 - DNA, 166 bp, Gossypium hirsutum
  Clone ID: LIB3148-038-Q1-K1-G2
aagcaaatcgatggagggagggccattcaacttattctagaccaaaattcaggctgtggatttgctttcaaaagacagtatttgtttggacgtgtcagcatgaaaatcaagcttattcccggtgactcggccggaaccgtgaccgccttttacatgaattctgata

SEQ ID NO: 30474 - DNA, 385 bp, Gossypium hirsutum
  unsure (1)..(385): unsure at all n locations; Clone ID: LIB3148-038-Q1-K1-G3
cttggatggttatttatcatgatgggtgtgatcttgcttgtgagctcgacgagactgatgcggcacctttcatggccattgcagaacttaataccaagtggagcagaccggaatttcagtctgaggaaaacggggtctcatcgagtcaaggatcctagcccagctgctgttatcccagcaacaacattgcaccatctgataccaacaccggctaaagagaaggcataagccaagaatgcaaaagatgactgcataagcagacaaatatgacaatctgcgatcaacttttgagtcttcagtctgggtactgtttccatttcggagggcatgaaattntttaagatcactctcccattgatctgtttgacatcattgacattataac

SEQ ID NO: 30475 - DNA, 200 bp, Gossypium hirsutum
  Clone ID: LIB3148-038-Q1-K1-G4
cccacgcgtccgtaaatacttcattttttttcttctgtttttttttttgcgtttttttctgggtttttttgtagcactgaaataagaaaaaaaaagtagcagtcaagagttgcggaaaatatagggaaactaggggtggaagtatacgataaatttcgaaaattttgatttagattgataatttaattgtttattcgttt

SEQ ID NO: 30476 - DNA, 262 bp, Gossypium hirsutum
  Clone ID: LIB3148-038-Q1-K1-G5
tgatttggaagctggatagatgctccctgaattttttagaagcagtgacggctcaagggggaaaaggcagaaaccgcggagtttcctgccttaatgtaataggttgggccaattgggccacttttatttctgggctaggcagggtgtaatgggtaccgggtaatttagctgggttttgggtttgggtttaagctagttgggttttaacttttgcgctgtaaaaggattgtttaataaataaacatttatttttttttgtttt

SEQ ID NO: 30477 - DNA, 51 bp, Gossypium hirsutum
  Clone ID: LIB3148-038-Q1-K1-G6
accaagcgtacgctataactaaagcttgagctttgggttgagttttgagtt

SEQ ID NO: 30478 - DNA, 365 bp, Gossypium hirsutum
  Clone ID: LIB3148-038-Q1-K1-G7
cccacgcgtccgctcttgttcagagcgggagacagccgatctggcgattccagtccacacacaatattctggtacgcaaagtgtagcggctgaagaaagacaaagaggagcccatttgacccagttttatacttcctcccgagagtttctgagaagagtatgggatactccctcacgtcatgttagtcataggatctatggctgtatgtctcctattagtttggtttgcttgagatatattggtatatgcaactattagttattgttttcttttctttttaaaagtttccccccaaacaagatattttagaggatcctaattttgtatccaaagattggcggagcatgaaatatgatatattgag

SEQ ID NO: 30479 - DNA, 273 bp, Gossypium hirsutum
  Clone ID: LIB3148-038-Q1-K1-G8
cccacgcgtccgcccacgcgtccgtaccaatccaggtcttagcgatggtatccctattgatgacccatagaatgattgtcaacgaaatgtcgataaatcattaaacaaattgcaatttaaaagaatagtgaggttttggaaaataaataattagttctataaatagaatgttatgtttttcattaagtttatgaactgattttcaaaaaaaaaaaaaaaaaaaaaaaaaaaaaaaaaaaaaaaaaaaaaaaaaataaaaaaaaaaaataaatt

SEQ ID NO: 30480 - DNA, 405 bp, Gossypium hirsutum
  unsure (1)..(405): unsure at all n locations; Clone ID: LIB3148-038-Q1-K1-G9
gcgctttcacttctgactacatctttaggcaattacctgagttcttttattctaactcttgtaacttacttcacaacaaagggtggccagattggttggatatcggacaaccttaacgagggtcatctcgactatttcttctggctcttggctggtctcagcttcttaaacatgttggtgtataccctttgtgcttcgaggtacaagcagaagaaggcttcctaaagttccttctcatatggagagaaattaagctgaaatgttgttatagataaaaactgtatgcatctcaatacagggacatccttccactttggaaaccaactatcttgtatcttattgggttatattcattttctagctgattctcgcatattgtacattaatactgcatggntttcaatt

SEQ ID NO: 30481 - DNA, 415 bp, Gossypium hirsutum
  unsure (1)..(415): unsure at all n locations; Clone ID: LIB3148-038-Q1-K1-H1
cttccggttggcctttttgatttggaagaaatactgaagaaatcaaaggacttcatcttggagaagttcgatggtgcaacattatttcaggaaaatgatgtgctactagatcaaccacttatgactctggagtttgcatcgctttccgatgggaaagaagcggtggcaaaagcagctaatgtactttttatgaagtacttgaaatcaggttccaccagctcatatcagggagagcaaatcttcaccgaatctcaaatgggggaggcgctcaaaactgttggcggcaacgggccagaacctgatcttttattagtatatggacctgccaggtgccacttangtttccctgcctggagaattcgatacaccgagattcaacatatgggacccttgaagtctatgaaaatatggtcac

SEQ ID NO: 30482 - DNA, 366 bp, Gossypium hirsutum
  Clone ID: LIB3148-038-Q1-K1-H10
aaaaaaaaaaaaaaaaaaacaaaaacaatgtaacagaatatgaaaaccaaaaaaaataagatatatgagggtgggcacatttaacacattcctaaactaccttgaatccactaaagatcctggatacttttcggggccaagccaacagcactgaccaaggcattacgattttcgcgccaaaagacagtgcctttgaagctcttaagaagccttcattgtctaatcttactcacgaccaacttagatgactcatccttttccatgccatgcccaaattgtactctctcgccgacttccacaagtttagtaccaaaggccctgttagtaccctcgcatgtcgccaatacagtttgaacttcacagaca

SEQ ID NO: 30483 - DNA, 412 bp, Gossypium hirsutum
  Clone ID: LIB3148-038-Q1-K1-H11
cccacgcgtccgctttccacagctcctttcttcaccctttccacagctcctctcttcaccctatcgattgcagcatcatcatctctgcctcatcttctctgctagttcacctcttctctttgcttgcctcgttagcgtgctggttcacctctgctggtttatcgaagcatcttgtgaaaacatgataagtggaaagggtatgaggcctggagatattgtcacagcttcaaatggaaagacaattgaggttaataacactgatgcagaaggtaggcttacactagcagatgctttggtttatgcttgcaaccaagatagttgacctggcaacactaaccggggcttgtgttgttgctcttggcccctcaattgcaggtggttcgaaaggcgttttcacacccaatgatgatct

SEQ ID NO: 30484 - DNA, 332 bp, Gossypium hirsutum
  Clone ID: LIB3148-038-Q1-K1-H12
ttctactcatttgattaaatgttattttttttcatgtcggtgccatcgcactcgcggatgatggccattgtatcacataatgaattatgatattactcctgtttttcatgcttgcctcgttagcgtgctggttcacctctgctggtttatcgaaacatcttgtgaaaacatgataagtggaaagggtatgaggcctggagatattgtcacagcttcaaatggaaagacaattgaggttaatggcactgatgcagaaggtacgcttacactagcagatgcttcggattatgcttgcaacccagatagccgacctggcaacactaaccggggct

SEQ ID NO: 30485 - DNA, 408 bp, Gossypium hirsutum
  Clone ID: LIB3148-038-Q1-K1-H2
cccacgcgtccgtatacattcattctccgtccagatgctacctacagcatccttattgataatgttgagaaacaaactggtagcctatacactgattgggatctcctcccaccaaagaagatcaaggatcctgaggccaagaagcctgaagattgggatgacaaggaatacatccctgatcctgaagacaaaaagccagagggttatgatgacattccaaaagagattcctgatcccgatgctaagaagcctgaagattgggatgatgaagaagatggtgaatggacaccctcaacaattcccaacccggagtacaagggccaatggaagccaaagaaaatcaagaaccccaactacaagggcaagtggaaggcaccaatgattgacaacccagatttcaaggatgat

SEQ ID NO: 30486 - DNA, 262 bp, Gossypium hirsutum
  Clone ID: LIB3148-038-Q1-K1-H3
cccacgcgtccggtaccttgcaggtactgtttacacaatttcagcttagttggaatttctatggattatggctggcaccaagagcctaaataagcaaactcagtttgcactgttgttatcgactttgttgaaactgctatatgcttttggcttcatgatgtactacttgtttggatcatgaaaaatacaatttaatgttcgctattattatcattaaaaaaaaaattcctgatcccgatgctaaaaaacctgaagattggga

SEQ ID NO: 30487 - DNA, 153 bp, Gossypium hirsutum
  Clone ID: LIB3148-038-Q1-K1-H4
cccacgcgtccggttttaatgcattaaagctgtgacagtagttgttgaggtttcttggtattattattatttatctgcttttgagtaaaaactttctttgagttgtatgtttgaatcttctatatataaaagttttctagaccaatttttgcc

SEQ ID NO: 30488 - DNA, 357 bp, Gossypium hirsutum
  Clone ID: LIB3148-038-Q1-K1-H5
accgggaaggaattgccgggaccgacgcagtcgtgccacccaaagaggaaaaaaagaagcagttgatgcagaagaaacagaagaagagagattcaacaaccccaaagccgaaacatgagaaattagaaaagctagaagcccttagtaagcggctacgcctttgcatcctaaaacgggtaagtcaccggaggcagggttccacgtgagtgaccccaggaaacattaagctgttctttttcttgtttctagtattttcagtatgaagtgttccaagtcattttaaactcaaagcataattatgcggatttccgagctttactttgataatgtaaatgcagcatccacgtatttaaattg

SEQ ID NO: 30489 - DNA, 415 bp, Gossypium hirsutum
  unsure (1)..(415): unsure at all n locations; Clone ID: LIB3148-038-Q1-K1-H6
gtcgatctgtcgtacaggttttggtaccggagcactctagtgacacgaggaaaataggaaacctccgcacgacaattagaagggtaacctggcatttcagcccttcgtcattgacacgtaggggtcagattggggagttggagtttattagagccccaatttttttcggcacaatgagcgttgaaatnggagaacattnnttgatggcgatattagaagcgaaaagcgtgagagcccatttttaatgcgcgatgtgccattattgcttgaaaaaacacattttgtttttgagagagaattttgtcatgtaattttgatttcatttggattgaaaaggattggttatttgtagattagagaaatatgtttattttgaagccagccctttttagacaaatcaaagtgaaagttgcag

SEQ ID NO: 30490 - DNA, 423 bp, Gossypium hirsutum
  unsure (1)..(423): unsure at all n locations; Clone ID: LIB3148-038-Q1-K1-H7
aaagaaaaaaggacagaaaatggggtgtttcttctcttgcttcgacggaggaaacaaagaacagcgaaaggagcaagacagattggcctctgccgaagctcgtgccaaagccgccgaggctgctcagaaaaggcaagagcagtttgaacagtcagccgcgggaagagctgctcgtgcccaggtgcaagcggctgcgaagcagtcagcaaattctaataaaggcgaacctgttttgaagtggcagctgggttgaagatttgcctagtctctcttcagccaaaactgctaatgtagatatnggaaataaatttgatgtacatagtttccaagttgtgaattcctcgccatttaacaagtgatacggtacaagtgcaccagcagtcaattttttttttccattttgagttgtaatgtgtatgataa

SEQ ID NO: 30491 - DNA, 408 bp, Gossypium hirsutum
  Clone ID: LIB3148-038-Q1-K1-H8
aggacatcttgtggaccgttgctactaccggtttgattcgtcctacaaaagcactaactacaggcctcatccacaagctaatgtctgtatggctgctcctcctatggttccatactctaactggacatatcaggtgactcatccttctagctggccaaattcttttgttggtaacccagtgcaacaggttccatccatggctgtgtctgctcctcaaccccatgctatggtaactactcctgatacggttggggatgctgcatggtatcccgattctggggtaacgcatcatctcactcactcagttgaatctcttggtgataacacgtctcgtcatggaccagttcaccagaaacaatcaagtgatgtttaaaatctttccttcacaatgtcaagttcgagacttaa

SEQ ID NO: 30492 - DNA, 397 bp, Gossypium hirsutum
  Clone ID: LIB3148-038-Q1-K1-H9
cccgacaccgtcaccggcaccagcccctgcaccggaatatgtaaacctaacttatttgctctctgtggctggtccatttcacacattcctcaactaccttgaatccactaaagtcctggatactttccaaaaccaagccaacaacactgaccaaggcattacgattttcgtgccaaaagacagtgcctttaaagctcttaagaagccttcattatctaatctcactaacgaccaacttaaatcactcatccttttccatgccatgcccaaattctactctctcgccgacttcaacaagcttagtaccaaaggccctgttagtaccctcgcaggtagccaatacagtttgaacttcacagacaattccggcactgttcaccttgattcaggatggagc

SEQ ID NO: 30493 - DNA, 283 bp, Gossypium hirsutum
  Clone ID: LIB3148-039-Q1-K1-A1
cttttaccttttgaaagtggaaatcatggagtactgtctgttagtaagttacccattcatgtggatagcttctttgcaccctgatatcagagatcgagtgttctttttagagggtaatcatatgcattctagcattcagaaggttcctgctttggtgcttgactgtgaacccaacatagatttcagcagagatattgaagcaaagagacagtatgctctccaagttgcaaaatctttggatttggtgaaaaaaaaaaaagaaatttcacctactaaagctggg

SEQ ID NO: 30494 - DNA, 301 bp, Gossypium hirsutum
  unsure (1)..(301): unsure at all n locations; Clone ID: LIB3148-039-Q1-K1-A10
gatccttagaatttggtagagatagtgaaatgacctgtttgcaaagaaaacggtgatgttgagtaagaaaaaagggctgcctctgccatggtagtgaacaaatatcggtgatgaaacaaggtaaattgaaaaatttcccatatgaattcaaatctcagtgttatctcaaggaattcgccttattgtcaatgaaattaaattccatttgtagaattatattaccgcanaaaaaaaaaaaataaaaaaaaaaaaaaaaataaaaaaaaaaaaaaaaaaaaaaaaaaataaaaaaaaaaaatat

SEQ ID NO: 30495 - DNA, 305 bp, Gossypium hirsutum
  unsure (1)..(305): unsure at all n locations; Clone ID: LIB3148-039-Q1-K1-A11
gttgagttgcctgataagactagtttgaactacaattctaatggaattgttttgtccctagacccttgtatccagactcaaactgcaaactctttcaatattttgataatcctaaacgttgaattataaaaaaaaaaaaaaaaaaaaaaaaaaaaaaaaaaaaaaaaaaaaaaaaaaaaaaaaaaaaaaaaaaaaaaaaaaaaaaaaggggggaaaaaaaaaaagaaaaaaaaaaaaagaaggaaggaaaaaaaaaaaaaaaaggggaaaaaaaaaaaaaaaaaatnanggggggcgcccctttt

SEQ ID NO: 30496 - DNA, 404 bp, Gossypium hirsutum
  Clone ID: LIB3148-039-Q1-K1-A12
cttttaaatacagtgtaccactattgatgagctgaatgctggacaaatatgtgttaaatgtagctcgtatggtcggtcacatgacaaaaaaaaaaagaaaaaaaaaaaaaaaaaaaaaaaaaaaaaaaaaaaaaaaaaaaaaaaaaaaaaaaaaaaaaaaaaaaaaaaaaaaaaaaaaaaaaaaaaaaaaaaaaaaaaaaaaaaaaaaaaaaaaaaaaaaaaaaaaaaaaaaaaaaatgggggggtcccttttaaaaaaaaaaattttaccccccgtttttgcaaaaaatttttttttttttttgggcccaaaaaaaaaaaaactgggcgcgggtttaaaaaaaggggataagaaaaaaaccttggtttacaaaaaataaattttttaaaaaaaaacccctttt

SEQ ID NO: 30497 - DNA, 149 bp, Gossypium hirsutum
  unsure (1)..(149): unsure at all n locations; Clone ID: LIB3148-039-Q1-K1-A2
taaaaccacccccacatttaatgggttgggtttattattaaagtcgcactagccacacctacatttaattntaaatatcttcccacacaaattttggcctatacacttataactttcagtactaggaacccacgcatcaataaccatag

SEQ ID NO: 30498 - DNA, 296 bp, Gossypium hirsutum
  unsure (1)..(296): unsure at all n locations; Clone ID: LIB3148-039-Q1-K1-A3
gtatttttcatttttcattttcacgcctaataaaacagatgatttaagaaccaaacaaaacaagaggaaccatcaaagatccaaacttttcctttcctaacgactcattctgaaaggaatctattcttatgatggcggaggaggatgataccagaagtggtcacaccacaaagtcccatcccgattttattttatttttcttctcctttctaagatctgttaataagattaatttctctttatcgatctgtaaatttcaattatttcttttctaggattngaaaanaaaannnnaa

SEQ ID NO: 30499 - DNA, 179 bp, Gossypium hirsutum
  Clone ID: LIB3148-039-Q1-K1-A4
gtttgtagttgggcctaggtttagttttaattttcagtgatttgggtttttggttgttaattcgtcgttaggctggaattaggtacttgggctcgggctaaaaattgggtctacaatcaacattaatattgttttttatttttcctcaatagtttttgcacacaaaccaaaatgtatgc

SEQ ID NO: 30500 - DNA, 444 bp, Gossypium hirsutum
  unsure (1)..(444): unsure at all n locations; Clone ID: LIB3148-039-Q1-K1-A5
taaaagagctgaaaaggaagctgaaaagaagctcaaggagcgtgaaaagaaagcaaagaagaagggagcagcagcatctgcaagcagcgcaaatgttgaggaaccaaccgaaactgttgcagaggttccagaaccagagaaagatgttaatgctgaggaacctgttcctgcccccgttccggtgaagaataaagttcagaaggagaatacagtaaggtacaagaatcgaagtagagcacgggagtcacttcctagacctgtcctgaaacgtaagaagtcgaccaactactggatatgggcggctcctgctgcggttgtggtgctgatacttatagctttggcttactattatcttgtttgaagaagttaaactgagagttatagacaaagtttatgggttgatagtgggaaaaagtagttaaatttggttggatgcatnccatg

SEQ ID NO: 30501 - DNA, 185 bp, Gossypium hirsutum
  Clone ID: LIB3148-039-Q1-K1-A6
gctgagtggtttggttttaatagttagggttgagttgtaaaaggacttggacatttaattgatttggtttatgattttatttttattattattttttgttttgattttaggtatgggcccaggcaaatttgggcctatacacttataactttcagtactaggaagccacgcatcaatagcaattg

SEQ ID NO: 30502 - DNA, 285 bp, Gossypium hirsutum
  Clone ID: LIB3148-039-Q1-K1-A7
cccacgcgtccggttctctgctgctgctgcatatttgaaagctgctgtgggccaatgttcggcgggccgcctgggccacctgggccaagacctttttaattatagtgctcatctctttttcccttttactctgtttttgatttgtgttttaggctgttgtgaactgtgatgtgaaacaaaaatctagttctgcccctttctgttctttcttgccagcatggaacatggttccagtccacgcttttatttgttctaaaataaaaaaaattagttaaaatatgcttt

SEQ ID NO: 30503 - DNA, 307 bp, Gossypium hirsutum
  Clone ID: LIB3148-039-Q1-K1-A8
ggaaaaggttctctattgattcaaatgctgtacctatgggatagggatagagaaagaggaaaaaccgaagatttcacatagtgcttttgatcgaaaaatcaatctgatttatttcgtacccctcgctcaatgagaaaatgggtcagattctataggatcaaacctatgggacttagggaatgatggaagggaataaaataaaaaaaaaaaaagaaatcaaaaaaaaaaaaaaaaaaaaaaaaaaaaaaaaaaaaaaaaaataaaaaaaaaaaaaaaaaaaaaaaaaaaaaaaaaaaaagggggcggc

SEQ ID NO: 30504 - DNA, 399 bp, Gossypium hirsutum
  Clone ID: LIB3148-039-Q1-K1-A9
gaaaatgtcttgctgcggaggaaactgtggctgcagctctggttgcaagtgtggcaatggctgtggaggatgcaagatgttccctgacataatagagaagactacaactgagactattgttcttggtgtgacaactcagaaaatgcactttgagggatctgagatgggagttggggttgagaatggatgcaagtgtggagacaactgcacttgcaacccttgcaattgtaaataagagggggggaaaatgaacaacaaagagaagcagagaggcctttgtctttttaactaaataaattctattactttagtatgtatcagcaaatcttcatgaggatttggttcttaattatgtgtaatgtgggcttttctgctatgtcagaatgtattatgatattt

SEQ ID NO: 30505 - DNA, 99 bp, Gossypium hirsutum
  Clone ID: LIB3148-039-Q1-K1-B1
aaaaaaaaaaaaaaaaaaaaataaaaaaaaaaattataaataaaaaaaaaaaaaaaaaaaaaaaaaagggaaagataaaaaagaaaaaagagggaaagg

SEQ ID NO: 30506 - DNA, 280 bp, Gossypium hirsutum
  unsure (1)..(280): unsure at all n locations; Clone ID: LIB3148-039-Q1-K1-B10
tcacttagaaaccggattttctccgatcacatttgaatctcctatctctttccttgtattttgtgtttaatttgtggccgacgatcttgtttactattttgttttttttcattcccatcctctatcatgatcatcatgaatggcagatgtttacaattgcatgccctgaaaaaatggtatatgagtgactcactgtaattctttntnttatattaatgaaaaccagcgtcagggctgtaaaacaaaaaaaacaatattaaaatcaaataaaaaaatatta

SEQ ID NO: 30507 - DNA, 417 bp, Gossypium hirsutum
  Clone ID: LIB3148-039-Q1-K1-B11
gcttcaaggtgaattcgctccttgggaaccaactagtgctctctacgagtttgtgagctcagcactgaaagaaccgtgcttggagttcgagctgttagatccggtaattgttaaactacgagtgatcccatcatttcctgcagcaggggagaaaggcaggacgctggaggaagaagatttggttccctcagcacttattaggttcaagcctgttgaaactgattctgtcgtcttcactggcctttctaatgaactcctggaaatcagtgagccccttgtaactaattgactaaaacccttcatctctatttgttggggaaatatacccaaccaattattatatgcttcgatttttaaagctgtgtggattcttagtgtgacatagcctgaattttctcccctttctaaatcatcaaa

SEQ ID NO: 30508 - DNA, 424 bp, Gossypium hirsutum
  Clone ID: LIB3148-039-Q1-K1-B2
gcatgtggccaaggcatcgattgcagtcccatccaaccgggaggtgcttgtttcgaaccgaatacgatagcatctcacgctgcttatgccatgaacctttactaccagaattccgccaagaatccgtggaactgtgatttctcgcagacggcaacactaacatcccaaaatcctacttatagtaattgcatctaccctggcgggagcacttagaaaagtaagataaaatatgtgggtcttattttagaaatacaaagtagctttgactgtaaagttattctcctttgatatgggtttgctgtggtctgtgttcttttttgggtaaaatatttgatgtaataaagtaggggtggaatgttgatgaacttttgtgttaaaaaaatgggcatgctattatctcttaacatatatcaaatcagatgac

SEQ ID NO: 30509 - DNA, 221 bp, Gossypium hirsutum
  Clone ID: LIB3148-039-Q1-K1-B3
ttttttttttttttttttatgaaattggttaacttgtggagaatgaagggagagtatttttgtactgtgtaaaattgtttattttacatttttttttcaatttcgtttacgattgttttttttattttatacaaattggttatttaacaaagtggcggatatatatataattgcacttattgtaaaatgtaaagttttaaatggaatcaatatttttgttt

SEQ ID NO: 30510 - DNA, 365 bp, Gossypium hirsutum
  Clone ID: LIB3148-039-Q1-K1-B4
cccacgcgtccgaaacaatgaagctgcaggacgtgctgagtccttgccaattttgctatgccatggagaaggtgatgatgtggttccatataaatttggtgagaaatcgtctcgggcattgacttcaaagggatttaaggacatgactttcaaatcctacaatgggcttggtcactatacaatcccagaggagatggaagaggtatgtgcttggttaacttcaaaactggggctcaacggtcgatccacataacgaatgtaatgcggaaatgtttatgcattacttgaagcaaagttgttctggttgtgggtgtcatacatggtattgtgataattttgcataccttgttgtagttgatgttttc

SEQ ID NO: 30511 - DNA, 345 bp, Gossypium hirsutum
  unsure (1)..(345): unsure at all n locations; Clone ID: LIB3148-039-Q1-K1-B5
gcaacattgggtccttgacattgaagctgacgaaagatgatttgaaagaaatgtgtgatgcagtgccaattgaagaagtgaatggtgaaagagaatatgatgtttttgctcagtattcctataagtttgcaaatacccccaaaaagtgattgtaaatgtaaagctaaattgctagaatcgaaaagcttatgccgatccatgaagactaatcttttcgagattcatgattgttccatccaataatattatttccatgatttgaaattgagtttgcaatatactttacagttgtacaaaaaacttgttatacttttccagattataaatgctttatattactccnna

SEQ ID NO: 30512 - DNA, 234 bp, Gossypium hirsutum
  Clone ID: LIB3148-039-Q1-K1-B6
cccacgcgtccggtgacatctccctcgataggatgcggctataagtgctttttcgaaaacaccaggtgccaatttggctgcaccccctttgatattcgaggccaatcagcccgtgttaagacctagagggatatatatatatgtgagcgcgcgcgttgtttgtttattattaagtgtttcttattattattacaaaacaaaaaacatgatgatacacaatgaataatgtcttcg

SEQ ID NO: 30513 - DNA, 276 bp, Gossypium hirsutum
  Clone ID: LIB3148-039-Q1-K1-B7
aaaaaaaaaaaaaaaaaaaaataaaaaatttaatttaaaaaaaaaaaaaaaaaaaaaaaaagaggagggaaaaattgaaagggggtttggggaataaaaaattttaaaaaatggaattttaattataatacaatttggttatgttaaaaaaatttgaggatttgtataataattgttcttattgttatatgttaatttctaaacggaatccatttttttggttgttgaaaaaaataagctatttgaaaagatttatttttattaaatagaattaaa

SEQ ID NO: 30514 - DNA, 450 bp, Gossypium hirsutum
  unsure (1)..(450): unsure at all n locations; Clone ID: LIB3148-039-Q1-K1-B8
cccacgcgtccggtttcatgtctgatcttgacattcaaattcctgcctttgatccgtttgctgatgcaaatgctgaggactctggtgctggtaccaaggagtacgtgtacattcgtatccaacaacggaatggtaggaaaagcttgactactgtccaagggttgaagaaagaatttagctataacaaaattctcaaggacctcaaggagttctgttgcaatggcactgttgtccaggaccctgagttagggcaggttattcaacttcaaggtgatcaaaggaagaacgtctncactttttcttgttcaggctggtattgtgaaggacaacatcaaaatccatggtttttaagttgcaggttcctagttttctgggaatctagcctctacgtttaatagctgaaaatcttacccactgatgaactngttttgctataagtatccccatgtt

SEQ ID NO: 30515 - DNA, 405 bp, Gossypium hirsutum
  unsure (1)..(405): unsure at all n locations; Clone ID: LIB3148-039-Q1-K1-B9
gttcccgattccgatctacgaaccgtttgaattcggaatcggcgttgactcagataccaataacaatatccatagtaataataccggtgattttgtggcgttaggagggttgtttgaaccggcggctgatatttcggagctgacgtggcggcctgaatcactttccgccttgtagtaaaaattaaataaataaaaaacaaccgaaacggttcgttttggctccgtatacatcacgtggacatattcgtttttttttttgggggtaattacataaatatacatgtggtctagatttagttttaagcctgaaatataagttcttaatggtaataatacgacatttatttaaccatcttccgtctatttgtaatttaaacttaacactngtgataaatttaaatttta

SEQ ID NO: 30516 - DNA, 329 bp, Gossypium hirsutum
  Clone ID: LIB3148-039-Q1-K1-C1
agacaaaattgtttcaagcaccgacagaaccagaagcgccccttgtttcaaagagaggaggacgggttattcacatttcatttgatggtcagaggcgaattgaaagctaagcagtggtaattctaaagattccccgggggaaaaatagagatgtctcctacgttacccataatatgtggaagtatcgacgtaatttcatagagtcattcggtctgaatgctacatgaagaacataagccagatgacggaacgggaagacctaggatgtagaagatcataacatgagtggttcgacagatttggattcctatatatccactcatgtggta

SEQ ID NO: 30517 - DNA, 386 bp, Gossypium hirsutum
  Clone ID: LIB3148-039-Q1-K1-C10
gggttttattaatttatcctattttactactctgttttatgaaaaatctcattagtcaggtgtcaaaaaaaaaaaggaaaaaagaaaaagaaaaaaaaaaaaaaaaaaaaaaaaaaaaaaaaaaaaaaaaaaaaaaaaaaaaaaaaaaaaaaaaaaaaaaaaaaaaaaaaaaaaaaaaaaaaaaaaaaaaaaaaaaagggggcgccccttttaaagaaccaaattttactaccccgtccatccaaaataaaaatttttttatggggccaccaaaataaaatcacctgcccgctttttaaaaccggtgtaattggaaaaaccttgggttacccaaattaaatccctttgaaaaaaatccccttttcacaagttggcataatacaaaa

SEQ ID NO: 30518 - DNA, 403 bp, Gossypium hirsutum
  Clone ID: LIB3148-039-Q1-K1-C11
cggacgcgtgggttttctttgatgatagtgctcgaaacatagctagcggcaaagcagcagggcttcacacagttgtagtaagctacataatttggttttcaatctagaaagctgcctataaacgattcaatgggtaacatgggagaatatgatggcaggtggggaactcaacgctggtgccaggtgcagatcatgccttgcgtagcatccacaacatcaaagaagcaatacctgagatatgggatggcgatgaggagcagatggaacaagttatacaagcagctgctgttgaaaccgtggtccttgcttagatttcagttcaaattgaaaattagagaggctgcccttgttatattattatggacatgggaagcattcatcttaagcttattaaataaatgac

SEQ ID NO: 30519 - DNA, 244 bp, Gossypium hirsutum
  unsure (1)..(244): unsure at all n locations; Clone ID: LIB3148-039-Q1-K1-C12
tccggcagacatattaccaatggaattctgcgatataccaccactactactagtttttaatataggtaaatagtttcgtccgttgctaanaaataataataagagtaatgttgaaataagagattaaatataatgtgtgtatgttcctttatatttgttgtgatcgttgttgtttgtttgaacgatgtgttttgaatgctgtaatgggaagatgttgtttaactaaaatgtacaatatttattc

SEQ ID NO: 30520 - DNA, 166 bp, Gossypium hirsutum
  Clone ID: LIB3148-039-Q1-K1-C2
atagaatccagtttccaaagatgaatgtggctggaaaacctctcccactcttctgttctatgctcatttgtttgtcttaatattttataatcaatcatcttcttgttttctattccgacaaacattcggtttcagatttaaataaatttcatagagttctgtctct

SEQ ID NO: 30521 - DNA, 259 bp, Gossypium hirsutum
  Clone ID: LIB3148-039-Q1-K1-C3
agcaagggaacggcaatgggaggtgacgtaaacacgaacgagagaacgacatcaaccatctatttggatatgtaccaattgatgacgcttttgacgattacgacaacattaacactgaccctacctagtgggggaaggaagaagatactcaaaaagaattggtacccgttggagcattcaaatggcggaaggggcgagttgtgagcgagtcaactaggtttcttgagaaagcgcccaagatcgtgaatgtgaaagtgag

SEQ ID NO: 30522 - DNA, 160 bp, Gossypium hirsutum
  Clone ID: LIB3148-039-Q1-K1-C4
cccacgcgtccgcccacgcgttcggcaaagagtttcgaattgttattatttctagctttttattatggttgtatttgtattttgtaccatggctgctaagcatcgacttagtccgagtggatgatgatgccatgtggtctgactaatattatttattttt

SEQ ID NO: 30523 - DNA, 308 bp, Gossypium hirsutum
  Clone ID: LIB3148-039-Q1-K1-C5
cccacgcgtccggaaaacttggttcaatcagcctgcaaggaaggctagaagaagaattgcaaggcagaagaaggccgtgaggatcttcccaaggccaactgctggacctctacgccctattgtccatggacagactttgaagtataacatgaagttgagagctggcaagggtttcacccttgaagagcttaaagctgcgggtatttcaaagaaacttgcacccaccatcggtatatcagttgatcaccgtcgtaagaaccgatctcttgaaggtcttcaagccaatgttcagaggcttaagacttaca

SEQ ID NO: 30524 - DNA, 386 bp, Gossypium hirsutum
  Clone ID: LIB3148-039-Q1-K1-C6
gaaaggatgaaggccacaaaagaaacaagggaaatatttgggaggtttttttataggttccctgaaggtgaatctgctgcagatgtttttgatcgagtttccagtatgttcttcttcatcaccagttttgctttctttttaatggaaacttggcattttttgcttaggagggtgctttgggaatcaagtttccattgagaaaattggttattttgaaatgggtctgtactgtttgttgcttttgtttaaaagaaatacttctcggaataatataatggcttgttttgaaaccttgaaagcaaagaacttccgagaaaaactgggttcttgttttgattatggtgaaacgaatgaaacattgaactgcatatacaagactctggtct

SEQ ID NO: 30525 - DNA, 287 bp, Gossypium hirsutum
  Clone ID: LIB3148-039-Q1-K1-C7
agattgcagattcattagcctgctcagaggccaactcgaggtgtgatcagattttctctggttccgttaatttatttaatttaagacgaaagtactattatgggtataattaggcacttaatttttcttctaccatcttcttgtgtgcaatatgttacttttcgttatggtgtcagaaacagttttgtattctctttccactgaaaccataatttgtctctggatcaagtgtgttttcgcgtctgatatgttatatttatttgaaatcatataaattttgattttga

SEQ ID NO: 30526 - DNA, 345 bp, Gossypium hirsutum
  Clone ID: LIB3148-039-Q1-K1-C8
cccacgcgtccggatggttccttttctgttcactttagtaaaccagtatgccgacgtatgcagcttgcaacaagtagagtgagtcccctctattgaaatacaatttaaacccatgtcgaggtagcagtagagaaggtaataaaagcagtgggtgagagtcttaaggttgatgaattgtcgataagggttggaggctttggcggctactcaaaataaacttggaaactatttcatgttccaacttccacctttcaactacgttctaacttccatctttcaactaggtgtcatctgtactattaagaaaaaattaaatgacttaattaaaatcattagttattatgg

SEQ ID NO: 30527 - DNA, 412 bp, Gossypium hirsutum
  Clone ID: LIB3148-039-Q1-K1-C9
actaaattggttaaaatcgggtcggttccggttttattaagtatggttaaatcgggtcatatgacgggtcgggtattccttatcctgtgtaacttggcttcgggttcggacgggcgggctgcgatgttggattcgggtgcggtggattgtctggtgaaattgttgaaagggagtgagttggatgagccgactcgggaaggttgtgtagcggttttatatggactgagtcaagcagggttgaggtttaagggactggctaaggctgccggtgcagtggaggagttggcgaaggtggagcggacggcaaatggtctgaccagggagaaagcaaggaaaatgtcggagatgttgaaaagggggagtgaggaggagcaagaggaagtggactgggaggcattgcttgactcgggat

SEQ ID NO: 30528 - DNA, 319 bp, Gossypium hirsutum
  Clone ID: LIB3148-039-Q1-K1-D1
cccacgcgtccgcccacgcgtccgcccacgcgttcgacttcagaacaagagtcgtgctttacagctgctaagagcaaaattgtatgaaataaaagtaagggagcagcaagagttaataaggaaccaacgaaaatcacaggttggtactggtgctcgtgctgaaaagattcgaacctacaattataaggacaatcgggttactgaccaccggctaaagatgaactttgagcttacatctttccttgaaggcgatattgagaatgcagttcaggcttgttcagctatcgaacagaaggaactccttgaagagcttgctgag

SEQ ID NO: 30529 - DNA, 397 bp, Gossypium hirsutum
  unsure (1)..(397): unsure at all n locations; Clone ID: LIB3148-039-Q1-K1-D10
gtgtgcctttcctgttcaccatcaagcaattggttgcatcaggcaaacctgatagctttggaggagacttccttgtaccatcctaccgtggctcatctttcttggacccaaagggaaggggtggctcaaccggttacgataatgcagtggccttgcctgctggaggaagaggggatgaggaagagctagccaaggagaacaacaagagtgctgcatcttcatcagggaaaatcaccttgagcgtcacaaagagcaagccggagaccggtgaagttatcggtgtgttcgagagccttcagccatctgacactgacttgngtgccaagactccaaaggatgtcaagatcactggtgtctggtatgctcagcttgattcataaacaagtcttgtatgaat

SEQ ID NO: 30530 - DNA, 404 bp, Gossypium hirsutum
  Clone ID: LIB3148-039-Q1-K1-D12
cccacgcgtccgctcatttccccatttcaaaaaccaaatcaatccggttcttctctccatcttctttccggaactggtgcgctgtgactcctcccttccctcaccaggtatgatgcttcccttttctctagtgctcctttcactaggttatttgcttgaacattttccgatctaggaataaactagaaaataacatcttgaagactgtctctttttctctgagtatctcgaatgatcgctccaagaacggatttgtctacttcttgcgatttacatttcttaataactgttttcgagtctccctttattattactgaaaataaacccattgatgttactaacttgatggcctctaaccctgtatgagcttcggctacgaatgaggaggagatattttcatggag

SEQ ID NO: 30531 - DNA, 281 bp, Gossypium hirsutum
  Clone ID: LIB3148-039-Q1-K1-D2
cgaacaagtaccgcgagggaaagatgaaaaggactttgaaaagagagtcaaagagtgcttgaaattgtcgggagggaagcggatggggccttttcattgccaacaaaaactaattcctgcttcttctctaatgttactttctcatttctctaataaatgattcatggtaataagagtgtagttagcattagttgtttctacttgatgcttgttgcttctgatgttatgaacttaaacatccttttgccttgaataaattatccctttttcgtcagttgctt

SEQ ID NO: 30532 - DNA, 228 bp, Gossypium hirsutum
  Clone ID: LIB3148-039-Q1-K1-D3
aaaaaaaaaaaaaaaaaaaaataaaaaaaaaagtttattattaaaaaaaaaaaaaaaaaaaaaaaaagagaaaagaaaaaaaggaaaaggagggaaaaaaaaaaaaaaaaaaaaaaaaaaaaaaaaaaaaaaaaaaaattggggggggcgttttaaagaaacaaaatttaaacaccccgctatggaaattaatattttttttttagggtccccaaaattaaattaatg

SEQ ID NO: 30533 - DNA, 432 bp, Gossypium hirsutum
  Clone ID: LIB3148-039-Q1-K1-D4
caagacctcataatagtggtcatcacactattgagtcctgctatacatcacagtttgaacagcatttgcgggctgttgttggtcttcctctcggtgatccatccatgaaaactccagctgctatcatgtacaatctactgggtgaggatgaaggggagccaggtttcagagtggctcatcaacttatagcaagggcactagagattccaggagctactgctcattggtatgataagccagaaatgcgaaggcaaaggaagatgggtcatataactctttgtggcccttcttgtggtattttagaagtacggctgaaatcaatgctgagggaagaagggtatgaaaatccaaatgaagttgcaccacgtgttgggattgtaatgggttcggattcagatcttccggttttgaaggatgcagctagaatcttaa

SEQ ID NO: 30534 - DNA, 375 bp, Gossypium hirsutum
  Clone ID: LIB3148-039-Q1-K1-D5
cccacgcgtccgcccacgcgtccgcccacgcgttcgctccggtgatgttggcacttccttcaagatgcaagatgaaggacgatctagggttagagaaactctgacaccttcaacagcgcagtcagcattacgaaggattctgccttacccttgcaaaaaacagtacactgtggtgattcttatgccacaagcatctcggtttaagttgttaagatcactattcaagcaaaatgctcctagtagagatgcaaagattttagcagccattgctggtggaacagtcttggcagcctgcttgtggagatattcacggaagtcatagcacaactgtacgtataaaaagccttcaattgctccccgacctcaaaacttgaa

SEQ ID NO: 30535 - DNA, 71 bp, Gossypium hirsutum
  Clone ID: LIB3148-039-Q1-K1-D7
aaaaaaaaaaaaaaaaaaaaataaaaattttaaatttaaaaaaaaaaaaaaaaaaaaaaaaagggaagggg

SEQ ID NO: 30536 - DNA, 194 bp, Gossypium hirsutum
  Clone ID: LIB3148-039-Q1-K1-D8
ttgtcccagaagaagatgcattcggtttactagtccaaatatatatatttaaaaaatgaatctgtgagatggccctgcaaatgtacatactttattatgggcagacaatctccttttcctccccgtttttccttgccggagtggaagaggaagtgaaatgttaataaaacttctctcttctaaattgggcttca

SEQ ID NO: 30537 - DNA, 410 bp, Gossypium hirsutum
  unsure (1)..(410): unsure at all n locations; Clone ID: LIB3148-039-Q1-K1-D9
gaccgacgcgtccgntggctgcgagttgacggagtgctaatgagattaagggacactcgcttgcattgtgtttttgacgagagtgcaagggctgtcattcttagagaaagatgttggagggaaggaacatttgaagctttgtctgctaaaggatatcctactgattctgcttcatatagtgatccaagcatcatcagccaaaggctacctgtcatcatgcatcagacccaaaagcttgtagtccctggtaatgtaaattgccacgcgcaacagattcattagttgaatatgtagacattgcgaatttgatccatttcggtggattcataagcaaaaaaaatcatgttcatgcacttgatgtaccattaacaagcaaaatttatgatgtgattttgagtgtaagcaagaat

SEQ ID NO: 30538 - DNA, 258 bp, Gossypium hirsutum
  unsure (1)..(258): unsure at all n locations; Clone ID: LIB3148-039-Q1-K1-E1
cccacgcgtncggaaagaggtgccgcagactgcgtcggagactgngatgtcgggttggctgaggaagaacgtgcangaaggaaaatatgtagtggataaagcttaagcttaaatggttgaaaatattgtgaaaaacaaggctattaaattgggtgatgagctggtcttggaatgccaaccttaaaggcttggtgggagaaagaaccttaaccgaaaggcttacttggaatgcttggctttgtattggaaggtaaagga

SEQ ID NO: 30539 - DNA, 64 bp, Gossypium hirsutum
  Clone ID: LIB3148-039-Q1-K1-E11
atttgcaaaaaaaaaaataaaaaaaaaatttataaaaaaaaaaaaaaaaaaaaaaaaaaggaaa

SEQ ID NO: 30540 - DNA, 70 bp, Gossypium hirsutum
  Clone ID: LIB3148-039-Q1-K1-E12
atattaaagacaaacaagtttctttggacctaggtttcttgatcatggaataagaaactcaattgtgaat

SEQ ID NO: 30541 - DNA, 335 bp, Gossypium hirsutum
  unsure (1)..(335): unsure at all n locations; Clone ID: LIB3148-039-Q1-K1-E2
gaaaaggcgaccttgacaaggggtgagctgttcaaacacccaggtaagccactgtacgaagtccatgctctggttcattataatattctgaagtgatagttgtaataggcccatttgcccggcccgtaaaccaaatcaaaatataaacaaaataaaaattaataacagtccagaaatagtccatatacctaggcccaaattgtttttaacccactagcctatcccaatttcctcaatccagttagcctaacacttaacccggacccaaggcataacgcagcccaaaacaaanatcagaagcaggaaacactaganaaccctgngcgctgcatgac

SEQ ID NO: 30542 - DNA, 254 bp, Gossypium hirsutum
  Clone ID: LIB3148-039-Q1-K1-E3
gtttgtcggcggcatcttacatcgggcaccttgatttgagttacaaccacctatgcgggcggattccggcgggagcaccgttcgatcatctggaagcatcctctttcatgtacaacgattgtctttgtggtaaaccgcttagagcttgttgatgacatggttaataaatttttatctaccgcttatatctattgtattattggaatgataatgtaaaccctacttaaacagaaattataaaatataatttactt

SEQ ID NO: 30543 - DNA, 275 bp, Gossypium hirsutum
  Clone ID: LIB3148-039-Q1-K1-E4
gaaaattcttttccaaagctactttaaggtccctgtgtaaccagactccgcggcgatgaatagcgtgtgatatttgagcccgatagccagattggttgatcataaaaataatcatgtggtttattcacagatttattttttctttttcctcccccaccccctttttttggcttgtatttttgctctaggaggcatggatatggtggtataagagcgcagccttgatgtcaaacactggatattgctgagttagcatgcagcactatatttacttg

SEQ ID NO: 30544 - DNA, 444 bp, Gossypium hirsutum
  Clone ID: LIB3148-039-Q1-K1-E5
ggctaatctctatttcatcaaggtttcttcctactgtcatgaatcttctaaagcggcttgctgaagaggcccaaggccatcgaaccccagagtcccccaggcaacaggaatcatcagtagcttttcagagcttcaggaatcaaagtcagctaaatccaacaagctcgattgcacagtcatctgtatcatccaacgtttctgtgtctgatagtagtgtcgagtactccagccctaacttaatgcagagaagaagtacaaaagttcaagaagcagagctttctcaataaaagctagtcttccggtgtagaatgtataccaagttagttcaagtgctacctcatgcaacttaaaatcttctttgggatgaaaaatggggatatataatatatggagagtctttacatatgtaacaaaggatgcaggatttggatgtgctctatatgt

SEQ ID NO: 30545 - DNA, 332 bp, Gossypium hirsutum
  unsure (1)..(332): unsure at all n locations; Clone ID: LIB3148-039-Q1-K1-E6
ctctccctgaaatcgcttgaattttttttctcgtgccagtcgcgcgacaggaaaataaaagacgtggttagtaacggcgagagctcctgtaagtggaagcgattttttaaactacggtcgatgtacgtgaatatacttcagcagataacctctactcttttttcaacatttgaaacattcagtttctttttgttgttcataattttgttactgtatttttttcgctgatgaatcaacacccgaaaaaaataaatcaatttatganttaacaaanccaaaacaaaaaatcaaaaacaagaaacactaaaaaactctgggcgctgaatgactgc

SEQ ID NO: 30546 - DNA, 307 bp, Gossypium hirsutum
  Clone ID: LIB3148-039-Q1-K1-E7
gaaggatatgaaggagatttacttcaaacagttttttgaatacacaatagaatgagttaatattaggtttagcacactgactttttattctttttcaagttttattcatgtatagagaaaccaaatgatagggtggattggtccttaaaccaatgtttcattgggagaaaaatagagtttggaaggtaattttagccacctgagacggattccgactctggcggctataggtgttccggttgaagttctaccggttgccgaaaaggctacattgttttattggtttattaaatttatcgcttatatt

SEQ ID NO: 30547 - DNA, 430 bp, Gossypium hirsutum
  unsure (1)..(430): unsure at all n locations; Clone ID: LIB3148-039-Q1-K1-E8
gaaaaggcgaccttgcaaggggtgagctgttctaacacccaggtaagccactgtacgaagtccatgctctggttcattataatattctgaagtgatagttgtaataggcccatttgcccggcccgtaaaccaaatcaaaatataaacaaaataaaaattaataacagtccagaaatagtccatatacctaggcccaaattgtttttaacccactagcctatcccaatttcctcaatccagttagcctaacacttaacccggacccaaggcataacgcagcccaaaacaaaaatcagaagcaggaaacactagaaaaccctgngcgctgcatgactgcacagccagcacactctcctctcgtgcgtgtgcgaccacaccttcgagccgctcctcacacgtgcctctgtacgatcatgtacctacaaatgac

SEQ ID NO: 30548 - DNA, 335 bp, Gossypium hirsutum
  Clone ID: LIB3148-039-Q1-K1-E9
gtgagaagttgggagaggtggcaacctgggtcagcgccactgtggtctccgcctttttctggtctctcgagcgctgctcctgcgttaacctctccaccaacgaccctgacgatgacgacaatcccgacgaggccaaggaccgccctctcacctactcctgaatatctctctcggtacttgccacgtcatagactctcttgctttctcttgatttagggtctttgtatacagaaccaagaaaaaagtattaaggaaactttaaatgctctctatatgtgttggtcctcctgattgaaaagggaactcttgtgtaataaaggccttttttttttgga

SEQ ID NO: 30549 - DNA, 364 bp, Gossypium hirsutum
  Clone ID: LIB3148-039-Q1-K1-F1
cttggaatgatgcttgtgatgcaaagtttcagcgctattgggcattggtgataggcactccaaaggagaatgaaggcttaattcgttctcctctttcaaagattcttcttcatgatggtaagactgagagggtcatcttggctcaaaatgtgggtttagaaccttctcaagaggctgtgactgaatatcgggtattaggtcctatgataaatggatgctcgtgggttgaactgcgcccacttactagcaagaagcaccagctccgtgtccactgtgcagaagctctagggactcctataagtggtgactataagtatggctggtttgttcaccggaagtggaagcagatgcctcgagttgatat

SEQ ID NO: 30550 - DNA, 384 bp, Gossypium hirsutum
  unsure (1)..(384): unsure at all n locations; Clone ID: LIB3148-039-Q1-K1-F10
agttaatctaaaatcaaattctctaatagagtcccagtaggactgtatgctcatccaaagaagagatggtccatgttcaaggtttctcagtcattgcgaaccatggctgaggaaaatggtttatcagaagagtttgatgatttccctctgattttcacagaccaagatgatgaatcaatatagattgggagtaatgttaattgctttttatttatgtcagttataaatagttgtataatatcaataaaaatgttaaacaaccgtaggttcttagatcttgaaaagatctatttattttgcaccttgcctttttttttttcttctaatgaaattaatgctgattgcttgnccccnnnananannnnnnnnnnnnnnnnnnnnncc

SEQ ID NO: 30551 - DNA, 268 bp, Gossypium hirsutum
  Clone ID: LIB3148-039-Q1-K1-F12
attttatttgcagactcgttttaatggaagtgtttccaatggaagattactgaaaatctagagggaaaaagtgtggttgatttagtccacagattcaatctattttctgttgatcatactgataggacttgttgatgacatgttgaacaaatgtgtgttacattttgaatgtgatcccaagtgccagcgatttacaaaggcttctatggtctgtgaatcacacaacattggctaatcttcttgtaaatctttttaactgcaatggctg

SEQ ID NO: 30552 - DNA, 440 bp, Gossypium hirsutum
  Clone ID: LIB3148-039-Q1-K1-F2
attttccattcatataaccaacccttagagaacaacatcaccccatttctttttaattactgcttgttgttctcttccttctcacgtaccccaccaatatcaataatggcacgccaaagctttgttcttgctttggtctttatagctcttgtcgggttggtttccgccgccaatacagcttctaaagcaccatctgcagtcccagtacccgatgatgataccatcggcaacactgatgatggagcaggtgcatcctcccccggtgcttctaatgacgctgttgctgcccctcttggcagtgagcaggaagctaaaagcatggctcctgctccttctagtgatgcaaccaccacaggtgtctctgccgttggggcggctgctctcactggggcagctgccattgctacctacttcgtcttctaaatagcttcgtctcaatc

SEQ ID NO: 30553 - DNA, 206 bp, Gossypium hirsutum
  Clone ID: LIB3148-039-Q1-K1-F3
cccacgcgttctaaaaaaaaattataaaaaaaattatataattacaaaaaaaaaaaaaaaaactaaagggagaaaatattaatggtcacgtgtgcccccaataataaatttttatacgctcggcgctaccctcttgctttcccctttatttctctcgccttttattctgttaacccctttttaactttttatttaactatacttta

SEQ ID NO: 30554 - DNA, 300 bp, Gossypium hirsutum
  Clone ID: LIB3148-039-Q1-K1-F4
ggcaaagatgttattggaatggatgttgctgcgtccgaattttatggatcagcagataaaacctatgatctgaacttcaaggaagagaaaaatgatggttctcaaaaaatatcaagggatgctctcaaagacttatacaaatcatttgtttctgagtatcctatcgagtcaattgaggatccctttgaccaagatgattgggagcattactcctaactaaccaatgaaatcggaacaaaaggtcagattgtcggagatgatctcttggtcaccaatccaaagagggttgagaaggctatc

SEQ ID NO: 30555 - DNA, 364 bp, Gossypium hirsutum
  Clone ID: LIB3148-039-Q1-K1-F6
cccacgcgtccgcggacgcgtggggcctcctcgtggaccactctggatcttgggcgacgtgtttatgggtaagttccatacggttttcgactatggaaacatgcaaattggatttgcagaggctacataaagtaatcacttcaacagttacacccctttggtatgtataatatgcagtgctaagtattactcttataaaaataagagagtgggatttagtatgtaatgataatttgcatgtaaatatattgttgcttgtggtaggagcttttattaggaaagaattttacttactctatacttataattaatgatgcaactgaattttagcttttatgagagctaaggttacatatttttatga

SEQ ID NO: 30556 - DNA, 444 bp, Gossypium hirsutum
  unsure (1)..(444): unsure at all n locations; Clone ID: LIB3148-039-Q1-K1-F7
cccacgcgtccgcccacgcgttcgattgttagtcactgccattagtagctccccacagaaggagtgggaagcaatcaatagactgggtgctgactcattccttgtttctaacgatccggaaaaaatgaagtcagctattggtaccatggactatatcattgacacagtgtctgcggtccatcccctacttccactgcttagtctgctgaaggtgaatggaaaattggtcactgtgggattgcctaataagccactcgaattgcctgtttttcctttagtcatgggacggaagcttattggaggaagtgatgttggagggatgaaagaaactcangagatgctagacttctgtgccaagcacaatatcactgcagatatcgagctgattcggatagaggaaatcaatacggccatggaaaggcttgctaaatctgatgtcagata

SEQ ID NO: 30557 - DNA, 336 bp, Gossypium hirsutum
  unsure (1)..(336): unsure at all n locations; Clone ID: LIB3148-039-Q1-K1-F8
ccggnccggaanncccgggcaaaaatatggctgtgatttggtcagagaacacattgtatgactacttgcttaatcctaagaagtatattcctgggacaaagatggttttccccggattgaagaagccacaggatcgtgccgatctcattgcttatctcaaggaatcaactgcctgatgggtgtgctttttatcagctattttggaacaaatgaaagagtttttgatcaatgatttttttttctttttgttacatgatataaaaactaggcgattcgcataataaaaggaaaacagctccaatataaattgggttttggagttgaaccgagtagtga

SEQ ID NO: 30558 - DNA, 405 bp, Gossypium hirsutum
  Clone ID: LIB3148-039-Q1-K1-F9
cccacgcgtccgccgatctgctacctcattggattcgaactcggaagtatcagcagctgagtcggtgggcacaagggggaccagccatttcatttctggtgaaagttgtggaaatggaaatgaaaagatacccttcattgatttccttggtgttggaagagcttcttaaagactagcggaggttttttgcttttggtaattagaactaaagagatccagctgaaaacacaagggaaataaaagaaaaaagagcaacattagtttgctgaaaacttcgttatttagattcaaatttatgtaagatatgagtatattttaaagttattttgtgtttagaagatttttttaagatgaaagtattgagtttgccagttgttagtcaagttacaacagggaaaacaacgc

SEQ ID NO: 30559 - DNA, 333 bp, Gossypium hirsutum
  unsure (1)..(333): unsure at all n locations; Clone ID: LIB3148-039-Q1-K1-G1
gcgtttctttctgaaaccagagctgagaaaataatacccaaagccttaaaaactatcaaaaatggttcaaaggctcacttaccgtactcgccatagctatgctaccaaatccaatcaacaccgtgtcgttaagacccccggtgggaaattagtctatcagactactaagaagagagcgagtgggcctaagtgtcctgttactggaaagcgaattcagggtattcctcacttgagacctgctgaatacaagcggtctcgattgcctaggaaccgtangacggtgaatcgtgcctatggtggtgtttgtctggagtgctgtagagaaaggatatc

SEQ ID NO: 30560 - DNA, 350 bp, Gossypium hirsutum
  Clone ID: LIB3148-039-Q1-K1-G10
gcatcaagtaactataagcaagagaaagaatagaaaataaagagagtgcaaagaataggcagttagttaggttaggttagtgccacagcttctcaaatggagggctttggctaaagctgttgtccattgttgtagttgtttaagtggggttattgacccctgtaaattagtgacactataagatggttaaaggtttcgaaattcttggggtcgggttcggatcggtagggtgaaatttctagcctgtgccgccgggcttttaaccggatatgggcaccgaagaaaatgatctttgttggtgtgattgattgattgatttctgtttgaatgagtgggggaaagttgaactt

SEQ ID NO: 30561 - DNA, 367 bp, Gossypium hirsutum
  Clone ID: LIB3148-039-Q1-K1-G11
accaagcgtgctatcaattgcgctaacacgttttcgaaaacgctgcaaggactggcgcaggggggagcgaagctgggtgcgtaggtaactgaacatgaaattaaacaatcaatggcagccagcgacgcagctatcaactacactatgtatatcgcagagaccatgcctgtcaccatgcttattaaccgaaagcatcgggaccaacatttgcaccactcctatcaacacttcaataaatacatcaccatgtacaagatgatacaagatctacaacaatctatcctgcactatggcatgcacgatggcgaaaacatcaatgaaatcatctatgacgatgacggcgacattgactgtgagatatactatg

SEQ ID NO: 30562 - DNA, 122 bp, Gossypium hirsutum
  Clone ID: LIB3148-039-Q1-K1-G12
gaaatgattcactgttaactttgtgatctgtgtataaacaaacaatttctatccatttgttcggaacaccaaaaaagggccacgtttcggttctatctattttcaaaattaggtttataaac

SEQ ID NO: 30563 - DNA, 453 bp, Gossypium hirsutum
  Clone ID: LIB3148-039-Q1-K1-G2
atctgtttcttcccacatcggtggatccaaagattttaaatttttaaaaaaaaaaaaaaaaaaaaaaagagaaaggtatttttgaaaggggggaaaggaaaattctaaaaaaatactaaacaaaatgctttctataaacatatacaaatcatgctttctttctttttctatcccgtttatttggtaacctttttgaccttcttcataaaaggcaatgttggggattggcaaaaccattttatactattcatgtctaatgttctaaatatattttttccatatactaaatttatctggtttgagtcttcaacttaacaatggatcatctttattgactaaaatcatttgtctttcttgtaataattgagtgttcatttgcaactgtgtttggttgcgatgctttgaatttcttgttcaaagatccaaacttgttttctttaaggtttttttttt

SEQ ID NO: 30564 - DNA, 167 bp, Gossypium hirsutum
  Clone ID: LIB3148-039-Q1-K1-G3
cccacgcgtccggaaatattgatgtcaacctcattaaataacgatggataagctcattgttgacatgacaaatatcataggccaaactgtgttgttgtcatctcttctccaattatatatatgtactaaaataaaaaaggaaattgatcatcaccatttttactatt

SEQ ID NO: 30565 - DNA, 430 bp, Gossypium hirsutum
  unsure (1)..(430): unsure at all n locations; Clone ID: LIB3148-039-Q1-K1-G4
cccacgcgtccgcgtgtgttgattaatagtggtttcattgtcacgggattggtttacagcattggcgcaatggtgcatggctgctggactctttgtttttttatagttcataattgttgtaattagaccatggatatattttctgacattcatctattgtttgtgtagctggtggtgaagttattctatttgtccctgaaattgattctacttgtcatgacgcctatcctattgaaagaagatgagtgcaataagggtctgcttgtctacccgctgatgaatgtcgatatgctgtgtacgaatttgattttctaacggccgagaacgtaccgaagagcagaatctttttcatagcatggtctcccgacacgtcaaggatcangagcaagatgatttaccccagctccaaaaatagattcaagcgagaact

SEQ ID NO: 30566 - DNA, 444 bp, Gossypium hirsutum
  Clone ID: LIB3148-039-Q1-K1-G5
cccacgcgtccgggcctgggtgcatatctcggtataatgggatctcgacgagatgttgtgactgctgtgtggaagactggtcttgaaggtgtttggtacaagtgcatgagatgtttgcgacaaacttcagcttttgcttcggctgattcgacccaccaacctagtcaaaatgaacgggtgagttggtggatcagtcgttgggcctatggatgtccgatgtgcggcggaccttgggttcgagttgtatagaagccgccagggtgaatgtcgattatgtatttgttgtcaggggctcacttcggttcctcttttcgatgtacgggtatgtactttttggaagctttacaagttgctgcaggtttaaagcttaaacataggaaacaaatgattggcttttttaacactagaacctgtttctgtataaaatttgttgataaaataatt

SEQ ID NO: 30567 - DNA, 418 bp, Gossypium hirsutum
  Clone ID: LIB3148-039-Q1-K1-G6
cccacgcgtccgtgtatgtgaaaaaattggctgtttttatagggtacccttttagctttgaagaagaacaaggtggggtagtgaagaaactaatagatttatgcagttttgagaacttgagtaatttagacgtgaacaagacgggaaaacgacatgaagacgacgatgaggcaacgaacaagacgttcttcagaaaaggcaaggttggggattggcaaaaccatcttacacccgagatggctaatcggctcgacaatatagtggagcaaaaactgagtggaaccggtttgagtttcgaactcaacaatggatcatcttgatggactaaaatcatttgtctttcgggtaataattgtgtgttcatttgcaactgtgtttggttgggatgctttgaatttcttgttcaaagatccaaaca

SEQ ID NO: 30568 - DNA, 180 bp, Gossypium hirsutum
  Clone ID: LIB3148-039-Q1-K1-G7
ggaagttataatcaattatacagtacatgatatgatcgaaatgccggaattcgacacaaactatatgcagacaaataggtgccatcttgtagatgaacatcaatttttttttttttgtgttctactctattcttatgtttgaatgataaagaagaatttacttttgttcattatagtatt

SEQ ID NO: 30569 - DNA, 432 bp, Gossypium hirsutum
  Clone ID: LIB3148-039-Q1-K1-G8
cccacgcgtccgttttttttttctctccttttttaccgccgtcgatctcgatccttatgctcgttgtcaaacaagctcgagaaagatggccaacgctgcatcgggaatggctgtgcatgatgattgcaagttgaagttcttggagctcaaggcaaaaagaacccaccgcttcattgttttcaaaattgaggagaagcaaaagcaagttattgtggagaagcttggtgaaccaaccgaaagctatgaggattttactaaatgtctccccgctgatgaatgtcgatatgctgtgtacgattttgattttctaacggccgagaacgtaccgaagagcagaatctttttcatagcatggtctcccgacacgtcaaggatcaggagcaagatgatttacgccagctccaaagatagattcaagcgagaactggatgg

SEQ ID NO: 30570 - DNA, 427 bp, Gossypium hirsutum
  Clone ID: LIB3148-039-Q1-K1-H1
tggatagctcagggagtgctgttggaaggaaagatagtggaacagttccaccattggataaaacaggagttgatgaaagttgtatcattgtgaatgaagctgaacttcattgtcatcctcataggcaaggcaaacacagaccttaccagaaaaagattcgtgatgctatttcttcacgaatgaggtcagcaaggaaaatggagtacaaacaacttgctaaatggtatggggatgttggaaaatgtgatgaggactccaaggggagctcaatgtctgcacaaacaagagaggttacaaggagatcctgataaagagttttattttaggggttgttccaaaagtagtaaagtttgttttattagtatgtgacctgaaaaaattaagtgtctatattctctatgttataaatgcaaatccatatgccata

SEQ ID NO: 30571 - DNA, 372 bp, Gossypium hirsutum
  Clone ID: LIB3148-039-Q1-K1-H10
ggaggacctattattttagcacagatagagaatgaatacaacactattcaaagagcattcagggaaaaaggggatagttatgttcaatgggccggtaaactggcccttagcttgaatgccaatgtcccatggatcatgtgcaagcagagggatgccccagatcccattatcaatacatgcaatggaaggcactgtggagatactttctatggtccaaataagcgcaacaagccggcattgtggactgagaactggactgcacagtatagagtattcggtgatccaccatcccaaaggtcagctgaagattggcatactcagttgctcgattcttcttcaaaatggaaagcatgtcaactactatatgtacta

SEQ ID NO: 30572 - DNA, 127 bp, Gossypium hirsutum
  Clone ID: LIB3148-039-Q1-K1-H11
cagattttggtatctgattagaacagtattttcagacataagttttggttgcttgagttgtgggtgttacacttgttctggattatatggttatctaaatatatgactaaaaattaagtctgtttag

SEQ ID NO: 30573 - DNA, 395 bp, Gossypium hirsutum
  Clone ID: LIB3148-039-Q1-K1-H2
cccacgcgtccgcctccccgttggaagaatcagctcttgtacatttaagtttctttagtgccatagaataagaaaaaaggttaggccttttgcacaggagggaaaggcaaaaaaaaaaaaaaaaaaaaaaaaaaaaaaaaaaaaaaaaaaaaaaaaaaaaaaaaaaaaaaaaaaaaaaaaaaaaaaaaaaaaaaaaaaaaaaaaaaaaaaaaaaaaagggggggccgtttaaaagaaccaaagttaactacccggggatggaaaagaaaaattttttttatggggccaccaaaataaaataaacgggccggggtttaaaaacgtgggaatgggaaaaacctgggggtaaccaaataaaatggcttggaaaaaaatccccttttcgcaagttgggg

SEQ ID NO: 30574 - DNA, 434 bp, Gossypium hirsutum
  Clone ID: LIB3148-039-Q1-K1-H3
cccacgcgtccgcccacgcgttcgccctagtcagagccgcatcttcttcttagcctcagaaatggcgaagtcaaagaaccacactgcccacaaccaatcttacaaggctcacaagaatggcatcaagaaacccaagaggcaccgccacacttccaccaaagggatggatcccaagttcttgaggaaccagaggtatgcaaggaagcacaacaagaagagcggtgagtctgccactgaagaagagtaaatttttaatggcaaaagatctagctttgattagtgttttctaattgttgtttttcccccgatggaattgagtgttcgtttactataatcaccttagtttgaaattgtattttgggattgttgaatctcattttcaaaagagaattgaagctgtgagcttattaatattaagaacatgttttgagctt

SEQ ID NO: 30575 - DNA, 465 bp, Gossypium hirsutum
  Clone ID: LIB3148-039-Q1-K1-H4
acccacgcgtccggttatcctatagatgctgtattcatgcctgttctaaatgcgaatcatagtattcattgttatgggaatgataatgaaaaacaggagatactttttctagaaatatggacaaatggaagtttaactccgaaagaagcacttcatgaagcttctcgcaatttgattgatttatttattccttttctacatacggaagaagaaaacttacatttagaaaacaatcaacacgatgttactttacctttttttccgtttcatgatagattagttaaactaacaaaaaagaaaaaagaaatagcattgaaatatatttttattgaccaattagaattgcctcccaggatctataattgtctcaaaaagtccaatatacatacattattggaccttttgaataacagtcgagaagaccttatgaaaattgaacactttcgcatagaagatgtaaaacaa

SEQ ID NO: 30576 - DNA, 237 bp, Gossypium hirsutum
  Clone ID: LIB3148-039-Q1-K1-H5
tgaacatattgccttgcagtatctttagtaaagtttgaaaacataggtgactgatgttcatgtaaatgaactataattatgacagaggtgagtgctcttattattaaacaatagtataattatggtaactaaggaatatcgaattggcgaaggttgaaaatatcaataattattattattttattatttagtccggaaaaaaaaaaaaaaaaaaaaaaaaaaaaaaaaaagggcaaa

SEQ ID NO: 30577 - DNA, 247 bp, Gossypium hirsutum
  Clone ID: LIB3148-039-Q1-K1-H6
cccacgcgtccgcccacgcgtccgcaccggaataaagttacggagtattaccggagttaccgatttatttattagatattttatttcatctaacgttcatatttgaacaaattaaaatcaatcatattgtgccttaaacatacttatttttctcgacatgttttatttgaatttattacttgtctcaatatacttaatttccttgtatcaacatatcaaaaataatcacatattgacatatcatgat

SEQ ID NO: 30578 - DNA, 333 bp, Gossypium hirsutum
  unsure (1)..(333): unsure at all n locations; Clone ID: LIB3148-039-Q1-K1-H7
cccacgcgtccgcccacgcgccgnggacgcgtgttcggactcgtgttttgacgcgnggggnggaacatgcccggctttatgcaactaaattgggggagactcacatggagaaatggtacgttttgctctctccactggccctggatggtcattttactttaagaaagttgaaaaatcagccatggagattgaacaagttgttcatatttagagtgaaagcaatcattctgcatgaactagtagttattatataatattagcttcaagtaaataatgctgagagaactgattgttaagattgccttgtttgaagcagcagcatgtatatatatg

SEQ ID NO: 30579 - DNA, 313 bp, Gossypium hirsutum
  Clone ID: LIB3148-039-Q1-K1-H8
ccacgcgtccgcattttgattagccttaagagaagaaataaaaattaaaaataaaaaaaaaaaaaaaaaaaaaaaaagagaaaaaaaaaaagaaaaaaaggggaaaaaaaaaaaaaaaaaaaaaaaaaaaaaaaaaaaaaaaaaaaaaaaaaaaaaaaaaaaaaaaaaaaaaaaaaaaaaaaaaaaaaaaaaaaaaaaaaaaaaaaaaaaaggggggggggggattttgaggggaaaaaaaaaaatggggggggaaaagaaaaaaaatttttttaaaagggggccaaaaaaaaaaagaaggaggggcggattt

SEQ ID NO: 30580 - DNA, 254 bp, Gossypium hirsutum
  Clone ID: LIB3148-039-Q1-K1-H9
cgcgtccgatccttatgttgtcatttttttacaatttatttaaaagattaggaccgagaactccattgtggatgtattgggtggaacagtattgtactactactagtagtttaacttatttagtagctgtataaagctgcttcttgtgcataaaaaaaaataaaaaaaaaaataaaaaaaaaaaaaaaaaaaaaaaaaaaaaaaaaaataaaaaaaaaaaaataaaaggctgaaatttaaaaaaggggcggccg

SEQ ID NO: 30581 - DNA, 51 bp, Gossypium hirsutum
  Clone ID: LIB3148-040-Q1-K1-A1
aaaaaaaaaaaaaaaaaaaaaaaaaaaaattatttaaataaaaaaaaaaaa

SEQ ID NO: 30582 - DNA, 309 bp, Gossypium hirsutum
  Clone ID: LIB3148-040-Q1-K1-A10
ccattccaagtttcttgggttcctactagcaaatctgaggccatttgatctgtatcaacataagcaaaagatccctgacctgacttgcatcatcgatgtagtgaaagaagtgttagagaacaagtgagtagaagggaggagaggcaaggctttgaatgctggtgaagctgttttgctgttcattttgtggatgcaattattataagtagtatcaactcgttttcttaatgtatatgcattggtgatccatagtaatattagaatggtgagaagctatatatgttttttaccatctgctggtaagttttc

SEQ ID NO: 30583 - DNA, 410 bp, Gossypium hirsutum
  Clone ID: LIB3148-040-Q1-K1-A11
tggaacctcctcaaccccatctgttccatgctgctcacagcttgctaacgttgttcaattacagccacattgcctttgcatggccctcagtggtggaggttcatcactgggtgtggaagtaaaccagacacttgcccttgcactccctcaactttgccatgtcaaaaccccacctgagagcaactgcaaagctgctgatggacctgctgtaatttcaatatctccatctggttcacctcaaggtttaccaccccattcaaatgataccccaggcagcaactcatcaacatcaggtggatctagaacaattgcagctactgccagtgatgttatcttcaacatgtcccttcagttcatcctgttcttgcagcccattgctttgttttcttcaacttggaccaccatctcct

SEQ ID NO: 30584 - DNA, 313 bp, Gossypium hirsutum
  Clone ID: LIB3148-040-Q1-K1-A2
ccggaacgaccggctcgacccactcgttctgttgtagatcgcgagcgtcatatactaagtatccaaactttactgccacattgttgatggaggcaaataggatcttaaaggtcaagcagttgtggtaatggtcccattgttgctatgttttgaactttgtatttgttactttttctgtgcaaatacgcatgcatgttcaaaacttgagtttgtggagcatttcatgcatgtattttagactctggaatgttcaactatggtggttatgttgaataaatgttaccaacataataaaatattttcagtgggattt

SEQ ID NO: 30585 - DNA, 75 bp, Gossypium hirsutum
  Clone ID: LIB3148-040-Q1-K1-A3
tcttggttttgctccttgtagatttaaccttttctgctagaggcaattaaagctgtaagagagggaagtggttct

SEQ ID NO: 30586 - DNA, 401 bp, Gossypium hirsutum
  unsure (1)..(401): unsure at all n locations; Clone ID: LIB3148-040-Q1-K1-A4
gggtgttgttggaaaattctggtggaaatttttgggcttctactgattgaaacttactccttcaatgtgattcttcactgtcgtaagaagtaatattttttgggaacacaattgagctcaaattgaatttacttccatagaaaattttcatagttacaactttgcctaattttttgactgctctattttcaactgtttgttaacatttcagcaggtttatattgcttattcaattcagtccataactgttgtcctcccatatcttgtgtgtttatgtttttactggagattgagacctgttctctcatgataatttagtggccttgtagcattagcccccaatccatatgtaataaaaggaaaggactgttcacatgaaaaaanaaaataatatttttttt

SEQ ID NO: 30587 - DNA, 175 bp, Gossypium hirsutum
  Clone ID: LIB3148-040-Q1-K1-A5
taatgtatacatacatatatatacatattttcccaggatgatgaaacctggcttagaataagttttatgagttgtatatggtgatatcaatcttccatgtttatttgtatactaaaacattgtttaacaattcattaattgttgaattaacataaatacttatttattgtcaatg

SEQ ID NO: 30588 - DNA, 334 bp, Gossypium hirsutum
  Clone ID: LIB3148-040-Q1-K1-A6
ctcacgcgtacgctggagtccgcactaacgtctgcactaacggtgacaagaaaggccaagtccttgcgatggaacttgtgctgaatactatgcactataccattcaatacatgcatgatgaactgttttatttgcgtgagagacaagaactgatgcaggatctgacctacgctacgacctgcaagatgttctggttgctcgttgtctgactgtcactttgcctatcacaagccggattacaattatggcatttaaaaaccttcttcctgaagaagaagcttatgtacgtttgtaagaccataggtctgtttcctgaactgttgccaaatatttt

SEQ ID NO: 30589 - DNA, 406 bp, Gossypium hirsutum
  Clone ID: LIB3148-040-Q1-K1-A8
ccagcttctagttcttcaatgcaagatgtaattatctgaaagaagccctttttcacattgatgtgttactccatttggtttccatgctgttccaaaataaatgtcttctcagctcaaggatgctgtacttggatcttgattcttgaatggttataactgctttgagttgaagaaatggaaaaaaagagggcttagaagatgtgagcatggattgtaattaataaattaagatatatgtttttatataggtttgtaaatgttaagggggagcaatagaaattcttaagaggggtagcaaagggcatttatcctatccagatttaatccaattgatttatgtaataatttttaaaggtgtggtttaacatatctgaaattcgaatttcaatatatgaaatgctttgtg

SEQ ID NO: 30590 - DNA, 393 bp, Gossypium hirsutum
  Clone ID: LIB3148-040-Q1-K1-A9
cggacgcgtgggcggacgcgtgggcggactcgtgggaagacgcatggctaatgcgacgagcattgtttcaataatatctaatcttttggataacaaaacccttgatacatatgcaaggcattgcttagaagattgctctgagctttattcaggtgcagggtctagtatacaaagtggtgggaaagcttttgaaggtaaagattatggaactgctaatgctgaaataagttcagccatggatgcaccggatacttgtgaagaacagtttaaagagaagaaagggtatgtgtcaccattgacaaaggaaaacaacaatttctttcagctacttgcaatcatactttcattcatgaatctggtaccaaaatgatgaacaatatactaatacttaat

SEQ ID NO: 30591 - DNA, 400 bp, Gossypium hirsutum
  unsure (1)..(400): unsure at all n locations; Clone ID: LIB3148-040-Q1-K1-B1
cggcccggaacgaccgacgcgaccgagcacgcgtncgcccacgcgtccgcccacgcgtccgttttacttcagtagttataatccggaccttggttggccattgatcctggataatttcgtagagtggatgcagtcgaagcagacctgaaattatttggtttggtcaacttctcagctgtaacctccatctatctatataaaggctggtgctttaaagtttaaactcccccttttctttgctccctttttctagagccttatgtagatttcccgatagggcataaattagtcaacttgaaagattttgcaagcacaccattctttaatcaaaactgttgtgaataatttgttgtcaggaatgtttgtattgctgatttttttttttttgaaaacatgaaag

SEQ ID NO: 30592 - DNA, 406 bp, Gossypium hirsutum
  Clone ID: LIB3148-040-Q1-K1-B10
ggaacttgaacttgataagttcatcactcactctgttcccttctctgagattaacaaggcatttgagtacatgcttgctggcgagggcctgaggtgcgtgattcgcatggatgcataaggattggctggccatggatgaagggctttttgttaagtatatgtgcattttaagggaataaataatgtaatataatgctacatcgttgtgctgtttttaatggtaaatttttatcttatcatgcatttctatgatcctctctagttgctttgctctgcatggttcttgttggagatagaattttcaaaaaatcattttaatttgttttagaaaatggaacatattgctgagcaaggtttgatgggataatccctaataacatgaaaatgtcatatgtgtaagatgtct

SEQ ID NO: 30593 - DNA, 410 bp, Gossypium hirsutum
  Clone ID: LIB3148-040-Q1-K1-B11
cagcaacccttctcatgccaggtttcgagatgtcagagatcaagctatatcaatatagaggaggatcagagttgttggtggaagcgggggaccaaagacgagtcatttctctcccaccacaaatgcaaggtaaggtaggaggcgccaagttcattgaaagaagtcttgtaatcactattcgataaatgctttgtgatcaattttttccacatttgagtgtgtcttcttgaaacgatagtgatcaaattttattgtgaggggtatcccttcaaattggactcgttaataagccacaggtagcaagatgaaccaatctgcctttaaaggcccttgattttgtcccttgcctccacctcctttacacaagcttcatttatcctctcaaaccattatgattccttaaatgcaaa

SEQ ID NO: 30594 - DNA, 231 bp, Gossypium hirsutum
  Clone ID: LIB3148-040-Q1-K1-B12
aaataatattcgagctgatatcaagattttgcatgttattgaaatacatgttctgcgatgtcatgtatctgtaaagtctttgtagtagtttcgtgaaaaaccgaaactgacctatacgagcttgtgatccgaatttcatcgatatgacatctaaggtttagggttatcttcgaacgcggatcatatttatttcaccatttaaactttcagtaatgagatggattttggttt

SEQ ID NO: 30595 - DNA, 329 bp, Gossypium hirsutum
  Clone ID: LIB3148-040-Q1-K1-B2
ccggcgccaccgtcggggaggtcatcatacaaacacccatgtattgcgagggtcattttgtaccaagggactcactgaaagcctgcaatctggctaacatgttacatgaactatatgggtgcacattcatatgacttctatggaccgtttgcttattgcagatttactatggggggaaaatcttggtcgcatccctgaaacttagtcaatcatttggatcacttttcgggtaatcgaccttttccatgctttttaggctttcgtatgccacgtccattccgattatcagatcttacctgatgaatgccttagcagttggctttatatat

SEQ ID NO: 30596 - DNA, 224 bp, Gossypium hirsutum
  Clone ID: LIB3148-040-Q1-K1-B4
catataatcacattagcattattcattaatttaaaatttttttaaaaaaaaaaaaaaaaagggtgcgcttaaaatatattaaaaataaataaaaatatacaaaaaaatacaaataataaaatataaaataaaaaaaaagggggccgccccttttaaaggttccaagtttacttccccttccttccaacttattatttttttttttgtgtcccctaaattcaatt

SEQ ID NO: 30597 - DNA, 370 bp, Gossypium hirsutum
  unsure (1)..(370): unsure at all n locations; Clone ID: LIB3148-040-Q1-K1-B6
cggacgcgtgggggaacatgcccagctttatgcaactaaattgtgagagactcagatggagaaatgatgcgcttggctctctccactggccatggatggccattttactttaagaaagcaaaaaaaattagccagggagattcaacaagtagttcatgtttagattgaaagcaatcattatgcatgaactagtagttattatataatattagcttcaagtaaataatgctgaaagaactgattgttaagactgtcttgtttgaagcagcagcatgtatatatatatatatgcttgcttacaaggtttgtctctcagagtccttctctttgtactcttttcagcttaatgaataaactgtttacttnnttt

SEQ ID NO: 30598 - DNA, 191 bp, Gossypium hirsutum
  Clone ID: LIB3148-040-Q1-K1-B7
cactttatagctctggtcttgcgttacctaaattcaatttattggccgtttttttacaacgtcttaactggaaaaacctggccgttacttaaaataatcggctcggagaaaatcccgcttttaccagctgaaatcatagcgaaaaagacctaactgatctgcccttacaaacatttttacaacctgaatgg

SEQ ID NO: 30599 - DNA, 413 bp, Gossypium hirsutum
  Clone ID: LIB3148-040-Q1-K1-B8
cccacgcgtccgctttgattcccattttatgccgagcacttgaacatgttgcagagttctgaaggcgtaatttcaatcgttctaccttgtacaggaagtatttggaagatccttgtttgtgggtagaatcgaacaccactactcttagcatactctcttcacatgctgagatcggagttggcttccttctaatcatttctttgttctcgtggcaacgcaatatcatacaaactttcatgtactggcagctattaaagcttatgtaccgtgctccggttacaactggttaccaccaaagtgtttgggcaaagatcgggaggacggttaatcctcttgtccagcagtatgctccgtttttgaacggtccggtttctgcaatacagcgatggtggctcagataggaagtcaaaaat

SEQ ID NO: 30600 - DNA, 174 bp, Gossypium hirsutum
  Clone ID: LIB3148-040-Q1-K1-B9
cccacgcgtccgcccacgcgtccgcccactcgtccgcccacgcgtccgtgcctgccatggagttgggagaacactcactttgtccttgaaaatgatagacaatggtggccgaatttaataaaaatgtttaaaaaaaaaaaaaaaaaaaaaaaaaaaaaaaaaaaaaaaaaagga

SEQ ID NO: 30601 - DNA, 247 bp, Gossypium hirsutum
  Clone ID: LIB3148-040-Q1-K1-C1
cgggacgacccaacccttccggtcttgaaccccaaccggccgccttttttttttttttttttttttaacccaaaaaaggggggaatagaaaattaatggatgcctgttaattattataaaaagctttacctttgatttttgctaagttaatatccatccccatatttggggcccaaatggggatccccatccttttggtccatttgaaaataaccttcttggggaaccaatcctgcaaaattaacca

SEQ ID NO: 30602 - DNA, 309 bp, Gossypium hirsutum
  Clone ID: LIB3148-040-Q1-K1-C11
aagctgatatgagacgagtgcttcgggagatcaccaggcaacgctcccgttcccctctcggattagctgagagacctatagctgttggccattcctagaaccttccatcaccttgtagaagcaaaagtaagaggaaatagttactttcatgcccaccaacagctttttaggattagattggatttttcttttcttttttaattacgcccctgtttatggatctatctgttgtagatatgtttatggagaaaacacttcctctgtttcttccctatattaattaataacttaaaaggtcttgttgtttgg

SEQ ID NO: 30603 - DNA, 396 bp, Gossypium hirsutum
  unsure (1)..(396): unsure at all n locations; Clone ID: LIB3148-040-Q1-K1-C12
gacctgtaggattttcacatgttgaagtgttcagccctccttcagctaatgatatgcatgctggatatcctcgttttctgtcaaagcactctcacttcatgccacatacaacacaaaattatcctagccgtttggggcagcaaactgctcagcggttcaatcctggtagatccactggtgctcggggaggcgaatggaatcacatgaaagtgcagctccctcctagctttaattctttgggcccacgttctcctggaaatagtacattcagtagtggcatgccgtgggggcgtagggccaaccatcctgtctcaaatattccatcaggttctcgtggaaaaaaggactatggaaggattgcctaatgtctgaaatcaacttgcgtgngattatgta

SEQ ID NO: 30604 - DNA, 423 bp, Gossypium hirsutum
  Clone ID: LIB3148-040-Q1-K1-C2
aaagttttaactgcaccatgcggaacctccattttgtacccgaaaactgggggcaatctgcattgttttacggcagtcaccccttgtgccgtgcttgatgtacttgctcctccttacagagaagatctaggtcggaaatgcacttactatgtcgactatccgtattctgcctttggaaatggagctcagataagcaacggaaaggaagaggagtatgcatggcttgcagagatagaaacaccagacgacctatatatgcgttcgggtgtgtatgttggcccatctattcgggtttagggtttggtatatataaatatcatgttggctgctcagttctttggcctgaatctagggaaagctttgagaagataagtcatggcctcaatcacatgcaaatctgaaatatgctctttcaatgagctt

SEQ ID NO: 30605 - DNA, 420 bp, Gossypium hirsutum
  Clone ID: LIB3148-040-Q1-K1-C3
cccacgcgtccgtgcaaaaatgctcagtgaaaaatactctgaatataatgttcccaccaagttcaaagatgtggatgagaacctgaagagtgtggagttctcctcaaagaagctcttggacttgggatttgagtttaaatatagcttggaagacatgttcgtaggagctgtcgagacatgccgagaaaagggactgcttcctctttctaatgagaagaagatcaaaaacatagactgaaaaatatgaactttcaacaattgagtgcctacccatgtcttccatttctagtagtgaaaacaataaagatttaaatctattatctgtttcctggtattgtacaatttttaattgcaaacattggtaatgtaatttggagtctattctgggaactttgtgatttatctaatattttcagcatt

SEQ ID NO: 30606 - DNA, 198 bp, Gossypium hirsutum
  Clone ID: LIB3148-040-Q1-K1-C4
aatgaatttaacatacaacaatggtattaggattccatgtgagtaagtctttataatacgctcgaaatttatatcgaggttagtttgtgcggccaacagaatagaaatccttttttttttttttgtatctatactggatagctaaaccctgatgtagaaaatcaagtgatgtttcaataaagtactgccatttttgtg

SEQ ID NO: 30607 - DNA, 308 bp, Gossypium hirsutum
  unsure (1)..(308): unsure at all n locations; Clone ID: LIB3148-040-Q1-K1-C5
cggggcggaccaacccgtccggccgcgactggcaacttaagccgttccaccaaaaagtttaccggtattaaaccatgagaagcaggtgtgtcaaatgtcagccaattttagtttctagcagagaagcagttgaaaaaaatgctctttttaacctttaggttgtagagaagaagcatgtaatatttgctatctagttatttcaacacctttagagcttgaccctaagtaattttaaaccagttcaactaatctctaagaggttttaccattgattctgtaaatctatgatcaaatgagnttgaaattag

SEQ ID NO: 30608 - DNA, 167 bp, Gossypium hirsutum
  Clone ID: LIB3148-040-Q1-K1-C7
cccacgcgtccgtccaaacgccgcttagctttttaaattcctcactaccttatgtacttgggttgcttaattgtaatatccatgtcagtataccggtgacatgaaaacatcttgcaagatgatattatggctaattagtactgaaactaaaagtttctggctgctgc

SEQ ID NO: 30609 - DNA, 360 bp, Gossypium hirsutum
  unsure (1)..(360): unsure at all n locations; Clone ID: LIB3148-040-Q1-K1-C8
cccacgcgtccgcccacgcgtccgcccacgcgtccgccagttcagtggttcgaccatttgcacagacgggcaatgcaagttgtcgaagaagggatgatatcccaagatcattatactgttgcatggcaggcctttaaagaatctctgaataaagttcgacttgttgcagataagcatgtatagttaaaacaaagaacatgtagataaatttctctgtagcatttataattatctcttgcgtccatatttgtacacagtcgagtttttccagcatagttcttgaatttggaataagtgttacatagctaattttaatgtcaaaatttgtttttagtccttgtattatggctnnnnnnaaaa

SEQ ID NO: 30610 - DNA, 205 bp, Gossypium hirsutum
  Clone ID: LIB3148-040-Q1-K1-C9
ttattaaataaattgcttcccaggcattgcctggtgatatagcatggggtgtgtttctatgctagtacttttttgtcttttatcaagtcaattgctatgccagcaaacctgaacttgttactgccatttgtacggcagaatgtggagcttctccatttttttattattatattacatgaaataatatgcggcctctattatacct

SEQ ID NO: 30611 - DNA, 395 bp, Gossypium hirsutum
  Clone ID: LIB3148-040-Q1-K1-D11
cccacgcgtccgcccacgcgtccggccaaatggagttaatcatgagaaaaaaggaaacaagcgacaacttgctgaagaaaggtagcagagattatcaaggaggatttatggcccaatcctctcacttatttcaacaatgaggccgatgaggaggattttgatggagatgaaggtgatgaagagggtaaagatgatgatgatgactctgatgatgatcaagacgacgatgatgatgaggacgacgacgacgacgaggactaaatcacttaacagccttaaatcatggtagtatgttctcttgctcaagtaagaactggtgtaaagctgtctcctagtcatagctacgtaaggttatagagaagatagccatctttaaaatagctttctatgtttat

SEQ ID NO: 30612 - DNA, 306 bp, Gossypium hirsutum
  Clone ID: LIB3148-040-Q1-K1-D12
atatgaacagaagttgaaaaagggaaacgatggcagccaacagctactattttataactgttaaatgtgtatgctatgttttgttctgctcactggaattcaggtttatgtttgtttgatggagtttgagtgtgcagtctgaggcgtttttgtacaaaatttctaaataaatgcgagctgtcgaaggcgtttttgtataaatttctgtctaaataaattgaagaaactgataagtccattttaagaaacccaagcttgttcaaaatgttgagtattcaaacggtgtatatgaaatttaggattgac

SEQ ID NO: 30613 - DNA, 418 bp, Gossypium hirsutum
  Clone ID: LIB3148-040-Q1-K1-D2
cccacgcgtccgaaatcctgatattttcgttcatagcattgttaatgggtcctacaacgcccctttttttgtgacacggttccgggaggcactcttccatttctctgcactatttgacatgtccgagacaaatatctctcaagaagataacttgaggtccatgctcgagcaaaagttttacgggcaagaaataatgaatattgtagcatgcgaaggcacagaaagagtagaaagaccggaggcatacaaacaatggcaggttcgtagtgtgagggctggatttacacagcttccattagaccctgaactcatgaagaaagttagaggaaaagtgaaggagtgctaccacagtgattttatggtggacgtggatgggcggtggatgttgcaaggatggaagggtcggattatctacgcg

SEQ ID NO: 30614 - DNA, 425 bp, Gossypium hirsutum
  unsure (1)..(425): unsure at all n locations; Clone ID: LIB3148-040-Q1-K1-D3
ggccaccccccccttccctgaatcctttgtcctcctnaaaaaaaaaattattattttttaaaaaaaaaaaaaaaaaaagggaatatgtttntatttaaaaaaaaataataatttttttaatttttttattantttttttttatttatttttttattaatttttttaaataaaaaaaggcccccccctttaaagatcccaactttccttccccttccttccaccgttttttttttttttttttcccccctaatttcatttccctccccccctttttcccccctcttccctgtaaaaccccttcctttccccaacttattcccttttcaccccttccccttttcccccctttccttattaccaaaaagccccccccctttcccctttcccaacattttcccacccttatttcctatttgcccccccc

SEQ ID NO: 30615 - DNA, 409 bp, Gossypium hirsutum
  Clone ID: LIB3148-040-Q1-K1-D4
ctttgtgaagatctaagattggtcccttgtgtgttttttttttttgcaataatgtgcagcatggagaagagtatatacttatatatatatagagagagagagagtactcctcttgttcttctcttttcattttgagcagcatttgcagcacccctaccggcatcaacttcgcttgtaattttcgtaagctttttcttcaatggcctttattagcctatagctttagtctgagttgtacaccaccaatccttaatgagttcaagatccatggtatatggacacataattctaagaacaaaccaatgctctcttatgatccaaacaatccttgcacctatcaacggtgtatggattacttgaatcataacgagacattgtattgtcattagcattatgagcccacaatctg

SEQ ID NO: 30616 - DNA, 281 bp, Gossypium hirsutum
  unsure (1)..(281): unsure at all n locations; Clone ID: LIB3148-040-Q1-K1-D5
cggacccttggccggacccttggccggacccttgggcaaaaaatgaataatccagtgtgatacttgggtttgattgttgaggaattgattgtgtatatcaagttgaaactggcaaaaccattagcattgtattcgaagggataaagtgtgatgtacatttattagtgtacgaattgatggagatggaaagtctcatttatatgatttttaaagtgaaattaataataccgaatttgtactttcatcttatctgctatattgntatttttacctgctttttt

SEQ ID NO: 30617 - DNA, 437 bp, Gossypium hirsutum
  unsure (1)..(437): unsure at all n locations; Clone ID: LIB3148-040-Q1-K1-D6
ccaccgtccgctgggaacacgttaaaatggaaggaccttttcattacaacatccanaaggaatccgggttgcggctggtttttcgcctcctcggtcgctcctaagtataatgcctaattatttttttatttattttatatttttttttatttatgctctatgaggatgatttttattgaatctttntctattttttcttttttctattattttttttttttttattatttttctaaactactactttttttttttttttttattatttctcaatcttataatattcttttttttattaaatttttataatttttctttttttactttttttctattttttctcttacttttcacttttttaatttttttcttcattttttttttaattatttttttttacttattacttttttctatttttttaaaatatttttttt

SEQ ID NO: 30618 - DNA, 96 bp, Gossypium hirsutum
  Clone ID: LIB3148-040-Q1-K1-D7
ggacaatgcagttgtagttaaaaactcctttgaaatagacttagataagaagctttaaggagttgaatagcccttgctttgggttcttttcagcat

SEQ ID NO: 30619 - DNA, 412 bp, Gossypium hirsutum
  Clone ID: LIB3148-040-Q1-K1-D8
cccacgcgtccgtaaaagggaagccatgcttcaatccctttggaaggtcaatgtggttgatattgaaacaactttgtctcgtgtctgcttagccgtacttcaagaccctgatgcatccaaggatgttctgattttacgagccaaagcattgaaaaaacttggatccatttttcaaggagtgaaagttcgttatagtagagaagacagccttcgccatgagattgattgttgatgtctttttcatagagatggaggttcacatggtgcctgacggcctctgaaggaagagacaggttgaaatgttggttggagaacaagttgagcagagtaacagtaggtacatcaccgaactaatgttgatcataaggccttagctatcattgtcatgagtgactctcgacatgtgcacatg

SEQ ID NO: 30620 - DNA, 63 bp, Gossypium hirsutum
  Clone ID: LIB3148-040-Q1-K1-D9
cccacgcgtccgaaaaaaaaaaaaaaaaatttaaaaaaaaaaaaaaaaaaaaagggaaaaggg

SEQ ID NO: 30621 - DNA, 64 bp, Gossypium hirsutum
  Clone ID: LIB3148-040-Q1-K1-E12
gatgatgatgatgatgatgtgatgattagtttttaatgatgattagtgttgttgggttgtgttc

SEQ ID NO: 30622 - DNA, 439 bp, Gossypium hirsutum
  unsure (1)..(439): unsure at all n locations; Clone ID: LIB3148-040-Q1-K1-E2
ggccacccaacccgtccgaatgtaacctcgtgtagccaagtaattcaaggaggttttccaaactgtaatcttaattttggaggggggatttaatagccatagttttttatagaaactacttagtcagtttttaaagcataaacactaggatcttccgacctttgtaatagtttataggcactacggacaaagtattctctcgagagttcaccattccaagccagaaaatcatcacgaggtgctttcgcaagaggaatatgcaaaatcttctctgctacttcattcaaaaaggtattgacaatgttctctattttccagcttctgttattaacatcaataagctcagcaactttaaaatccctttnnnntaataatatatnattttatttattatttatttatttttttttttttttttttttttaattttttctttttt

SEQ ID NO: 30623 - DNA, 387 bp, Gossypium hirsutum
  Clone ID: LIB3148-040-Q1-K1-E4
cccacgcgtccgaaattctcaaattaggttgggtatattgcagcttgtgcatgtagttcaaagtgagaaaactagggttgtttactgtaaaaataaaaatcagggcaaattttgttaatggtagttaaaaattccactagaaaacaagctatgttaggcatgaatcttagatatggtaggtaacaatggtgctttcttaggataattttacttttaaacgccttgatgaaaaaattttacgaacagttttttggttagagcattttgctcagtgtcaaactcatccctttcatgtttagagcatcttgatgatgtaaaaatgctactaatgtatcatctgctatggtggcatatgaatgtatcgtgcactgcatgatttttgtgata

SEQ ID NO: 30624 - DNA, 266 bp, Gossypium hirsutum
  Clone ID: LIB3148-040-Q1-K1-E5
agcatctttgaacttgtcaaaaaaaaaaatttaaatttttataaaaaaaaaaaaaaaaataggtttagtggaatataaaaaaataaataaaaaaaataaaaatcaaaacaaatttaaataaataaaattattaaaatttaaataaaaaacaattttttctattcgtgtatttttaaatatggtccgtaccggtcggccctttttaaagataatttttttttttccccttctttgtaaaaaaattttttttttttttttccccctaa

SEQ ID NO: 30625 - DNA, 79 bp, Gossypium hirsutum
  Clone ID: LIB3148-040-Q1-K1-E6
gaatttcttaatgttgaaaaaatatgctaagtaagtctcttttttagaggaactgaatcaaattagtgaatttactatt

SEQ ID NO: 30626 - DNA, 414 bp, Gossypium hirsutum
  Clone ID: LIB3148-040-Q1-K1-E7
cccgcccctaaaaaatctcactcatataatttaaattcgaagaatctgctacaccaaaggtaaatcacaaaacccatttctcttccttacatcttttctttccttttcaacaattgcatcttttgctttcgatcccaaattctgggtttcctcttctgtccatcagtcaattcatactagttactcgaattcgttaattttaagtcgaagaaaaatgggaggtggtagggaaggcgaatcaagtgacaaagggctgttttctcatcttgctggctatgccgccggacattatcctccgcctggatcctaccctccacaaggatatcctcctcaaggatatcccccacaaggatacccaccggctggatatcctccaccagcgggatatcctccacatggcggatacccacctgc

SEQ ID NO: 30627 - DNA, 413 bp, Gossypium hirsutum
  Clone ID: LIB3148-040-Q1-K1-E8
cccacgcgtccgattttctagagagatagcgagagtttcttcttcttcttcttcttcttcgtcgctcctgtagaaagtttatttgctcttcaacaataaaaaaaataaaaaaagctttcctacagcagcgctcaagtttttatcaatccagagtttgaatttgaattgaacaaatcaatattaagataagagaaatggctcgctctctctccaacgctaagcttttctctacttttgttgtcgatggaatctctaacgttatctccagacgaggatatgcggcggcatcacaaggaattgtgtcgagtggaataagaggaggagcgggaaggagcgctgctacggtggccaagaaaacaggggaagagatgtctcgcggagctaaagagaaggtttcgtgggttcccgaccct

SEQ ID NO: 30628 - DNA, 410 bp, Gossypium hirsutum
  Clone ID: LIB3148-040-Q1-K1-E9
cccacgcgtccgagaggtatgttatctacaatctcccgagaaactacctgaaagctcttcggatggtctgttactggtggcccctttattataaggttcttagtttgattttgctttgtatgcaaaatgcattatctcggatccgtttagcttaattctgtaaaatcaacattgactctaccttcctgcgtgatcgttatttgcttgctcttttctagtgctgttttttctgacactatgtagtttccttttccttggaatatagcttataggttcacccgatgattcaagtcttggtttccttcgaagcgagaacgctagaagatatgttagacagcttccgcaatatccaaagcaaaatttctctactagatttcctaacagctcgtctggtgcttgtgatttgctcg

SEQ ID NO: 30629 - DNA, 75 bp, Gossypium hirsutum
  Clone ID: LIB3148-040-Q1-K1-F10
cccacgcgtccgcgaagactttcgagaacaaacaaaactaaaaaaaaaaaaaaattaggaataccaacttctact

SEQ ID NO: 30630 - DNA, 205 bp, Gossypium hirsutum
  Clone ID: LIB3148-040-Q1-K1-F11
tgttgatacagctacagcaaactgcaaggttaaggaacatattgaagtctgaatcctttgctgagttttcaaatattgagttcatatatactttgcaccattttgtagatcaaatcatcctttcttttatataagaattatgcatcaattgaaaggaacaaatggcttttagagattgatagatgccctcttgtctttttgactg

SEQ ID NO: 30631 - DNA, 410 bp, Gossypium hirsutum
  Clone ID: LIB3148-040-Q1-K1-F12
cccacgcgtccggtcgccaaccaactgctttaaaatattaaaagctatcatcacaaatatgatacatacggctcccagatctgctcttacctctcaattccagtataaaaggtaagggtttctaaaatatcaacgagaaaaaaaaccgtgaatactgtgatggcctctgagagggaagtttttggtctttcgggtccattacacctaaccaatatagattggaataatgcacatcatcgaaggtcagtagcagccagtttggttgagggtgtgtatatcttggagcgagaccgtcaggaaaaacgtgaaggttctcaagcattggctcctccctggtgggagttctttcattttaagttggttcgtaagctgattgatgatgttgatttttgcatctttggtgctattta

SEQ ID NO: 30632 - DNA, 201 bp, Gossypium hirsutum
  Clone ID: LIB3148-040-Q1-K1-F2
cccacgcgtccgaaaaaaaaaaaaaaaaatttaaaaatttaaaaaaaaaaaaaaaaaaaaaggagaaagttggataattaaaaaaaaaaattaaaaaactcatatatgctgtaattttaatttattttattttacttacaatttcaatcaactggcactgcttttaaaaaatctcaccttaattaaaccatttccctccca

SEQ ID NO: 30633 - DNA, 333 bp, Gossypium hirsutum
  Clone ID: LIB3148-040-Q1-K1-F3
ccaacccgtccggccagcttcggtaaaaaaacactacacgagtggttttgaactgcaaaaggagatcgatttcaaagccttttcaccatgagagctaagtggaagaagaagcgtatgaggaggttgaagaggaagagaagaaagatgaggcaaagatctaagtagtctaattttatcttaaagctagcaattcggtctatgtttctttagattttctggtgtttgatggatactttactttaaaaggatttaagttatctttatcgaaaccttttgaatattctggaaacatgttattgtgttttctattaaaagcttatggctttggatgtt

SEQ ID NO: 30634 - DNA, 400 bp, Gossypium hirsutum
  Clone ID: LIB3148-040-Q1-K1-F4
gctattcgtaaggcatgtccctaattggagccaaattatcagcctcctgttacatttgttgtggtgcaaaaaaggcatcatacaaggttgtttgctaacaatcataatgatcgccgttctgtagacaggagtgggaatattttgcctggcactgtggtggactccaaaatttgtcacccaacggagtttgacttctacttatgcagccatgctgggattcagggtacaagccgtccagctcattaccatgtgctatgggatgagaacaagtttacagctgatgcattacagtcccttacaaataacctttgctatacatatgcaaggtgcacacgatcagtgtcgattgttccccctgcgtactacgcacatcttgctgcattccgagctcgcttttata

SEQ ID NO: 30635 - DNA, 399 bp, Gossypium hirsutum
  Clone ID: LIB3148-040-Q1-K1-F5
gttggatgtcaacttgggaaacggcctttgttggcagccaccgaccttctagctgctggctttactgcagttactgacattgccggagggtacgcggcgtggactcagaatgggcttccaacggaatgatgatgatgatgttggaggcagggaataaagttggtgatacaataataaagcatggaagacagagaactagaaagatctcaagtgtaaagaaaaaaaaatgtcgcatattagtgtagttggcagccacagaatgaccaggaagtatgtgaatgtgaatgtgactgtttcgttgttgttctgtatggaaaaggaagcaaagaaacatacaaataatagatgaatggaaccagtgaattttgtacataaaaatctcttctttgctatcgagac

SEQ ID NO: 30636 - DNA, 419 bp, Gossypium hirsutum
  Clone ID: LIB3148-040-Q1-K1-F6
cggaagagggtggaagaagctcaaagaaggtaagcactggaacagcaccaaagggaggaggaacggtatcgagaactagaggagcttcaaagacaaaaggaagaggcaatgaaaaggaagaagcaacaggaggaggaagaacgtttaaaccagatgatattactgggaaagaacaaactgcgaccgaagttgtctttcgcactcggttcaaaatgatagaatccgaaaagttgttactctacgttgtaatagttgtgttgtctgtccagttttgaagttgaattctattacggcttgctcagggttcagactcgaacgctggggatagattcgctaagagtgaagctcttgactggttaagttagggctagtttagtattggtgcccaaaaaaaagttttaggttgaaatatattttga

SEQ ID NO: 30637 - DNA, 422 bp, Gossypium hirsutum
  Clone ID: LIB3148-040-Q1-K1-F7
cttaatattcttccctataatatatattttttatggtaaaaaaaaaaaaaaaagtaaaagagaaaaaaaaaaaaaaaaaaaaaaaaaaaaaaaaaaaaaaaaaaaaaaaaaaaaaaaaaaaaaaaaaaaaaaaaaaaaaaaaaaaaaaaaaaaaaaaaaaaaaaaaaaaaaggggggggccgtttaaaaggaacaaagttaacgaacgggggaaggaaaggaaaaaatttttaaaaggggcaaccaaaataaaatcaaggggccggggttaaaaaacggggggacgggaaaaacctgggggtaacaaaataaaatggcttggaaaaaaaaccccttttggcaaggggggaaaaaaaaaaaaaggcccgaacaaatggcctttcaaaaaatttgccaaacttaaaggcgaaagggaacccccc

SEQ ID NO: 30638 - DNA, 388 bp, Gossypium hirsutum
  Clone ID: LIB3148-040-Q1-K1-F8
cccacgcgtccggccaattctatttacaatggcaaggctggatcgtgttaagaatttaagtggacttgttgaatggtacgggaagaatgctaagttgcgtgaattggttaaccttgtagttgtcggtggagatcggagaaaagagtccaaggatttggaagagaaggctgagatgaagaagatgttcgagctcattgagaagtacaagctgaacggtcagttcagatggatatcatcccaaatgaacagagttaggaacggtgaactttaccgttacatttgtgacacaaagggtgccttcgtacaacccgcattatatgaagcctttgggttgactgtcgttgaagccatgacttgtggtttgccgacattcgcaacttgcaatggt

SEQ ID NO: 30639 - DNA, 413 bp, Gossypium hirsutum
  unsure (1)..(413): unsure at all n locations; Clone ID: LIB3148-040-Q1-K1-F9
gggccgaccgacgcggccgcccaggcctccngccaatactatttacatctgcaaggcncnatcntgcaaaggaggtgaattgcgactttttcaatggaccatcaaaacttctaaatttcataaattttttaaccttttatatattaatagaaatctgataaaacaatccacgaattttcaagataatacttaaattaaaaaaatgttccaactcatttataaatacaacctcaactgatagatcatatacatatcatcctatataaacattatttataacaaccaactaaacccgctacataacataacacaaattttttcctttatacaacccttattatattaatccttttaattaactttctttaaagccattacttattgtttacctacattatcaacttgcaattttt

SEQ ID NO: 30640 - DNA, 293 bp, Gossypium hirsutum
  unsure (1)..(293): unsure at all n locations; Clone ID: LIB3148-040-Q1-K1-G1
ccaacccgtccgaaaaagtgcaatgggcccagcagtaaaaaatgttggcgttcaatgtttggcccctcttattttatagcagcagccaccttagatcactacatatccggaacttgtatgcggttttgtctgcaaccagcacattaaattggtgttttgtctctttattttttatttttgcgttcatctcagcatgttgtggtattttacctcgacatttcaaggatctatctactatgttcagatgctatatttgatttttnaaaaaaaaaaannnnnnnnnaannnnnnna

SEQ ID NO: 30641 - DNA, 404 bp, Gossypium hirsutum
  Clone ID: LIB3148-040-Q1-K1-G10
cagagtggttcctgcgcaggagaagttcatcaagtttttagaagacagtcgatatgtgcgtgtgaagttggcaccatctggattcgttcttctcagagacctgtgccctaatgaaccggaggtgctctctctaacagatgcacccacatccacggcatccccggctggtggatcaacagcagctgcaggacaacagagttcatcagccatggccgttgatgatgaacctcagccgcctcagccattcgagtactcatcctgattttacccaatcctgaaactgaaacagggccaagaatacttttatacttgagcagtgccttttgacattacagctgttcaacctagagtgaaactagaactgatgctcgattcctatcctcaacttagggagattctgagtt

SEQ ID NO: 30642 - DNA, 122 bp, Gossypium hirsutum
  Clone ID: LIB3148-040-Q1-K1-G11
cccacgcgtccgcacatcgtactatcaccaaccattgcttccctgttgtgaattgtattaccacacgctatagccgtacaacatagtgtttcccttaataggagactttagaatatttattg

SEQ ID NO: 30643 - DNA, 151 bp, Gossypium hirsutum
  unsure (1)..(151): unsure at all n locations; Clone ID: LIB3148-040-Q1-K1-G12
cccacgcgtccgcacatcgtactatcaccatccattgcttacaagtccacagggccttatcgatttatgtgaggacnacaacatactgtctccctaaataggagactttaaaatatccattggaacaaaaaataaaaaatgcaactaaaat

SEQ ID NO: 30644 - DNA, 277 bp, Gossypium hirsutum
  Clone ID: LIB3148-040-Q1-K1-G2
tccggctaactttgcctgccatcaaaatcaaaactgttatgtgttggaagccgattccctatgggtgcacagtagatattggagcgtttcagattcagaagaattatctgtagccactgccaccatatgattttaccttgtgtcgctttagctagcaagctcaattatatctgtcaaggtgtttttattcattgcaaaacttacaagttttactttcagcaaaagtaaggtatttgaaatataatgctaaaacttgaataaccattaaccaagcaag

SEQ ID NO: 30645 - DNA, 167 bp, Gossypium hirsutum
  unsure (1)..(167): unsure at all n locations; Clone ID: LIB3148-040-Q1-K1-G3
gactttttctcttattcgacttgtatcaaatttgtggttttgactataataattagtacttatgtctaagattcgaacacatctagacatggttatacagatatgaccttcaaatgtatgaaactcttattttcttgaaaaacttgaacaaaccgtgttagattnaa

SEQ ID NO: 30646 - DNA, 247 bp, Gossypium hirsutum
  unsure (1)..(247): unsure at all n locations; Clone ID: LIB3148-040-Q1-K1-G4
ctttgttaaattacttcttgaattacatcatgattgtatgattcatgaaaaaaaaaaaaagaaaaagggaaaaaaaaaaaaaaaaaaaaaaaaaaaaaaaaaaaaaaaaaaaaaaaaaaaaaaaaaaaaaaaaaaaaaaaagaaagaaaacaaaaatgatnttttttaaaaaaataaaaaaaaaaaaaaaaaaaaaaattaattgaaaaataacataaaaactggggggctgcgttataatacacaa

SEQ ID NO: 30647 - DNA, 416 bp, Gossypium hirsutum
  Clone ID: LIB3148-040-Q1-K1-G5
gctcgaataccaccttctcacactagtgtgtcatttgttgatacttgctcttgcagtactgttcttgtggtcaaatgctgctaccttcattaacaagtctccaccacgcatccctgaagttcaaattcctaaggacccagttatggagtttgctcaggcacttcggtttgagatcaaccgggcttttgctgtcctacgggatattgcatcaggaagagaactcaagaagttcctatctgtgatcgccggcttatgggtcttgtctattgtcggaagttggtgcaacttcttaacactgttttacatagtcttcgtacttcttcacacggtacccgtgctatacgagaaatacgaggacaaggtggacccatttgctgagaaagcaatgcatgagattaagaagcagtatgcagtgt

SEQ ID NO: 30648 - DNA, 283 bp, Gossypium hirsutum
  Clone ID: LIB3148-040-Q1-K1-G6
ggaaccctctgacacaaacctcgccaagattgcgagatttacaaggatgggcagtttcaagggaacttgtccctcgagttgtggcaaggacttgattgatcgttgtttagcatcgtggttgactgccgaagaacggcagaacgatgaattcgaggccattaggttgaagctttcccatgctacgatcaaccttagtggagttcaagttcctatagagaccaaatagtacttgattgtgggaatcactggctcatgggtttacacttttggactgggaaaaccc

SEQ ID NO: 30649 - DNA, 116 bp, Gossypium hirsutum
  Clone ID: LIB3148-040-Q1-K1-G7
atttctctttccctagggatttaatgtcaatgaacattattgtattgagttgtcactttctttttaggggtttggcttttgggaacttactaatttaatatattaattcatacttc

SEQ ID NO: 30650 - DNA, 391 bp, Gossypium hirsutum
  Clone ID: LIB3148-040-Q1-K1-G9
cccacgcgtccgagcagagacacatggcttcttttcttgctgctattgagaaaggcatcagcaagaagcttagggagaaagatatggaactagagactatgaataacaagaatagagaactggttgagagaataaagcaggtgactgcagaagcacataattggcattatagagcaaaatacaacgagtcagttgttaatgtgttgaagagcaaccttcagcaagtaatctcacaaggtgctcaacacgggaaagaaggttttggagatagtgaagttgatgatgcgacctcctatattgatccgaacaactttctcagtattcatcttggggctgcaaaatgtgtttccaagggcatgaaggaacacattatttgcagagcatgcaacgc

SEQ ID NO: 30651 - DNA, 296 bp, Gossypium hirsutum
  unsure (1)..(296): unsure at all n locations; Clone ID: LIB3148-040-Q1-K1-H1
tttcccctattnatttaaaaaaaaaaaaaaaaaaaaaaggaaaaagaaaaaataaaaaaaaaaaaaaaaaaaaaaaaagaaannataagtaaaaaatttttgaaaaaaaaaaaaaaaaaataaaaagggggtattttaaataaatttatttttttttttttttaaaaaaaaaccaaataaaatttttattttttttaaaaaaaaaaatatttgtgtaaaataattccggtgcccccccctctttaaaaaaccaccaattttttcccccccttttcccaccctaataattttttttt

SEQ ID NO: 30652 - DNA, 57 bp, Gossypium hirsutum
  Clone ID: LIB3148-040-Q1-K1-H10
tttccctttaaatcatgtttggaacacttatataaagggtctttccttgttatattt

SEQ ID NO: 30653 - DNA, 371 bp, Gossypium hirsutum
  Clone ID: LIB3148-040-Q1-K1-H11
acgagctgatggagggccaactgttaaggtagctgccacgttttacaccgccggtgacactgaggtcactcccgacttaatggcccagatcaaggaagcttccgagaagcgagcccttgttatgaaggctattgaaagttacatcttggcaaatcccgatgcctaaaactgtgctttcatggcgttaatggtgtgtggtttggttatttcatatgttgtgttactcaaaagcagtgtttgattgggtaataagtgatttgtctctctagatttgatcatctctatttctattgtaataaaagtctttggagttgttattatgtttgatatatgagagtgaagaatatacttgcaggtttaaaaaaaaaaaa

SEQ ID NO: 30654 - DNA, 348 bp, Gossypium hirsutum
  Clone ID: LIB3148-040-Q1-K1-H12
cgtacccaagcccaacgacaccccaaaacctgttccaggaatgagcggagccgttgaagtgccccgaccggagagtgttacggtgtttgaattcgggtccgtagctgctactgcagataaggttactttagccggatattgccctgtgtctgacgacctcgagccatgccgctgggaaattctgcctgccaatggatccgatgctcctcagtttcgcgtcgtcttttgacaacgaaaaaaagtggattgtaagtgggtaaaaacaaaattggtttcaaggaagttgagcgagactctttgctgagattattgtaattttagttaatgtgaaacgcgttattcttattg

SEQ ID NO: 30655 - DNA, 415 bp, Gossypium hirsutum
  Clone ID: LIB3148-040-Q1-K1-H4
cccacgcgtccgcggcgacgtgggcggttcgctgcccgctacgtcgcgagaagtccactgaaccttatgatttaatggaaggagatattgacatgctgagttctgatcattcaccaacagtcccggaacttaaactcctgaatgatggtaactttttgaaggcttggggcggtatatcatctatacagtttgttcttcctgtgacatggtcatacggacagaaatatggaataactttggaacagttagtttcatggtggagcgagaggcctgcgaagcttgctggacaacattcaaagggagccatagcaatcggaaaccacgcagatgtcgttgtctgggaacctgaagtggagtttgacctcaatgaagatcatcctatgtttgttaaaaatccgagtatatctgcctacat

SEQ ID NO: 30656 - DNA, 326 bp, Gossypium hirsutum
  Clone ID: LIB3148-040-Q1-K1-H5
aaaacatgtccagaggcggattttaaggttgtttcaaatgcggggcattcagccgacgaacggggaatagctgctgaacttgtggctgcaaacgagaagctgaaaagccttgccaagaagaacaaaccttgaaattcgaaagctaagtctacatgttgatttgcctcataaacacaagcagtttgataatcaattgaagagaatttggtttaaacttagaatgttgaatccatgtgcttatataggtatacatatgcatatattgagaaaaatgcaagccatgagagaaataaacctggaaataaaaaacaaaatcaccttttcac

SEQ ID NO: 30657 - DNA, 262 bp, Gossypium hirsutum
  unsure (1)..(262): unsure at all n locations; Clone ID: LIB3148-040-Q1-K1-H6
cggggnggaccaacccgtccgagaggacgttgttccaaaacccaacgacaccctaaaacctgttccaggaatgagcggagccgttgaactgccctgaccggagagtgttacagcatttctattccaaaaccagactcctactggctacatgagaaattttcacacatatcttactgtgattaccatgtcataagggttttggctacaagaagcaaggcacagatcaatgcaactttgaatcactacaaaaattaatatggaa

SEQ ID NO: 30658 - DNA, 403 bp, Gossypium hirsutum
  Clone ID: LIB3148-040-Q1-K1-H7
ctttcatttgcccgcactagcagcagcagcgccacactcttcacagtgctgatcaaccatggcggagcagaccgagaaggcatttctaaagcaacccaaagtgtttttaagctccaagaaatctgggaaagggaagagaccaggaaagggaggaaaccgcttctggaagagcattggtttgggcttcaaaacccctcgtgaagctactgaaggaacctacatcgacaagaaatgcccattcaccggcactgtttccatcaggggtcgcattttagccggtacttgccatagtgccaagatgataaggacaatcattgttcgacggaattacctacattatatcaagaaataccaaaggtacgagaagagacattcaaatatccctgcacatatttctccatgc

SEQ ID NO: 30659 - DNA, 411 bp, Gossypium hirsutum
  Clone ID: LIB3148-040-Q1-K1-H8
cagtattgcaaaggtggttggaactgcaatcacagtgggcggtgcaatggtgatgacatgggataaaggccccattattgacttcgtcaagtcaggaggagccacacaccatagcactaacactgaatctgcagatcaacactgggtttctgggaccattatgcttcttggaagtatcgctggctggtcaagcttctttattttgctatcctgcacatcgaagaagtacccagcacatctgccttttatagtttcaatatgggtcacattttcgcctctttttgccatactgcctttttgattatgactatcatttgtttacttaattacttactttatttcaagaaaatttaaattttcgagattagtcatttaaatatctcttttcatatttttttcttcttctctttt

SEQ ID NO: 30660 - DNA, 376 bp, Gossypium hirsutum
  Clone ID: LIB3148-040-Q1-K1-H9
cccacgcgtccggtttgacaagttgggtatgatcatgggatcaacgtgatgttcttacagcgagcagcggtggttggagctgtggcaaccgttgctgtggcttatagctactatagaaggtcaggctgaattaaggacatgtaatccaatttcgtactgtttgctcaagggttgtacacccctgttttttggttgcggaggcaatggtgacaataaaataatcctccaaacgacaaacttcattaggggatggatacaaatagtcatattacttttattttgatatctacttgcattgagatgtttcagtagatgcaattagacatttggaatgcttcagctcgataccgaaattatgagtagaaaaatgcttgct

SEQ ID NO: 30661 - DNA, 203 bp, Gossypium hirsutum
  Clone ID: LIB3148-041-Q1-K1-A1
cccacgcgtccgcaagtttttctcaggacagtctaatttgcttaatttgatcttttaatccattgcttagtgtaataaaatggcacttcttgttgttctttcctcttttagctttgggtttggttttgttttgttattgtttgtaaagttattgtcgccaatcgttgctatcgtggaaatgaatgaggtggtttttttttatt

SEQ ID NO: 30662 - DNA, 261 bp, Gossypium hirsutum
  Clone ID: LIB3148-041-Q1-K1-A10
aagaaatctagtaaagatatggatgctgccgcaaaagctgccggacaagaagcagctgcaaggagtgcaaggctagctgcagcaaagaagaaagagaagaaccattacaaccaacagccagtgcggtaaaaacaaatcccgttcttatatatatatatatttgagatatgaacatgtattttattgttgttcatatgacaatatgaaataaacagtgggctttggttcagtgaaaaaaaaataaaaaaaataaataataaa

SEQ ID NO: 30663 - DNA, 295 bp, Gossypium hirsutum
  Clone ID: LIB3148-041-Q1-K1-A11
accataccaatggtctcttcctgatttcaagagcccatcaactcgtcatggaaggatacaattggtgtcaggagaagaatgtggtgactgtcttcagcgccccaaactattgttaccgatgtgggaacatggctgcaattttagagattggggagaatatggaccagaattttcttcagtttgatccggcacctcggcaagttgaacctgacaccgcacgcaagactcctgattattttttataattcttttttaattcatataatatatactacatataatatatattcctgct

SEQ ID NO: 30664 - DNA, 295 bp, Gossypium hirsutum
  Clone ID: LIB3148-041-Q1-K1-A12
tcttgactggagagaatgtcggcctgttacagctgccaactgacaaagttctcctttccgaccctgttttccgtccattggtcgacaaatatgcggctgatgaggatgctttctttgctgattacactgaagctcacctgaagctctcggagctaggatttgctgatgcataagctgatgattgcataagaggaagaagccaacaacacaatcctacaaagacgttttaggttttgttttctctctaaagttggcttaaggaatgaatttgggtggttttatttggggagattca

SEQ ID NO: 30665 - DNA, 292 bp, Gossypium hirsutum
  Clone ID: LIB3148-041-Q1-K1-A2
agctggtgagtgaaaggtttaagttaaggatgaagaagctggaggagctgagtaagaacatagattccatacactgatcatataaggaaagagaagcccctttagctttggttttaactgattaggcttgtgtgtgatgtatttaaggtgactttgaatatttatatatgggtgtgttgtaatggtaatctttgtttgtttttggttagcattcgatgaatgttcaactgatttagaaaaagggaaataccctataaaaacaaaacaggtttgtaactaaaatgcatctctt

SEQ ID NO: 30666 - DNA, 220 bp, Gossypium hirsutum
  Clone ID: LIB3148-041-Q1-K1-A3
ctttttaagaacatacaccccatacactgatcatataacgaaagagaagcccctttagctttggctataactgatgaggcttgagtgtgatgtattgaaggggactttgaatatttatatatgggtgtggtgcagagggaaccttggcttgtcttcggatagcattcaaaagaaagtccaactgatttacaaaaagggaaattccctataaaaacaaaac

SEQ ID NO: 30667 - DNA, 256 bp, Gossypium hirsutum
  Clone ID: LIB3148-041-Q1-K1-A4
cccacgcgtccggttattttaagctgttaaataacattggggcggtttttcttggagaataatattctgttttgtaatttcaattggagaagctcttttgtatttcatcttgtcttttccttttccttttttcgccggcattgtttgaacatggggttgtgcgcccgtcaattccagttaaatatggtgacttttgtttttcaaaaaaaaaaataaaaaaaaaaattattatacaaaaatataaaaaaaaactaat

SEQ ID NO: 30668 - DNA, 286 bp, Gossypium hirsutum
  Clone ID: LIB3148-041-Q1-K1-A7
cataaatgtatttaggaagaggaagaagagcttaatgggtgatcattgtttcctcttttgtttttgtttttaattgaggaaggaatgttattgtaatatatatatatatataaagtgatttaggttgtgtagtgtttttattttgagaaaaaaaaaaataatttttaggataagttaaaaaggaaatatttgattggttttggttaacattcgatgaatgttcaactgatttagaaaaagggaaataccctataaaaacaaaacaggtttgtaactaaaatgcatc

SEQ ID NO: 30669 - DNA, 292 bp, Gossypium hirsutum
  Clone ID: LIB3148-041-Q1-K1-A8
ggaacacatggtatgtttaagcaaaactgaaacagtcgggagtaagcttcttgaaaaggaaggcattcagtggcgtgaagaaaaccgtggaactgtactaatcaagcttggcggatacagagagttcagctttttagaatccaatagtgacacggagtaaattaattatctaataccaggtttgcatcatttaccatctgtttgtacaagacaaggatgtaatgtaacaaggttaattagtggttcaaaaacagggatcagatgtttatatgtacattactagaaatccttg

SEQ ID NO: 30670 - DNA, 271 bp, Gossypium hirsutum
  Clone ID: LIB3148-041-Q1-K1-B1
cccacgcgtccggggttcttgaaggatgtttcacccgacgtcgacaagcttgtggaatatgcgttgaagcttggggccagggtcttgaaagctacggcagccaccaattgaaatcgaagtttggagtatgtgttactttcttcttttgtcattgagtgaaacttgggtgagaattgttattatcatttagaaaataaaatatttttatttttataaagaaaacaattttatgcttctaagtccttttatgaataaaatggtgagtttttac

SEQ ID NO: 30671 - DNA, 292 bp, Gossypium hirsutum
  Clone ID: LIB3148-041-Q1-K1-B10
attggaacctggttccctttcagccacccatgttgctgagatccgtaagaggaagggattgaaggagcagatgaccccgctctccgattacgaggacaagctgtaagctaagctacaaaataataattaattgaagaggttgggttacccattttatgcaatgctgctagttagttccttctatattttgttgtccatggttcggactttttagatggtttttacaatggacacaattgttatgtttttttgtattcaaatagacaattggctttgttaatgtttttgacct

SEQ ID NO: 30672 - DNA, 63 bp, Gossypium hirsutum
  unsure (1)..(63): unsure at all n locations; Clone ID: LIB3148-041-Q1-K1-B11
cattgtntttaaaataaaaaaagggaaaaaaaaaaaaaaaaaataaaaaaacaaaaaacaaaa

SEQ ID NO: 30673 - DNA, 323 bp, Gossypium hirsutum
  Clone ID: LIB3148-041-Q1-K1-B12
cccacgcgtccgcgagctcattcaaattttgggtcttacaatgggattctatgaaagtaactacgaatatttaaatttaatgttttaatttatgagaggggctaaaaaaaattcttgcttttagccatgctattattaattatatatttttttatttttttttaattaatttattttatatattttttttttacttataatttaattattttttttttttattatttttctcattttgtattatctattttttattttttcttatttattattgtttgttttttttatatatctttttgtttatttattttttattttttttt

SEQ ID NO: 30674 - DNA, 291 bp, Gossypium hirsutum
  Clone ID: LIB3148-041-Q1-K1-B2
cccacgcgtccgtgaaattgttgtctccaaggcactggtggcaaagattgaccgaccaatgggaatagtctgcttccaggtagcaaaggatagcaatgaaattctcaattcgtgggcttcgaacttggaaaaacttcttgatcttgtcgagaagagttgccaccaaatacacaaagaaaccatggttcacaaagctgctctgaaagtatgaaaacgatgaacattcaccaaactacaggttgtggccaagttgaaatgtgctttttggagacaagtggtctaatagatggt

SEQ ID NO: 30675 - DNA, 230 bp, Gossypium hirsutum
  Clone ID: LIB3148-041-Q1-K1-B3
acccttcctccaacccttccgaaattttgtccgaacccattgttgcaagccggtttttgttgcgtcaaagagtgtgtgactcgctctacaatttcaaaaccaatatccaagacaaggaatgcatccctccagatcaacaacaccttatcttcgccgggaagcatcttgaatacagccgcaccttatcccactacaatatccagaaggaatccactcttcacctcatcctc

SEQ ID NO: 30676 - DNA, 84 bp, Gossypium hirsutum
  unsure (1)..(84): unsure at all n locations; Clone ID: LIB3148-041-Q1-K1-B4
gcaaaaggaatgagtttttctaaanaagctattctttctggcggggcctttgatggatttgttttttataatgttttttttttt

SEQ ID NO: 30677 - DNA, 291 bp, Gossypium hirsutum
  Clone ID: LIB3148-041-Q1-K1-B5
ctttacattttccctttatttcctttgccgcccctagggtttgattacattccccacatggcttctgcagatgtcgagtaccagtgcttcgtcggaggtctcgcatggaccatcaacgaccgtgctctcgaagaagccttcagtgcttacggcgagatcgtcgattcgaagatcattaacgatcgtgagactggaagatccagaggctttggcttcgttactttccgtgatgagaaatctatgaaagatgctattgaaggaatgaacggtcggagtctcgatggaaggaat

SEQ ID NO: 30678 - DNA, 264 bp, Gossypium hirsutum
  Clone ID: LIB3148-041-Q1-K1-B6
gcatcccgctggattgtgaagggatccgttatttcgtaagcggcaaggaagagagctgcaagaacggtctaaagctacatgtggaggtgatgccttttgggaaccccgagcccgaaaagcccagagttgcagtggctgctgcagcgcccaccactccttctggatcagcccggctttacggaagctccgtgttattattggttgggttatggctttgccatatggctatttaattgtaccagttatgacctctctgcactcttt

SEQ ID NO: 30679 - DNA, 250 bp, Gossypium hirsutum
  Clone ID: LIB3148-041-Q1-K1-B9
cgtcaagatgcagattttcgtcaaaaccctaacggggaaaacggtaacccttgaggtcgagtcttccgacaccatctacaatgtcaaagccaagatccaagacaaggaaggcatccctccagatcaacaacgccttatcttcgccgggaagcagcttgaagactgccgcaccttatccgactacaatatccagaaggaatccactcttcaccttgttcttcgcctccgcggcgagtccaagtaaaggaag

SEQ ID NO: 30680 - DNA, 293 bp, Gossypium hirsutum
  Clone ID: LIB3148-041-Q1-K1-C1
gtgaagaaaagaaggatgtaatggatgtggtgacgattagtggttacaaagatgtgccggaaaatgatgagaaaagtctattgaaagcattggctcatcaacccctaagtgtagccattgaggcttctggcagagatttccaattctatagtgggggagtattcaacgggccatgtggaactgatctagaccatggagtagcagcagttgggtatggaacatggaaaggttcagattacatcattgtaaagaattcgtggggaccaaaatggggagaaaaagggtacataagg

SEQ ID NO: 30681 - DNA, 133 bp, Gossypium hirsutum
  Clone ID: LIB3148-041-Q1-K1-C10
ccggggggcgacccacgcgtccaaacaatttccacactttttataccccaaaacacgctaagaagaaactttaacacaccttaacacacaaaccggactatatgacaatccaaagccatcaaacccccataca

SEQ ID NO: 30682 - DNA, 293 bp, Gossypium hirsutum
  Clone ID: LIB3148-041-Q1-K1-C11
caaggtcatcaaggatgttctgggtgacaaggttgaaaaggttgtggtttctgatcgtgtggttgactcaccttgttgtttagtgactggcgagtatgggtggactgcaaacatggagagaatcatgaaggcccaggctttgagggataacagcatggctggttacatgtcaagcaagaagacgatggagatcaacccggagaaccccatcatggaagagctgagaaagagagccgatgcagacaagaatgataaatctgtgaaggacctttgtctccttctcttcgagactg

SEQ ID NO: 30683 - DNA, 295 bp, Gossypium hirsutum
  Clone ID: LIB3148-041-Q1-K1-C12
ttcagttacaacaagattcttaaagacctcaagaaggagttttgctgcaatggcactgtggttcaggacccagaattagggcaggttattcaacttcaaggtgaccagcgtaagaatgtctccaccttccttgttcaggctggcattgtgaagaaggaaaacatcaaaatccatggtttctaagttgcagcaagcttaaagttttctgctaatctgtgtgccttgtttcgaacctggatatactacccggtcaggatatactataataatatctatgccgttatatcatttcttt

SEQ ID NO: 30684 - DNA, 226 bp, Gossypium hirsutum
  Clone ID: LIB3148-041-Q1-K1-C2
gaccaagccttcgccagcgtccgccctattcttccgggttccacatagtcatactagatcaaagttgtaagcccgtgacgttatatgtacacttattgtaaagccagtactttgggaatcctaagattttgctcttaatgattagatttctaaaatctattctttcaaaaaaaaaaaaaaaaaaaaaaaaaaaaaaaaaaaaaaaaaaaaaaaaaaggggggcggc

SEQ ID NO: 30685 - DNA, 292 bp, Gossypium hirsutum
  Clone ID: LIB3148-041-Q1-K1-C3
aatactttggtcttatctgtatgataacaaaaatagtttccaggattagatttataccaagttacttcaactcggattaatttttcaatcttagaaaagcttatttataaacaattacttacaagctgacgactctgtctaatttctttttcttaaagaaattttgtttttaaaaccaatttactcttttggtataaatgaaattaaatgaattaaatgaacttaacgttacttagaaagaagtaattaatattaatattggtagataaatttatcgttttggtaacgtcat

SEQ ID NO: 30686 - DNA, 291 bp, Gossypium hirsutum
  Clone ID: LIB3148-041-Q1-K1-C4
ctccggggcaatgcttttggttgtggagaggttgggcgatgggcttgcagaacagggcctgtagtcgaccacctagcttttcatattcaatgccttaattcccccatatgtttttgtttcttcttttttaagtcttggattccgagtaatttgcgttttcttccattgaaaaactatatacggtttgataagatggtttgactggcatttggacttgggttgatctgagttgttttcttttcaccatatccgtttgttttggtttcttaatttttccgtcttgggttctgt

SEQ ID NO: 30687 - DNA, 53 bp, Gossypium hirsutum
  Clone ID: LIB3148-041-Q1-K1-C8
aaaaaaaaaaaaaattttttaaaaaaaaaaaaaaaaaaaaaagggaaataaaa

SEQ ID NO: 30688 - DNA, 80 bp, Gossypium hirsutum
  Clone ID: LIB3148-041-Q1-K1-C9
cccacgcgtgcgtatattttaatcttactgtacatgcggccaaggctgaaaaaagaggcaaaggctgaagaagatgcaag

SEQ ID NO: 30689 - DNA, 271 bp, Gossypium hirsutum
  Clone ID: LIB3148-041-Q1-K1-D10
cccactcgtccgcccactcttccgattttactgggtcattgttcagtttccctctttaaaaccatcatttggtctccacatgcactttggtcctttgggtctttctaggttcgaatgattttgtgattttttttcttttaaaaaaattgtgtctagattacaagcaaaagtgtctgaatgtcaaacttccaagttattgaaagactttgttacagatgatgaaatatgatgatgcattatagtcaaatagcattgatgtttcttttacatt

SEQ ID NO: 30690 - DNA, 270 bp, Gossypium hirsutum
  Clone ID: LIB3148-041-Q1-K1-D11
tgatcaaaaatattgcttttggagtaaatgcaagataaatgaagaatcgaaagttaaactaagcaacattagcttcaagaacatccgtggcacatctgcgcttccagaagctgtcaagtttatttgcagcggttcttcgccatgtcaaaatgtggaacttgcagacattgatattaagcacaccggacctgaacccgcaacatcccaatgtttgaatgtcaagcctaaaactagtggcaaattaaacccgactccatgttccagccctgt

SEQ ID NO: 30691 - DNA, 317 bp, Gossypium hirsutum
  Clone ID: LIB3148-041-Q1-K1-D12
ccggggcggacccacccgtccgaaatctgtaaaaaaccttataaaagacttcacttttagcatctgtatataatctgccgcaaccccttcacagcaaatgtagggcggccaatccaaaaccctaattttgccataggtgagaagaaggtaaagaagaaatggcagtgccgcttctaagtaagaagatcgtgaagaagagggtcaagaagtttaagagaccccagagcgatcgcaaaatctccgtcaagacgaactggcgaagaccgaagggtattgattctcgtgtaagaagaaagttcaagggctgcactttgatg

SEQ ID NO: 30692 - DNA, 286 bp, Gossypium hirsutum
  Clone ID: LIB3148-041-Q1-K1-D2
cccacgcgtccgttcttaccatttctggcattgtccaagaagctgctcaagataggaatagcattgtggcaaacttgacaacaaaaattgatttgacgaatgaaaatttagatgaattacagtacaaatacaatgagactactatgtccttaagcagaatgctcgaagagaaagacaggctgcaccttgcctttattgaagagacaaggaagatgcaaaggcttgctcgagacaatgttcgaaggattttggaagaacaggaaaagctgaatcatgaactggaaac

SEQ ID NO: 30693 - DNA, 267 bp, Gossypium hirsutum
  Clone ID: LIB3148-041-Q1-K1-D3
cccacgcgtccggttgttttctccggaatgtcttattaatagcgagattacgatgaggtttgaggtttgagatgatcggtttatggccggagcttgatggggtgaacttaaatagttgttgaataagtgaaaatagattgatgggatgagaattgagggcatttatgaaaacacagtaattttttagtatgagaataatgttgtatttttattttggttattcttttttattgtttaatttttaggtattgtttttttttttacatt

SEQ ID NO: 30694 - DNA, 168 bp, Gossypium hirsutum
  Clone ID: LIB3148-041-Q1-K1-D4
aaaaaaaaaaaaaaattaaaaaaaaaaaaaaaaaaaaaaaaaaagaaaaaaaaaaaaaaaaaaaaaaaaaaaaaaaaaaaaaaaaaaaaaaaaaaaaaaaaaaaaaaaaaaaaaaaaaaaaaaaaaaaaaaaaaaaaaaaaaagaaaaaaaaagtaaacaacaatacg

SEQ ID NO: 30695 - DNA, 292 bp, Gossypium hirsutum
  Clone ID: LIB3148-041-Q1-K1-D6
gctaccttgaggcattttggaggatgaaaaagggagataggatttggcagattgcttttgggagtggattcaagtgtaacagtgcggtatggaagtgcaatcgaaccatcaaaaaaccaacagatgggccttgggaggattgcatccataggtatcccgttcatatccctgaagttgtcaagctctagacagcttcttcattcatggccttccttctttgcctttagtactttgctaaaatcaccatcatcatcatcattatcatcatcatctacttcttatcctactccat

SEQ ID NO: 30696 - DNA, 292 bp, Gossypium hirsutum
  Clone ID: LIB3148-041-Q1-K1-D8
caatgatcccttggatgtcctgattattatgcaggaaccagttcttccagggtgctttcttcgggctaaagctataggtctgatgcctatgattgatcagggtgagaaagatgacaagattattgctgtatgtgctgatgatcctgagtatcgtcactacaatgacatcaaggaacttccacctcaccgtttggctgagattcgccgcttctttgaggactataagaagaatgagaacaaggaagttgctgtcaatgacttcctgcccgcctcaactgcttatgaggcaatc

SEQ ID NO: 30697 - DNA, 302 bp, Gossypium hirsutum
  Clone ID: LIB3148-041-Q1-K1-D9
tcctagtaatgtaaacaaatttctttttaaagtaaaaaaaaatcctcggtttccaaaaaaaaaaaaaaaaaaaaaaaaaaaaaaaaaaaaaaaaaaaaaaaaaaaaaaaaaaaaaaaaaaaaaaaaaaaaaaaaaaaaaaaaaaaaaaaaaaaaaaaaaaaaaaaaaaaaaaaaaaaaaaaggggccgccccttttaaaaaaacaaatttaactaccccttccatgcaaattaaaattttttttatagggccaccaaaattaaattaactgccccttttttaaaaaagtctaaacggaaaaa

SEQ ID NO: 30698 - DNA, 293 bp, Gossypium hirsutum
  Clone ID: LIB3148-041-Q1-K1-E1
ctgatatgttaaactgtcattccaagctggattttgctcactgtgactagtttgactaatttccatggaagcttgagtttccagttggtataatgtttattgccattcgttcttaaaagacaatgctatgtattttatttttttttttattttacttcatacttttatctagtgtctatgcttttattttctattattgttttttctttttatttttttatttttatatatatattattttttttaattattttttttttattttttttttcatatatttttttttatatttt

SEQ ID NO: 30699 - DNA, 145 bp, Gossypium hirsutum
  Clone ID: LIB3148-041-Q1-K1-E10
cccacccgtccgtgattttaaattgaagtcatcagtatgccttcgcaatcgatgtatataggtaatgcaggattcgggatgagattataagttttgtatgaacctgatgcattactcagttgatttattcaaccgatttatggtt

SEQ ID NO: 30700 - DNA, 263 bp, Gossypium hirsutum
  Clone ID: LIB3148-041-Q1-K1-E11
ctttggttcataattacttattaaagtttgtatttttaaggcataatgccaaaaataacccctaacatttgactgattagtcaaaaaaaaaaaaaaaaaaaaaaaaaaaaaaaaaaaaaaaaaaaaaaaaaaaaaaaaaaaaaaaaaaaaaaaaaaaaaaaaaaaaaaaaaaaaaaaaaaaaaaaaaaaaggggggggcttttaaaggtaaattactacctctcgactaaaaaaaaaaccacggttataaacatgttccccta

SEQ ID NO: 30701 - DNA, 150 bp, Gossypium hirsutum
  Clone ID: LIB3148-041-Q1-K1-E12
cccacgcgtccggggattttaaccatatgcattctatttcctgacattctatagccaaccctaaatgcgcagcctgcttgatttgtatgcgtaaatgctttgtagcctgcctgatttattcacaagaagctaaattgtatgttgtttctt

SEQ ID NO: 30702 - DNA, 291 bp, Gossypium hirsutum
  Clone ID: LIB3148-041-Q1-K1-E2
cccacgcgtccgggtttttaattgcccgcttgtaaccggcgaagcatggccctccaacggtgcgggctcgatgcccggtaagcctcttctcctctctccaatccttcgtatgtgttgtggatccaaatggaaaaaggaaaaaaaaaggaaaaatagaacaaaattacaataaataatcaccttagaaatattcttggttgcctctcttctgatttttgtgtgtattttcttttattattttgtccaaaaaaaacccctttacagtgaaaaaatcgaaggcttttatagcca

SEQ ID NO: 30703 - DNA, 301 bp, Gossypium hirsutum
  Clone ID: LIB3148-041-Q1-K1-E4
cccacgcgtccgagcttatcaatatatatatatagatctcagtgatctatagtgctttagcccttgtaataagtggtaaaaaatattatgtcaagattgatgaaagccatgcaaatgctaagatttgctttaaaaaaaaaaaaaaaaaaaaaaaaaaaaaaaaaaaaaaaaaaaaaaaaaaaaaaaaaaaaaaaaaaaaaaaaaaaaaaaaaaaaaaaaaaaaaaaaaaaaaaattttaaaaaaaaaaaaaaaaaaaaaaaaaatatataatattttttataaaaaaaaaaaaaatggggg

SEQ ID NO: 30704 - DNA, 258 bp, Gossypium hirsutum
  Clone ID: LIB3148-041-Q1-K1-E6
gcaacgtaatgatatcttgatatttgggataaaagtggcgatctcccatggtagaaacatactaaggagacaaatccctttgtaataagttaaagcactatgtaagtttctttatttattttgtatttttgttctttgctttcttttataatatatattgaatacaaagtgaggccatgtagcctgataatattgtaaaatacactgttactttttaagcaaaaaaaaaaaaaaaaaaaaaaaaaaaaaaaataaaaa

SEQ ID NO: 30705 - DNA, 289 bp, Gossypium hirsutum
  Clone ID: LIB3148-041-Q1-K1-E7
tgtttttttaaccctttttgctgcttgcgtgtctgctccatcttgcagagtagttgatggcggtggaatgggggttgacagagacgatgggacagaggcggcggctggtggaggcaggtggctgccagtgctagggtttttcctttttattgtttttcattattggtttgggctaggttagtgatttggactgatgtaatttgggtttgggtatttgtatttgtttggttgggttttattgggttctgggctgtttgtttagaaattgggttttgggttgttggttgta

SEQ ID NO: 30706 - DNA, 226 bp, Gossypium hirsutum
  Clone ID: LIB3148-041-Q1-K1-E8
cccacgcgtccgcagttttcatttataccctgtaattctagatgtgccatggaattattatttatttctttttaagatcagtacatgaatttagtcattaataagatggaggaagctaagctttcctctttaattagatccaaaaaaaaaaaaaaaaaaaaaaaaaaaaaaaaaaaaaaaaaaaaaaaaaaaaaaaaaaaaaaaaagggaggaaattaaaaaagaa

SEQ ID NO: 30707 - DNA, 85 bp, Gossypium hirsutum
  Clone ID: LIB3148-041-Q1-K1-E9
gcggaaatgaatggatctgatgtgcgccggagaaggtctaagggggattttcagctaatatagaacccacaagaagatccaaata

SEQ ID NO: 30708 - DNA, 127 bp, Gossypium hirsutum
  Clone ID: LIB3148-041-Q1-K1-F10
ggttccgccatctgtttgaggagaagagctgctgagatgatgatgatgatttcagaatctgagaatctgagagatgtcaactttatgtattaaataattattaataagatttgtggttattttccat

SEQ ID NO: 30709 - DNA, 249 bp, Gossypium hirsutum
  Clone ID: LIB3148-041-Q1-K1-F11
gcctcttttcccatcttatcttaaggcatttccaatatgttggcatagtctgtttcctagtaaacctggaattgaactgtcaaggctgttgttcttaagggtgaagttcggttttgaaaagaaaaagtgaagttactgtgtcaaaaaaaaaaaaaaaaaaaaaaaaaaaaaaaaaaaaaaaaaaaaaaaaaaaaaaaaaaaaaaaaaaaaaaaaaaaaaaaaaaaaaaaaaaaataaaaaaaaaataaa

SEQ ID NO: 30710 - DNA, 286 bp, Gossypium hirsutum
  unsure (1)..(286): unsure at all n locations; Clone ID: LIB3148-041-Q1-K1-F3
gtgacgctgtgcattgcgatcgtcattatgctcttctattagtgtnncacctaaattcaaattcatctgggccgtctgttttacatacgtctgtgatctgggataaatccctggtcgttaccccaatcttatatctgccttgcatgcatcttttccccctttctgccagtctgtgcgtaattatgcgaatgagggcccgcatccgattcgtcccttcccaaccagttgcgcatgcctgaatgtgcgaatgtggtcgccgccctgtagcgtgcgcatttaatgcgcg

SEQ ID NO: 30711 - DNA, 296 bp, Gossypium hirsutum
  Clone ID: LIB3148-041-Q1-K1-F4
ggattatgacagagattggtgggacaggaataggcgtgggtctggtagatctgaacacagatcaaagtcaaggtcccgctctcgctcaccctcaaagagcaaaaggattagtggctttgacatggcacctcctgcttcagcaatgttagctgctggttctggtggtgctgctgcggctgctgctgctgccgtcactgccaccacagtccagattccagggaataatccaaccctacctggagtgtttccaaacatgtttcctctggcaactggtcagcagtttggtggtctccctc

SEQ ID NO: 30712 - DNA, 296 bp, Gossypium hirsutum
  Clone ID: LIB3148-041-Q1-K1-F5
gaaaacacaaagaagctttaaactttgctgttgcagcacaatgtgtctctccatttgatactatggcggctgagaaagtggagaacctaaaaaaacaacttgcagtagctgaagctgaaaaaaataataaggctagtgatgggtcacctaagtctgaacctcgagctggaagggtattgtctttaagtgacatactctatcgcacagaaggtaacagtgatgcttcacaagatgggccaagatccgatagggaagattctgattatgatgaagagctggaattagattttgaaact

SEQ ID NO: 30713 - DNA, 67 bp, Gossypium hirsutum
  Clone ID: LIB3148-041-Q1-K1-F7
agaatccaaatagatgatgttaaaagttatatcatatgataatattgaaatgaatctatcattttct

SEQ ID NO: 30714 - DNA, 291 bp, Gossypium hirsutum
  Clone ID: LIB3148-041-Q1-K1-F8
cccacgcgtccgaaaattgagaacgaaagaaatggcaaatattcccataatcgctcttttctgcttcaccatttttgtttcgtcctcactcaatttcgtctatggggctgaaaatatgagctacgtcgtcgtaggccatgtttactgtgacacttgccgtgttgagtttgagaccaaactcagcgaacccatcgctggagcagtagtgaaactggaatgcaggaatcgtacagacaatcaccttaccttccagagccaagaaatagtgactgacgaacgtggagactatca

SEQ ID NO: 30715 - DNA, 177 bp, Gossypium hirsutum
  unsure (1)..(177): unsure at all n locations; Clone ID: LIB3148-041-Q1-K1-G1
tctgtccggtctttttacnagatattctttttctatnnatctgttttttgattagcatgtaaaatttttgtaccccatctannaaaattagttgcaaanntccaatagtcattgatnntaattgtttttttcaaaaaanaaaaaaaaaaaaaaaaaaaaaaaaaaaaaaaggaaaaa

SEQ ID NO: 30716 - DNA, 289 bp, Gossypium hirsutum
  Clone ID: LIB3148-041-Q1-K1-G10
cccacgcgtccgcttttttttttttttttttttttttttttgggttttttttttttttttaaaagctccattttattcaatattttcaatattcatcacatgtttttttaaaaaaaaaaaaaaatcgtccacatgttgatttttcgtacatgtagcttactgcagcttgtaaaaaaacaaaaaaacaatggaagccccaaccaatgttccaagaacaggcaaggttgcggcagccatcccaaatttgctttatgtaatagtttttttgggaagatgagatgattaatga

SEQ ID NO: 30717 - DNA, 239 bp, Gossypium hirsutum
  Clone ID: LIB3148-041-Q1-K1-G12
aactgttaacttttttttaaaatatgtatgtatattatcagggataataaaaatatattaatggggaaaattttccccaataaaaaaaaaaaaaaataaaaaaaactaaaaaaaaaaaaaaaaattaattcacaaaaaaaaaaaataatataaaaaattatttattttttaaaataaattaaaaaaattatattatataaatctccattttaaaaataaatttttaaattatttatttc

SEQ ID NO: 30718 - DNA, 212 bp, Gossypium hirsutum
  Clone ID: LIB3148-041-Q1-K1-G2
cctgtgtagctttaatcttggctgcggcaatcacacaatccccagctgcatcaacttcataaccccaaaacaagaaagaattgatgggatttattgacatttcaataacaatgaaaaaaaataaaaaagaagggtaaaaacgacaaggaaacagaggaattggcatatcttatcttcagaattagtagttcagaagctgagagactacacgt

SEQ ID NO: 30719 - DNA, 290 bp, Gossypium hirsutum
  Clone ID: LIB3148-041-Q1-K1-G3
caaagagtgacagatcttgttttgccagcttttcaatttcatgagttcctaattgtggagaaggctgtatttggaaagccgatctgataataagctttggagtgtggtgcattcaccgaattcttgatctttcgctgatggaaagccgaccagagctgtggggaaaatacacttatgtgcttaatcgtctccagggtgtgatagatcttgccttttcgaagcatcgatccctggtgcccccatgcttctgccttcaaattcccgtggaataccagcagaggttaagtcct

SEQ ID NO: 30720 - DNA, 296 bp, Gossypium hirsutum
  Clone ID: LIB3148-041-Q1-K1-G5
gataacccccaggataatatgtttggtgctaccaatgccattggccgagacagccatggaactcatacaagtaccactcgcagtgctatcagcaagcaccttgatgtagaagagttagaaatgctcttggaagcatactttgttcaaattgacggtacactgaacaagctatccacgctgagggaatatgttgatgacacagaggactacattaatataatgctcgatgacaaacagaaccatctccttcaaatgggagtcatgctaacaacggcaacccttgtcatcagtgcttt

SEQ ID NO: 30721 - DNA, 224 bp, Gossypium hirsutum
  Clone ID: LIB3148-041-Q1-K1-G6
cccacgcgtccgtaaattttaaaaaaaaaaaaaaaaaaaaaaaaagaaaaaaaaaaaaaaaaaaaaaaaaaaaaaaaaaaaaaaaaaaaaaaaaaaaaaaaaaaaaaaaaaaaaaaaaaaaaaaaaaaaaaaaaaaaaaaaaaaaaaaaaaaaaaaaaaaaaacaaaaaaaaaaaaaaaaaaatggcggggcaccaccttaatgacccaaaactaaatcccctt

SEQ ID NO: 30722 - DNA, 293 bp, Gossypium hirsutum
  Clone ID: LIB3148-041-Q1-K1-G7
gtgctatcagttgatgtggacattattgccgatccctatcagttgtgtgacgatcttgaagaagctctgaagctcattaagaattgtgtcattggtcaaggtgtgatagataactaagaatcgccattatcagttgcagtagtggcctgtgcccgtaataaagttgcttaaatatgtttaggatggcgtctacgctttctttattattatctacttgatgtcgtgtttatgaactatatttactgaacgcttgaattcctgggtaagtttaatattacggaaaaaaaagtatg

SEQ ID NO: 30723 - DNA, 300 bp, Gossypium hirsutum
  Clone ID: LIB3148-041-Q1-K1-G8
agccttccgcccacccttccggatttttttgggagaaggggatgtctgtgtctttgaactgctcagatcaagggaaatcgtgctcaaagttactgtatttcgtgtactggaaagcggtggactaatgcaccggtctcaatgaatgcctgctaagttaagccatcatagattatagagagctggaaatttcaggaatgtcaaaaactatgtcaagtaactcgttcttctcaggtgacggtgtaaccaatctggttccataagaaattagctgctgtgcatgtttagctgcttaagataatg

SEQ ID NO: 30724 - DNA, 238 bp, Gossypium hirsutum
  Clone ID: LIB3148-041-Q1-K1-G9
ctcgaagtagaaagccaatattctgcatgaagatataacaaagcagtggattcagcgagaattagttcaattgcagggtaaaattgattttgcgcatgagaagggacggaaatacatgttggaacgatttttgttttaaagggaaatgtctgattatctgtttgttcttttattctttatttatataagtcgactattatttctttgctttttttttctttttttctttttttttatt

SEQ ID NO: 30725 - DNA, 222 bp, Gossypium hirsutum
  Clone ID: LIB3148-041-Q1-K1-H1
cccacgcgtccggcctttctttgaaacttgaactggtcttatgctgtcgcaatgattttgttacaattgcaacccaaatttggagagtgcatcatgtggctcggaatatagtagcattggatcacaaaagtcaaagatgaatcaaaagttattgtagaggattatccggcatcgatgagattgatcgagtaaatgctacccaaaaaggcagcgacatgatcg

SEQ ID NO: 30726 - DNA, 111 bp, Gossypium hirsutum
  unsure (1)..(111): unsure at all n locations; Clone ID: LIB3148-041-Q1-K1-H10
cccacgcgtccgggctgnnttttttaaaaaaaaaaaatagggggggttttgatatatattaacccccatcacacttatctaaattataaaacataaatatatttaatcagc

SEQ ID NO: 30727 - DNA, 296 bp, Gossypium hirsutum
  Clone ID: LIB3148-041-Q1-K1-H11
gaaaaataaaaagaattaagtttttctgcaacaaattaaggcgggtctctccaacaccatggacatgaagaagaagatcacttgcgctgtcatattcgccgctgcctcaatgagcgcagtcatggcagcaagcaccgccccagcttcctcaccagatggcgccacacttagctccgcctcagttggcgctgcaccagcttctgcaccaggcccagactccagcgttgcaacctcaaccttgcctgttcttgggtccttggttggagccttcattgtctctttctttgcttaaatta

SEQ ID NO: 30728 - DNA, 294 bp, Gossypium hirsutum
  Clone ID: LIB3148-041-Q1-K1-H12
ataagcacaaggacagttaagaccacaaggatgaagggatgatggataaaatcaaggacatgatcactggtgataaagatgacgatcgtggccgcgaccgtcgtcgcgataatagccgtggtcgcgatagcagtcgtgatcgtgagcaccatcgtgatcggaaccgtgatagtgatcgtgaaagcgaccgtgatagcgatggtggtagtgatgacgagaagaagaaaaagaagaagaaaggaaaaaagaagaaacacgatggcagcggtagtgatgatgaccctctccatgtat

SEQ ID NO: 30729 - DNA, 285 bp, Gossypium hirsutum
  Clone ID: LIB3148-041-Q1-K1-H2
cccacgcgtccgcccactcgtccgcccacgcgtccgcccacgcgtccggtaaacttgctttggaaccaagttttattatgatatagctatgctaatggcattgaatccaaaaagtatcaaccaatatcagtttaagattatttattttgtcgtatttagtttgtgcactatgatctttgtccaaggggaagcttttatgtttccactctatccaaaatagcttgctgttgtaagttgatatgcttaggctttcatagcctttatataataaaaatttctttctgc

SEQ ID NO: 30730 - DNA, 294 bp, Gossypium hirsutum
  Clone ID: LIB3148-041-Q1-K1-H3
cccacgcgtccgatcatgttcatcgacgaaaagtgctttcctaccctttggctagctgcatggagcgccgagaatgagcgagaaaaagtgacgaatgaagcttgcgagtatctgaaaacgcttgaaagtgcgcttaatggaaagaaattctttggtggagaaaccattggaatggtagatattgttgctagctctgttgggtatttcattagggtcactcaagaaattatggggcaaaatctgctgtcagctgacaaatttccccaattattccaatggtctgaagatttcgca

SEQ ID NO: 30731 - DNA, 293 bp, Gossypium hirsutum
  Clone ID: LIB3148-041-Q1-K1-H4
gctttctgttatactaataatcatatgcatctatcgggagagggggggagggaatcatgtctttcgatctcatatgctgaagccatcctgcagctgcttcggatccttccaagatctgtacggctgaggaccaaaagaagaaagatgatgaggatctggtgtttgagatgtctgcaacagctctctcttgaatactccctactgaagaacaagcttcaaatcttattccagattgtcaaactttcttagtgactatgcacattaatgttcacagcatttattagagtgttgag

SEQ ID NO: 30732 - DNA, 295 bp, Gossypium hirsutum
  Clone ID: LIB3148-041-Q1-K1-H5
cttgcaccgagaatattagttagaggagagagctcaattgagggccaaggaatcacccagtgttccattcagttgggtttctggtagagaagtgacgctctaaattggctatcctccaagtgacttgtaatccaagaaagaaacaacagggcttagggagaagcatgatgaaaactgcgactctgtgtttagctggaatgcaataagtggaggagaagtgtgtgtgtgctgtttctttgttatttttcttaaaacgagtaatatcaacatcttcctcctatttgatgaaaatgat

SEQ ID NO: 30733 - DNA, 297 bp, Gossypium hirsutum
  Clone ID: LIB3148-041-Q1-K1-H6
gagttggcactaaaaaagtgttatgctactatatgaataaatcagtgtcttgttgtgtaagcgagcacatatgtctgttaaatatgatatttgttatgctacctggaccatttcccgcttgtatcagttgtggattctagtatgtcgcatagctatcagcaggttatgcttatgatcgatgatattcacgatttacatccctgttttttagatgtggtcaataaaaagacgcacttggaccgtcatgccttgataacaaaaaggcagcggtagtgatgatgaccctctccatgtatc

SEQ ID NO: 30734 - DNA, 253 bp, Gossypium hirsutum
  unsure (1)..(253): unsure at all n locations; Clone ID: LIB3148-041-Q1-K1-H7
aaattttcttcttattgcattgttatctttgattaacttattcattttaagttaattcctttcttattgcaaaaaaaaaaaaaaaaaaaaaaaaaaaaaaaaaaaaaaaaaaaaaaaaaaaaaaagggaagngggtgtaaggggtcaaagcttcaagacgagggactccaacgtgcaaggtcttaaatagtgtaacctaaaaccaaaaaacaggccaatggcctacaacgtacaacactggaaaaagggaaaa

SEQ ID NO: 30735 - DNA, 214 bp, Gossypium hirsutum
  Clone ID: LIB3148-042-Q1-K1-A1
cccacgcgtccgagaacgccaagagttggttatggggtaactggtcaaaccgaggttcaatttttttttcctttcattttattttacttttgaaaattaggtgtaaaggttgaacacagatgacatatggatgtcttgtataaatttgattttcctttctatcatttcctaatggaacacaatttaaagaggaataaacagaccttatctcttc

SEQ ID NO: 30736 - DNA, 338 bp, Gossypium hirsutum
  Clone ID: LIB3148-042-Q1-K1-A11
cccacgcgtccgttccaacctcccagcctataggacggcagtgaacccacttctgaggggaatcgaagtgggtctggctcacggcttcctcctggtgggtccattcgttaaggccggccctctaaggaacactgcggtggcgggtcaagctgggtccttagccgctgccggtctggttgtgatcctcagcatttgcttgacgatgtatggcgttgcatcgttcaaagaaggtgagccatcgatagcaccgagcctaaccctgactgggaggaagaaagagccagaccagttgcaaacggcggatggatgggctaagttcactggagggttcttctttg

SEQ ID NO: 30737 - DNA, 181 bp, Gossypium hirsutum
  Clone ID: LIB3148-042-Q1-K1-A12
ctaaaactccaaattcaacataccattgatatcttcgatccaaagcaacccaccggggcgcagtaataaacctttgatgaagattaccacaaaagtcaacatttccacttcttctaccctacaagaaccaaacaggttgactttttatctcaatcaaactcttacccatgttctactaaca

SEQ ID NO: 30738 - DNA, 297 bp, Gossypium hirsutum
  Clone ID: LIB3148-042-Q1-K1-A2
cccacgcgtccgggaggaaagagttgaagccgcttaagttttcaaatcaggagggttcggtgatgtcttgaccgacaaaaccgtggacaaggcgaaattaattgatgatgtaaggcaagcactttatgcatccaagatctgcagttatgcacagggcatgaatctcattcgtgcaaaaagcatcgagaagggttgggacttaaagttgggggaactggctagaatatggaagggaggctgcatcatcagagctattttccttgaccgaatcaagaaggcatacgacagaaaccctga

SEQ ID NO: 30739 - DNA, 252 bp, Gossypium hirsutum
  Clone ID: LIB3148-042-Q1-K1-A3
ataacttccacttctttggtagccatgttacacatgctctttatttattgtagtggcataagaaggaagtgagtgttttttctattttaattattgggttttcactttaatttattcgtgtatagaaatgtggccttccgtatgattgatgaagctttttctatttattgtgggcatgcatttgctatttggtggataatttgatgtactatgtgcactattagcaataaaagaatctatttgttccaatgt

SEQ ID NO: 30740 - DNA, 146 bp, Gossypium hirsutum
  Clone ID: LIB3148-042-Q1-K1-A4
gagagaataaacgaattgtacggagcatatttttgtgtgaagaagggttgtttcagttttattacccaagtacttgaatgtttcaagtttcattgcagttgtttttctactttaatgcatacgtggtgattatggtttctctactt

SEQ ID NO: 30741 - DNA, 400 bp, Gossypium hirsutum
  Clone ID: LIB3148-042-Q1-K1-A5
cggacgcgtgggaaagaacagcgagtgggagatcggttacaatgcaatgacagacacgtatgagaacttgctggcagctggagttattgacccggcaaaggtgacaagatgtgcgttgcagaacgcagcttcggttgcgggaatggtgcttacgactcaagctattgtcgttgagaaagccaagccaaaggctcctgcagctgctgctcctgaaggtcttaccatttaatcactaggattttaagaaatttcagggattgaatgagcaatgatgtaggtttggtgccctatttttgtattggatttaataaaagaatggtttgtggatgcaatgtaaggttagggattgtgaacaatgtttgattagacattgcagtaaaaaaaaaaaaaattctttgcc

SEQ ID NO: 30742 - DNA, 321 bp, Gossypium hirsutum
  Clone ID: LIB3148-042-Q1-K1-A7
cccacgcgtccgtttgaaactaaatgctcaactatcttatgcttttcagtggaagaagaagcgtatgaggaggctgaaaaggaagcgccgaaagatgagacagagatccaagtagatgcgccttggactgaaatagttttgccctgacaatcccttgtcttcataattatcctgcatatgttgcttgaagttgtgaagattgaagggtatttttaggaaaccttatctgttgtcttctaaatctaggttaaagttttaagactatttgagctgtttgtctagtactattagatattatgttgggggttttggggttgatct

SEQ ID NO: 30743 - DNA, 296 bp, Gossypium hirsutum
  unsure (1)..(296): unsure at all n locations; Clone ID: LIB3148-042-Q1-K1-A8
caacggcggagcctaaacgtggtagcgcagaggccaagaaggcgtatgctcctgtttgtgttactatgccaactgctaggatctgtcgcaactgaggcagtgccactgcacattgctcgagtgccatgagactatgcttgttatgggcaggggctgaaggatgtaatttaataatgcttgtaatttttcatttttataattgagaaacctaatttaaatttgtgtttttctttnnnaaaaannnnnnnnnnnnnnnnnnnannnnnnnannnnnnnnnnnnnnnnnnannacccct

SEQ ID NO: 30744 - DNA, 355 bp, Gossypium hirsutum
  Clone ID: LIB3148-042-Q1-K1-A9
cccacgcgtccgattcaaaaaaccattgatttgtttcatcaaagaaccagttcaactgggaaagattcattatgacaggaagtacaacgttgttctaatttttgtttttttcttctagttctacgcattttcagatatctcttgtacaaataaacttcataaataaacttcataaatagagaaagaatcaagacaccgcatgttgtatcaatatctttctaaaagggtggctattccagttggcaagaaatagagcagtaaccacataaaatttggcttcctaaaaaaaaatatggtggggttttgtggtttgatctgggtcagctgttttaataaacatatttattttccaaat

SEQ ID NO: 30745 - DNA, 236 bp, Gossypium hirsutum
  unsure (1)..(236): unsure at all n locations; Clone ID: LIB3148-042-Q1-K1-B1
cccacgcgtccgcccacgcgtccgcccacgcgtncgcctatacattctatattcccgaagcaattgtttccccttggttgcagtttcagactgtattagcttttatgtagtacaatattaatatcaatgtccatcgtcttaggttttttatttgttcacttttgcacattgagttgaatgttgttgctatacatttcgactaaatgttagtgtattttgattgttggatttgttgt

SEQ ID NO: 30746 - DNA, 329 bp, Gossypium hirsutum
  Clone ID: LIB3148-042-Q1-K1-B10
ttttaacccaaaaaagaaaagaacgctcattggatttgcaacaatgggtctctcaaaggcttctctaatccttgttctcgtcgctgtttgtgctcttatgggttcagccgtagctgctgaagccccagcaccgagtcccacctcaggaaccgcctccatctccccctcattcgtctctgttttctttgccgctgtcacggctctgcttttcggctctactctcaggatctgaagggtgttggctattgatggtgtagagagggtgtttgatttctcatttatatagatttaatttttgggaggggtgaattttatatggaggtttagta

SEQ ID NO: 30747 - DNA, 415 bp, Gossypium hirsutum
  Clone ID: LIB3148-042-Q1-K1-B11
aatttgatttccaatttgaacatcattatttaattgattgtctttccaattctaaaaaagaaaaaaaaaaaaaaaagtttaaaaaaaaaaaaaaaaaaaaaaaaaaaaaaaaaaaaaaaaaaaaaaaaaaagggtggcaaaaataaaagaaaaaaagtaaaagaacgcgtgcataaaaaaaaaaaaaattttcaaaagtggaaataaaaattaagggggctggcttttgaaaacaaaaattaaaattggggaaacccgggcttaaacctttttattgggaaaacataaaattaaatttttggaggggggttaaaaaaaaaagaagtgaaaaaaagtggggttaaaaaaaaaaaagccggccagaaaaaattatttaaatcccggtgatttaaaaaaaaaaaggcccccccctttt

SEQ ID NO: 30748 - DNA, 339 bp, Gossypium hirsutum
  unsure (1)..(339): unsure at all n locations; Clone ID: LIB3148-042-Q1-K1-B12
gtaaaacgccaagttcgagagatcacaagataccagcgattcaaagttgcccaccgacacccaggaagaaaccaatgatgaggatgaagagaaaagtatcagagttgcagttctttgaaactacaagaagtgaagaggtagagtctttttttggatcaaactcttacccattttctactaacaatactgctgctcaccctcctttcaagaaaaggagatgtaagagtgcttgatggatattatcatacatatatattcattaatctgtccttcttcatcaccatcatatcttctcccccaagcaatntaaatttttatttcgaatttaatttcttggag

SEQ ID NO: 30749 - DNA, 387 bp, Gossypium hirsutum
  Clone ID: LIB3148-042-Q1-K1-B2
aaaaaaaaaaaaaaaaaaaaaaaaaaaaatttttttttatataaaaaaaaaaaaaaaaaaagggagggatttttaataaaatacaaaatcaaccctacatatccctaaaaaataaaacacccttttttataaatataaaaaaatctttaatttaataaaaaaatctctctcacacaaaaaaaataaaaggggccccctttcttaaaaattaaatttttttcccctttttcttttcgcttttttttttttttttttgccccttttttccttttccccccccccattattccaccttccagattaaaaaaaaccctcgccccccccccttttttttttttccccatatttcttttttttcccccccccctttttaaaaaaaattcccac

SEQ ID NO: 30750 - DNA, 102 bp, Gossypium hirsutum
  Clone ID: LIB3148-042-Q1-K1-B3
tattaaagtatgcctcttgttctttttatcatgtgggatatttggttgtgtgtatgtgaactctgttgatgcaatcttagtattgcctgttgtgtttgtatc

SEQ ID NO: 30751 - DNA, 161 bp, Gossypium hirsutum
  Clone ID: LIB3148-042-Q1-K1-B4
atcaataataggggatcccatactttcacgggcacctgagagatggcaaaatagtctagttcatggcatttagtttatgttgtttgctttttttttggtttataaggatgtggctttgtcgttaattaccgggtaatctatcccaagttcttaccctgctc

SEQ ID NO: 30752 - DNA, 200 bp, Gossypium hirsutum
  Clone ID: LIB3148-042-Q1-K1-B5
cccacgcgtccggacatacttcaagttccattgtgggggaatttttatgggtcatctgttatctgtaaagggatgggtttcttgggtcccaaaccacctttctttgcttatgtttattgttttgcttgtatggttattaggagaggcagtatcaagtatgcatgttgtcttggttataataaatcttagtccttttgttt

SEQ ID NO: 30753 - DNA, 364 bp, Gossypium hirsutum
  unsure (1)..(364): unsure at all n locations; Clone ID: LIB3148-042-Q1-K1-B6
agttctgatgcgagcgccgcccttttttttttttaatcaatctggtatatatatattatattatcggtggcattgagtggcttgtaaattgtaatgctttggtctatcttttgtttaggccacaaagtcttcattttgggaattttccgttagagtattgaatgatttttttttattaaaaagattgattgcaagatatataataagaatcagaagtacgttttttgtttgattaaattttaattttaaaaatgttttatatcttttccgagtgtgttgtaaaatcaaagttattcacaaaatatttacatgccaataatatttgatgcattggtnnataaaaaaaaaaaaannnnnnnaanaa

SEQ ID NO: 30754 - DNA, 178 bp, Gossypium hirsutum
  Clone ID: LIB3148-042-Q1-K1-B8
gaattttgtttttatttttcctatttgcctttgtcatttcgatgcctgcatcttgaaatggcatatgagaataacattttatgtttattcatgaaaggagccaatcgtttcatttcaaaaaaaaaaaaaaaaccttaacaaaaccaaactaaataagactaaaaaaacatacaaattt

SEQ ID NO: 30755 - DNA, 251 bp, Gossypium hirsutum
  Clone ID: LIB3148-042-Q1-K1-B9
ttgagccatatccagaatctgcactaaatgaacaggctggcaagatgctgcttgaaaatgatgacgagtatgcccggcatgccaagctttattctggaattcatgccaaacccaaacccgaggttaaaataaggaccttttggcaagtaaactacagcattaaacgtggagcagcataacacctcggttctgaatatcgaccagaaaaatgcagcaggtggggccgggtaatccttgccatcccaactcgt

SEQ ID NO: 30756 - DNA, 319 bp, Gossypium hirsutum
  Clone ID: LIB3148-042-Q1-K1-C1
attggctgggaacgctgcacgtgacaacattaaaaacaggatcatcccaaggcacgttctactcgccgtgaggaacgacgaagaattagggaagcttctcgccggcgtaaccatcgctcacggtggtgtgttgccgaacatcaacccagttcttttgccgaagaagactgaaaaggccgccggcaaagaacccaaatctccatcaaaggccaccaagtctcctaagaaagcttaatttggtttaacaaaactagattcacagggctttatttttcttagttgaatgtccttttgggtgattgttttcacagggtttggg

SEQ ID NO: 30757 - DNA, 368 bp, Gossypium hirsutum
  Clone ID: LIB3148-042-Q1-K1-C10
gcagaatgaatgtcatcccctgatctcatgcactgtactcttgatgaagaaatgcctttaaaccggtttagttctcgttttcgtccctctactatgtcgagatttcgacatagtagagagattaaaaccataatcatactgtttttgtccataattttttttttgaacaatctttctgatcatatttgctatttttaacataatacttaaaatcacccatatctctttctcaacccatacataaataggagtataatgcgcttcagaacattcaaactcatgtctcttatattagtaacaatatccatgtcaatcgagttagaactcaattgacttttttttcgtatatttgtacaagtttcattatt

SEQ ID NO: 30758 - DNA, 263 bp, Gossypium hirsutum
  Clone ID: LIB3148-042-Q1-K1-C11
cccacgcgtccgcccacgcgtccgcccacgcgtccggccaatcatggggggtatctgtagctcaaaatattggtaactttgggataatatttatctcttgcatagagagtaacttatggagctgcttctttgtttgttggtcgcttatatgcgttataggtcgctattaagcatattttgttatgtttggaattgcttaatccttttattttattttctttggctctaatttgtttcattttattgtattttatggttttatt

SEQ ID NO: 30759 - DNA, 258 bp, Gossypium hirsutum
  unsure (1)..(258): unsure at all n locations; Clone ID: LIB3148-042-Q1-K1-C12
cccacgcgtncgcccacgcgtncggatgaacttaatgctcaatggaagcaacaaaagagacggggtttcaaaagctggagtacaagggactgaaatgaatgatgttactattactggtgatcaagaccacggaagtttgctggctggggagatattgaagcgtaattatagttcctggctatccggcctttttaacaaagacaacaacagtgtggaagttgcacactttcatggcttacaagaagcattggacaaaac

SEQ ID NO: 30760 - DNA, 364 bp, Gossypium hirsutum
  unsure (1)..(364): unsure at all n locations; Clone ID: LIB3148-042-Q1-K1-C2
cccacgcgtccgccgaaggttgccccagatgttattgctgagtatactgttcgtgccttgcagcgaaccgtccctgctgcagtcccagctattgtattcttgtctggtgggcaaagtgaggaggaggctactcttaaccttaatgccatgaacaagctccagaccaagaaaccatggtcactctcattctcatttggacgtgcccttcagcagagcactctcaagacctgggcaggaaaagaggagaatgtgaagaaggcgcaagatgctttgctcgttaggtgcaaggctaactcagaggccactttgggtacatacaanggtgatgctgagctttgtgagggtgctgcagagagccttcatg

SEQ ID NO: 30761 - DNA, 239 bp, Gossypium hirsutum
  unsure (1)..(239): unsure at all n locations; Clone ID: LIB3148-042-Q1-K1-C3
gaaaagaaagaccaaaatgaacccccatactcttttttctaatatactgnacatgcctaggagggatccattcctgctccattcccatctattgtattcttgtctggtgggcaaagtgaggaggaggctactcttaaccttaatgccatgaacaagctccagaccaagaaaccatggtcactctcattctcatttgtacgtgcccttcagcaaagcactctcaagacctttacaatgaa

SEQ ID NO: 30762 - DNA, 316 bp, Gossypium hirsutum
  Clone ID: LIB3148-042-Q1-K1-C4
cccacgcgtccgcccacgcgtccggccgcacatgtgaaggcaaagttcataatagaggctgcagaccatcccagtgacccggaagcagatgagattctatcaaagaaaggagtaataatattgcctgacatatatgcaaatgcaggaggggtgactgtcagctactttgagtgggttcagaacattcaaggtttcatgtgggatgaagacaaagtgaacaaggagctgaagaggtatatgactcaagctttccacaacatcaaaaccatgtgccagactcaccattgcaatctccggatgggtgcctttacactcg

SEQ ID NO: 30763 - DNA, 261 bp, Gossypium hirsutum
  Clone ID: LIB3148-042-Q1-K1-C5
ggttggttttatagcctttttcgttacagtttagaagtaaaacagagcttggtccgtttagttgatgaatgaattttatgactgcatatgggatttaatgttttgctactctttgttcctgctttgtttaatttttattgacaatcgtgttctaaactgatgctggtttctatatttactttattatgcatacatatacacgaacacaagggaactacttatttattatatcaattggaactattatctgtattaatggtc

SEQ ID NO: 30764 - DNA, 293 bp, Gossypium hirsutum
  Clone ID: LIB3148-042-Q1-K1-C6
agtcggcttctgagtatgaagtcagctaatgctttgaagttatgtatggtcataatccgagaagaaactttcttgctaaatgaggaaaaagtatgaaacagggtatttctatttcgctgcatatgaagtggaattgcctgtctaggggtggctgaacgtatacatgtcatatgggggtcaaggatgccatagcgaggccacactcctatgctggcgagtaagatgagagccactggctgacaattacttatttctatggatgctcaacacatatgacatgctgcaattgtttc

SEQ ID NO: 30765 - DNA, 276 bp, Gossypium hirsutum
  unsure (1)..(276): unsure at all n locations; Clone ID: LIB3148-042-Q1-K1-C8
cttttgatatatatatatgcaaagaaaaaaccccgactgctttttgattggaatattgtaaagaatattgattatatgggaggtcggtggctaagtgatatgcattatctttccttgttctcattgctatttattcaaagatgatatgctatgtaatatatctgtcaacttttgtatatatatttatatatcttttcaatcaattaaacancanacaaaccaacaaatacacaacctgaatggcaaataaaacaccccctgtaacaacacattaaa

SEQ ID NO: 30766 - DNA, 309 bp, Gossypium hirsutum
  Clone ID: LIB3148-042-Q1-K1-C9
ctcgttcatcggatcagtcatggcagacgcgattgaactgaaaacagccccagctgactgtcgtttccctacaacaaatcaaactagacattgtttcacccgctacattgagtttcataggtgcttggctgcaaagggtgaagagtctaatcaatgtgagaaatttgccaaatactaccgttctctttgtcctggtgaatggattgacaagtggaatgaacagagggagaatggtactttcccgggtcctctgtgactgtgatcacatattggaaaagaggtgaagcattgctttttggcatgggaaac

SEQ ID NO: 30767 - DNA, 223 bp, Gossypium hirsutum
  Clone ID: LIB3148-042-Q1-K1-D10
tgcatttataatattattttatttgtccaatctttaataaaaaaaaaaaaaaaaaggggggggaaaaaaaaaaaaaaaaagaaaacaaaaaaaaaaaaaaaaaaaaaagggtgaccgatataaaagaaggggggcggcttttttagggtatccagttttccgtccctttttttccagcttttatgtttttttttggggccccttttttttattgtgggggccg

SEQ ID NO: 30768 - DNA, 264 bp, Gossypium hirsutum
  Clone ID: LIB3148-042-Q1-K1-D11
cccacgcgtccgtaatcagcatgcgtcttattttagctcaattagcccattgctttgattgggagttgcctgatgggatgttgcctaatgaactcgacatgagcgagaagtttggcctttcgttgccgagggctaatcatttacttgcaaagtcgacttatcgtttaattgcttaaagttaaggttgtaaatgaacatttgggttgttgtttatgttgatttctcaaaataaataaatgagcataaacaaataaaacttatttt

SEQ ID NO: 30769 - DNA, 351 bp, Gossypium hirsutum
  Clone ID: LIB3148-042-Q1-K1-D12
cttcagcaaggattcggaccttctttctttccaagaatgcaaccttccgatagagaattcaaagaacaaccaagcaaggagaagttgactcctattgtcgatagcacgaaagaagtacctgggtggccatcttttggccaacttgtcgcagatctttctaagcttgcacttgaagcaatgggaagcatattcctctactttgtcccctcccgttttcaaccaaatagctcaaagaaaggtcttacaccaatgaaggattctcttataatgcctgaagatgaagtcccccctccgttagttcaaaggcaggccactccagcacccatttctgaaacccggcagacgcatacg

SEQ ID NO: 30770 - DNA, 314 bp, Gossypium hirsutum
  Clone ID: LIB3148-042-Q1-K1-D3
ggaataagcacttaagtcactatgggagtccaggatattcagggtgagggatttcccgatcagttttctgggttggctgactccttatttctggacctaccgcaaccttggctagccattccttcaggttgaaacatgttgaaacaagatggaactctgtgttgcttctcactctgcatggagcaagtgcaacgttcatgtgaaactctgagatctgactttatagagatatatggacctttgaaatactgctccgcatgtatgaaatctgtgaatggaaaatggataatgatgggaattccattgcatgctca

SEQ ID NO: 30771 - DNA, 416 bp, Gossypium hirsutum
  Clone ID: LIB3148-042-Q1-K1-D6
gtcgattaggtttttttcatgtcgtcaacaatgactacactcattggttcatgtatgccattggcggtagtagccaccctacaattatcagccagggcaataggtatattgcgtcaagcatctatgtaactaagcaagcgaccagtaggggctacttatcaccggaacagtggaagaattggaactgggtatcacagggtgaccacttcatgaacggtgcctattttactacatccggtgatcctaatgccagcaagctattcgatgctgacaaaataatgtctttccaacccggtcgattggtccccagactcacaaggtatgccggaacactccactgcagaattggtcgcccttgttaaaaacattattttgatatgcatacatcctctctttttggtatgtacaacatttga

SEQ ID NO: 30772 - DNA, 196 bp, Gossypium hirsutum
  Clone ID: LIB3148-042-Q1-K1-D7
gaagaaactaatggtatcaatgtaattagtgtcagtgagacattagaaatggatgcatcaaagcagaagaatgctgaggaatcggctatcttggttgatcatggagataaagaaaatccacaagaaactaatgaccgtgacaccgccagtttcgatgaggaattgcaaaaagatggagcaaagcaagaaagtattg

SEQ ID NO: 30773 - DNA, 257 bp, Gossypium hirsutum
  Clone ID: LIB3148-042-Q1-K1-D8
cccacgcgtccggaactgctcaaacacccaggacattctcggaataaatggtccattgtttcagctctttctctacgttgggggcagcttttgttggttgctaacttcctatactgcatatttacttttgtaggcaaataattccatgagagtcttcagattgtaatctttatttttgttggtagatttaggctccaaatttttttgtaaaatttcctgtagatggtttgtaaagcataaactctaggatttgcatc

SEQ ID NO: 30774 - DNA, 312 bp, Gossypium hirsutum
  Clone ID: LIB3148-042-Q1-K1-D9
gattgtctcatcagcgggacagtagatttcatctttggggatgcggcaagcgtgttccaaaattgtcagatcatcgcaaggaagccaggtgaaaaccagaacaacatgattacagcccacggaaggaaattcccatacactcactcagccattgtgcttcaaaattgtaccatctcgggtgcccctgactacctcccggtgaaggacaagagtaagacgtacctaggtcgtccttggaaagctttggcgaggaccatcataatgcaaagcaatattgatgacatcattacaccagagggttacttgcccatg

SEQ ID NO: 30775 - DNA, 379 bp, Gossypium hirsutum
  Clone ID: LIB3148-042-Q1-K1-E1
aaaaaatgctagactttaaaaaaaaaaaatttttttaaaaaaaaaaaaaaaaaaaaaaaagggggggaaaaaaaaagaaaaaaaatttaaaaaattggggggtggttttaaagtatcttaaaatttcggcccccccctttagaggtcccaacttttctttcccttccctccaacccaatacctttttttttgggtcaccccctatttattcccctgcccccctgtttccaccccctttactgtgaaacccctggcttcccccaatttaatctctttgaataccatcctcctttccccagttgccctttttccaaaaaatgccccccccctttgccttttccaacaattccccccccttattggttatttcccccccccc

SEQ ID NO: 30776 - DNA, 397 bp, Gossypium hirsutum
  Clone ID: LIB3148-042-Q1-K1-E10
cttcatcgcaactagtagaaaatttatgctatggcaaggcaattcaaaatcgcagggttggcctgaaagcactttccactccagaagttattgcggcaatggatacaacccaactaggaaccctcattatgaaattaggagcagcaaatgccaaagcaacgttgaatgtatataatgaaataattaagaaaccagaattggttgaagatccccaaaccgcaaactatgatgtagctgttataggtcccgaaattgctaattgtgaaaaggaactgattaacgcaaaggttcaagcacctcgactccttgctgggaatcgatttataaaatattatgtctcaatgggatatgagataacatcaactctcgagcttgaaaatccaaatgagtattaggc

SEQ ID NO: 30777 - DNA, 418 bp, Gossypium hirsutum
  Clone ID: LIB3148-042-Q1-K1-E11
tacaggctcagttttctcaaatgagaccaattatcccctcagttgctcctcgtatgccaatgtttcctcctggtgctccaggtcttggccagcaatttttatatgggcaagcacctccagctatgcttcctccacaagctagttttggttatcagcagcaactgcttcctggaatgaggcctggtggcccccctgtaccaaacttctttgttcccatggtccagcagggtcagcagggccagcgtccagggggacgaggaggagctggtgctgtccaacagactcagcaaccaatgccgatgatgcagcagcagatgatgcccagggggcatgcctatcgttacccccctggtcgtaacatgcctgaagttccactgtctaaatgtggtggaggcatgctttctgttccatacgacat

SEQ ID NO: 30778 - DNA, 120 bp, Gossypium hirsutum
  Clone ID: LIB3148-042-Q1-K1-E12
aaaaaaaaaaaaaaaaaaaaaaaaattaattaaaaaaaaaaaaaaaaaaaaaaaaaaaaggggaaaaaaaaaaaaaaaaaaaaaaaaaaaaaaaaaaaaaaaaaaaaaaaaaaaaaaaaa

SEQ ID NO: 30779 - DNA, 229 bp, Gossypium hirsutum
  Clone ID: LIB3148-042-Q1-K1-E2
gtttttgactaccttttctccaatggcagcttagaaaaatattgaattgataggagagttgaattcaattaccattttcaaacttcaatttcaaatgttcttctttcccttcatcgctttttttctgcttaataattgaacccttcattggatttgaactcttgtttacatacactgtaatattaggatctttttcctttgttctatatatttttggatttttattgtt

SEQ ID NO: 30780 - DNA, 228 bp, Gossypium hirsutum
  Clone ID: LIB3148-042-Q1-K1-E3
cccacgcgtccgataccgtcctagtctcaaccttaaacaatgcctgcagaaaacacatgtgtactacattagaaacaagaaagcagatatcctctaaacaatatcttcttaaaatcttgcatttcaatatttggtgttcactctttttaggaaactataaattaatgatttcttgtttggcgcattcagtaaaatttgagacattcatacttttatctttcataaacc

SEQ ID NO: 30781 - DNA, 347 bp, Gossypium hirsutum
  unsure (1)..(347): unsure at all n locations; Clone ID: LIB3148-042-Q1-K1-E4
gcgagtggccgccctgttttctttgcgtcatttaaccctttaacaatggttatagttgccattatgagctcctttatcttttctgagataatgtatttaggaagggtaattggagcaatggtgatagttgtagggctttacatggtcttgtggggaaaaagcaaagatcagatttcgtcagattcatcgaacaacactaaggatgaaattcccattagtggtgatgaacttcaaatggccactcaaacaacaacacccatttncaatcaagattttgtagttttggatttaaacaaaggggatgtttctaatcagtcttccaaaaacaaccccaaataaaatatcat

SEQ ID NO: 30782 - DNA, 234 bp, Gossypium hirsutum
  Clone ID: LIB3148-042-Q1-K1-E5
cataccctatcggaccttgtttgtttcatttattcgatggggttcgtcaccgccaatctaacaccttgaagttggaagcctgttttgcccaacagctggtatttatcgtaaataatttattgaacgtgctttaagttcatatgggtagcttgaagaatttgtaacccggcgacctgacctgattaataatactaatatatattgatttagtgttgaaaaaaaaaacttaaaacc

SEQ ID NO: 30783 - DNA, 339 bp, Gossypium hirsutum
  Clone ID: LIB3148-042-Q1-K1-E6
cccacgcgtccgccacggtctaaattaggacccgcagcaagtggcggtgaacgtgcggcggcttctgcaccaccgagaaaagtggggtcaggtataaggtaccgggagtgtcaaaaaaaccatgccgtgagtatcggaggccacgcgttggatggctgtggggagttcatggcggcaggtgatgaagggacacttgacgccttgaaatgtgctgcttgtaactgccacaggaactttcaccgtaaagaaactgacggtgaaggtagtagtatctacaaccctcaccatcatcatcaccactaccagcagcagcaacacccccaattctcgccctactat

SEQ ID NO: 30784 - DNA, 158 bp, Gossypium hirsutum
  Clone ID: LIB3148-042-Q1-K1-E7
gaccctctatggaggctctttgttttgcagcaaagcatgtaaaatagattgcctcgtgtaataaaatttcaaagtgaaaaattgtatattcaaattgtttgtaacaattggcataaagtgttggtgtgagtgtgattcaattctataatctcaaggac

SEQ ID NO: 30785 - DNA, 123 bp, Gossypium hirsutum
  Clone ID: LIB3148-042-Q1-K1-E8
ctcgagtccctaaaagccagcatggttagtgtaacatcatcacccagttttatagggacaagattttggatattatctcaaacgttttaaggtctattaacttatggcgtaaattttaagccc

SEQ ID NO: 30786 - DNA, 288 bp, Gossypium hirsutum
  Clone ID: LIB3148-042-Q1-K1-F1
cccacgcgtccgggaaagtgctggatcctagattgtccttaaaagaccccttaacatggccttggtgagtgtacatgtgctgctgaagctctttccttttttcttttttctgttaatctttttgtagttggatagctatgtgttgatgatcaatgtgttgacaatgattgcaagaatgtgttttgtaattatttcgagtgagtttcgattagatgagccaatcagacacataatgttcaatcttttttatgaccaatgtatcttttattttgtttatgggtacagatt

SEQ ID NO: 30787 - DNA, 363 bp, Gossypium hirsutum
  Clone ID: LIB3148-042-Q1-K1-F11
cgccatttctccaaaatagtagacggtcgccgccctgcccctcagggcttccttgcagagtgttatttgtatcgagcctatgcttacaaggcctcaggtcgcatagctgagtcaatctcggattgcaacaaaacgcttgctcttgatccaactagcatccaggcccttgacaccagggcatcgcttttggaaaccatccgctgtttacccgactgtttgcacgactttgaacacttgaaactgctttacaattccatcttgcgagacaggaagctcccaggtccagcctggaagcgtcacaatgtgagatacagggagattccaaggaaactctgtgcattaaccactaaaattcgacaattg

SEQ ID NO: 30788 - DNA, 326 bp, Gossypium hirsutum
  Clone ID: LIB3148-042-Q1-K1-F12
gaagaagtgaagtcaagtgacaaaaaactaagtgaagatgaatatgctgcctcggaggatgaggaaaccgctggaaaaatagatctttaggcacatattatgccctgcatactcgctacaaaaattgtcttgtgttgtacatgattttcagctctaagaaaattcgaacacgacagaaccggggaacatgtggaaaaattcctacttacctcattttttcattacttttcatggatgtttgtgtaaattaatccattgttgttcaataatttaaatatttatccactgctgagactttaaaaagcaattctcccatatgctcctaa

SEQ ID NO: 30789 - DNA, 99 bp, Gossypium hirsutum
  Clone ID: LIB3148-042-Q1-K1-F2
cccacgcgtccgaaaaaaaaaaaaaaaaaattaataaaaaaaaaaaaaaagacggccggtcgggaggaaaaaaaacaaacttacgtaagcatgcataca

SEQ ID NO: 30790 - DNA, 300 bp, Gossypium hirsutum
  unsure (1)..(300): unsure at all n locations; Clone ID: LIB3148-042-Q1-K1-F3
cccacgcgtccgtgcaaactttgtcatttgttgcttcttgtagtttaagaataattggtaaaattttcggtttctattgttggtcttggtagttggaaaaaaaaatgtattgttttccccaatctcgaggtcattccattcttgatggaaattaacaggttaagtcggtttctttaatctttaaatataaagataccagatttctttggattcaaaaaaaaaaaaaaaaaaaaaaaaaaaaaaaaaaaaaaaaaaaaaaaaaaaaaaaaaaaaaaaaaaaaaanannnannnnannnnaa

SEQ ID NO: 30791 - DNA, 271 bp, Gossypium hirsutum
  unsure (1)..(271): unsure at all n locations; Clone ID: LIB3148-042-Q1-K1-F4
tgtttctttccaattaagggggccattttttcctaatctcatctgnnaaactaaagaaccaggagccacgcttgtatctatttccattnggaaatcaatttcttnttctttatttcatgcctgtcatagaggatcctaatttggataaacatggttgtttaggattctttaaacaagttttccttctagctttaatttattaagtagtttcagttggtgttcccattnaaaaaaaaaaaaaaaagacccaaccatataactccttcttaac

SEQ ID NO: 30792 - DNA, 335 bp, Gossypium hirsutum
  Clone ID: LIB3148-042-Q1-K1-F5
tgcagcctcaccagcaattccaaatgatgtttttttcaaggcattccagattcatcctagagagggtgagagaatcaaggtcaaattgacacctaaaaaatagattaaatcaagtttaatatgttgtgttctcaataatcttaaattaaaaacgaataagcttagagttattattatatttaaaatagaaaataagcatctatatggtattcaaatttattattattgtgtttgaacacttgaaactgctttacaattccatcttgcgagacaggaagcttccaagttccccctgaaacctttctattttaaaatatatgatattttctatgaaa

SEQ ID NO: 30793 - DNA, 307 bp, Gossypium hirsutum
  Clone ID: LIB3148-042-Q1-K1-F6
cttcctttcaaaccctagcttccttcttctttgttattttgcttcagcactctaaagccgcgggaagccaaaatgggtatttctcgtcattccatgcacaagaggcgtgccactggtggcaaaaagaaggcttggaggaagaagagaaagtatgagcttggaaggcaacctgcaaacacaaagctatccatcaacaagacagtcaggaggattagggtttctaagtggcaatgttaagtggcgtgccttgaggcttgacacatgagtggagctattgaaacctggaaacttttgtgacaatactctt

SEQ ID NO: 30794 - DNA, 322 bp, Gossypium hirsutum
  Clone ID: LIB3148-042-Q1-K1-F8
cccacgcgtccgaaaagaggtagatgacgcaattgctcaagctaaggaaaatccactgcctgaatcttctgagctcttcacaaatgtgtacgcaaaaggtttgggtgttgagtcatttggagcagataggaaagaagtaagagctgtacttccataaactgggactttgttggaacgtcttcattcttttttttagttttaccaccctcaaccttggaagaaagaagaataaagaaccaaaagaggctaaccagctcttccaagttacaaatatgacttagcacttgttttggtccggaatattaattattttccctaaaaa

SEQ ID NO: 30795 - DNA, 275 bp, Gossypium hirsutum
  Clone ID: LIB3148-042-Q1-K1-F9
cccacgcgtccgcccacgcgtccgcccacgcgtccgcgtaattcggccctgaaatgaaaaaaaagggaatatagatggaaaaaggggggagaggttggacgtaaagtaaaaaaaaatcgatatgctaaaataaaatatgaaatgaaattgaaacaaggctaatgagatagaaataaggaatcataaatagagttcgggttcgaattccatagataatatggatggtgttgcctataatgatggactgtttaatttttgtgtttgattttggtttt

SEQ ID NO: 30796 - DNA, 139 bp, Gossypium hirsutum
  Clone ID: LIB3148-042-Q1-K1-G1
cggacgcgtgggaggcacgatattaaagaatagttaagatccaatccaattgtacaaaacgacagtacactattgctttatcattttttccagtatacgaagaagattaaataaaaaggcaatagaatacagtttatgc

SEQ ID NO: 30797 - DNA, 380 bp, Gossypium hirsutum
  Clone ID: LIB3148-042-Q1-K1-G10
atggcacctgcccctggctaaggcctgatggtaaaacccaggttactgttgagtactacaatgacaagggtgccatggttcccgttcgtgttcacactgtcctcatttccacccaacatgacgaaactgttacaaatgatgaaattgctgctgacctcaaagagcatgttatcaagcctgtcatccctgaaaagtacctagatgagaaaacaatcttgcaccttaacccatctggccgctttgtcattggtggtcctcacggtgatgcaggtctcactggtcgtaatatcattattgacacctatggtggctggggagcccattgtggtggtgctttctcttgaaaagaccctaccaaagtggacaggagtggtgcttac

SEQ ID NO: 30798 - DNA, 297 bp, Gossypium hirsutum
  Clone ID: LIB3148-042-Q1-K1-G11
ggcgacctggctgtaccagcttttggattgtcatcaggtgtgggcgtgtctaacgcatgggttttcgaaatcgtgataaccttcgattggtgttcaccaggtaccccacaacccgtgattccaaaaagggaagcttgggaacaatcccaccattggcaattggtttcatcgtgggggccaacattttggcaggaggtgccttcgatggagcctcaatgaacccagctgtttcattcggaccagccttggttagctggacatgggacaaccactggatctactgggtcggacccctta

SEQ ID NO: 30799 - DNA, 306 bp, Gossypium hirsutum
  Clone ID: LIB3148-042-Q1-K1-G12
gggacaggcataactccaatgcttcaggttattgaggctatactaaagaaccctgatgacaagactcaggtgtcactgctttatgccaatgtctcccctgatgatatattgctcaagcagaagcttgatatacttgctgctagtcatccgaatcttaaggtactctacactgtagacaatccaactaaaacttggaaaggaggtgctggattcatttcaaaggatatggtcacaaaatgcttacctggtcctgctgaagatactcttatccttgtatgcggtccacctggtatgatggaacacata

SEQ ID NO: 30800 - DNA, 368 bp, Gossypium hirsutum
  unsure (1)..(368): unsure at all n locations; Clone ID: LIB3148-042-Q1-K1-G3
agtaatttaaccatacagaagcaagcaccaaagaagaaaataaaaaagaagagtgcaaagaattggcgtttagttagggttaggttgagtgccatagcatttcaaaaatggagtgctttggcaaaaggtgttcgctgttcaatgctataggcaatgagttattttaattttataaaaaagaaaaaaggttaagtgaggttaatagactactgtaaattagtgatcgaaagataggtgagtttctaaattcttagggtccttcaatttaggcccgaagggtgaaatgtcttgcatgtgtnccncngactttttaataacccgatacacggcccaggaatacaagatgcatgtcngtttgcttttgcnna

SEQ ID NO: 30801 - DNA, 122 bp, Gossypium hirsutum
  Clone ID: LIB3148-042-Q1-K1-G4
gtcatactttctttaataatatttgccattatttttgataaacgattgtataatctatgatggagggaatttagaatggaaaaaaaaaaaaaaaaaaaaaataaataaaataatactttaat

SEQ ID NO: 30802 - DNA, 360 bp, Gossypium hirsutum
  Clone ID: LIB3148-042-Q1-K1-G5
ggcgacctggctgtaccagcttttggattgtcatcaggtgtgggcgtgtctaacgcattggttttcgaaatcgtgatgaccttcggattggtgtacacagtgtacgccacagccgttgatcccaaaaagggaagcttgggaacaatcgcaccattggcaattggtttcatcgtgggggccaacattttggcaggaggtgccttcgatggagcctcaatgaacccagctgtttcattcggaccagccttggttagctggacatgggacaaccactggatctactgggtcggaccccttatcggtggtgggctcgctggtctcatctacgagttcatctttcatcagcaacacccacgagca

SEQ ID NO: 30803 - DNA, 307 bp, Gossypium hirsutum
  Clone ID: LIB3148-042-Q1-K1-G6
cccacgcgttcatccacgcgtccgcaagttgccaatgatcagtgcccaacaacagggtgagaggtgaggttccaaagaatcaagtggcaatgaaggaacaagagctgctatgctgtatttggcagctacccttttcaccacagcggatgcttcttgtgcaaatgctggggtcattgatgatcaccttgaaaagagcaaagcttacaaggagttgaatgacaagaagaggttggccacaagtggagcaaactttgcaagagcatacactgttcaatttggcacctgcaagttccctgagaactttaca

SEQ ID NO: 30804 - DNA, 111 bp, Gossypium hirsutum
  Clone ID: LIB3148-042-Q1-K1-G7
tgggaatttgcaaatctagttactgcgaactctgtaacacaggaacttattatatttgtgatgcttgcgcgctatcttactataaaaatgttggggttattttgtgtactc

SEQ ID NO: 30805 - DNA, 179 bp, Gossypium hirsutum
  Clone ID: LIB3148-042-Q1-K1-G8
caaaacacagtgattttcgtgcttttgttcactgttgtatgtatgtgtagttggattgctcaaatttctatagttttatttattattaccaagagtttgttagggattttaaagggttttgaagtctcgtccctcttcttcaccatttatttttatggttttggagtttgaatttgttc

SEQ ID NO: 30806 - DNA, 212 bp, Gossypium hirsutum
  unsure (1)..(212): unsure at all n locations; Clone ID: LIB3148-042-Q1-K1-G9
gtctggctccgattacggcggagtaaacgatgttcgagtaacaggtaaacttttagccctcgattttcttgctttgattttatctgaaaaagagaaaagaaaatccaggaaaaagagtctgaaatcacctttccaatttttgatctttttttctctgaaatttttctgtttttctattcaatatccgncaaaaagatcccgttacaatgttt

SEQ ID NO: 30807 - DNA, 305 bp, Gossypium hirsutum
  Clone ID: LIB3148-042-Q1-K1-H1
ggaacctacaatgggggactactttcgacagaagctgggactattgctcgagtgattgcagatgccacaataacaatggctggcttcttaggtcagagtcagcttttgaatatcactctacttccttcactactgatatgcgtcatctctattgctgctacatgctttacctacaactctctgtattgatctactctataacaagaagaagaaaaatcagtatctccttcacaattcaatcatgatcctttacaggttttacctgttcaaaagttgttttcatcatcatcatcatcattattata

SEQ ID NO: 30808 - DNA, 260 bp, Gossypium hirsutum
  Clone ID: LIB3148-042-Q1-K1-H10
ctgggatttgaatgctttgtatagatggataggaataggcctagggcagttacttttctttctctcttttcacttttcagagtacttttcctcttagttgcctgcctaccacaatttacttctcatttctcgtgtatgtaatctagtttccttgtcaactagttataagccttttttgaggattaccaactctttgtattcgtttgcaattagacctgttcatgagctgagttatcaatctaaacttaaaggtttgcttt

SEQ ID NO: 30809 - DNA, 412 bp, Gossypium hirsutum
  Clone ID: LIB3148-042-Q1-K1-H11
gcagattattatgagactgatgcagacaggaggtttttgtctgcaaagggcagtgttccgattggtataggaaagaattcacatatcaagagagccattattgacaagaatgctcgaattggagacaatgtgaagatcataaacagtgaaaacgtgcaagaagcggcaagggaaaccgatggatatttcataaagagtgggattgtgacagtagtcaaggatgccttgattcctagtggaactgtaatctgagaagattgcattatgatacagcaaacccaccattagtgtttctagatagagaaagtaatgcattaccaaatcacttccacttaatccctatcatggataatttgagcctccggcggattattatttttattaaatggaatggaacccattattgcccgcc

SEQ ID NO: 30810 - DNA, 132 bp, Gossypium hirsutum
  unsure (1)..(132): unsure at all n locations; Clone ID: LIB3148-042-Q1-K1-H12
ntaaaaaaaaaaaaaaaaaaaaaaaaaaatttaaaaaaaaaaaaaaaaaaaaaaaagaaaagggaaaaaaaaaaaaaaaaaaaaaaaaaaaaaaaaaaaaattattgaaaaaaataagggggggggggttaa

SEQ ID NO: 30811 - DNA, 100 bp, Gossypium hirsutum
  Clone ID: LIB3148-042-Q1-K1-H2
cttgaatttgctgactagtgaaatttagaattgttgtttatagaaaatgtattattttatgattgtaaatttgaaaagaaaataaagaggtttatttttc

SEQ ID NO: 30812 - DNA, 389 bp, Gossypium hirsutum
  Clone ID: LIB3148-042-Q1-K1-H3
gatcacatagcagcagtagaacagcaattagtttcagaaagaatgaggaggaaacttaatgaagtaaatattgcagcccaagctcaacttgctccggtccaagaccacatcaatttcactcttcagcaagcgtatttcaaatgtgcatatgaatgctttgatagaacaaggaaacaagaggagataagcaattgtgtagaacattgcagtgttcccgttgttaatgctcaacagcattttgagaacgaaatggccaagtttcaagaaaggttaaatcgatccttgatggtctgccaagacaagtttgaatcagctaaacttcaacaaaataaagccgatgcaatcaaatgagtggagtcatgcgtcaaccagtcaatcgaggataacat

SEQ ID NO: 30813 - DNA, 417 bp, Gossypium hirsutum
  unsure (1)..(417): unsure at all n locations; Clone ID: LIB3148-042-Q1-K1-H4
cttcagtgatactggctgctttggattcggcatccaggagcacatagatcttggaatcaagtatgacccttcaaccggtatctacggtatggatttctatgttgttcttgaacgagctgggtaccgtgttggccgtcgtcgcagatgcaagtcacgtgttggtattcagcacagagttacaaaggaggatgccatgaagtggttccaggtcaaatatgaaggtgtcatccttaacaagtcccaaaatattggagcttagaagtagcagtatgagtttatttttagttttgagtacctgattttggctagtttatatttatcagatcttattttcctgaancaaattatnttatttgtttagggtggatcctaangtttttcttttggtggcctagtttataatatatttacaatctg

SEQ ID NO: 30814 - DNA, 300 bp, Gossypium hirsutum
  unsure (1)..(300): unsure at all n locations; Clone ID: LIB3148-042-Q1-K1-H5
aaggtccacctatgggtattgtatcttccttggaggttatccggtctcgtggagctcgaagaaataacatgttgtgtctcgttccacagcagaggcggaatacaggagtgttgcacatgtcactgctgaaatgacgtggattcagtccctgttaactgaattgtgtgttccaaacttaccaaaggcgctgatttgatatgatagctcagcagcgatagcagttgtaggaaatccagtcatgcactccaaatttaagcatgtggtagtggatatattcntttgttttaattggaatcaaaa

SEQ ID NO: 30815 - DNA, 123 bp, Gossypium hirsutum
  Clone ID: LIB3148-042-Q1-K1-H7
cttttttgttatcggagacgcgaatatttttgctttgtgttgccagtgttatactttgtgactgagagctttctcaaagttcttttggtttagaatttattactaatatgttatttattggtc

SEQ ID NO: 30816 - DNA, 294 bp, Gossypium hirsutum
  Clone ID: LIB3148-042-Q1-K1-H9
gtcgtggaccacatacgatgcttacatctaccattctgcagacacttggtctctcttccgctgatgaactaattgggtggacctatgcagatccatcctgggctcgcatcgccgcacttgtcccagttgttgtctcttgtgcagaggctggtgatgaagttgcaaataagattttgaaagaggcagttcaagagttagctttaagtgtgaaagctgttgttcagagacttggcctgtgcggtgcagatagaaaaaattccttccctcttgttatggttggtggtgttcttgaag

SEQ ID NO: 30817 - DNA, 118 bp, Gossypium hirsutum
  unsure (1)..(118): unsure at all n locations; Clone ID: LIB3148-043-Q1-K1-A1
aaataactcaaacacggttttagaacgtgactgtttatgcaatgttaatcggatatctttccttgcngaaaaaaaaaaaaaaaaaaaaaaaaaaaaaaaaaaaaaanggagggccgcc

SEQ ID NO: 30818 - DNA, 362 bp, Gossypium hirsutum
  Clone ID: LIB3148-043-Q1-K1-A10
tcatcccaaagagaaaaccaggcatccttcaactagtatgcgatgtcagtgaggttcaggagaaagaaaatgaatgtaagaagtcattggacccaaaaagactccctgtgggaattgctgcaggcgcagccaaatccggtgaaaatgatggcaccaaaaaatgttttcccaaaagtaagcgccgccattggtcctccagttttcccaaagggcggccgcagttttaaagtaaattcccagccaaagggctggaaccagaagggctgaaaagacccgttttggactttgctactagagtatctttcagtagtttttaagtttatacagttccccgagtttttttttttatcaaccataacgct

SEQ ID NO: 30819 - DNA, 409 bp, Gossypium hirsutum
  Clone ID: LIB3148-043-Q1-K1-A11
cccacgcgtccgcccacgcgtccgctccattgtcaagtgtaagttcaccagttgttgctagggagaaatcaaaatggggccaggtggaccaggaggacctccgggatggggcggtcctcctcccggaccgggtttttccggtggtatttgtgacttcattggttcttgtttgagctttctgtgttgctgctggctgcttggagactgttttggtggtccaatgggtccaccagggccacctggaccacctggatttggacctccaccaccatagttatatgctgtttatcatcttcatattccaacacaaaaattggaggcttttctagcttctatctgggtttcaacttagctatctaaaatacatatttatgtaataattgtttgcatttttagtagaatttatgtt

SEQ ID NO: 30820 - DNA, 253 bp, Gossypium hirsutum
  Clone ID: LIB3148-043-Q1-K1-A12
tctcaacaatgcctgttcttgggtccttggttggagccacccttgtttctttctttgcctactatttgcagtaagccagcaagaatatacgaaagcatgaagtgttgaagaataaaaaatggtggattaataaatgtaaaatattactcggggttcaatccattttacttgcttttcttccttctttttttgttcatcacttcatttgtacgttcatcaaaaaagttgaattccatgtgatactttgcagttg

SEQ ID NO: 30821 - DNA, 410 bp, Gossypium hirsutum
  Clone ID: LIB3148-043-Q1-K1-A2
gttgaacttgttcttaggagacttcaaggaatagtggaaaccattcgcggtaacctaatctatctcagagacagagaagcagatatgagagaagtaagtgaagcaacaaatgctagagtggcatggttcagtatcatgtcccttggtgtctgcatcgcggtttcggttttgcagatatggtatttgaagcgttactttgtaaagaagaagctcatctagattatatacacaagtagtttgtgaagcaaagttaaaaatgtctttgaagaactagaaaaaggaaagatagaagaattcacttaattcttgctgtaccattggcttcctttcatttcctgctgatttgggaatgaagattggtgatggtttattgttcaatggtcatatgaaagtcttcttttttaaatcta

SEQ ID NO: 30822 - DNA, 403 bp, Gossypium hirsutum
  Clone ID: LIB3148-043-Q1-K1-A3
gataaaataatcctagaaaaataattaaaatggccttattacaacccaaaaccaaataatgatatgtaataagataaaacttataaagaaataaatcggctacttattgcaattaaaagaaacagaaacaatagtgtggccatctccgagtccctcacagctccaaaccatctaagcttagggattacctgataggagactggagttaatccacgctccgagcactcttggctgatccctttcgctgaatggcgagcttgtctgtgtagggcgttgaataggaaagatcgaagaattcacttaattctggcttttccattggggttgctttcattttctgcaggatggggaattgaagattggggatgggtttattgttcaatggccatgtgagagttttttt

SEQ ID NO: 30823 - DNA, 70 bp, Gossypium hirsutum
  Clone ID: LIB3148-043-Q1-K1-A4
aaaaaaaaaaaaaaaaaaaaaaaaaaaaaatttattaaaaaaaaaaaaaaaaaaaaaaaaaaaaaagaaa

SEQ ID NO: 30824 - DNA, 410 bp, Gossypium hirsutum
  Clone ID: LIB3148-043-Q1-K1-A5
ccacttctagctttcgtgttcgggtttttagttgtggtcacgcaactcatattcaatgtgagcttctggaaaacgagtcatcaactagaggcttgtcatctggatgccctgtttgtttgcccaagaaaaacactcacaaatctagaagtaaaaccgctcttacagagaatggtttagttagttcgttgccctcaagatcccaaccagcacatggatcaacattacaccctcacgaaaacgacgcactagataactcttacggccttcaacaaatatcacggtttgaaattttaagtaaccttcaaaaagaccagagattagcccagatagaaaatttaccacagttgaggcttgcaccgtcggcgatttatcacgaaaaagtgaagaaaggaagtggagtattagcagca

SEQ ID NO: 30825 - DNA, 409 bp, Gossypium hirsutum
  Clone ID: LIB3148-043-Q1-K1-A6
accagacatgcccaatgggcctctatgacctttttcgcatcactcagctataccctaaggttgatatatttgctcagctccaaaatgctagtgaggcatttcggacttatattagagacggcttagctcagatggagaagaatgctgcagcaggaaggactccttcaagtgtgccaatgtcaacccctccccctgcttctctttcttcttcgtcacctgaatttgggcctctgtcccctgttcagaccaactctttaaatgattctaaattatcaagtacaaaacctgaaccaacaagctttaatttgccaccatcatacactgaagacaatcgggggggtggtaatgctgtaaatacagcaagagttcgtgcccctgaaaatgcattggcagaccaaagaaatgagag

SEQ ID NO: 30826 - DNA, 81 bp, Gossypium hirsutum
  Clone ID: LIB3148-043-Q1-K1-A7
attaaccataatttgtaaataaagaaaacctactcctttgagtaacttaacaaatgccctatttgagccacacttgactgc

SEQ ID NO: 30827 - DNA, 399 bp, Gossypium hirsutum
  Clone ID: LIB3148-043-Q1-K1-A8
gaaaatggtcaacttcatttcataggctctacaattgcttcattaaatggaagtagtctattggaatcctgtagggtgagtagtgaactaaaccccgatgactatttctttgaatggtcaactgaaatgaatggcttcacaggcaataattcgaacaagtcttggtctaaaaagcttaaacagatgaagcaatcctctataacccaaaagctcaaggcatccagggagtatcttaagtcattgttcagtaaatctgcttgttcagatgaatcttgtgccaaagcagatgtttcaaagaccaaagaatgtgcaaacaagtacatgaaaatgggaaagaagaacccatttggaaaggttgataaaggtagatacaaaatattcatgaagactattgatagg

SEQ ID NO: 30828 - DNA, 405 bp, Gossypium hirsutum
  Clone ID: LIB3148-043-Q1-K1-A9
ggaagagcacaaaaagttggtggagaagatcataaaacgagacacaaaacgtagaaagaggatagaggctgctggcattgattatgaatgcccagaaattgtgggtagcggtcagtctgctccaaagaagataaagttcgacgaagattaggcaccattaagttttactaccaaatgctgactatgaaggtaatggcttacacaatatagtcctcctgagatgctaaaaaattgcaagtttaatgtgtagttgagctggtgacaagctgtattgcctttggctctgcaacaagtaggaagttttatatttataatgttggatcctgttaagaccagacctcctgttggaatcaaattttgttatatgtaatttcaatcaatgttgttttttatatgctctgagtg

SEQ ID NO: 30829 - DNA, 390 bp, Gossypium hirsutum
  Clone ID: LIB3148-043-Q1-K1-B1
cccactcgtccgcccacgcgtccggcgaaagatgcagattcagaggctaccaggttatggcataggcgattgggacatgctggtgaaaaagctttgcagactttggcgaagcaaggcttgttgaaaggtgcaaattcttgcaaattggaattctgtgaacattgtgttctgggcaagcagacgagggtaaaatttggttcagcaattcacaatacgaaaggaattctggactatgttcacagtgatgtgtggggacctaccaaagtggcttctttgggaggtatgcactattttgtcacttttcttgatgattattcaagaaaagtatgggtgtatctaatgaaaagaaaaaatgaagttttggatgcatttctgaagtggagcttgaaa

SEQ ID NO: 30830 - DNA, 306 bp, Gossypium hirsutum
  Clone ID: LIB3148-043-Q1-K1-B10
ctttttcaaccctattttcatttttcaatcttgtttgtaataagttcattgtaaacccagttttacctatgttgaaacaaatagttggcaatatattggtgaatttacatgagaaaaaaaaaaaaaaaaaaaaaaaaaaaaaaaaaaaaaaaaaaaaaagaaaaaaaatataaaagaaaataagattaaaaaagcaaaaataaaaagaaagggaatattatatagagtggacaaaattaaataaactggccgttggttaaaacgttttaactggaaaaaccttgaattgccccaggttagtctttt

SEQ ID NO: 30831 - DNA, 281 bp, Gossypium hirsutum
  Clone ID: LIB3148-043-Q1-K1-B11
cagccttgtccaaatttggtacttcatgaaccctaaaactattcagaacatcttacccataggcattaaatgaagaacagatttagggtacatgaagtaccaaattcgttcaaggaagaaatcgcactggattgcccttgcagagaggattgtgaaaactctctttttattacctttcttttttgaagttgttaaagtctgtgaatgtaatttgaaatgtacatttccttttaatttccatcataattcactatttatataaaaaaaaaaggggggggcgt

SEQ ID NO: 30832 - DNA, 404 bp, Gossypium hirsutum
  Clone ID: LIB3148-043-Q1-K1-B12
cccacgcgtccggttatgggaacttgaagatgaggctgctaattactatactttgttacagtctgaactcttcatgtagcttcatggccggagaaactacgaagcagaaagaaatggtaggggtaaaaattagagaaggggaaaaaaagggagtgcggggggaaatatgaaaaatgaaggcgattattttttttgggactaattcattttggaaccccccaacttctttgaaaatatcaggactttccccttgtttctttgttcaatattaaaattaaaatgttaaaaggaggaatatgctttatattttgtcccatatttcctaattattttatcccttcccattcttgctccaaacgtttttaagatgaagggttgaaaaataattattttattttggtaaa

SEQ ID NO: 30833 - DNA, 322 bp, Gossypium hirsutum
  unsure (1)..(322): unsure at all n locations; Clone ID: LIB3148-043-Q1-K1-B2
ctatattgtaattttgattttcgggggaatttgttaattccataattttttgtaaaaagctttagtctcggtttgtaaattaataggattttgagtacctcctgtaatagtttgtaggcgcttcgaaccgaaaaattgccaaaaggttctcctctccagacttgaaaatcttcatttgctgacgttgccaatggaatctgcaagatctttttagcaacttccgcattgaaggtattagaaataatatcatctttccactctctactatctgcatcaatcaaatctgaaactaatgtaatatttccatttctctgnnnaaaaa

SEQ ID NO: 30834 - DNA, 229 bp, Gossypium hirsutum
  Clone ID: LIB3148-043-Q1-K1-B3
cccacgcgtccggccaaatctgacattcccatccttgctcaaaaatatctacacaaggaaattaatctggatggattcataacgcacgaagtgaattttcaagatatcaacaaagcttttgatttactgcttgaaggaaagagtcttcgttgcatcatatggatggattaattaattcttattttttttatcattttaaattttcatcaataaaagaaatattgatgtc

SEQ ID NO: 30835 - DNA, 350 bp, Gossypium hirsutum
  unsure (1)..(350): unsure at all n locations; Clone ID: LIB3148-043-Q1-K1-B4
cgggccgacgcgttccgcccacccgttccgcccacgcgtnccggtttaaattttgcttggaagacatgtccgtgggagctgaggagacatgccgagaaaagggactgcttcctctttctaatgagaagaagatcaaaaacatagactgaaaaatatgaactttcaacaattgagtgcctacccatgtcttccatttctagtagtgaaaacaataaagatttaaatctattatctgtttcctggtattgtacaatttttaattgcaaacattggtaatgtaatttggagtctattctgggaactttgtgatttatctaatattttcagcattcctgaaaaaaaaaaataaa

SEQ ID NO: 30836 - DNA, 329 bp, Gossypium hirsutum
  unsure (1)..(329): unsure at all n locations; Clone ID: LIB3148-043-Q1-K1-B5
cccacgcgtccgatcggagttgatggtctatttacggatttcacagagagcctccataatttccaggaatggacgtcgcctctctcacaaaaggatagtgacagtgcatctaaattggtggataaaattgccttgttgatctcttcttatagaaaaggatagattgtatcatatatttatatcatcctaagaacatatccattgagctttattcactccaaggcataataagcacatcttaattcaggttgagtttatgcaccgaagtgtgtaagttttaaggagtcctcctttcgaattttcaattttttttttctggnaaaaaaaaa

SEQ ID NO: 30837 - DNA, 274 bp, Gossypium hirsutum
  Clone ID: LIB3148-043-Q1-K1-B6
tctccattccaaaaaactccaatccaaagaaatggttgggtaaaatacataagggaaaaaaggatgccggggaaacctacctttcttttttatctaataaagcctgcaatgttatttgaaatgccatttctttaaattcatcacaattcacatattactcaaaaaaaaaaaaaagctcccttctaaggatccatctacatcgcgtgcatctacattaagctctttatataccacctaaattaattcactaccctctttttacaacttcgttaag

SEQ ID NO: 30838 - DNA, 404 bp, Gossypium hirsutum
  Clone ID: LIB3148-043-Q1-K1-B7
ctcaaggtggtcaaggggattcaggtcaggcacctacgtctacccaaccgtctgcaacaggccaacaagggtataatactagtcagcagcctaacccaaaccctggaagttatccacctccaggaagtactcaacctggttatggaatgccgccttcccaaactggctatgggaatcagccaccagcacagcctggttatggagctggatatggacaaccacaaacgcagaaacctttggccaatccccagatgtatgggcaggctcaacagtcgcctagcaccccaggaagttatggccagccaggatatcattcacagccgccatcttctggttatggtcaaccagagacaggttcacaacttgctcaaccaccaagttatggtgcggcatctgcccagcct

SEQ ID NO: 30839 - DNA, 274 bp, Gossypium hirsutum
  Clone ID: LIB3148-043-Q1-K1-B8
cggacgcgtgggcggacgcgtgggtgaagatagaagatgtcaaacgtgtttttgacagagttgagattgcgaaaatggctaaattgtgtggagtttcatattctttcacctgctagaatcccgtttggtttcatttgactctctctggctaggataacttggcatctcaataaatgacaattttatttgaaaactatttttttactcataatttcgactataatgtacttgtgttccttttttttttttggaatgatactagtggtttgctatc

SEQ ID NO: 30840 - DNA, 191 bp, Gossypium hirsutum
  Clone ID: LIB3148-043-Q1-K1-B9
gccgattcgggtttgtgtgtatctccctgtattggttcttaggtgacatgaatatggaaatatgacgttctgattttgttatctccgtttcatgaatgtgtaggaaatttgtgtacttgtattattcacgggctataatcgtgttcaaggtcttatatttatataaattttgatagattgcttattcttac

SEQ ID NO: 30841 - DNA, 409 bp, Gossypium hirsutum
  Clone ID: LIB3148-043-Q1-K1-C1
catagttgcagttaagattaaaggctcaagaacagggtggttaccgatgggtcggaattggggacaaaattggcatataaattctgatctaaggaatcaaccactttcatttgaggtcactaatagtgatggtcttacacttacatcttacaatgttgctcctaaaaattggaactttggccaaacttttgaaggaaagcaattcgaggtctaagatgaaagaaaagcatcatcatcaacacaatgtaatgttgggtattatttattttatatatatagaccagactgtcctattcttttctttctttttgtttatctgttgttttgtactgattggggatggaaatggaagggtagaattggcgacttttttattgtgtgtaaggacttaaaatagcaggatatatca

SEQ ID NO: 30842 - DNA, 302 bp, Gossypium hirsutum
  Clone ID: LIB3148-043-Q1-K1-C10
gtaaaattaatacttgattaacattttgtttcatctacccaaaaaacggttaagcgggcggataatttaaaaaaaaataaaaaaaaaaaaaaaaaaaaaaaaaaaaaaaaataaaaaaaaaaaaaaaaaaaaaataaaaaaaacaatataaaaaaaaaaaaaaaaaaaaaataaaattgtctctcctcttaaaaatccaaaactaacataccctaataatacataataaaaacatattttatattatcacataaatacaaataaacagccactattttataaatcctttaaaattataaaaa

SEQ ID NO: 30843 - DNA, 332 bp, Gossypium hirsutum
  unsure (1)..(332): unsure at all n locations; Clone ID: LIB3148-043-Q1-K1-C11
caatggctggattggcatcgtccaattcatgcatgagggcggtaaaccaggagctgagctgcattcgatagtacaactcgatcctgacccatgattcgtgtttgagcttgaagatgtgaccatgctgagtgctcagatagttcagcttcttggttccatcaagcaaccaatttttagttgcgaatttagtctagacaggttatgtaaaactatataatttcatcgtccatcttccattggttgagttcaattttaaaagagctgcaattactcagtttttaaaaaactatatttggacacctttaaacaactcttacagccggncgttttta

SEQ ID NO: 30844 - DNA, 403 bp, Gossypium hirsutum
  Clone ID: LIB3148-043-Q1-K1-C12
caagcttatcaagttgctgtaatcgataagaccaaatggctaagttcatctgattattgctgaaacggagctccttgttaatgtaaaagaacattctcttgttccggagcatcaggtgcttactaccgaggagaaaaagactttgctgcagagatatactgtaaaggaaacacagctgccgcgtatccaggtgagtgatccgatcgcaagatactacgggctgaagcgtggacaagtggtgaagataattaggcctagcgagactgctggtcgttatattacctatcggtatgtggtgtgaacatgtttcatgttaaataggattttcctagtttagttagaactagacagcctaatagattttgtagtcggggtatgaagaagacagctatgatgatagttt

SEQ ID NO: 30845 - DNA, 378 bp, Gossypium hirsutum
  Clone ID: LIB3148-043-Q1-K1-C2
cccacgcgtccgcccacgcgtccggttgcttttttttaattgtaaaaataatttacctttatgtttggataaaaaaaaaaaaaaaaaaaaaaaaaaaaaaaaaaaaaaaaaaaaaaaaaaaaaaaaaaaaaaaaaaaaaaaaaaaaaaaaaaaaaaaaaaaaaaaaaaaaaaaaaaaaataaaaaaaaaaaaaaaaaaaaaaaaaaaaaaaaaagaaaaaaaaaaaaaaaaaaaaaaaattataaaaaaaaaaaaaatagtggggggggatttatttaataaaaaaaatttaaaacggggggaagaaaaaaattttttttttttttatgggaacaaaaaaaaaaaatagggggcggttttttaaaaaatttttttggg

SEQ ID NO: 30846 - DNA, 395 bp, Gossypium hirsutum
  Clone ID: LIB3148-043-Q1-K1-C3
gtgctcttcaaggggttgggaaggtttttgagccttataaagacaataaagtagatcttcttgggcctaagttgcttttcattgcccttaatttgggtggcttagcacttggtgtttggaagcttaacacgttggggcttcttcctacacatgcatcagactgggtgtcatccttaccccctgctcaggaggtagagtattcgggtggaggtattcctctataataacgtgtttgttagtctttggttatctgatcaatttctggaggtgtgagttgacttatggaaggccggtcgaaatttcttgtgaagatggagaacaacaccaccttagatttttatgttaaattttatgaaacatgtagttgtagtatgggacgacatgattaagaacat

SEQ ID NO: 30847 - DNA, 412 bp, Gossypium hirsutum
  Clone ID: LIB3148-043-Q1-K1-C4
ggaataagaaaatccttaatcaattggattctttgtacttagttaacgtggggattcaattgaagattagtagctaaaatgttagattttctctaaaaaaaaaaacaaaacataaagataatatatagtgtaaaaattataaaagggttataataagggtgtgcggagggaaatattaatattgaatgctattttttgtgtttgggtctaatttatttatttatcccctcaactgttttgtatttatcagttctttttctcttgtatttttgttcaatattaaaattaaaatgttaaaaggaggaatatgctttttattttgtcccatttttccttattattttatcccttcccattcttgctccaaacttttttaagatgaaggtttgaaaaataattattttattttggt

SEQ ID NO: 30848 - DNA, 373 bp, Gossypium hirsutum
  Clone ID: LIB3148-043-Q1-K1-C5
ctttgatgggtgtaagggttttaaacttaacgaattctagtatctatatcggcgattacaatccaaaaaaaaaaaaaaaaaaaaaaaaaaaaaaaaaaaaaaaaaaaaaaaaaaaaaaaaaaaaaaaaaaaaaaaaaaaaaaaaaaaaaaaaaaaaaaaaaaaaaaaaaaaaaaaaaaaaaaggggggggcggttttaaaggaacaaagtttacgtacgggggcttggaaagtaatagtttttttataggggaacaaaaattaaattaaggggcgggggtttaaaaagggggggaggggaaaaacccgggggtaaccaaattaaatggcttggaaaaaaatccccttttggcaagttgggttaaaaacaaaaa

SEQ ID NO: 30849 - DNA, 376 bp, Gossypium hirsutum
  Clone ID: LIB3148-043-Q1-K1-C6
gtgggcttgggcctatattgttatgggtttggtttgggtttggtagttggtaattctaaagttactctgttactgtttggtttgggttctctcgtttttgatcgatgttgttactgttctcttaaaagcataaaaatggaatgaagtatcttcttttcaaaaaaaaaaaaaaaaaaaaaaaaaaaaaaaaaaaaaaaaaaaaaaaaaaaaaaaataaaaaaaaaaaaaaaaaaaaacacaaacatacaacaaaaaaaaaaataaaataatgaaaactaaaaataataaatatttccaaaagggggggcctttttaaaattccaaatttttttcccccggccatcaaaattatatttttttttttttgggcccctaa

SEQ ID NO: 30850 - DNA, 64 bp, Gossypium hirsutum
  Clone ID: LIB3148-043-Q1-K1-C8
aaaataattaacccaattaaaaaaattattttaaaaaaaaaaaaaaaaaaaaaaaaaaaaggga

SEQ ID NO: 30851 - DNA, 61 bp, Gossypium hirsutum
  Clone ID: LIB3148-043-Q1-K1-C9
gtaaaattaagagttgatgaacgtctggagttatctacgtaataaacggttaagcatgcgc

SEQ ID NO: 30852 - DNA, 316 bp, Gossypium hirsutum
  Clone ID: LIB3148-043-Q1-K1-D1
gatagatataaatgaacccaacaaatggactcctcgcgtctatctggaatctgagactgggatgccgagttccggcattccctatagtcccgacatggtccctggagtctagacagcttattatcgataccaacgccattagtatgcttattatcatatcattgttctaattatgtcgttttttactaattaattaaacagattttttaatcttttatctatctatgtatatatgttaaattctttggttccccaattgttgtttccattcatttgttaatgatgcttgcaaaagccaaaaattaagttaacgttt

SEQ ID NO: 30853 - DNA, 405 bp, Gossypium hirsutum
  Clone ID: LIB3148-043-Q1-K1-D10
attcaacatctatttgtcaattcccattcaacattctctttcggccgcgctctcatttatgttaatataaaactgttgctgttgaaaatatagctgaaaatccccattaaactatgtcccagaaggccaggagatgctacagctgtttatgtttccactgaaaaagctcaaaaagaacttggttggaaagcaaaatatggtatagcagagatgtgcagagatcagtggaagtgggcaagcaacaatccatggggataccagtcaaagccttaggctgcaactaaatactaattttcttccctagtcttttaaaaatgtctcatagggagaattaagtgtacaaatacttgtttaatttaaacaaaactgatctttgatgaccaaaagtttggatttatcaaatgt

SEQ ID NO: 30854 - DNA, 316 bp, Gossypium hirsutum
  Clone ID: LIB3148-043-Q1-K1-D12
cccacgcgtccgcttctggatatggcggttgaagtggcgaaggaggtggagctggtggtgccggcgggtatggaggagccggtggacatggaggtggtggtggtagtggtggcggtggagctagtgcaggtggatatggtggtggagcttctggatatggcggtgggggtggtgaaggaggtggagctggtggtgcaagtggacatggaggtggtgaggtttatctttggagttcatagtgtgtcatcattaatgttattatgccttatcgagctataaacttcttgatattttttgttcccaattaataaaattt

SEQ ID NO: 30855 - DNA, 405 bp, Gossypium hirsutum
  Clone ID: LIB3148-043-Q1-K1-D2
cccacgcgtccggggatggtcttatcaggcagactaacaccccagagaggatgcagaactggagaaagatctgtagaggtatctgttctactgaacaaaattaagaaggaagatattatgaggttcctggaattacatcatgtgaagaagtttgatgttccatttattgccatgtatcggaaggagcaatgtctgagtctgctggatgattttgagaaaaatgaggctgagaatgaagataatgatgatgttgaacaagcagggcaattgaagtggcataaggtactttggattataaaagaattagacatgtggttgctcctttagaagcgtaagagtctgcttcagatgcaccaaaggaaaatttacgatgaggaatgtctgaagattgataacagtgaaaag

SEQ ID NO: 30856 - DNA, 478 bp, Gossypium hirsutum
  unsure (1)..(478): unsure at all n locations; Clone ID: LIB3148-043-Q1-K1-D3
cccgggttcgatcccaatcgcgtccgnncttttttttnntttttttgtgnntaatatannatgatatttcccatttatcaaagggtgattgacaatactttcagtgagtgacaagataatgtataaaggggaggaagaaaaacagggaaatnngaaagtgggtgaaatctaanntatgtaanntaataatattaaaccaagaaagatacccagctttatacaaaaatgaagnnaaactataatgagnggaaatttnngtgtctagaaaccagagcnaagggtagagannaccctaatgcttgtgttattttgttgatggaaaattggtgatggggaaattgagaatgtcatcaatggagaatatataggaggttctaaaaaaaaggaaaaagaaacacaaagaagattattaaaatcctttgtatatatagatggtgaaatgcctctttttactcctttttggttttttgattatgta

SEQ ID NO: 30857 - DNA, 385 bp, Gossypium hirsutum
  Clone ID: LIB3148-043-Q1-K1-D4
ctttttattattttaatataattttttttttattatcaaggcattgacatactgggggggactttaatattaaaaggatgaataacatgtaaatgaaagttggtgatctaatatgtaattataatataaacaagaagatacatctttaacaaatgaagaaactaaatgatgaaattgttgtctataaacatatcaagggaaagaaccctaattcttgcgttatttttttataaaaattgaatatggtgaatagacaatgtcatcatatggataatattttccattgttctaaaaaattgaaaaagaaacacattgaatattattaaaattcttattatatatatatagcaaaatgcctctttctactcctttttagtcttttaat

SEQ ID NO: 30858 - DNA, 92 bp, Gossypium hirsutum
  Clone ID: LIB3148-043-Q1-K1-D5
aaaaaaaaaaaaaaaaaaaaaaaaaaaaatttaataaaaaaaaaaaaaaaaaaaaaaaaaaaaaaaaaaaaaaaaaaaaaaaaaaaaaaaaa

SEQ ID NO: 30859 - DNA, 287 bp, Gossypium hirsutum
  Clone ID: LIB3148-043-Q1-K1-D6
cccgttttaagtgacttgagaacttgcaaaggctggcgtcattagcacaggaataggttgaataatttgaagtaccaacacattggtaggttgccattagagtttgttgaaagctttttaagaacacagaactagtcatatgggtttcttcttccttaattttcttggaattgtcttcaagggaggaaataagttccggaggctgttatcttagatgtttgctgatgtactgattacattgatcattacaattgatgaactatatactcccagaaattttcttatgt

SEQ ID NO: 30860 - DNA, 403 bp, Gossypium hirsutum
  Clone ID: LIB3148-043-Q1-K1-D7
aaaaaaagaaaaaaaatagaaacgaaaaatattagagtattaaaagcaatggtaatgggttgtctcctcgttgaagcacacataccttaagttgcttaactgcttgctgatgcttcttgttgttggaaaacaccgtagttgtgatcggcttatgaccgtgtacgaaagtaaacattgggtcttccgatgaatcgaagcttcaaacatgttaagctgacttgtttgacaggagaacaaatcggtaatgtgaggatttggcttagttaggattgatgcatttacatgcttaaaaaacatgctaaattatcatataataatcttatgagatagagacagcttgatttcctatgcttttctaatgggactaagcactgtttgctttcctatttatttctttgctttt

SEQ ID NO: 30861 - DNA, 193 bp, Gossypium hirsutum
  Clone ID: LIB3148-043-Q1-K1-D8
gtacactttgttttgttctcggatcaactgtataatgtttggttgaacaaggcaaaggaattgctccaagcttcaatgcatcaaagcagccagaattaacttgtcctgccttcatccttaaggattcagaaacttcaaaagtgtgtgtattaaatttaactatgagagaattgcattcagttggtttgcttgg

SEQ ID NO: 30862 - DNA, 347 bp, Gossypium hirsutum
  Clone ID: LIB3148-043-Q1-K1-D9
gccatccgtaggcgccctattgtgacttgctatagaggaaacgcctatgcgtcgtgtctgcctgctaaaaaccaacggataagatctgaacgttgcggtatttacaagcgtcgtggatgcttctagtttatttgctcaggcaaaggggtaactcgtgtgtatggacttcctttgcttttttgtgttctttttttttccctctgtttctgtgtcaagatttatggcttccatttgtgtgatgcttagatatgtatctacactttaagaaaatggaattttatatgttgtgtttgaagctttttaagtcaattttctttttcttaaaaaaaaaaaaataaaataaataa

SEQ ID NO: 30863 - DNA, 255 bp, Gossypium hirsutum
  Clone ID: LIB3148-043-Q1-K1-E1
cccacgcgtccgaaaatatattgcgtgtaatgtgttgtggaaataaagttaaaaagcagctttatgttacattttctagtatgaaagttgattgctctgttatgggcagatcatatacattttgtgtataaatatattatgttttaaatattttatttgggtcaaattgtaaggatggtttctgttttgtgtgaattcagtctgtataatttggttaataaatggtcctcgtaaattttgaaatgttaattttca

SEQ ID NO: 30864 - DNA, 406 bp, Gossypium hirsutum
  Clone ID: LIB3148-043-Q1-K1-E10
cccacgcgtccggattcaacaggtccagatgaactcttgggagcatcagaaggctcttcctcccattccacttcactatcatcattaatattgctttccttattcaaaagattatgttcagcattcataccaggagtaacatcatcccattttccttcaaccactccctcctcccactcaaaatctgaatcagaacccgaagcctgctttctcaaagatttttccttaggagaaggtagtgttacaggatcacctgctgctaagcatgcaaaaatatcatcatcatcatcaaaatactccgtctttccatcatcctcaaaagttatttccatacaagattcagtttcaaatgcagacttccggttgctctcattcacatttacagattcaccattatcatcacgtg

SEQ ID NO: 30865 - DNA, 275 bp, Gossypium hirsutum
  Clone ID: LIB3148-043-Q1-K1-E11
cccgtcggtcgaattggccggtacttgaagaaagggcgatactctcaacgtgtgggaacgggtgctccagtttaccttgctgctgttcttgaatacctagctgctgaggttcttgagttagctggcaatgctgcaagagacaacaagaagaataggatcattccaaggcatgttctattggcagtgaggaacgatgaagaacttgggaagcttttagctggtgtgaccattgctcatggtggtgttttgcccaatattaacccagttcttttacc

SEQ ID NO: 30866 - DNA, 399 bp, Gossypium hirsutum
  Clone ID: LIB3148-043-Q1-K1-E12
ccgcccttttttttttttttttttttttttttttttggatgccttaaaaagcttggtattattaagaaacagagaaagatacattcaaactttgctaaatgctagatacatacatacaacttcataactacacaattcttttttctatatatatatatatatattagccctttggattggatatttatggaccgttaatcataattctaaggcttatgattttgagtataaatataatccaaatgagcatctgccatcatcctccttttcacacattcttcatctttctcataacactcttctgctcccatcaactttgagaaatcatcttttctatcagcttgaatcatcatcatctcgtttgctttaagctccttttcaccatggttgttgatttgc

SEQ ID NO: 30867 - DNA, 367 bp, Gossypium hirsutum
  Clone ID: LIB3148-043-Q1-K1-E2
cccacgcgtccgcccacgcgtccgtccttgatcatatgtttcatcaaggctcgagactcgaatggaagtgactgaaacttctaatcatttgaagcgctcctgcctaaaattttccaaggtgtacgtcggtgtttgttcataggaaatatagatttatacaagaacaagagcccgattttttttcccatatggctgtttttataatatcaatgtagttgccactccttagctatgaacatgatatagaatccagaaatctctggcctcgttgcttccttcaactttattgtaccgaattttgttgttcacaatcgaggtcaaattgtcacattgaaataaggcttttatatgtaccaaattttggctc

SEQ ID NO: 30868 - DNA, 386 bp, Gossypium hirsutum
  Clone ID: LIB3148-043-Q1-K1-E4
ttctaatttggttttcctacataacaatttttttttcttttaagaaccttacattctaggatgggtcttttacattggatgacctatattcaattcactttcctttttaatacaacttctttacttattaaacctttactttctcaacttaatctccttcaaccacatcctccttccactaaatatcttaattacaacctgaaaccttcttatttaaatatttatcattatcacaatgtattattacaaaatcaacccctcttaatcatgcaaaaatatcatcatcttcatcaaaatactcctcctttccatctttcttatatgttattttcatacaacattcattttcaaattcaaacattccttttgctctcattcacatttac

SEQ ID NO: 30869 - DNA, 378 bp, Gossypium hirsutum
  Clone ID: LIB3148-043-Q1-K1-E5
tctagtaaacaatcaaattctcagccacttcgtcatcaaatccctgaatttcattggagaaagtaagaaaaatggcaatgatcccaagattctttggcaatcgaaggagcagcatcttcgatgatcccttctcctttgacatattggatcctttcaggggcttccctctgtcttcttcgtcactcaccaccacgcctgtcccagaaagcgctgcttttgctaacaccagaatcgactggaaggaaactccggaagctcatgtcttcaaagccgacctccctgggcttaaaaaagaggaagtgaaagtggagattgaagatgacaggatgcttcaaatcagcggagaaaggaaatttgagaaggaagacaagaacgaca

SEQ ID NO: 30870 - DNA, 405 bp, Gossypium hirsutum
  Clone ID: LIB3148-043-Q1-K1-E6
cccacgcgtccgggaagataacccttgtgcagggtctagccttggtcatggtaactttgctatggactggaaccatggctcaatcagactgcaccagtgtgataatcacgatggctccatgcgttgattatgtgactggaacctcctcaaccccatctgttccatgctgctcacagcttgctaacgttgttcaattacagccacattgcctttgcatggccctcagtggtggaggttcatcactgggtgtggaagtaaaccagacacttgcccttgcactccctcaactttgccatgtcaaaaccccacctgagagcaactgcaaagctgctgatggacctgctgtaatttcaatatctccatctggttcacctcaaggtttaccaccccattcaaatgataccc

SEQ ID NO: 30871 - DNA, 402 bp, Gossypium hirsutum
  Clone ID: LIB3148-043-Q1-K1-E7
ggtgatgttgtgcccaaggatgtcaatgctgctgttgccaccatcaagaccaagagaactattcagttcgttgactggtgcccaactggattcaagtgtggtatcaactaccagccacccactgtcgttcctggtggtgatcttgctaaggtccagagagccgtttgcatgatttccaactcaaccagcgttgctgaggtgttctcccgcattgaccacaagtttgatctcatgtatgccaagcgtgcctttgttcactggtacgtgggtgagggtatggaagaaggagaattctcggaagctcgtgaggaccttgctgcacttgagaaggattatgaagaagtcggtgctgagtcaggcgagggtgatgaggaagatgaagatgagtactaaataagtaat

SEQ ID NO: 30872 - DNA, 391 bp, Gossypium hirsutum
  unsure (1)..(391): unsure at all n locations; Clone ID: LIB3148-043-Q1-K1-E9
gtggaaatcatcttcgagaatcccgagaccgccattcagtcttaccacttgtctggctactcattctttgccgtgggcatggacattgggaaatggagtcctgagaagaggatgaactacaatcttctcgacgccgtgagcagacacaccatacaggtattccccaactcctggtcagcaatcctattgacattcgacaactgcgggatgtggaacctgaggtcggagatatgggacaggcattaccttggggcaacagctttatgctagtgttatttcccctaaccgatccctcaaggatgaatacaacttgccggaggtgtatngacttgggcatcgtgcaagcatgccagggcctcaccttcagcagttaattaataagctataatct

SEQ ID NO: 30873 - DNA, 296 bp, Gossypium hirsutum
  Clone ID: LIB3148-043-Q1-K1-F1
ggcaatgcctgatgtgaagtcattggacattcggaacctcatctgaaactcgaaattcggctttggtgggtccaggttggaggtggaccaatattaactggtcaacaattggctaaaacccttctttttcattttgcttccattatttgattaaataattattatgggaaaggggaacccgggattggaagggccccacccgtaaatccggaccaactaaaatggtggttttggttggggttaataattctcaggttttggggatgacttccgcctcctaattgttataattgggt

SEQ ID NO: 30874 - DNA, 77 bp, Gossypium hirsutum
  Clone ID: LIB3148-043-Q1-K1-F10
atttctgtttatctttttcccaatgagtagccattgtagcttctttacaaatctaatgcataccaacatttccatct

SEQ ID NO: 30875 - DNA, 392 bp, Gossypium hirsutum
  Clone ID: LIB3148-043-Q1-K1-F11
tggtaataatgcttatagacttggttacttttttatcaaaaaaaaaaaaaaaaaaagagggaaaaaaaaaaaaaaaaaaaaaaaaaaaaaaaaaaaaaaaaaaaaaaaaaaaaaaaaaaaaaaaaaaaaaaaaaaaaaaaaaaaaaaaaaaaaaaaaaaaaaaaaaaaaaaaaaggggggggccgttttaagggtccaaagtttacttccccggcctggcaaggtaatagtttttttttggggcccccaaatttaatttccgggcccgggttttaaaaccgtggggaggggaaaaacccggggttccccaaattaattcgcttggaaaaaaatccccttttcccagggtgggtttataacaaaaaggcccccccctttcccctttccaaaaa

SEQ ID NO: 30876 - DNA, 54 bp, Gossypium hirsutum
  Clone ID: LIB3148-043-Q1-K1-F12
aaaaaaaaaaaaacaaaaaaaaaaataaatttaaaaaaaaaaaaaaaaaaaaaa

SEQ ID NO: 30877 - DNA, 142 bp, Gossypium hirsutum
  Clone ID: LIB3148-043-Q1-K1-F2
acaccaaagggaaaggtatataaaacacagcaaatttcagtgcattacatgcaagagaaatccaatggtaaactttatgttggggatggggattttgttaacccccaaataaacaaagttgccgggtatctttagtattact

SEQ ID NO: 30878 - DNA, 153 bp, Gossypium hirsutum
  Clone ID: LIB3148-043-Q1-K1-F4
cggacgcgtgggcggacgcgtgggttcacattgtggtcatgtgctgctgtttttttctcagtaggttgtttttgactattagtcttcattactttaattgtgctttcaatccttctattttcttatttatacaatttagtctcctagctgtct

SEQ ID NO: 30879 - DNA, 401 bp, Gossypium hirsutum
  Clone ID: LIB3148-043-Q1-K1-F5
aaaaaccagaactgccaagtactgattctggtcacatggagccaggggtgcctaaaccagttttgaatggtgataaggcagaagagaccgacaccgagactgatcagataaatccaatggatgtagttgaagattcattgcggtctcttgatgatgcagcagaggcagttggtttgcctgctgacgaggaaaactcaaatgatataaacaaaaccgaaggtaatagtactgtgtactgtgccaaggaaatacatgcttttgatgatgcaattagtggttctttaaatgattctcctaaggtatcaggggctttgattcccgggtcaaatgagtctgggtcggagttggtaattttaactgggatacatcattctcctgaaaatacacattgagacaatttc

SEQ ID NO: 30880 - DNA, 384 bp, Gossypium hirsutum
  Clone ID: LIB3148-043-Q1-K1-F6
tccacgcgtactaccacgcgtacgcttgattggtttgtgttattccataatttcctatagaaaggttttgtttcggtctgtattaaataagcactaggatccgtagttgcctcttgtaatagtttataggcacttcttctgactgtaaatttgccaaaatgttctcctcgccagacatggaagttgttatgttcttcttccgccaggggaatttgcaaaatcttctatacagtattttctcgaaaggtattttcaatttaaaaaaaataaaaaaaaaaataaaagaaatatataataaattaaataatataattatattattaaaatttaattaatatttaatatggataataaaaaaaaaaggggggggcccttttaaagttt

SEQ ID NO: 30881 - DNA, 401 bp, Gossypium hirsutum
  Clone ID: LIB3148-043-Q1-K1-F7
cccacgcgtccgcaatcctgagaaccccatcatggaagagctgagaaagagggctgatgctgataagaatgacaagtctgtgaaagaccttgttctgttgctctttgagactgccctcctcacctctgggtttagcctcgatgacccaaatacttttggcaacagaatccataggatgttgaaacttgggttgagcattgacgaggatgcaggagatgctgatgccgactctgagatgccaccattggaggatgctgatgccgagggcagcaagatggaggaagttgactaagctttttaacatgtttgtgaagagtttatttggtagtttcatttttagcttttaatataatattctggaaaattggtcaatgctgtgtttactttggaatgggaaatga

SEQ ID NO: 30882 - DNA, 234 bp, Gossypium hirsutum
  Clone ID: LIB3148-043-Q1-K1-F8
ccaatgttcaggatgacatgttgatagctaaagatgagatatttggtccagtacaatccatctcaaagttcaaggatcttgaaaaggtggtccaaagggcaaatgcatcttcttatggttgggctgccgaagtttcaactcaaattttcgaacccgccaccacttgacttgggcattgcgagtcgggacaatattgattaacttgttccacatatttgatgcttcaatcccatt

SEQ ID NO: 30883 - DNA, 228 bp, Gossypium hirsutum
  Clone ID: LIB3148-043-Q1-K1-F9
cccacgcgtccgcaggacaaggagggtattcccccagaccaacagaggttgatctttgccggtaagcaacttgaagatggccgcactctcgctgattacaacatccaaaaggaatccaccctccacttggtgcttcgtcttcgtggtggtatgcagatttttgtgaagactcttaccgggaaaaccatcaccttggaagttgagagctccgacactattgacaatgtc

SEQ ID NO: 30884 - DNA, 102 bp, Gossypium hirsutum
  Clone ID: LIB3148-043-Q1-K1-G1
cggaccctggggttcttttattcaatttattattattaaggaataaggtccaaaaaaaaaaaaaaaaaaaaaaaaaaaaaaaaaggggccggccgtttaaaa

SEQ ID NO: 30885 - DNA, 179 bp, Gossypium hirsutum
  Clone ID: LIB3148-043-Q1-K1-G10
accaagcgtcctcaataattatactttcttttagacaaatcattctgacttgtgaggaaggagataatgcctaaacctcttgatatcttactttagaaatgcaaataggatctaatactgttattgaaatataataaaaaaaaaaaaaaaaaaaaaaaaaaaaaaaaataaaatataaa

SEQ ID NO: 30886 - DNA, 322 bp, Gossypium hirsutum
  unsure (1)..(322): unsure at all n locations; Clone ID: LIB3148-043-Q1-K1-G11
cccactcgtccgcccacgcgtccgaaagatcacctagaagaagaatcttttctgttgtttatccatgcacttcatcatgttggctgttgaaagaaaaaccttttaatcatgagtgtcctatgaaatggaatatggattgtaggtgaattaatttcattttgtatgatgttgagtttattgtggtttgtcctttgtgttgactgtgatggcatgtataaaattgcaagtgcctttcacattattaatatttataaattgaattgaatgattgatgaggacgtatgttgaatcananaaaaaaaaaaaaaaaataatattttat

SEQ ID NO: 30887 - DNA, 67 bp, Gossypium hirsutum
  Clone ID: LIB3148-043-Q1-K1-G12
tgcattggtcccttgtaactgttaattttgttttatgtgagatcttaaaattattcctagtttggtt

SEQ ID NO: 30888 - DNA, 157 bp, Gossypium hirsutum
  Clone ID: LIB3148-043-Q1-K1-G2
cgatgggccatagagtggagtttgcccttcacaagggggctccactatggagaaccattttgtgggtccttattttatttcgcaggtttaaggttttatttttaaacatttaaaaaaacgggttttttaggataaatattggaaatggcggtccaaa

SEQ ID NO: 30889 - DNA, 406 bp, Gossypium hirsutum
  Clone ID: LIB3148-043-Q1-K1-G3
cgatgccacagtgtatccattgaagatcagagagggagataaaccaatccttgaggagcccatcacatttgctgagatgtataggaggaagatgagcaaggatcttgagcttgccaggctgaagaagctggccaaagagcagcaacagttgaaggagaaagaggctgagaatgagaagcccaagcttgaagccaagccattggaggaaatccttgcctaaaacttttaccctactgctggttattgtgttagcactgtttcgtcttccactatgttgtgttaattttatttcatttctacttttttttttgtggtgatacccgtttctatttattttctagcgagtaatgtatgtcatgtttcccacatttgatgcttgtggtctattatatactcgggtatcagt

SEQ ID NO: 30890 - DNA, 371 bp, Gossypium hirsutum
  Clone ID: LIB3148-043-Q1-K1-G4
cccacgcgtacggttttacaactctgagattcattcggctgctttctgtttaccatcctttgcaaagaaggtgatcgaatcgaaaccttaagggtggaaattttgaagttttagaacaaattctaattattggtgagcattagttatcatcctttgctgtgatggcccaatgtagcaacgaaccttggatttggaactttagataatgcactttcttttttgtctcgcttaagaagagaatttgaggtaatggttgtggaaagatatatgtccacaagggataatatggtcatttagctgagacataaatggctgtttcttgcaatcgttttatcagattcacatgttgtgtgtattatatcatttttgca

SEQ ID NO: 30891 - DNA, 72 bp, Gossypium hirsutum
  Clone ID: LIB3148-043-Q1-K1-G5
gtaaatgttaaatgccaaatgatcgttgttttaattaaaaaaaaaaaaaaaaaaaaaaggggggggaaaaag

SEQ ID NO: 30892 - DNA, 361 bp, Gossypium hirsutum
  unsure (1)..(361): unsure at all n locations; Clone ID: LIB3148-043-Q1-K1-G6
ggagaggagaacctgatgttacccgtagaacgcctgattacttcctctgaagctgctacattccataactgattcaagatactccgcttttcggcctctcctctccccctttacattgtcaggtagttgccgatcctttacagaaatcttttgcatctactgttcttttggtgatttggggggggggtaccaaaagcatacatgggaatgggttgggttatgaacttatgatctataatcctatcatcgagttgatcaatttatcttacacttggatattctgttgaagagattgtcatagctggtgaaactctgacactatcagaatgtaaatttttgtgtttgtttttggttnanaaaa

SEQ ID NO: 30893 - DNA, 403 bp, Gossypium hirsutum
  Clone ID: LIB3148-043-Q1-K1-G7
ctggaagatcccgaggctttggattcgttactttccgtgacgagaaagctatgagggacgcgatcgaaggaatgaacggtcaaaatcttgatggaaggaacatcaccgtcaacgaagcccaatcgcgcagaagtggaggcggtggcggaggatttggaggaggaaacggtggttacagccgcggtggaggcggcggcggatatggtggtcgccaaggaggatatggtggcggacgccgtgaaggtggatacggaaatggtggagggtatggtggtggtgggtaccgaggtggacgccgtgaaggaggatatggtgacggctgatctcgttactcaaaaggcggcggtgcatctgaaggcagctggaggtcttaagtttaggtttcaaagtgggcttgggccta

SEQ ID NO: 30894 - DNA, 333 bp, Gossypium hirsutum
  Clone ID: LIB3148-043-Q1-K1-G8
ctagaagatcccgagtcttttcatttttttctttccgtgactagaaatctatcagggacgcgatctaacgaatgaacggtcaacatcttaacggactgaacattacctctaaccaatcccaatcactcacaaatgcttgccgtggctgtggatcttgagcaggaaacggtggttacagccgcggtggaagcagcagcatatatggtgatcgccaaggatgatatgctgacgaacgccagtaatgtgatatacggaaatggtggaagctatcgtggtgatgttctcagaaatagactccctttattaggataactttaccgctattctattttc

SEQ ID NO: 30895 - DNA, 149 bp, Gossypium hirsutum
  Clone ID: LIB3148-043-Q1-K1-G9
ccgggccgacccactcttcctttttaatatcccctaattttacattttttttttttcgaaactagaaagctatcatatgcacgttctatgtaatgaacgatccccatctttatggactgaacattaccctctaccaatcccaatcgctc

SEQ ID NO: 30896 - DNA, 209 bp, Gossypium hirsutum
  Clone ID: LIB3148-043-Q1-K1-H1
ttcttcttgaacaccatcgtaccgtggcctttgtttaaatggaatcagttgcttcgttggaagctggttatgactctatacttctacagagtggttttggaacttcaataccgtctgacacaagactttcatgctttataattaattgctatgtgattgagttatgcatttcatgcatcataaaatatcttcgggatcgaaaaacccca

SEQ ID NO: 30897 - DNA, 400 bp, Gossypium hirsutum
  unsure (1)..(400): unsure at all n locations; Clone ID: LIB3148-043-Q1-K1-H10
gtttntcataaatacataaaaatttttttttttatatccaacaaaaaaatctacgcgggggagaaatttatacaaaaaaaaaaaaacaaaaaaaaaaaaattaataaaaataaaaaaaaaaaacggggcccccctttttaaatgaccaaactttcctccccctccattccaactaatattttttcttttgcccccccctaatttaaataccctcccccctttttcccaccttctaaattgaaaaacccctgccccccccaaatttattccccttcaaaaaatcccccttttccccagttggattatttccttaaaccccctacccatccccctttccaatattttgcccacccttattttttattgcccccccccttttactttttttttaaccccccct

SEQ ID NO: 30898 - DNA, 362 bp, Gossypium hirsutum
  Clone ID: LIB3148-043-Q1-K1-H11
ggaatggagtttcgacccacacgtacgcgcacgcttgtctcttttttttttggttgttattttagtataaaaccccatttctaatttaatgtatccttgatgttttgagggaaaaaaaaaaaaaaaaaaaaaaaaaaaaaaaaaaaaaaaaaaaaaaaaaaaaaaaaaaaaaaaaaaaaaaaaaaaaaaaaaaaaaaaaaaaaaaaaaaaaaaaaaaaaaaaaaaaaaaaaaaataaaaaaaaaaaataattattttggggggggcctttttaaaaataaaaatttttattcccgttgttttaaaattttaaatttttttaattggtgaaaaaaaaaaaaaaaaaagggggggggtttaaaa

SEQ ID NO: 30899 - DNA, 345 bp, Gossypium hirsutum
  Clone ID: LIB3148-043-Q1-K1-H12
cccacgcgtgcgacatatctcacaagatcgtttgaagttgaaggacgagtttggtggctactaacggcgcctaattgaaacccttggcaaaaaaagaaaaatgaaaatgagcgtggctggccgtgtacatttgggcttaggattatgacaatttggacttattggattgacgacactggggatgtgcactggactgtttggttctatctatatgttcttaattttgggttttgggtgttgggcccgggcagatttggcccattacaattagtacctaaacttatttacctctatcagattggtacttatgatttttttttctaaattggtatccaaatttttttt

SEQ ID NO: 30900 - DNA, 304 bp, Gossypium hirsutum
  Clone ID: LIB3148-043-Q1-K1-H2
cccacgcgtccgcccacgcgtccggaaatgctggaagagggccatttagtcctagagccaatgaaaagccatcaaatttaggcaaaggttagcaagtaatggaccaagttgctaaaagaatatatatacatatatgagcatgcagttcaagaagtctgctatgcatatcccatactaatcccctgattttcgctatcactcatgtaaaatatattctactactaataaaaatgccgttgattagtggaaaaaaaaaaaaaaaaaaaaaaaaaaaaaaaaaaaaaaaaaaaaaaaaaaaataaaa

SEQ ID NO: 30901 - DNA, 405 bp, Gossypium hirsutum
  Clone ID: LIB3148-043-Q1-K1-H3
caaaacatggacattggtggttagaattcggaccaggattattggtgggatactggcctgcctttctttttagtcacttgagaagccatgccaacatggtacaatttggaggagaaattgtgaacactagatcctcaggattccacacatcaacacaaatgggcagtggtcattttgcagaagaaggctttagaaaagcagcttatttcaggaacttacagacagttgattgggacaataatttggtcccattgacaaacattcatttaaaggctgatcgtgccaattgttacgacatcagacaaggaagaaaccgtgtttggggaacttacttttattatggaggccctggaaggaatgtaagatgtccttaactatttcatcttttaaccctttaattttttt

SEQ ID NO: 30902 - DNA, 374 bp, Gossypium hirsutum
  Clone ID: LIB3148-043-Q1-K1-H4
gcaaggtcgaagagtactgtttatgcttggtggtattcaaatgcttgcaacacaagtaacaattggagggtttatgacagctttattaggtgatcatggtggattgagcaaggcgagtgcttatgtggttctagttttgatatgtatatacatttctgggtttgggttatcttggggtcccttgggatggttagtccctagtgagatttatccattagagattcgatcagctggccaaagtattacagtagcagtcagttttttcttctgttttcttattggacaaacttttctagctatgctttgccacatgaaggcagggattttcttctttttcggaagatgggtggctctgatgaccctatttatatact

SEQ ID NO: 30903 - DNA, 375 bp, Gossypium hirsutum
  Clone ID: LIB3148-043-Q1-K1-H5
tggagtttcgacccacgcgtacgcccacgcgtgcgtccacgcgtccggcctggtttcatactgaccagcaatatctatattcgtgtttccatctctaattgttttcgtttttcagctgtaatcgctcatgtcttgttatcttttgatcagacatttcacacaccggccaggctcgacaaaggttaggacttttttctagttataaaaaagttcaatatacactcatgtattcattctttttggtccccctttcctctgttcatatgtagcctgtagctagaaagtttacttttaaatggctttgttgtttaaaaaaaactctgaaaacttatggttttgttttgacttttagagaatgaaatgcagagatccctt

SEQ ID NO: 30904 - DNA, 246 bp, Gossypium hirsutum
  Clone ID: LIB3148-043-Q1-K1-H6
acgctgtgtcgacacagtcgctacagctatcgtttgaagattgaaggaatattatggtgtttttaattgtacttaattttctttttttccaaaaaaagaaaaatgaaaattatggtggctttaattttacattttgtattaggattctgacaatttttattttttagatttccatttcagcagatgtacctttttagatttgtttcgttctaaagtttctaaatttgatgaaatttgattatttgc

SEQ ID NO: 30905 - DNA, 368 bp, Gossypium hirsutum
  Clone ID: LIB3148-043-Q1-K1-H7
cctcccccaccctttttttttggcttgtatttttgttctaggaggcatggatatggtggtataagagcgcagccttgatgtcaaacactggaaattgttgagttagcatgcagcactatatttacttggattcatgtgtgcgtgattgatactaatatttttctaacatgactgtgttcaatttttcattttcatgatttggagagtttagagggtatttgtttgtggtttagatatatcaagaaaaatgaagagtcgaagcaatattttagttatttttttaaacgtgtttggagggcctctaaaggatatctaggaccatgttcggaatgtgacgaatcagacatttttaacctaattctctaaac

SEQ ID NO: 30906 - DNA, 378 bp, Gossypium hirsutum
  Clone ID: LIB3148-043-Q1-K1-H8
caaaatctcaaaagcttaggtgttcaagaagataagctgtttcagttaccgtcggcttgtcaattgaagaacgctagcgtcagtgattgcccaaagcttcttgggttatctccgagctcaccagacgccgccatcttcaccaactcctcctctaaagcaacgacacccagtacttcaacaaccaccgcaacgccgtcttccgcggccgataaaaccgatagcaaatccagtggaatcaagcttggtccccacttcgtcggttccacggcggcgctactggttgctacagcggccgtgtttttccttgtattcccagctggatttgcttcaatagtttaggggttttgcatgggatttcgagatttggaggtttattta

SEQ ID NO: 30907 - DNA, 337 bp, Gossypium hirsutum
  Clone ID: LIB3148-043-Q1-K1-H9
gttttacttgaatgcgtttcagcctccggctaagttcgatagtgatggcaaccttattgacgaggattccaaggagagaatgaagcaagttcttctttccttgcaagcatttaccctccgactccaacctaaaaactgagtaaactaatcaagtgtttcagtcttttcccaattcttccattgttattgtgatggattaaaaaaaaaaaaaaaaaaaaaaaaaaaaaaaaaaaaaaaaaaaaaaaaaaaaaaaaaaaaaaaaaaaaaaaaaaaaataaaaaaataaaaaaaaaaacaaattaaaaaattataattaaaatttataattaaatataat

SEQ ID NO: 30908 - DNA, 302 bp, Gossypium hirsutum
  unsure (1)..(302): unsure at all n locations; Clone ID: LIB3148-044-Q1-K1-A10
accagatggctgcaacaactcatgctcagtaagtcaatgggtttatccctggatggatgcgtctaaattttttggtttcagcaatgtggtcaatggccacaaactagtagccaaaaatgcttcttgatgttggaaaatgtgtaaaaatagtttcaagagcatatgcataatatactgcattgacataaacactactgcagtgactgaatttgctggtaagactattgagaccttgagccacagacaaaaggcatgtgattgattaagtttatatatatgacaatggaagacttgncnnanna

SEQ ID NO: 30909 - DNA, 262 bp, Gossypium hirsutum
  Clone ID: LIB3148-044-Q1-K1-A11
gtgacaataaaaagattggccaccctttttttatttaaaaaaaaaaaaaaaaaatagaagggaaaaataaaaaaaaaacaatatataaaaaaaaaagactacaaatcttgtacatccaaattcaacgttccttttttaaaatccccttaattcttttcactcgcctcttctttacattcttttattcccttaaactctcctcctttccctgcttattctctttgcattactttttcctttcccccctttctttactcctttt

SEQ ID NO: 30910 - DNA, 408 bp, Gossypium hirsutum
  Clone ID: LIB3148-044-Q1-K1-A12
aaacaatcaggagagaaaacatataaatatgggaaagtgttgactttgcaagggcatatcgccggagcttatcgagcatgtcactaagggcgatactgaactctttccggtcatcgttgctgcaagggatgtcagtattcaaggaatttgcaacgggaagtgtgccgatcatttacttactgaggatccccatccgcgaccatacattatagtcggtaacccagaaacggagtgccccggagaatgcggatggcctttcttcccggctgacatgggtccaaagggaccagtccttaaaccaccaagcggaaacatggcagcagatgctatggttgttgccttcgcgggtgcattggttgatgcaatcaccaacccaatgaacgatgcactctaccattcaaacaaagc

SEQ ID NO: 30911 - DNA, 345 bp, Gossypium hirsutum
  Clone ID: LIB3148-044-Q1-K1-A2
ctgtgctaccatgcactgtacaagcttgattttggcaattgctgtagtcatggatcctgggttcaaaatgaagcttgttgagttcagtttcacaaaaatatttggtgaagacgctcccacatatatcaaaattgttgatgatggaattcatgagctctttctggagtatgtagcacttccactgcctttgacaccaacttacacagaagaaggcaatgtgggaaacaatggaaagaccgatgaatctcagcaaggaaatcttctttcagaccaaggacttacagatttcgatgtgtacattatggagactagtagccagcaaatgaaatctgagctggatcagta

SEQ ID NO: 30912 - DNA, 382 bp, Gossypium hirsutum
  Clone ID: LIB3148-044-Q1-K1-A3
accggaccggaaggcccggcgccagagcgtccggtcacgtaacattgtctaactaccgggactatcgattttaaacgtgatataaacatgactagggtgatgtgatttggtcagaattctgtagaggttaacatgggctttcttgaaccccaacaacatatctggaggccccagagaggcctaccagaacgttcggtggctattcttagagcttcggtctttgagcattttctttatccgtacccgacagacacagataagcacatgttggccactcaaactggtctctcttgaaatatgtgtctaactggttcataaatgcacgtgttcgggttctgaaaccgatggtggaagaaatacatatgcttgaaagcaaatgctt

SEQ ID NO: 30913 - DNA, 141 bp, Gossypium hirsutum
  Clone ID: LIB3148-044-Q1-K1-A4
atttcatttttttaattttaaaaataaatttttttcttttaacttttattattaaaaggggcgtgtttttttttttatatataaaaaaaaaaaaacataaccaaacaatgccaccccttctttattatcaaatcttacata

SEQ ID NO: 30914 - DNA, 288 bp, Gossypium hirsutum
  Clone ID: LIB3148-044-Q1-K1-A5
cgggccgacccacgcggtccgcccacgccgtccgtttattggttccaattttttttttgttactggcttaaactctaattttcccgttaaccattgctaaaggtccaccttcccttgaatcctccccaagctccaaagtgagcactgtggcttttgataaagggtttcgaaacctctggggtcctcagcaccaaaaactagaccagggctcattaccagtttggctcgataaaagctcagggagtggtttcaagtcactttgttcggacacatcaggttactttggtg

SEQ ID NO: 30915 - DNA, 408 bp, Gossypium hirsutum
  Clone ID: LIB3148-044-Q1-K1-A6
cccacgcgtccgcccacgcttccgaaacaagcatttgctaagggctccaaaaaaggtgcgcaacagacatcattgaagtctaaggtcggtatatttgtggcattagctatggtattgcagcgtaaacctgatgctttaattagtgtattgccaaagttgagagaaaattccaaatatcaaggacaagataagccccccatttttgtatggacgatagttcaggcatccaaaggagatcttgctgtgggactgtacttgtgggcacatctcctcttgcctgtacttagtagaaaaaactgtaatccacaatccagagatctaattttacaactggtggaatggatcttatctgtctcaaaagctcggtcaattttagtaaataatgctgttagaaaaggggaacgtttg

SEQ ID NO: 30916 - DNA, 148 bp, Gossypium hirsutum
  Clone ID: LIB3148-044-Q1-K1-A7
ctttggtagtttggactgtacatgtagtttcttcatcatcagaatttgtttaccaaaaacgcaaattccctttgacacaactttgggaataatattacttggtaagttgtttaatgacccaaatgttaaaagttccaaaattacttat

SEQ ID NO: 30917 - DNA, 112 bp, Gossypium hirsutum
  Clone ID: LIB3148-044-Q1-K1-A8
gaacattgtaaatggggatggtttatgtttatttgaagctagaatgctggcttgcactagacgaccaatacccctatatgataaatcaagaggcgaagtcttgttaatctct

SEQ ID NO: 30918 - DNA, 408 bp, Gossypium hirsutum
  Clone ID: LIB3148-044-Q1-K1-A9
gaataagaacatagaaaaaaatgcgaatcaccttcggtaaactgtttttttaattgattgtttttcaatccgtccccctatttacaatccgtttccccctttttgaattaggaaaacccccccttacaatcggttctcccctaaagctttagagccgatagtcctctttacatttcgttattgtttctctgctatatcctttgttgtttgcacatggtttttgtctttttgtgtcttcttttcttgcttgtttgcaggctttgaggggtgtcagacgcgtggaagagaggggcatgcgtggggaggccagtggtggaagcgcgtgcttgtgggaagagcggcagctgaagaggaggctagggtttgggtggctactgaaaaagttaagatagtgagctgatttgggct

SEQ ID NO: 30919 - DNA, 411 bp, Gossypium hirsutum
  unsure (1)..(411): unsure at all n locations; Clone ID: LIB3148-044-Q1-K1-B10
agaaaatggctggaagcccaatcacttgttcaatttgnaggaacaatttctatttgggtgcgaccaggctgccatcaacaacagcgatctgcccaatctctcccccgacgacgccgtcgagcgcgactgtcttgtttatcgctcttacatcgccttcggcagctaccaactggtgatcaatgagatcgattcctctgctgccactcctctacaagccgttaaattgctcgctctctatctctccaaccctcatgataaggaatcgacgatttctagcttgaaggaatggttggcagatccagctattgggaacaatcccatcttaaggttgattgctggaattattttcacgcacgaagaagattataacgaggctcttaaacacaccaatgctggtggcaccatggaact

SEQ ID NO: 30920 - DNA, 279 bp, Gossypium hirsutum
  Clone ID: LIB3148-044-Q1-K1-B11
cccacgcgtccggaataatatttgttgttttggcattttgatccaactcttttgtggttgcttttctattttcttttatgtgtatttgtttttcttcatgttttgggcattgtttgaacatctgggtgttgagcccatcaatgctagtaaagtaaaagatggcaacttttgcttcaaaaaaaaaaaaaaaaaaaaaaaaaaaaaaaatataaaaaaaaaaaaaaaaaaaaaaaaaaaaaaaaaaaaaaaaataaaaataatgaattaatttttttatta

SEQ ID NO: 30921 - DNA, 405 bp, Gossypium hirsutum
  Clone ID: LIB3148-044-Q1-K1-B12
caagaagctttggtggtcaagtcatggactgtaatgaagaagaatgcagctgaatgggggcttaaattcttcttgaagatatttgagattgcaccatcagccaagaaactattctcattcttgagagactcaaatgttccattggagcaaaacacaaagctgaagccccatgccatgtctgtctttgtcatgacatgtgaatctgcagttcaactgcgtaaagcaggcaaagttacagtgagggaatcaaatttgaagaaattaggagctacccattttaagtatggggtagttgatgaacattttgaggtaacaaaatttgctcttttggagaccataaaagaagcagtaccagatatgtggtcagatgagatgaagaatgcaatgggtgaagcctatgatcgt

SEQ ID NO: 30922 - DNA, 390 bp, Gossypium hirsutum
  unsure (1)..(390): unsure at all n locations; Clone ID: LIB3148-044-Q1-K1-B2
cccacgcgtccgcatgtttgttatatatgtatgttattgttatcatctaatgcaataatatataggtcttctttaaaaaaaaaaaaccanaccaaaaaaaaaaaaacaaaaaacaaaaaaaaaaaaaaaaaaaaaaacacaaaccaaaaaaaaaaaaaaaaaaaaaaaaaaaaaaaaaaaaaaattccggccccccccttaaaagaaaccaacctaactaccccctccataccaaaaaaaatcttttcaaaagcgcaaccaaaataaaattaactgcccgtgtaaaaacaactttttaactagaaaaaccctggataaacccaactaaaaccctttgaaaacatcccctatttacaaccttcttaataacaaaaaaccccacctatcgac

SEQ ID NO: 30923 - DNA, 251 bp, Gossypium hirsutum
  Clone ID: LIB3148-044-Q1-K1-B3
agaaccttgaaaggggccagaacttgtgctttgttcattacagctgcttcacaattcacgaacggcatgtaataaaaccagcttctagttatcattattgttgatatcttttacatatatgacatgttacatgtgatatgtttacagtgtcttctattctatgaatgaaagatcaacatccttttgtttgggaaaaaaaaaaaaaaaaaaaatttaaaaaaaaattaaaaaaaaattaaaaaaatttattt

SEQ ID NO: 30924 - DNA, 148 bp, Gossypium hirsutum
  Clone ID: LIB3148-044-Q1-K1-B4
tgagtaacttcttaaaatctctctcacaaattcctctttaacctctcacttggtgatttcgggggggcaattgtcgtgtcgtgttctgtctcaatacttgcttgttgcttgattttgatatgattaatgtggtaaagcttgtggtgtt

SEQ ID NO: 30925 - DNA, 233 bp, Gossypium hirsutum
  Clone ID: LIB3148-044-Q1-K1-B5
gaagaacatggttgtaaatttgatttcaaagcattggggaaacaacagattgctcaagctaatggcgttgttaaagctatcaagcttcataaaatctgaaatttgaagtgaaatgatcggaaaaaaaaaacaagaaaaaaaaggatttgttttgttttgtgattgtgtcatttgaaaaaaaaaagcgatgaaattatattgaccgtcgagtctcgccggtcggttggccgttc

SEQ ID NO: 30926 - DNA, 405 bp, Gossypium hirsutum
  Clone ID: LIB3148-044-Q1-K1-B6
gcctgtatttgcttcaagagttgggttcatgagacacgactacaaaaatagatcaagggggcggaaacgttgaccgtaaagacaaattgtccgaagtgttcaagagctatgctgctaatgggctgctagacaaggaagggctgaaagacgctcttctacatctagatgctgccatgccgtaccggcaagccgaagacgccctccgtgtcgtcggcaaaacctataacattaacgtcgaggaggaaaccgagcttaacgcccttatcgactatgcttacaataagggttacgggtcttcaatttgattagctaatttataagctaaatttctttttctttatcacttttaatcatctaatatgtttttttatatatatttaagtttcgtcccaaaagacgttatta

SEQ ID NO: 30927 - DNA, 345 bp, Gossypium hirsutum
  unsure (1)..(345): unsure at all n locations; Clone ID: LIB3148-044-Q1-K1-B7
ccataaatgccgacaaggagagatgggatcgtgcagctgacttgaggaaagccatggtggaagcaggcatcagaaaagttccagcttatagcttcattgatcccatgtaaaaatcttgtgaaaacagaagatgtctctattctttaactaatcacatgcattctgcagcagcaatatcgatggtaaatgctaatcaaaatattagagaattcattcttagattgaacaatcaaatatgatgcaaacaaatcagcatgatgatatttatatatgaaagacaaatgaaattcatgcttgctttgcttannnaaaaaaataaactaaaataaatttttaattataaat

SEQ ID NO: 30928 - DNA, 416 bp, Gossypium hirsutum
  unsure (1)..(416): unsure at all n locations; Clone ID: LIB3148-044-Q1-K1-B8
gtgaatgcattggcgcaactaatgacatggaagacagcagttgcaaacatcccatatggtggggctaaaggtggtataggatgtaaccctggagagttgagcaaatccgaactagaacgcctcactcgagttttcacccagaaaatacatgatcttataggaattcataccgatgttccagcacctgatatgggtactggtccgcagacaatggcatggatactagatgagtactcaaaattccatggtcattcacctgctgtggtgactggaaaaccgattgatcttggaggatcacttgggagagatgcggccactggccgaggggtgctgtttgcaactgaagcccttcttaatgaacatggcaagtccatctcttgacaaaaatttgtaattcaaggtttntgggaatgttg

SEQ ID NO: 30929 - DNA, 398 bp, Gossypium hirsutum
  Clone ID: LIB3148-044-Q1-K1-B9
cgatgaatcccctgcgaatgttgaagctgtaaaagaatggagagagacaagagatgaatgcaagaggaaggttagccgctgcgtgagacggtcccaagaaatgttatgatccattgccgctgcttcttcttgacaatatttgagtacccagggaatgccttcaattgattgtgtggggagctttggtcgataacactgcgagtgtccttgtagaatgccatatgaaaaaatctcaacactttacttaaaaactctccctttttttgttttggttttgactggagtaatgtaattactctgaaaacagtttcccggtattcaaaagcgttttttggtaagtgtttgttggcaaacgttctttgtgagtcccgcttttttatcatgaaatggtcatttgt

SEQ ID NO: 30930 - DNA, 289 bp, Gossypium hirsutum
  Clone ID: LIB3148-044-Q1-K1-C10
cccacgcgtccggtaactgagtttattactcttgataacatattatttttcaaaagagagaggaaaaaaaaaaaaaaaaacaaaaaaaaaaaaaaaaaaaaaaaaaaaacgtgcatccaatataaaagggtccgctcttcttacacatccatgctatcctcctccttcttgtatagcaacacctttatttaattaaccccccaatttcttacatcggccggacttttaaaaccctgtcatttccaaaatcctttgctttccaaaatttacccccttgaccaacattccc

SEQ ID NO: 30931 - DNA, 310 bp, Gossypium hirsutum
  Clone ID: LIB3148-044-Q1-K1-C12
tagccatacatttgataattgaccttgttcttggctagcaaatactcacagttaaggtgggttatagtgtttgtagggttgaaggattttttttttgggtctctgttttatgggtagaaggaatgaattccggttatttaaggtgcagcattaggataagattgggttagtctttttttgccagagttgcttctatagataatgtaatagttccagaaactttgatagaagctatcttctgtttcaaaaaaaaaaaaaaaaaaaaaaaaaaaaaaaaaaaaaaatatttaattttttaaaatgttattta

SEQ ID NO: 30932 - DNA, 214 bp, Gossypium hirsutum
  Clone ID: LIB3148-044-Q1-K1-C2
cgaccacgcgtccgatttaacttcttcaaagtgaaaaaagaaaataaataattggatgttgggaaaaaaaaaagggaagaaaaaaaaaaaaaaaaaaaaaaacaaaaaaaaaaaaaaaaaaaaaaaaaaaaaaaaaaaaaaaaaaaaaaaaataaaaaaaataaaaggcctccaaaaaaaaaaaacccctccctttccttaaacaacttcattt

SEQ ID NO: 30933 - DNA, 415 bp, Gossypium hirsutum
  Clone ID: LIB3148-044-Q1-K1-C3
cttgtggtcatatatgcacttacatcaggaattttaggatatactgcaacttctttctattgggagcttgaaggaaacaactgggttaggaatctcttattgactggctgtcttttctgtggtccgttgtttctcacattctgcttccttaacacggttgctattgtatacagtgcaactgctgcactgccttttggaactattgtagtaatagtccttatatggacactagtgacatctccattgcttgttctgggtggaattgctggcaaaaatagcaaggctgagttccaagctccttgccgcaccacaaagtatcctcgagagattccaccattgccatggtacaggagtgctgttcctcagatggcaatggctggatttcttcctttcagtgccatctacattgagcttt

SEQ ID NO: 30934 - DNA, 386 bp, Gossypium hirsutum
  unsure (1)..(386): unsure at all n locations; Clone ID: LIB3148-044-Q1-K1-C4
cggaataaccgggccggccccacgcgtccgcccacgcgtccggctgcaaatgaggaggatattttgtggtgaatgatggcctttaaggcgaggggattccccgtcatatcgcgaaccaccaaacccgtcgcagatgtgaagctactactatcaaatgctccatcaaaatagattgtcgttctcggcatgtcttcttagactctaaaaggcacgaactgattcctggagaaccatattagccataaagtataacaaanaagtctacattggatgtcgtttcctctcttaaaaaccccgttgcaggacagtcacggaagaaatgggggctatcttctacccaggaacaacctcgggggcatccatcaatttgaaattactcttttgta

SEQ ID NO: 30935 - DNA, 225 bp, Gossypium hirsutum
  Clone ID: LIB3148-044-Q1-K1-C5
cccacccgtccgaatttcaaaaaaaaaaaaaaaaaaaaaatttaatttttaaaaaaaaaaaaaaaaaaaacggacgaataaaaaaaaaaaaaaaaaaaccaaaaaaaaaaaaaaaaaaaaaaaaaaaaaaaaaaaaaaaaaaaaaaaatggcccccccccttaaaaaaaccaaacctaactaccccttccatccaactaaaaatttttttaaaaggccccccaaa

SEQ ID NO: 30936 - DNA, 255 bp, Gossypium hirsutum
  unsure (1)..(255): unsure at all n locations; Clone ID: LIB3148-044-Q1-K1-C6
tgggtnaacccccgaagggtgggcggagtttttttgatttaactaatccccccaatgcccacaaactattacccaaaaatgcttcttgatgttgaaaaatgtgtaaaaatagtttcaagagcatatgcataatatactgcattgacataaacactactgcagtgactgaatttgctggtaagactattgagaccttgagccacagacaaaaggcatgtgattgattaagtttatatatatgacaatggaagactt

SEQ ID NO: 30937 - DNA, 420 bp, Gossypium hirsutum
  Clone ID: LIB3148-044-Q1-K1-C7
cccacgcgtccgcccacgcgtccgccccctttcactttctcccaatagcacccccctctggcctcatttgacaccaaaatggcgaactcagcatccggaatggcagttaacgatgaatgcaagatgcgattcttggaactaaaggccaaaagaagctacaggttcatcgttttcaaaatagaagagaacattcaacaggtcatggttgaaaaactcggtggacctaaagaaaaatacgacgacttcagtgcttgtttgcctcataacgagtgtcgttacgctgtctttgatttcgacttcactaccgacgaaaatgtccagaaaagcaaaatcttcttcattgcatggtctcctgatacatcaagggtgaggagcaaaatgttatatgcgagctctaaagatagattcagaagagagttg

SEQ ID NO: 30938 - DNA, 372 bp, Gossypium hirsutum
  Clone ID: LIB3148-044-Q1-K1-C9
gcaaatttggagaagagagcaaatcatgtttacaaagcggtaaaggacaactattgatgcttaattaaagttccagaggccaaggaaaaagcattcaaaccaatagtggcatggatggaataccagaatgtaggttgctgaaacagtggccacacattcatatgcttggtttcatccctaaatccaagtatacgtagggtgagtaaaattcgatttgattcgagaaaaatttaaatttcgagttaatcgaattaagttattcagattattcgagttgagttaaattttacgactcgaataattcgaataacaaattggtgtaaatatccctttggtccctattaattttgaaaatgagcaaattagtctctc

SEQ ID NO: 30939 - DNA, 277 bp, Gossypium hirsutum
  unsure (1)..(277): unsure at all n locations; Clone ID: LIB3148-044-Q1-K1-D10
accggnttcggaaaacccggcccgacccacgcgtccgctcacacctacggtatttgttacgtttttttttgacaacaccaatcgcttaacacggcggggacacatttttagacgggtctcgatacaaatgcaagaacgacagccgtctaggcatctaaggccgaactctgaacgtgacacatcttctggaagaacatgcagtacgataagaggtataattgtaatcagcaaggaaagatgcgaacaatgaagtccacggtattgatcataggaagtg

SEQ ID NO: 30940 - DNA, 392 bp, Gossypium hirsutum
  Clone ID: LIB3148-044-Q1-K1-D11
gggaaatggtgctttatttggagcttgttatatccagactgcccagtctcatgatgtaggacaattacaatggattggtccagttcctggggatattccagaagttgaggcttattgtgaaatagaattttggaggggtggtcaagtgacagaggaaggtctgaagtggttgattgacagaggatttaaaaccattgttgatctaagagctgagactgtaaaggacaatttttatcaatcagccttggatgatgctattttatctgagaaagttgattttttattttgcatatgaaaagaaaagaactaatgttactaaaatttagtaatttttatgtaaaatttgaagatttttatttcaccaaaagattgctataaataattaatttatt

SEQ ID NO: 30941 - DNA, 359 bp, Gossypium hirsutum
  Clone ID: LIB3148-044-Q1-K1-D12
gccgatcgatctcctgtgttcacgtttgtattgttcgagatgggataatcacccaggtgggggattatttcaacacttctctcaccgttactcgccttaaagactctccaccgtcagcttgcagttcttcgacggcggagattgcgccagtgtattgcccttacgtttgggagagtactctttccaaccggctggggaaatcggatccaggtcttgttcttgcaatttagtttcctcctcccacgtgtggctaacataacagatgttaattccatgagttgagtttggtctggtgttaaaaattattgtgtctggactgtcaatttggtaacttattagaattgttgtgtttcaagtgt

SEQ ID NO: 30942 - DNA, 339 bp, Gossypium hirsutum
  unsure (1)..(339): unsure at all n locations; Clone ID: LIB3148-044-Q1-K1-D2
tccggcttttgaactcttcttttggggtggnngcttggaacttatagtatatggttcnntagttgannactttagtataagagagtgttagtagggactannggaagtannaaaatgttgcatttattaatnnatggtttcnnctgatttcnnagtattacctggtttanttggtgaccctagatctnnttgataaanncttgtagtttaaaatcgtttgaaccctacgagaaaccgttgtttgacaattnnaacattcgaagttcaaccctttgtaaaagctgccttgtttatnggtgcgccnnannaaaaaaaaaannaaaaaaaaaaaannnnnng

SEQ ID NO: 30943 - DNA, 415 bp, Gossypium hirsutum
  Clone ID: LIB3148-044-Q1-K1-D3
cccacgcgtccgagggcatcaaattacggtttttgtaatctaaaaaagtgtgagaataacattcgtgcactggatagtccatgtgccaatataagaatggaaattgggtggcctcacggagtgccgttcgttcatccccacgatctacctaataaggccaagatcggttttcttgaagcatatgaacctggttggacagcaactcacgatatggatttaagcctaatggaacctgcacagaccagtcaacagtactgtaactgaatcatcgttgtggttttgtatgtccattatcctgaattcgcttgttcctggtcagttttctcaatctcaacttggtggtttcttttcctgctaaatccaggacaagagctgttccaaccggtgtaagctgttttgttgaacccaacccatt

SEQ ID NO: 30944 - DNA, 237 bp, Gossypium hirsutum
  unsure (1)..(237): unsure at all n locations; Clone ID: LIB3148-044-Q1-K1-D4
tccgcccacccgtcctaaaaaaaaaaaaaaaaaaataaaatataaaaaaaaaaaaaaaaaaaaagaaagaaattataaaaaaaatattaaattcctaaaaaataaaaagggccaaattttaatataaaataaattttaatttaattnttttttttatttttttttcctttatttttttttaattaaattgttttttttaatccttcttttttctttatattttcttcccctttcctt

SEQ ID NO: 30945 - DNA, 387 bp, Gossypium hirsutum
  Clone ID: LIB3148-044-Q1-K1-D5
gcccgacccacgcgtccgcttttctctatcttagagaaactactgctttaattaattaattaaatattaataaattaaatcagggaaataccacacaagaaaagcaaagaaagatggcacgccaagtatttgtcatggcccttgctttcatggctgttgttggggcatttgctgccaattcttcaccttccgcgtcgccatcttcttctcctgctgccagccccgcaggtggcccagctagcgaccttgctttttcccctggtgtcgagagtccaaatgaaagcgaggacccaagtgaggaaccaagcgaggacccaagcgaaggcccagaggcggacgaacccgctgctgactctctagatgccgactattctggtggtgatgccc

SEQ ID NO: 30946 - DNA, 372 bp, Gossypium hirsutum
  Clone ID: LIB3148-044-Q1-K1-D6
cccacgcgtccgcccacgcgtccgcccactcgtccgccaacccttccgaagggacttaatgctataaacttgggggacagtggttttatggtggttcgggatggatgtactatatttagatcccctgttcagcagcatgattttaacttcacatataaacttgagagtggaaataatgctgatttacctagctccggtcagatctttgcagttccccgttgctccaggagatgttatcattgctggcacagatggactgtttgataacttgtacaataatgaaattactgcggtggtggttcatgcactgagagctggttttgggcctgaagtgactgctcagaagatagcagcattggcacgagaacgagc

SEQ ID NO: 30947 - DNA, 404 bp, Gossypium hirsutum
  Clone ID: LIB3148-044-Q1-K1-D7
cccacgcttccggaaaaatgaacctttcttcgttgcacgacgaatgaggcgtgaagcatgattttaaaaggaaaaaactctttaaaacagattggtcggtgttcatcatctctaattataccccatgttcagtctcatgattttaacttcacatatcaacttgagagtggaaataatgctgatttacctagctccggtcagatctttgcagttcccgttgctccagtagatgttatcattgctggcacagatggactgtttgataacttgtacaataatgaaattactgcggtggtggttcatgcactgatagctggttttgggcctgaagtgactgctcattatatagcattattggcacgagaactatcacattctatatatttacaaactcctttctcaac

SEQ ID NO: 30948 - DNA, 416 bp, Gossypium hirsutum
  Clone ID: LIB3148-044-Q1-K1-D8
ccaagaacatgatattaaaacgcctttgttttcagcctttggtcttcactcgcctggaggggagagaagaagagatggtaaccataatggtacggccgttctcacttgcactcaaaccctagatcatgttcatcgtctccagaggcagcaatcactcggtcaagggagatccccacatccggatcgagtcgctgccgccactggtgctgcagctgttgcacccatttcagttggttcaaacgcaaagccgtccagcttcgtcagataccgagagtgtcttaagaaccacgccgccagcatcggcgggaatgtgtacgatggctgcggcgagttcatgcctagtggggaagaaggaacactcgaggccttgaaatgtgctgcctgtgactgccatcgcaactttcatcgcaaggagg

SEQ ID NO: 30949 - DNA, 382 bp, Gossypium hirsutum
  unsure (1)..(382): unsure at all n locations; Clone ID: LIB3148-044-Q1-K1-D9
ggcttggcacgcttaagagggctattttgtgcagtgtaagcaactatgtagtgaacaagggctcctgtcctgttactgtggtgaagcatcatgtttaaggattgtttttcattgcctttgaggttttaaaagtgttttcccataatagaagtaataaggaatagttgagatatgtagcttgatttatgttttattgcatgggattgtatgtatggaagtaattaaagcttttgttgaagctgaacacacttcatcttgttgtatattgagatgggtgtttgtgtaaactagacttaccaattgagtgatgtgagaataaattgtgtaggcagtttctaagaactgctggttcttccanaaaagaactgataaatcctgtctt

SEQ ID NO: 30950 - DNA, 125 bp, Gossypium hirsutum
  Clone ID: LIB3148-044-Q1-K1-E1
aaaaaaaaaaaataaaaataaaaaaaaatataatatttcgccccaaaaaaaaaaaccaaggctggcttttttttacatcctacctctaaactcttctattagttcacctaaattcaattcacttt

SEQ ID NO: 30951 - DNA, 415 bp, Gossypium hirsutum
  Clone ID: LIB3148-044-Q1-K1-E11
cccacgcgtccgcggacgcgtggggtcctttacaagcaacggatagccatagctgagcggagagagcaaggagagagaagattaatgcacgtatgaagctcctacaggagttggtaccaggatgcaataagatttcgggcacagcgttagttttggatgaaatcatcaaccatgtgcagtccctacaacgtcaagtggagttcttatcaatgagactcgctgcagtgaacccaagagttgatttcaactttgatagtgtattcacggcagaaagtggattttttatggacagtaacttttctggcatggttatgcctatgatgtggcccgagattcaactttcagcaacctgtttgggggagagaagaagtctgcaataattacttaactccggagaacttgcttttaagctatg

SEQ ID NO: 30952 - DNA, 269 bp, Gossypium hirsutum
  unsure (1)..(269): unsure at all n locations; Clone ID: LIB3148-044-Q1-K1-E12
cccacgcgtccggctattcatactttatgttttctgtaagttatatccaatgttgtgggtgcaacttgttgagcaagttgtttgccattcttgctgcttcaccaatcaattataacaagctgtatctcaacaatttgcttggatttcaagtcatcaagttcttcatttttatgtttgtagcttttttctgctgaatattagccaccttgcttgtaattttagttatgaattggtacatgaatgagccatttcatcacgtttaccccana

SEQ ID NO: 30953 - DNA, 272 bp, Gossypium hirsutum
  Clone ID: LIB3148-044-Q1-K1-E5
cccacccgtccggatgaagacaggctatttttttttcaccagggtccggtttggctggggatgggaccaatctaagggtttggtaatttggtcctttaaggggggtttcagttgtggtttggttctaaattataaccttaaagtagtagcaaatgatagctatattgtaatgcaagtttgataaatgaaatcattgtttgtttgtttgaaaagtaaatacaattcaaacgcaaatgatcattaaaataattcttcatgaggagattttcaat

SEQ ID NO: 30954 - DNA, 414 bp, Gossypium hirsutum
  unsure (1)..(414): unsure at all n locations; Clone ID: LIB3148-044-Q1-K1-E6
gcggcaagcattttccagaactgtatgcctcttttgagggaacccgggcccagaccaaaccggcttggttcctgcacagggaaggattgatcttggaccaaactcaccatttgtccttcaaaactgcaccatctcggccgcccctgattacatccaagtgaaggatacaaacaaggcatacttggggcgtccttggaaacaattcgctaggtccatcataatccaatctaggatcgacgacatcattcaaccagagggttatgcccccatgacaggcaccatangaatagacacttctttcattgccgagtttggaaacaggngacccggtgccgataccagccgtagggtagcatggaaaggtatcaaaaagatagatataaatgaagccaacaaatggactcctcgcgtctt

SEQ ID NO: 30955 - DNA, 65 bp, Gossypium hirsutum
  Clone ID: LIB3148-044-Q1-K1-E8
cccacgcgtccgataacctagcatttcaataaatgaaattttatttgaaaactatgtttgtactc

SEQ ID NO: 30956 - DNA, 413 bp, Gossypium hirsutum
  Clone ID: LIB3148-044-Q1-K1-E9
ctttggagtggcaaagatgtttagacatttagtcagggcagatacacttttacaatacaaggacccatacgagaacatcaaaggatccaaggagaagccctgaacccccaagccccgttcacatgagcttagaccttgagctaaacctaccatgcgattcatcagtaaggaaagttgatgcaacagatcaccaattattcaacaagcacaactccatcggccccacgagggccggttcagttgataagaagatcaactcatcgggaggattaactcgcaacctttcgtggttggcagtggaggagaatgatcagcaagagcaagagatggtagcaacagtgtgcatgagatgccacatgttggtgatgctttgcaagtcatcacctgcatgccctaactgcaaattcatgcac

SEQ ID NO: 30957 - DNA, 417 bp, Gossypium hirsutum
  Clone ID: LIB3148-044-Q1-K1-F1
cccacgcgtccgcccacgcgtccggccacttttttcatgctcgctactggaactggaatcgcggcctttcgatcatttctgtggaaaatgttcttcgagaagcatgacgactacaagttcaacggtttggcatggctcttccttggtgtccccacgagtagttcattgctatacaaggaggaattcgagaaaatgaaggagaagaacccagaaaacttcaggctggactttgcagtgagcagggaacaaacaaacgagaaaggagaaaagatgtacattcagacacgaatggctgaatacgcgaaagagctatgggaattgctgaagaaagacaacaccttcgtctacatgtgtgggttgaggggaatggagaaaggaattgatgacataatggtctcactcgctgcagctgatggt

SEQ ID NO: 30958 - DNA, 411 bp, Gossypium hirsutum
  Clone ID: LIB3148-044-Q1-K1-F10
cttggaaaaagttgttgaattcttttagtttaaatatttcaagaaggattcagtcggcggttaccattttccagcaaattcagccactgctgagattgcattcacgacggagggaaaggaggaagcaaaaatcaaagtagagaatgcgaatgtggtcgagatgatcaagaaatggtacttaggaggaacaaggggagtgtctgcaactaccatttcctccttagctaataccctctccgctgagctttgcaaatgaacccatgccgttttgttaccaagtctttcctactaagaaccatcctgtttgttgtgctttctctaccaataaattatgatatgattggagttttcgcttaaaaaaaaaaaaaaaaaaaaaaaaaaaaaaaaaaaaaaaaaaaaaaaaaagggcgg

SEQ ID NO: 30959 - DNA, 413 bp, Gossypium hirsutum
  Clone ID: LIB3148-044-Q1-K1-F11
gagccccatgcatacttgagtggagagtgcattgaatgcatggcaacgtcagacaatgtggtccgggcgggtcttactcccaagcaccgtgatatcataactctttgctccatgctaacatataagcaggtacaattatttgatcaagggtttgataattttctatttgagagtaaaaataatttgttaagagtgataccacatataggcttttctttttctgttttagctgaacttttgctctatgaactttaattacacgatgacacaggctactgctttatttatttgtcaagcactaatactttatttctatgtgacttgatttggtatatttctttgtcttttcccaacggggcagtttccttgataacataaggcgaaatattatgcacatttttgcttggatatag

SEQ ID NO: 30960 - DNA, 341 bp, Gossypium hirsutum
  unsure (1)..(341): unsure at all n locations; Clone ID: LIB3148-044-Q1-K1-F2
aatttgtgcccccgttttctttgaataattgaacattctaagttggctcagaattggacctgcagtttcagctctgtatattggaaaaagcacttccatagatgcatgtataaatttccttacattgatatttaatacatgcaattactttttaacctnnnnnanannnnnnnnnannnnnnnnnnnnnnnanannnaannaaaaaaaaaaaaaaaannnaannnnnaaaaaaaaaaaaaaaaaaaaaaaaaaaaaaannaaaaannaggannnnnnaanannaaaaaaaaaaanaaaaaaaaannaaaaaaaaaaaaaaaaaaaaagggggggggntatt

SEQ ID NO: 30961 - DNA, 246 bp, Gossypium hirsutum
  unsure (1)..(246): unsure at all n locations; Clone ID: LIB3148-044-Q1-K1-F4
cggacgcgtggggttgggagggatatgagtatttgtttgttccctcctgctaaaaatggggtgggaccctgttgtatcctagtactcgtggtgatagatcaactgctatatttgtcagtccaacctgtgtttcccctgaaacaatctgttgtgtggataaaaaaaaggaatttactagagatgccaggtggaagttgagatttcaaannnnaaaannnnannnnaaaaaaaaaaaaaaaaaanaaa

SEQ ID NO: 30962 - DNA, 270 bp, Gossypium hirsutum
  Clone ID: LIB3148-044-Q1-K1-F5
aataccgggcccaccccacccgtccgaaaaaaaaaaaaaaaaaaaaaaaaaaaattttaatattaaaaaaaaaaaaaaaaaaaagggcggcggattttttaaaaaaaaaaatttccaaccccatcaatccaaaaaaaaaaatatttttttaaaaaaacctaaattaaattaaaataaccaaaattttgcccccccctttaaaaaaaaaaacttttccttcccccaccttaaacgcttttaatttttttttcctttccccaaaataaaata

SEQ ID NO: 30963 - DNA, 235 bp, Gossypium hirsutum
  unsure (1)..(235): unsure at all n locations; Clone ID: LIB3148-044-Q1-K1-F6
cggaataaccgggcccgccccacgcgtccgtggaaaacaaggcagatgctcggagaactttatttcaactttttccgtcctaatggtggggttggggtcccactatgtgggaaacccatattttctggcacaaatgttttgccttcctttttcttttgtttttttgtcaaaagccaattctttttggcttattaacagggaatgggcagaaatttttcggcagagattgaangtt

SEQ ID NO: 30964 - DNA, 86 bp, Gossypium hirsutum
  Clone ID: LIB3148-044-Q1-K1-F7
ccggtccccactcccgatccgggcataatctctttaagacccaaccggcctgtgtagcgcaggttaatcacgcaaaaacaacccta

SEQ ID NO: 30965 - DNA, 398 bp, Gossypium hirsutum
  Clone ID: LIB3148-044-Q1-K1-F8
tgaagctcccattttcgaaccagatttaattagagccattttcaagcacatttggataaggagagctcaagagcgtgaaaggaacggattcccaaacactgaggccggagattccgaggttggagctggaacatcaaagaagaatcgacccacttccgctaatacaaatgccttgaagctgagttgtgaacttcttcggatttttatcacagaggctattcagcgagctggtacaattgctgaagctgagggtagtaccatgattgaaccaactcatttagaaaggattcttcctcaattacttctggatttttaaggggttcagctcgctaactaattcgttggaactgatagacatcaatgcagtatctctacatcagcttgtaggtagtattatc

SEQ ID NO: 30966 - DNA, 131 bp, Gossypium hirsutum
  Clone ID: LIB3148-044-Q1-K1-F9
ctgaatgctgctagggtttgttgctgtgttttctggtgttgggccatttgggctgagttatggttgggctagggtctttaatattgggtttttgtaaatggacatttgggctaaactttaatattttgttt

SEQ ID NO: 30967 - DNA, 420 bp, Gossypium hirsutum
  Clone ID: LIB3148-044-Q1-K1-G1
tgaaaggacccaccaaatggctgttaatattgacaaggatttgaataagggtgagaagcttttaaataatctagggggcatgttttctatgccctggaaaccgaagaaaaccaaagaaattaccgggcctgtgatcacttcagatgataacaagaaaggcaaagccgccacaaaggagcagagagagaagttgggtgtggctcctgtacctaagtctaaggctggaagtaagacacctacgccggagccaaccgacgccatacagaaagttgagcttgagaagcaaaagcaagatgatggactttcagatttaagtgatatcttgggtgatctaaagggcatggctcttgatatgggaagtgaacttgatagacaaaacaaagctcttgatcatctgggtgaagatattgatgaactgaa

SEQ ID NO: 30968 - DNA, 68 bp, Gossypium hirsutum
  Clone ID: LIB3148-044-Q1-K1-G10
cggacacgttcgcccacccgtcctttcactcctgctacaaaaaaaaaaaacctgcgggtggtataatt

SEQ ID NO: 30969 - DNA, 413 bp, Gossypium hirsutum
  Clone ID: LIB3148-044-Q1-K1-G11
tacagagattgctggagtggtgctttcctttgatcctaagccaattcagggagacgggggtggtgccggcgctcacacaaattacagtacgaagtccatgagaagtgatggaggctacgaggttatcaagaaagcaattgcaaagcttgggctaaggcacaaagaacacattgctgcctatggagaaggcaacgagcgccgtctcaccggccggcatgagactgccgacatcaacactttcttatggggtgttgcaaatcgtggggcatcaattcgtgttgggcgagacacagagaaagccggaaaagggtatttcgaagacaagaggccagcatcgaacatggatccatacgttgtcacatccatgattgcagaaaccaccatcctgtggaaaccatgaggggaagcccatg

SEQ ID NO: 30970 - DNA, 412 bp, Gossypium hirsutum
  Clone ID: LIB3148-044-Q1-K1-G12
aaataacatatataaaaatcatctttttatatattccaaaaacaacacattgcgcaggcgtgttccatattctaacctaacacccttcacaaaatcttaaatatgaaattaaaccttcttcatataaaatcaacatataaaaagatctgtttcaaaatctcaattgtctcatttaacaaaattcatctttcaaaaaaaattgacctaccagtctccccccatcgttgcccattcacatccaagcccttcaaatggaaacatcatgtggtccttcaaacatgtcaatataaagaatagcttccttcataaacttaccaatatcacttctttccatccataaaattatttaaaataccttatctttccattaattaaacttattatcctccattaaaatttattaactatattt

SEQ ID NO: 30971 - DNA, 411 bp, Gossypium hirsutum
  Clone ID: LIB3148-044-Q1-K1-G2
gttagctaataacccatctgatataaattttctttttcctcggttaagttcaagagtttggggggcggaaacagtcactggttatgatctccagcctgatgtgaacgctctgggattagggttttcttctgggatagtgtctagtgatactggagatggtgattatcgaaatggttttaacactaacccgactaagcaaatccaggatgtggtgacttcaaatgcactccttccatgctattccaatatctttggatcaactagcaccaccacggcaccaacaattgcttctttgttagcttctacactttaccaacacaaattcatgaaatgtggtgtcaaaaattcttcactgcctaaccaattgcaagccttatcaccttttcaagaccttcaaatgacatgcaactg

SEQ ID NO: 30972 - DNA, 264 bp, Gossypium hirsutum
  Clone ID: LIB3148-044-Q1-K1-G3
caaataacattcttcaaattcatttgattttgattaaggaacccaaaggaaaaaaaaaaggaggggaggaagcaatgcctgatgtaaactcaggcatacaagtttgtggtttggctttcatgttactgactcaacagcacagatcgagagataaattgtctgagatctcgaactaatttcagtatagactttggttttcctctatattcatatttgttggattttggtttagtttttagtgttgaaatggaaactacttgaagc

SEQ ID NO: 30973 - DNA, 392 bp, Gossypium hirsutum
  unsure (1)..(392): unsure at all n locations; Clone ID: LIB3148-044-Q1-K1-G4
ctgtgaagaagatgtatgatattcaggccaagaattggaacaacctggtcaaggcccatgggcccaaaaaaggcttatgtaaggtggaccccgaataacaaggcctggaatgttgcaaacaaaatcggatttatctaaccagttggcaactaccttgttttgaatgcttaatttttggggtttggttgcagggtgagaactgtattttcagaatcagctggaaaattaaagcttaagttttttgttttttaaaggttgtaaatcttgctttactgcccactaaatcatctttggtataaaacttaagtcaagaaagtatttaaacatgtttttcatatttgtttaaaaatggttgaatgcttgaattttcggctattcttactttacanatg

SEQ ID NO: 30974 - DNA, 204 bp, Gossypium hirsutum
  Clone ID: LIB3148-044-Q1-K1-G5
gttcctttggatgatgggatcgatgacgagtgttcccatttttggttaaacccaattttgggggaagttatggaagtttttaagcctggtgcatttgtccttcaatgtggtgctgactccttatctggagatcggttggggtgtttcaatctttcgatcaagggtcatgctgaatgtgttaaatttatgagatctttcaatgtt

SEQ ID NO: 30975 - DNA, 408 bp, Gossypium hirsutum
  unsure (1)..(408): unsure at all n locations; Clone ID: LIB3148-044-Q1-K1-G6
ggagatttgcagaaaaagccatgggaaccatggttttaaaagtggttgtaaaactgaacgaggcgatttggagccgagggatccgaagtgtccccagacggattagggttcgcattgctcggaagagaaacgatgatgaagatgcaaaggaggagctttactctctggtatcggttgccgaaatcccagccgaaggactcaaaggtttgggcactaaggtaatcgatgatgatgatgagtaatctccgatctctagtttaagaaaagcattgcattttgtttactgaaaagtttaaacccaggttttggctagtttaacgattttgttcatcaactgtttttcctttgatactnncgtttatcgtgtttagacttttaagcttggtgcaatatatgtttcaatggcgg

SEQ ID NO: 30976 - DNA, 282 bp, Gossypium hirsutum
  Clone ID: LIB3148-044-Q1-K1-G7
aaggcggctgctcctaaagctgcttttaataaggctgctgcgcctaaaaaggctcgttcgaagagtgctaagccgaagagtgtcaaatcaccggcgaagaaagctacgacgaggaggggaaagaaatgagaagggaggctagtcgaaataggggtagtcttgtaaattggagtgatgtacagagggtgtatatggatccatgtatacccacgaaatataacattcagatctcattattaatattcttatttgagtaggttatgatatgcgtgagtttaaaag

SEQ ID NO: 30977 - DNA, 337 bp, Gossypium hirsutum
  Clone ID: LIB3148-044-Q1-K1-G8
ggatgaggtggtagaggaagccgttgagtttgcagacgaaagccctgttccttctaaaagccagctgctcaaaaatgtatttgcagatccaaaaggttttggaatcggacctgatgtccgatatagatgtgaggacccaaagttcactgaaggcactgctcaggtctaagctttcaaaattggaggttgatcaaaactctctatgtcaacttatttattatttcatggtcacatatgtttagtttgtggtagcaatcacgcgttcacttgattttagtgtttattgcgtaccaagtattgtgttccttaggttgcctatccatatgaaaatttgggg

SEQ ID NO: 30978 - DNA, 202 bp, Gossypium hirsutum
  Clone ID: LIB3148-044-Q1-K1-G9
atttaatggtcatatttcgcgaatttaatatggactattttcattatgaactgtgtatgtcatttgcaatgcttgcatgaacgtggtggataatccagtttgagatgaaactctgaactttttaaataaaaagaacccaaagttaactgaaggcactgatcaagtctaaacttataaaaaaagaaagttgatcaaaaatatg

SEQ ID NO: 30979 - DNA, 418 bp, Gossypium hirsutum
  Clone ID: LIB3148-044-Q1-K1-H1
cccacgcgtccgatgggaaacatggaggatggtgtcagtggcctttcttgttgccgctttgatttccgtatcggttatttccgtggtggcggctgtcaaatccgcaaagcctgtcataataggtttggcaagtgcgttgacgactgctatagttccgttgggaacatggtgcaacaattcttggaagcggaacaaggaaaagataaagatgaagaagaagttaacagctataatggagatctttggttctagtgcaaccaccatatggatgcttgttgaacaattgtaaattaagaaagcgtcactgtccgactccgttgattacgtgctcaaagaaggatatactttgaaggctgggatggatgatatcaacaaaaaattgaaacttgttacgcctatcatcacagatttgcttcga

SEQ ID NO: 30980 - DNA, 241 bp, Gossypium hirsutum
  unsure (1)..(241): unsure at all n locations; Clone ID: LIB3148-044-Q1-K1-H10
cagttggtgataataatgataatggtatatcatcaaatggagggaagtgcatgaggtggagcagtgtaagaacaagtcccacatgttttctgggtttgccagcaatcangccagttcactcttagcttagttacccaaaataataaactctnttaagggtaaaaaatgaggtgtcgcttttattggataaatggaaatatgtacgatccaacagccttagaaacccaannnnnaaaannaa

SEQ ID NO: 30981 - DNA, 407 bp, Gossypium hirsutum
  unsure (1)..(407): unsure at all n locations; Clone ID: LIB3148-044-Q1-K1-H11
cccacgcgtccgatgcaattaaggctatacatagtgagatcaacattgatgatgtgcagaggttaatggatgacaccgaagaggctaaggcttatcaagatgaaattaatgcgatcttggnggagaagttatcagcagaagatgaagaggagattttggcagaatttgagaacttggaaactcagatggccgttcaagatatgccagaagtgcctagtaaagcaggatctgaagaacaaaagttggatcttcctgatgtgccaaccaagaaaccagttgcttccaatgcagctacagatgatgctgaaatttccacaaaaagaagagttacggaggaacccctacctgcatgattgagaaaaagacgtgcttgttcatgataaggagcttgcgattattaattacca

SEQ ID NO: 30982 - DNA, 248 bp, Gossypium hirsutum
  Clone ID: LIB3148-044-Q1-K1-H12
aaaaaaataaaaaaaatgcaaaaggaaaaaaggagggattaaagaaaaaaaaagaaaaaaagttaaaaattaaattaaaaaaaaaaaaaagggggtcggaagggaaattggacggtggttgattaaaaaaaaatggaaaaaaatccttaaaaaaaaaaggggggggggagaaaaaggattaaaaaaagaagaaacggattgagaaaaaagaaaagtgacggagggagaaaaaaaaaaaggtttaaggt

SEQ ID NO: 30983 - DNA, 256 bp, Gossypium hirsutum
  Clone ID: LIB3148-044-Q1-K1-H2
cgaaaaaatcgaaatccagcacagtagggttcgatctctcgaatttttaaatattgaacattggtttgttttagaatttagaaaacatgagtgaagttctaaagggatatttgattattttgaataaacgggaaattgcaacccagcacgatagggcacgatttttcgaattgtcaaatatcaaacatttccttcgtgttaaagaatttttaaagacatgagtgaaattctaaaggaatatttgattattttgaac

SEQ ID NO: 30984 - DNA, 466 bp, Gossypium hirsutum
  unsure (1)..(466): unsure at all n locations; Clone ID: LIB3148-044-Q1-K1-H3
gggtcggacccacgcccgtccggacccagcaaagagcctgacgccttactagaaagtcctgagcatagaatgattggtgagaatgatacagggagatcatagcaatgtgaggggtgaaggaaatacaagggcannacattgttttctcccaaacctggaagtatttgaaacttaagttgtctgcccaagtctagcnnaagcttttcctttggcgcatcactttgttnggagttcccaagtctttggaaaccgtgaagggtgaaaaagttgccccaaaatgaagaaatttctgtcaagggagagttaagcacaccaaggctggaaccagcgaacttaacaggagatgaggacggtgaactgcagtgggaaggcgatcttaacactagcataaaacatatgttcgatgaaatgaatgttcaaaattctcaagcggtcgaggttactgatcagttggggtccgtgtgag

SEQ ID NO: 30985 - DNA, 280 bp, Gossypium hirsutum
  unsure (1)..(280): unsure at all n locations; Clone ID: LIB3148-044-Q1-K1-H4
cggaatggacagggccggccgaccacgcgttcgacggtcagtctctatttccactaagttcaaaattacctggttcccttaatattttgggccgctttccaatggcctccaataattttttgacctgccaatttaccatccttatttttatgtttgcccttcgtaataaaatacaataagcccctggaataatctttaatctcaatagcaggattaatctttcnnaaaaaaaaaaaaaaaaaaaaaaaaaaaaaaaaaaaaaaaggggggggccgtttta

SEQ ID NO: 30986 - DNA, 140 bp, Gossypium hirsutum
  Clone ID: LIB3148-044-Q1-K1-H6
caaaggaacccccgtgaagaagaaatgggtagcaaattaataaatgaatttaaaaaaaaaaaaaaaaaaaaaaaaaaaaaaaaaaaaaaaaaaacaagaagtgaaaaaaaaaaaaaaaaaaaaaaaaaaaaaaggggggg

SEQ ID NO: 30987 - DNA, 407 bp, Gossypium hirsutum
  Clone ID: LIB3148-044-Q1-K1-H7
cccacgcgtccgggcgtgcatattattgttttactaagggagtaccatatgcttctgtggggaggaaaaacaaacccaggcgtgtcgatttatactattccagttggttaatccgtgcagttgaatcaaggagaggagacggtcagctaactgcatgcgaggtgttacttttccatcacgaagatatgggtataccatggaaaattgcaaaggttggcgtccggcaaggcatgtggggaaccgtcaagaagatcgaccccggcctacgtgcatatcaaaaggaaagaacatccggaaatacgctatcccattgcgctttcatggctcagataaacagtaaaaataagtgcagactatctgagatcctttgaaagcaaaagtaatgattcaatagagctcgaaacaca

SEQ ID NO: 30988 - DNA, 312 bp, Gossypium hirsutum
  Clone ID: LIB3148-044-Q1-K1-H8
gcgacaatgttgaccgtggtgataatctttattttattgctacaactacaaacggaaaggtggggaacttctcaaccccttccccacatcatcctctcaaggcatggagatcacttaaccaaggaataaacactggcgcaaaccgtgacaaccgtgaggtaatatttgttgcacattcatcaagagctttccgcgatgaggaaagcaaaagcttttggctggagattgagattgtggataagcatagatatccatcaaggttccaagcaccttacaatgtcacaacaacattgttagtccctgctcactacc

SEQ ID NO: 30989 - DNA, 313 bp, Gossypium hirsutum
  unsure (1)..(313): unsure at all n locations; Clone ID: LIB3148-044-Q1-K1-H9
gtaaaaatcctgaagagtagattcatacactataagtttcatcatagtgtgcattaaagcgagcttaaagcaatatccagtttgttctataataatatacccacgagtttagttatgtgaaatctatccatgaatcatgttcttggtaatggataaaatgatattactttctgtatcacaatggtttggtgataaatgtattagtatttgaagtatcgttgcngaaaaaaaaaaaaaaaaaaaaaaaaaaaaaaaaaaaaaaaaaaaaaaaaaaaaaaaaaaaaaaaaaaaaaaaaaaaaatattaaaataaa

SEQ ID NO: 30990 - DNA, 375 bp, Gossypium hirsutum
  Clone ID: LIB3148-045-Q1-K1-A1
ccaaaataagggaggccgaagaaaatgtccctgagaatgaaaagaatgttggcattgagaagcagtctggagaggaagatgccatggatgctggcaaggagaatgctgcaaatgaagctgaggagaaagagccagaaaacaaggagatgactctggaagaatatgagaagattgttgaggagaagaggaaagctttgcttgcccttaagactgaagaaagaaaagttgataccaaagagtttgagtccatgcaacaactttcaagtaagaagagcaacgatgacatttttatcaaactgggttctgaaaaggacaagcgcaaggatgctgataaagaagaaagagtcaaaaagtctgttagcatcaatgagtttc

SEQ ID NO: 30991 - DNA, 67 bp, Gossypium hirsutum
  Clone ID: LIB3148-045-Q1-K1-A10
gaaaaaagaaaaaaactaaaccgaaaataatatcctataatctcacaaattaaaatgttatgggtgt

SEQ ID NO: 30992 - DNA, 353 bp, Gossypium hirsutum
  Clone ID: LIB3148-045-Q1-K1-A11
cggacgcgtggggtcgaattttagttaatttaaaaaaaaaaaaaaaaaaaaaaaagaagggaaaaaaaaaaaaaaaaaaaaaaaaaaaaaaaaaaaaaaaaaaaaaaaaaaaaaaaaaaaaaaaaaaaaaaaaaaaaaaaaaaaaaaaaaaaaaaaaagggggccccttttgaaatttaaaaaatgggggggggcctttttaaagaatcaaattttatttacccttttttgcaaagtaatattttttttttggggccacaaaaattaaattaattggccgggttttaaaaacttgggaattggaaaaaccttggtttaaccaaatttaatccttttgaaaaaaattccttttt

SEQ ID NO: 30993 - DNA, 267 bp, Gossypium hirsutum
  unsure (1)..(267): unsure at all n locations; Clone ID: LIB3148-045-Q1-K1-A12
agctaagccagcttcgaagccgaagaaagctgaggcgacaaagaagccaacaaagagagggggggccaagaagaaatcaactccagcaaagccgaagcagcctaaatctatcaagtcacctgcggctaaaaaggccaagaaggcggctgcttagaacaaatgtgtaggaagtcactttaggttttatatgtaatcagtaacttatctttgtgaatacatggatgttagttcggtgcttgtgttnnggaaaaaaannnnnannnnaaa

SEQ ID NO: 30994 - DNA, 122 bp, Gossypium hirsutum
  Clone ID: LIB3148-045-Q1-K1-A2
tcccactcgtcctcccactcgtccgaaaaattaattttaaaaaaaaaaaaaaaaaataaaaggaagttttatattaaattttaaaaaactccaaaatttttttatctttatttcattataat

SEQ ID NO: 30995 - DNA, 380 bp, Gossypium hirsutum
  Clone ID: LIB3148-045-Q1-K1-A3
cagattcaaaaagaggccagaaattcaatggctgttgttagacatctccgggaatcataggggttggctgtggtgaggattgttgatatccattaatttgagacttagtcagagaaacactatttgatggttaacctgaggaaagatgtatgcaattttcatgataaaaggttcggggaaggatgatacggcagtatgaagtagccaaatataccaaggtagaaattaggttgtagtagtgtatatctatgtgtttcttaagtgcgatgtaattatgcagtagtttattgtttgttgcagctggttatgctgcgagggtccgaagctacggattgtgtcgatgttcttcactttcttgtatagatttcagcaatgaaaag

SEQ ID NO: 30996 - DNA, 282 bp, Gossypium hirsutum
  Clone ID: LIB3148-045-Q1-K1-A4
cccacgcgtccgctcttcccctatgataccaagggacgggagcttagtgatactagttgagaagaagtagttagcttctaaagacaaatggcaaattgtgtgccatccgtaatttgtcttttaagggaaataagtggtcccctacctgtagttatagtttgaattgtaggggggggtattaatggtaaccttattttcttaaaaaatgccatggggtgctgggatcattttgtaaaaacataccagtcattgtcataattaaaatagtttcttctattacgt

SEQ ID NO: 30997 - DNA, 373 bp, Gossypium hirsutum
  Clone ID: LIB3148-045-Q1-K1-A5
cccacgcgtccgaaaggggcagttttgtgccgatatcttgtatgtacaaggatttagacgggacatccctgagctgcaaactctcgatggctgctgaagaccaaaaactggtttccaagtatgctttattgatgaagaagagaatggaactagagaatcaccttgtcaaaaagttgggacggtactagaagtcaataatagtgtgttatatctcgtgatttttaggtactatcagagttcaattcaaatttaacatggacattgttatagttttttttttccttttatttaaatcattgcaaataaaaggtattatcagagttcagttaaaaaaaaaaaaaaaaaaaaattgttagaataaaaaaatttaaaa

SEQ ID NO: 30998 - DNA, 383 bp, Gossypium hirsutum
  Clone ID: LIB3148-045-Q1-K1-A6
gcatggatgagatcaacaatgctgcagtcattcattataatggaaacatgaaaccgtgggtcgacattgctatgaaccaatacaagaatctttggactaaatatgtggataatgatatggagtttgtgcagatgtgcaatttcggagtctaggttaagttaaagtgcttgtgcttctctccagcaatcaaggtaacaagaatacaaagttgtagtgattgttcatagtggcttgagggttataccatcagttttatttattttcattatcccatttattgtagaatttctattatcgattcataaattttgctatttcgtcctctcgaatataagcatgaattgtactgaaccaaatagctttatgtacacaaagaaaatgat

SEQ ID NO: 30999 - DNA, 63 bp, Gossypium hirsutum
  Clone ID: LIB3148-045-Q1-K1-A7
cggacgcgtgggaaaaaaaaaaaaaaaaaaaaaaaaaaaaaaaaaaaaaaaaaaagggggggg

SEQ ID NO: 31000 - DNA, 355 bp, Gossypium hirsutum
  Clone ID: LIB3148-045-Q1-K1-A8
cgccaaccgtccgccttcatattcctcacagggcacctgatctgccttcaaagttcaagggcatgcctggtcctggcaagattcaacacatcatttgcactggcaatctctgtatcaaagaaattcatgattactccaagactctgtgtgctgatctgcatatttctcgcggtgaatatgatgaagattcccgctgtccagagaacaaaacactgacaactggtcaattcaagcttgggatatgccatgggcatcatgtcattccatggggggatttggattcactagcaatggtacaaaggcaattggacgtggatatccttgtaactggtcacactcatcaattcaaagcata

SEQ ID NO: 31001 - DNA, 431 bp, Gossypium hirsutum
  Clone ID: LIB3148-045-Q1-K1-A9
ggaacatcgaaaaagctttctctttcacgaaacgtaatatgctccaagtgcaagggcaaagggtctaaatcaggtgcatcaatgaaatgtaccggttgtcaaggttcaggaatgaaagtctccattcggcacctcggtccttccatgatccaacaaatgcagcatccttgcaatgagtgcaagggtactggtgaaaccatcaacgataaggatcgttgcccacaatgcaaaggtgataaggttgtgcaagagaagaaagtcttggaggttattgttgagaagggtatgcagaatggacaaaggattactttcccaggagaagctgatgaagcgcccgatacggttactggggacattgtattcgtcctgcaacagaaagatcatcctaaatttaaacgaaagggtgatgacttatttgtagagcatacatt

SEQ ID NO: 31002 - DNA, 380 bp, Gossypium hirsutum
  Clone ID: LIB3148-045-Q1-K1-B1
gattgattagtgtttctatcaaagacccctccccccctcttcttcctctccgatcggtgctgtcgtttgctgtatttatatattttttgcttcaactcattcaatcaccacaatttctcttatttctttctttttataaatacccttttatttttacttgctttttctatttctcctttgactggttcatattagccgttgatagtttagtgattaatatatacaactttttaaagctttggaaagatcgttttttttacttggtatcaagcatggaagatcgcaaggagaaaaatgcaccatggctatcagtaccacaatttggtgattgggatcaaaagggacaggtgccagattactctcttgacttctcaaagatc

SEQ ID NO: 31003 - DNA, 202 bp, Gossypium hirsutum
  Clone ID: LIB3148-045-Q1-K1-B10
gggtactcctctttatctttttgactccattcaacacatcccataccctttacttaaactttatgacacgaacattctctatacatgcaatatttcatacatttattcattcttttggacaacatttaatgtaccaacatgttaatttattacttaatcttaaaaatccttttccttatccattccttttaacaactttttt

SEQ ID NO: 31004 - DNA, 170 bp, Gossypium hirsutum
  Clone ID: LIB3148-045-Q1-K1-B11
cccacgcgtccggaagaagtgaagctctctggtgacaagtcaccttgatgatttcgttagagaactttgtttagcatatgttttaacgtattggtttgagactgaaaactatgcactgaatctcgtttgtttaattttataatgtatgctaaatttttgtgtttagttgc

SEQ ID NO: 31005 - DNA, 391 bp, Gossypium hirsutum
  Clone ID: LIB3148-045-Q1-K1-B12
attgaatttgagcttggtagtggtcaagtaatcaaaggatgggaccaaggactactaggggtgtgtgtcggtgagaagcggaagttgaaaatacccgcaaagcttggttatggtgaccatggttcaccacccaaaatcccaggtggagcaacactagtatttgacacggagcttgttgcagtcaatgggaagccatccagcggaggggataatacaagtgaagatgagctataataactgatgataggcactcgtctgagcagctttatccttttactacgtttgttttcctttaaaaatgctagcaatggtaaacctcaccagcctttctggctgggatttagaaaacaaattctggtggcattttttcataagcaaaaaactatttatt

SEQ ID NO: 31006 - DNA, 281 bp, Gossypium hirsutum
  Clone ID: LIB3148-045-Q1-K1-B2
cccacgcgtgcgaaaaaaaaaataaaaactttattttacaaaaaaaatcccttccatataaggaaggatctttttaaaaaaaaaaaaacctaaaaataacaaaaactcctgcccgcctttttaataatatccaacctcactccccccaacatacaccggcttatcttttatattgttgcacccattttaaattcactggccttccttttaaaaccttttaacaccataaaccctccctttccccactttttccacctttgctttcacccccctttttcctt

SEQ ID NO: 31007 - DNA, 387 bp, Gossypium hirsutum
  Clone ID: LIB3148-045-Q1-K1-B3
cccacgcgtccgcccacgcgtccggttgccaaacaatcgagtgttttatcacggagtttagagaagaggattgtcccgagggctttgtttgctcaagaattgtcatcaaaaggtttggttaatgactttaaattgtctgtattgtttgacacatcggagaagacgttcaacaagatgtttggtgactatttcgtaaagaaagcacccgagctcttgaagctatacaaagaaaatgttgagaagtgaattaatgtagactgcagcgttagtgtttttcgtgctgtgctgcctggattttggttcattcttttgatctgaagcttgttgtagttgttttattgtcttccattaatgaaaccttaagctcaacatgtttgctgtttgatt

SEQ ID NO: 31008 - DNA, 273 bp, Gossypium hirsutum
  Clone ID: LIB3148-045-Q1-K1-B4
cccacgcgtccgcccacgcgtccggagctgctcgccgcgcccaaacctataaggtgcgcaagaatttgtggaggaggctatggcgataggtgacgccaaaatgaggaggtggacgggcatcttggttaggtcctaagttccctcaaatggagcgaaccaaaaatcaaaaatcaaaattatcatcatcatcatcatcatagttattatcaattatcattttcctgggcttcttttgtagtttctttatgcagaaaaaaattaatcagttattcc

SEQ ID NO: 31009 - DNA, 363 bp, Gossypium hirsutum
  Clone ID: LIB3148-045-Q1-K1-B5
cggacgcgtgggcggacgcgtgggttggaacaggtgattttcaagaaagaaactgggactgacaaaagggtagactgtaacagcttttgtctcaaagggatcttgttactccattttctattcttgtttcattttcctttttccaattctacttatttatctgctcctgcaaatgcaatgggaaacaacccatgaacattaaaaataagttaagtttctgtcattgggggtgtatatatattatatatgcatatgtatatatattttatcaatgatgacatgataaggtcacttgtgcaaaaataaaaaaaccacaaatttaataattggggtccaaatggtcaggtgccagatttctttctt

SEQ ID NO: 31010 - DNA, 416 bp, Gossypium hirsutum
  Clone ID: LIB3148-045-Q1-K1-B6
aggggctgtttagcttctctgccatgggagtgcaaggagaatccttcgatttcagtttggagctttttgggaaaatagttcctgagggttgcaaaactaatgttgggttaaggaatataatatgctcaatcatgaaagaagaaacagggtggtggaaaagattgttaaagtcagaagagaaacccgcgccttacatcaaggttgattggaacaaatggtgcgatgaagacgatgaagatccaaattctgatttggcctctgatgatgatgatgccacgtatgttggtcaagaagaagaaagcagtgatgatgaaagattgctgtatcttccagatttggaaaaagcaagaggaaactaagtaagaaatcctaactaaccattcaaaagttgaaagtactaagcttttcttggtagc

SEQ ID NO: 31011 - DNA, 332 bp, Gossypium hirsutum
  Clone ID: LIB3148-045-Q1-K1-B8
cctgcagctttcaaacgccatggagacgatggagttgttgatggattcagaagcgagcaggatggtatttgaagcaagtgcggcaatcaacttcgccggcagtaaacgtccaactaccagagcccttgtcccttctccagctgcctgcgaccgtaagactggcaaacgttgcgttcctgatagtaattcaggcagaaagaaacctccaaattgttcactatacaccagaggttgcaaatgatttactactttttcttgctatgctggtatattgtgtttgtgtgtcattttcgattattatgaataatggaaaaataatttggttgaatcat

SEQ ID NO: 31012 - DNA, 333 bp, Gossypium hirsutum
  Clone ID: LIB3148-045-Q1-K1-B9
aaataaaaaaaaataaatataaaaatttttttttttaaaactaaaataaaaaaaaaaagaggaagatttttttttaatgaagggtattcctattataaaataaaaaaaaaaaaaaaaaaattaaatttataaaatattttaaaaaaatataataaaaaaaatggggccccccttttttaaatatccattttttttccccctttttttccccttttttttttttttttttttccccctaattcattttccttccccccttttttcccccccttaattttaaaaacctctctcttcccccattttttttttttttcaaaattttcctttttttcc

SEQ ID NO: 31013 - DNA, 160 bp, Gossypium hirsutum
  Clone ID: LIB3148-045-Q1-K1-C1
cggacgcgtgggttctttccatctttggttgttctcccggcatggcttggaccatcgtggatgtcgctcacttccttgttacttaccacttctttcactggaagaaaggaaccccgtttgctgatgatcaaggaatttacaatggcttgacttggtggga

SEQ ID NO: 31014 - DNA, 343 bp, Gossypium hirsutum
  Clone ID: LIB3148-045-Q1-K1-C10
gattactttagaagtggagagctcggatactattgataacgtgaaagcgaagattcagggcaaagaaggaattccaccagatcagcaaaggttgatttttgctgggaaacaactggaagacggaaggactttggctgattacaatattcaaaaggagtccactcttcaccttgttcttcgtcttcgtggtgggttctaagccttaaggtctcccttaatgtgggttttctggttttacgtgaaggactgtgccctgtaatggccttttaaataatttctagtctttgtttaccggttgcatctatgtatggtttctctttgaatggaatttgcatatttacct

SEQ ID NO: 31015 - DNA, 418 bp, Gossypium hirsutum
  Clone ID: LIB3148-045-Q1-K1-C11
cccacgcgtccgggtctccactcttccacctcgctccaaaggggttgaagatctggaacggcctttcatggctccaaagctggtacaccaggcttcccacaccatgccacctgagaagattgaaatctttaaatctttggatgattgggctagggataacattctgattcatcttaaacaagttgataaatgttggcaacccaaggattttcttcccgatccttcgtccgatggatttgaagatcaagttagagaacttagagaacgggcaaaggagattccggatgagtactttgtcgtgttggttggtgatatgatcacggaggaagcccttccaacttaccaaactatgcttaataccttggatggaactcgtgatgaaactggtgctagccctacttcttgggcaacttggacc

SEQ ID NO: 31016 - DNA, 409 bp, Gossypium hirsutum
  Clone ID: LIB3148-045-Q1-K1-C12
gaaaaaaacgcaaagaaaagagaaatggctactttgggtggaattagccaggtcgatgggggcgccaatagtttggagattgaaaacctcgctcgttttgctgttgatgaacacaacaagaaagggaatacgatgctgcagtttaagaaggtgacgaatgtaaaacaacaagtggtttctgggactatgtattacataacattggaggcgatggatggtgacaagacgaaagtttatgaagccaaggtgtgggacaagccatggatgaatttcaaggagttacaggatttcaaggttattggcgatgctcccgccggttgtacttccaccgcttaaagtgactggagattgtagaggaaaggatattcggatatcgaaggcggttttaaaataatgtaactgtcttatg

SEQ ID NO: 31017 - DNA, 405 bp, Gossypium hirsutum
  Clone ID: LIB3148-045-Q1-K1-C2
gtttcagaccaatttagtcccataccctagaatccatttcatgttgtcttcatatgcacgagtgatttcagcggaaaaggcttaccatgagcaactatcagtggcagaaatcacaagcagtgcatttgaaccagcttcaatgatggccaaatgtgatccacgccatgggaaatacatggcttgttgcttgatgtacagaggagatgtggtgcctaaagatgtgaatgctgcagtggcaacaatcaagaccaaaaggaccatccagtttgttgattggtgtcccacagggttcaagtgtggcatcaactaccagcctccaactgtggtacctggtggggatttggctaaggttcaaagggcagtttgcatgatttcaaattctacaagtgttgctgaagtattctc

SEQ ID NO: 31018 - DNA, 234 bp, Gossypium hirsutum
  Clone ID: LIB3148-045-Q1-K1-C3
aaaatggtgtcgccatagttttgattgaatgaagcactgctacctccataaaaattcctgcgagtgcaagactccaattgccatgccccgagacttcccacggtttcctgaatgttttgagtaataaaatcctgtatgcatgtatgtatgtaaatcgacctttcaagtttacatattttttccgtgacagcttgccatggaaatggaaatatcattcatatcttttaagttttt

SEQ ID NO: 31019 - DNA, 303 bp, Gossypium hirsutum
  unsure (1)..(303): unsure at all n locations; Clone ID: LIB3148-045-Q1-K1-C4
ggctttaccatgtcggtattccggggaatctgcttcttgaaggagataacaccatatttgtaactcaaccgaaaagcaccagccctttccaaggaattatgtatgactatattcgattagaaggccctgcatcttctaatggaaacaagaaagcttaaattttttccagatatccacaaaattgaagctagaaacaggtttgaacaagtttctgtcaaagaagtatatcctgtttcatattgattaaaccgtatttctgtagttgatttatgtacaacatcaaaatcccatggattcaacana

SEQ ID NO: 31020 - DNA, 398 bp, Gossypium hirsutum
  unsure (1)..(398): unsure at all n locations; Clone ID: LIB3148-045-Q1-K1-C5
caatggatggattggcatcggcaaaaacatgcatgagggcggaaaaccaggagctgaaggtcatttgagagtacaactcgatcctgatccaagatacgtgtttcagtttgaagatgtgaccatgctgagtcctcagatagtacagcttcgaggttccatcaagcaaccaatttttagttgcgaatttagtcgagacaggttatgtaaaactatataatttcatcgtccatcttccatttgttgagttcaattttaaaagagctgcaattactcagtttttaaaaaactatatttggacacctttaaacaactcttacaacccnnnnntaaatataatttttattttttatttttaaaaatggattataattttngtttttttggttttttttttttta

SEQ ID NO: 31021 - DNA, 372 bp, Gossypium hirsutum
  Clone ID: LIB3148-045-Q1-K1-C6
cccacgcgtccgattcatctttcctttatttgaacagtcaggacctggacaagtgaggggctgtgaataaccctgaagagcaaaactaggtcgattatatacgactgagtttactaggaaactctattagtttttttacctatttattgacccctttttctccatactctctttatctctttctgataataaaaaaaaaagcagtggcggccaaaaaaaaaaaaaaaaattaataaaaataaaaaaaaatataaaaaaagaaattaattaaaaatatcaaaaacccatagatttcaccaaaaaaaaaaataacattaaaatttaataaattcttaataaaatattatttatatttaaaggggccgccttttt

SEQ ID NO: 31022 - DNA, 361 bp, Gossypium hirsutum
  Clone ID: LIB3148-045-Q1-K1-C7
cggacgcgtggggattactctaccctcaagaggtacccaaagatgtcagcttactggttgaaacagattcttactcggaaaaaacattaagcgggcagagtttatgtctcagtcatgtagagtaagtgctcatggaagaaaccaagtatggtgaggccatttctatgctttagtcctcccatagtatgttctttccttcctggcttaatcaataaaagcatactaatgcttcttagttcaaaaaaaaaaaaaaaaaaaaaaaaaaaaaaaaggaaaaaataaaaaaaaaatatatgtaaaaaatttataggaattttactaaaacaaaaaaagataattatttgatatgtaatttttaaaa

SEQ ID NO: 31023 - DNA, 349 bp, Gossypium hirsutum
  Clone ID: LIB3148-045-Q1-K1-C8
tcgctgatgccttggaagttttgggaaatgaatctccaaaatcaattgtgaaaggaaggctagccaacaatcgtaacatggacaatgacaataacggggttgagaatagttcacatttgacttcaaatatattggccgagcgccgcatccttgattttagcgaatgtgaaacacccagaaaggaaaccgaaaatgggaaatcctcaacaactgctgcaaccatgagtttctcaagcccctctttctatctttttaaaaagagcggatagtgcctcttattattattttttgactaaaaatccctcatgtttgtaggttatatcgtatatgtatgccttttttttttttc

SEQ ID NO: 31024 - DNA, 425 bp, Gossypium hirsutum
  Clone ID: LIB3148-045-Q1-K1-C9
gtttagaggacttctataacttatttttcttacaaattctattaccaattatatggaccgaagctatggcttctatctcggaagtaaaaaaaaaaaaaaaaaaaaaaaaaaaaaaaaaaaaaaaaaaaaaaaaaaaaaaaaaaaaaaaaaaaaaaaaaaaaaaaaaaaaaaaaaaaaaaaaaaaaaaaaaaaaaaaaaaaaaaaaaaaagggggggccctttaaaaggaacaaagttatattccccgggcatgcaacttaaaaatttttttaaggggcccccaaaaaaaaattaacggcccggggtttaaaaaccgggggacgggaaaaaccctgggttacccaaaataaatccctttaaaaaaaatccccttttcgcaagtgggggaaaaacaaaaaaggcccccaccaaacccctttccaaaa

SEQ ID NO: 31025 - DNA, 428 bp, Gossypium hirsutum
  Clone ID: LIB3148-045-Q1-K1-D1
gctcgcattgcctgcaacaagtacatggccaaatttgctggaaaggatgcgttccatttgagggtaagggttcatcccttccatgttctgcggatcaacaagatgctttcatgtgctggtgctgataggcttcagactggaatgaggggtgcttttgggaagcctcagggaacatgtgcaagagttgacattggtcaggtcctgctttcagttcgttgcaaggacagcaacagccaccatgcacaggaggccctccgccgtgcaaagtttaagtttcccggtcgtcaaaagattattgttagcaagaagtggggattcaccaagtacaaccgcgctgattatctgaagtggaagtctgagaacaggattatgccagatggtgtgaatgcaaagcttcttggatgccatggacctttggcaaatcgtca

SEQ ID NO: 31026 - DNA, 481 bp, Gossypium hirsutum
  unsure (1)..(481): unsure at all n locations; Clone ID: LIB3148-045-Q1-K1-D10
ccggctcggaaacccgggtcgacgcgacgcgtccgcccacgcttccttttttaagatatttatgttaaataacacaaaaacggttacgggcgcttttttttctttttagatctccttaaataattctcnantataattttaattttttttttatttttactaatttttttaaagttttttgttttacctaattttttattttttcacttttttttttttattttttttttttttttttttttttttttttttaactttttattaatatatttatatttttttttttttttttttttattttttatttattttatttttattatttttaatttttattttatttttttatttttttttttttatttttattattttattttttaattttattttatttaatttttatatttattttttcttttataattttttaattatttttttatatattttatttttttctttaatatattaatatttt

SEQ ID NO: 31027 - DNA, 317 bp, Gossypium hirsutum
  Clone ID: LIB3148-045-Q1-K1-D11
cttatatctacaaggccaaagtgaagaagaatggctcacactatcgctgcatttgggggagaagttactagacctcatggtaacagtggggttgttcgtgctaagttcaagtctaaccttcccccaaagtctatgggagatagagtcagagtcttcatgtaccccagcaatatatgagtagtgtagatcgacgactcgaatgacgctctaccatttcacttttgtttttatgaacttagtcaagattttgtgtgctttgaatcagtcattttgtttctttgggattgtgaaatataagacttatttatctttacatt

SEQ ID NO: 31028 - DNA, 67 bp, Gossypium hirsutum
  Clone ID: LIB3148-045-Q1-K1-D12
taacacagatgtttgaatgttattattgtttttcttttattaaaaaaaaaaaaagggagggaataat

SEQ ID NO: 31029 - DNA, 304 bp, Gossypium hirsutum
  Clone ID: LIB3148-045-Q1-K1-D2
aaatgtggtctctggatttggtcctacagctggtgcagcactttcaagtcacatggatgtcaacaagttatcatttacaggttccactgctacaggcaagattgtactcgcactcgctgcaaaaagcaaccttaaaccagtaacattggaactcggaggaaaatctccgttcattgggtgcaaagatgctgacgttgacaaggctgttgagcttgcacattcagccttgttctttaaccagggtcagtgttgttgtgctggttctcgcactttggtacacgaaagcgtgtatgatgagttcgta

SEQ ID NO: 31030 - DNA, 360 bp, Gossypium hirsutum
  unsure (1)..(360): unsure at all n locations; Clone ID: LIB3148-045-Q1-K1-D3
aaggacagaatggcaagccaaccagccatgaacaatgcaaagcctccaacggtacaaatccgaggacagcctgttgcccaaaagggtggctgctgctcttcctaaaaaatggaatgatgaattagcaggaagctctctctatttcttctgcagtgcgctgctgccagttgcagcacggtgtgtaagattaagtgttttcttaacctcatcagtgttccaaacttatttcatatgaacaaaacctcagaagtagaggatataattcatttctacacacttggttaacgtgaaggcttgtacaatgtattattggttgtttgttgattaaataatactagtgttctttctcannnnanaaaa

SEQ ID NO: 31031 - DNA, 194 bp, Gossypium hirsutum
  Clone ID: LIB3148-045-Q1-K1-D4
gcagtgaagaaagatgatttaaaattggggtttataaaaaaaggaagaaaggaacagggcggatgagtttgctaagatatctattaatgaataggacatctatgtttttatgttacaagcttttgcaagatggtttcttcatttaaattttctcggttctgaaatacaacgtgttttctttttttttcttaaaa

SEQ ID NO: 31032 - DNA, 420 bp, Gossypium hirsutum
  Clone ID: LIB3148-045-Q1-K1-D5
cccacgcgtccggccacgaggcacgtgctttcagaatatgggaacatgtcaagtgcttgggtgctgttcatattggatgagatgaggaagaaatcaaaggaagatggacttggaaccacgggtgaagggctcgagtggggtgtcctgtttggtttcggaccagggctcactgttgagaccgtggtgcttcatagtatctctgcttaaacaaggttctaatgttcatgttggctagcccaggctgcactaccatttgctttgcatttttatttattttattttcctttttattactgaaatttgtgatttgtatggttatttgaaagagagtaaagctctcacatatggtgtttaacgcctgtagaatttatgtaccaccttatattttatggttataataaaattgcctttttttaggtg

SEQ ID NO: 31033 - DNA, 227 bp, Gossypium hirsutum
  Clone ID: LIB3148-045-Q1-K1-D6
aatcgcggtgcatggaacaaatggttctgctctgcgtagaaaaaatgaacactgcagctcgacttttcaatgagaggcttgtaccgcttgttgatgaactgaatagcaacttcaccgacgctaaatttacgtatctaaatcctacgggagcaagcgcagcaaattcccttggttttacagtggcaaatgctagctgctgtgagatagggagtggtggagattcttgt

SEQ ID NO: 31034 - DNA, 417 bp, Gossypium hirsutum
  Clone ID: LIB3148-045-Q1-K1-D8
gccacgcgtccgccacgcgtccgccactcgttcgccacgcgtccgccacgcgtccggccacgcgtccgtaagttatttcgtgaaattaaaggggttgtgggagatggagaggaaatcaaagaagatgatttacaaaagatgccttatctgaaagcagtgatattggaagggctaagaaggcacccaccagggcattttgtgcttcctcattgtgtgacagaagacactgtgctgggagactatttggttcccaagaatggaactatcaatttcatggtggcagagatgggatgggatccaaaggtgtgggaggatcccatggcatttaagccagagaggttcatgagaaatgaacaagtgtttgatataacagggagtagggaaatcaagatgatgcctttcggtgttgggagaaag

SEQ ID NO: 31035 - DNA, 190 bp, Gossypium hirsutum
  Clone ID: LIB3148-045-Q1-K1-D9
gaaaacccgggcgcgaccgcacgcgtccgtagtagacaaattctgtgctttactggttttgcaatgtccaaaattttgagttaggtctgcaatttttatgtgccgtatgtgaagttttgatttgttgttgatcttatgtgattaagactgagaaaagacaattatcaaagagaatgaatttgatactatt

SEQ ID NO: 31036 - DNA, 407 bp, Gossypium hirsutum
  Clone ID: LIB3148-045-Q1-K1-E1
accggatgccggacgaaagcgtctccatcgagaatccaagagacgagctcttgcgccgcgtgaaaggattagcaccgcgcgtgctgacattagtggaacaagaaatgaacacgaatacggcgccgttcgcgtcaagggtgggagaagcatgcggatattacggagctttattcgactcggttgagtcgaccgtgttgagggataacccggaccgagcgaagctagaggaagggctgttacgcaaaatcgccaactcagttgcttgtgaaggtagggaccgcgttgaaagatgcgaggttttcgggaagtggcgggcccggatgagcatggcggggttcgagttaaagccactgatccaaaccgttgccgaaacgatgcgcgccaaactcaactcatgcaaccgagtc

SEQ ID NO: 31037 - DNA, 292 bp, Gossypium hirsutum
  unsure (1)..(292): unsure at all n locations; Clone ID: LIB3148-045-Q1-K1-E10
ggaaaacccggcccgaccgcacgcgtccgcccacccctccaatccttttcatgattcatgtttcgtcccatatccagctaaccgggtcgtttcatttgaacaacgcggcatgccaataaaccattttntgtaaacacattcctattattgtgttaaatacaaatatttgattggtgtgtattttcgttggtatattataatattttttataaagcacctcctttttacacttctattgactttaaaaaccatcctttttatatttaaatatttaataataattttattcttc

SEQ ID NO: 31038 - DNA, 381 bp, Gossypium hirsutum
  unsure (1)..(381): unsure at all n locations; Clone ID: LIB3148-045-Q1-K1-E11
cccacgcgtccgcccacgcgtccgcccacgcgtccgcccacgcgtccgcccacgcgtccggcccaaccaaggatcaaaactctaatgttttgtcctactatgtgttatatttatgtgcctacttaagctacctttcccggttatcaagagtgcccatatagaactctctctctctaaaaaaaaaaaaagagagttctttatatggagttttatattatgtgatgagagaataaattatcttgtnaaaaaaaaaaaaaaaaaaaaaaccaaaaaaaaaaaaaaaaaaaaaaaaaaaaaaaaaaaaaaaaaaaaaaaaaaaaaaaaaaaaaaaaaaaaaaaaaaaaaaaaaaggggncccccctaaaaaaaaaaagggggggg

SEQ ID NO: 31039 - DNA, 210 bp, Gossypium hirsutum
  Clone ID: LIB3148-045-Q1-K1-E12
cccacgcgtccgtggaatcttatctatcttcggctccatggaagaaactgaggttagaggttcatcatgcttagccttgtacatttaacttctctttgacctatgctgtttctagccccatcagtgttagggattatcggggtcggcaatcccgacatccgagcatgtagttgactggaatttatgcaatctcaatgagacttttcattt

SEQ ID NO: 31040 - DNA, 417 bp, Gossypium hirsutum
  unsure (1)..(417): unsure at all n locations; Clone ID: LIB3148-045-Q1-K1-E2
cccacgcgtccgcccacgcgtccgtggaagttgagagctcagacacgattgataatgttgaggccaagatccaggataaggaaggaatcccaccagaccagcagaggctgatttttgctgggaagcaacttgaagatgggaggacccttgcagattacaacatccagaaggaatccactttgcacctggtccttcgcctccgcggtggttttaagtgttgtgccgaacacctgtccagttattgttgatgtgttaagtttgttatgtttgtgggtcgtatgctgatgtgagctggccactatgcaggggaagcttacaagtaaaaataattgctttttataaacgcttttagttgttttttaggtttgaataagttcgtttttgcattcaagtttctctcttgttcgaatntacatg

SEQ ID NO: 31041 - DNA, 422 bp, Gossypium hirsutum
  Clone ID: LIB3148-045-Q1-K1-E3
gggaatcgggcatagttagcccggtcaaaaatcagggatcctgtggatcttgctgggcattcagtactactggagctcttgaagctgcttaccatcaggcatttgggaaaggaatctctctttcggagcagcagcttgtggactgtgctggagcatttaacaactttgggtgcaatggtggtttgccatcccaagcctttgagtatatcaattacaacggtggccttgatacggaggaggcatacccttatacagaaaaagatggtcaatgcatattctcatccgaaaatgttggtgtccaagtcattgactctgtcaacattaccttgggttctgaagatgaattaaagcatgcagttgccatggttcgaccagttagcgtggcatttgaaagtgtcccaagtttcaatttttacaaaagc

SEQ ID NO: 31042 - DNA, 368 bp, Gossypium hirsutum
  Clone ID: LIB3148-045-Q1-K1-E4
ggaaattataatttggtcgtgtggttttctttggtgatttgtaattcgtgccatgaattgcagattttaatgaaatttggaatttaatttcggccaaaaaaaaaaaaaaaaaaaaaaaaaaaaaaaaaaaaaaaaaaaaaaaaaaaaaaaaaaaaaaaaaaaaaaaaaaaaaaaaaaaaaaaaaaaaaaaaaaaaaaaaaaaaaaaaaaaaaaaaaaaaaaaaaaaaaaaaaaaaaaaaaaaaaaaaaaaaaagggggcccccccctaaaaaaacaaaatttaccccccccggtttgcccggttttttttttttttttgggccccccaaaataaatttccgggcccgggtttaaaaaacccgggcagg

SEQ ID NO: 31043 - DNA, 320 bp, Gossypium hirsutum
  Clone ID: LIB3148-045-Q1-K1-E5
catgaccggattccagcgtagctgccgcaaccttgcctgttcttggatcattggtgggggcttccattgtttctttgttttcttacatgctgcactaagctacatgtatcataactgagcatgtcaacaaaatatattattttatttcttttgaaagaaacatgtgatgaatattgaataaaattgaataaaatggagctttgaataccaaacaaaactaaaagaaaggctattacacatttttcccaaactaaatagcttgagaaagtaaggaccccatttaaaaaaatcaaagattacaaaaaataacaaggggcggc

SEQ ID NO: 31044 - DNA, 418 bp, Gossypium hirsutum
  Clone ID: LIB3148-045-Q1-K1-E6
caccgacaagatccgcatgctcagagacatgcaccacaaccatgcaaggaacagagccggggtaaggaaccatcacgaccggcgaatattcaagctttccaaaagaatttggggcaagaaagcaacacccagaaagaagaatagcaagtcagaagatcaaggggctattgaaatgggaggtgatggtgtactatggtcatccgcctcattcatagtaaatagaaacaatcttttagattaggcagatgagaactttgaaattttggtttgtgaggaattgaaattgtggagtaaatcagttgtagccagaataatcatacaaatggtttcgaggagcaactaagtacctggcaagaaataacatttttatttatttatttttcagaatgagatgattttggatcgtgctactttattt

SEQ ID NO: 31045 - DNA, 402 bp, Gossypium hirsutum
  Clone ID: LIB3148-045-Q1-K1-E7
cccacgcgtccgaagagaagaaaaaaaaatgtcatcgaattcaatgtctgcttcatggacagccaagcaaaacaaagatttcgaaagggctttagctgtttacgacatggacacaccagatcgttggtacaatgttgctaaagctgtgggagggaaaactgttgaggaagtgaagaagcactatgagcttcttctggaagatgttagacacatcgagtcgggtcgggttcctttccccgactattggaccgttaccgggaatcgtcaagcatgtaagattccgaagctcaaatgaagaaaaaaaaatggtggacttgcatggatctcacccttatatgtgtgtgtgtgtgtgcggcagtaattgttgtacttatagatagccatatatgtatttaggaagag

SEQ ID NO: 31046 - DNA, 273 bp, Gossypium hirsutum
  Clone ID: LIB3148-045-Q1-K1-E9
cccacgcgtccgatccttttggtgatgcatggttgggggcatttccagctaaccggatgggtccatttgctcaaccagcatgcgaataatccatttggtggaagcacaggcctattgtagtgttaaatacgaagagttgatgggtgtgtattttggttgggagatgagaagagtgtgtagaaagcacctgtgttttgcacttgtatgggctgtaaaagccagcctgtggatatttaaagatgtaataataatttgttgctgccaccaattcat

SEQ ID NO: 31047 - DNA, 403 bp, Gossypium hirsutum
  Clone ID: LIB3148-045-Q1-K1-F1
cggacgcgtgggagaaaacaacggtaaaccctgtggaaacaagccgactgcaaaacgctggagctgaagccctaacttttccgctcacctctctgcaccagccgctcctctattcgcatcttccatggctacgataccagttaacccaaaacccttcttgaacaatttgactggaaagactgttatagtgaagctcaaatgggggatggaatacaaaggttttcttgcatctgttgattcatacatgaacttgcagcttggcaatgctgaagagtatgttgatgggcaattcactggaaatttaggggagattttgatcagatgcaataatgttctctatcttcgtggggttccggaagatgaagatatagaagatgctgacaaggactagatggttcacatg

SEQ ID NO: 31048 - DNA, 325 bp, Gossypium hirsutum
  Clone ID: LIB3148-045-Q1-K1-F11
agatgcttgaagttgctataaaaccacttttaagattaagctgcatccatttgccgagtgcgaaattaagagatagttgtccgctatacccttttaagttagtagttaatatttgcagagttgagtttgaaccttgtttgactgtaagattgcaagtgattatgttcttcacatgcatcaagataaaaaacgtttctgtttcaacttttactttctactaatagcgaaagagatgatgattgttcaacttactgcattattgtactgaattcaccatctcatgtttagcttgttggaattgaatattaatgtaatggaatattta

SEQ ID NO: 31049 - DNA, 366 bp, Gossypium hirsutum
  Clone ID: LIB3148-045-Q1-K1-F12
cccacgcgtccggtgctttatctctgaactttcaatcaaatatctatctgaattgggtagcgtttaaaacagaatattagaatatataacttttggtttgaaaaaaaaaaaaaaaaaaaaaaaaaaaaaaaaaaaaaaaaaaaaaaaaaaaaaaaaaaaaaaaaaaaaaaaaaaaaaaaaaaaaaaaaaaaaaaaaaaaaaaaaaaaaaaaaaaaaaaaaaagggggcggcccttttaaaaaaaccaaaatttatttccccgttaatgaaaaaaaaattttttttaattgggcccccaaaataaaaaaaatggccggggtttaaaaaacttggggtatgggaaaaaccttggtttaacaaaattaa

SEQ ID NO: 31050 - DNA, 359 bp, Gossypium hirsutum
  unsure (1)..(359): unsure at all n locations; Clone ID: LIB3148-045-Q1-K1-F2
atgtattggacgcaaataggatatatttcagtttcagttatgttgtgctttatacaatatgattgataattatacttgtaaaacttcttaaaaaaatattggccacaggtatttcaaaccaaaaaaaaaaaaaaaaaaaaaaaaaaaaaaaaaaaaaaaaaaaaaaaaaaaaaaaaaaaaaaaaaaaaaaaaaaaaaaaaaaaaaaaaaaaaaaaaaaaaaaaaaaaaaaaaaaatataaataaatttggaaattattataaaaatatataaaaattaaaaaatattaaanagtgggggggggcttttttagaaaggaaattttatttgtgggacacaagggaattttatttttttttt

SEQ ID NO: 31051 - DNA, 435 bp, Gossypium hirsutum
  Clone ID: LIB3148-045-Q1-K1-F3
gaaatcgatcgctaactcggagctccgaacctaaccctaatcggaccttacactatatccaagaagtagaagaacaagatgtcaggcgtaaccaaccaagaggaagacaagaaacccgctgatcaaacggctcacattaatcttaaagtgaaaggccaggatgggaatgaagtgttttttaggattaagagaagtactcaactgaagaagctgatgaatgcgtactgtgatcggcaatcagtggatttcaactctattgctttcctgtttgatggccgccgtctgcgagtggaggaaactccagatgagttggaaatggaagaaggggatgaaatagatgcaatgctacatcaaactggtggtgctatggcctaagtagctagtttttaggttacgtaatgcagtaggatttaaacggtagtacttacgaaatca

SEQ ID NO: 31052 - DNA, 431 bp, Gossypium hirsutum
  Clone ID: LIB3148-045-Q1-K1-F4
gctaactactttagaaactcaaacaaactttttagttctcaactctctcaaattcaccatggctgacaagtgtggcaactgcgattgcgctgacaagagccagtgtgtgaagaaaggaaacagcttggtcattgagactgaggagagctacatcagcaccgtagtggtcgagcctctggcagagaacgatggcaagtgcaagtgcggaactagctgcagctgcacaaactgcacatgtggcagtcactaagcagacatatagaatgatgaagtttgggacctaaaaagaataaaagttgggttgaataatttgcgtcttttgttgtagcttgagtgagttttcttgtctatctagccgatgattgtctatgtctctcattttatacaatgatggaatgaccatgtcaatggcctttgtctgattaatgaac

SEQ ID NO: 31053 - DNA, 243 bp, Gossypium hirsutum
  Clone ID: LIB3148-045-Q1-K1-F5
acatccagaccagcccttttttttattttttatttttttttaacaaatttattttttttcttaagaaaatttttcctaaatttttttttcacctttctttaccattctttcataaataacatctttcatttcttccataccaattaacccaaaacccttcttaacaatttgacaaaaaaaaaaaccctaaaaaaacccccaaatttatcaaaaaaaaaaaaaaaaaaaaaaatacccccccat

SEQ ID NO: 31054 - DNA, 395 bp, Gossypium hirsutum
  Clone ID: LIB3148-045-Q1-K1-F6
atcaactttgttttagtagtcttgttagttaaaaagttgaaattgtgataaataaataaaggcagtttactgtttaaaaaaaaaaaaaaaaaaaaaaaaaaaaaaaaaaaaaaaaaaaaaaaaaaaaaaaaaaaaaaaaaaaaaaaaaaaaaaaaaaaaaaaaaataaaaaaaaaaaaaaaaaaaaaaaaaaaaaaaaaaaaaaaaaaaaaataaaaaaaaaaaaaaaaaaaaaaaaaaagtgggggggcctttttaaaaaaaaaattattcttatgcccccttgggaaattaaattttttttttttgtggccaaaaaactattttcgtggccggttttttaacaacctaaagtgagaaaaaaccttgtgctcaacaatttttttttttttaaaa

SEQ ID NO: 31055 - DNA, 285 bp, Gossypium hirsutum
  Clone ID: LIB3148-045-Q1-K1-F7
gtggagagtgtgatgtctgatattttaatgtttaagaacactcatgtctggtataggagggttaaatgtgcttcctgatcaaaactagtgacttcgaatatttattcatatattgtaaagcaaatcttgtttagtcgtgttgtggaatcagcccgtgaagagaatatttgggagggggcatgtttaaatttatgggcttaaatttgttaacctgcctgaaagagcgattgaaccaggtcggttatgaaaatgtgtccttgggtaaagtaggatgcgtgtttttca

SEQ ID NO: 31056 - DNA, 276 bp, Gossypium hirsutum
  Clone ID: LIB3148-045-Q1-K1-F8
tccaaatcctatctgttcaccgtcagttttcccctatggctcgtaccaagcaaacggcagggaaatcaaccggtggtaaagctccacgtaagcaactggctacgaaagcagctcggaagtctgctcctgcaaccggaggagtgaagaagcctcatcgttttaggcccggaactggtgctctgagagaaatcaggaagtaccagaagagcaccgagcttttgatcaggaaactttcattccaaaggttggtgagagatatcactcataatttcaaga

SEQ ID NO: 31057 - DNA, 425 bp, Gossypium hirsutum
  Clone ID: LIB3148-045-Q1-K1-F9
cccacgcgtccgcccacgcgtccgattttatttttttaattgagctaagacggtgcatgggggagtgctcgatctatttaatttgtatttcttaaatattaaatgaatatgtgcgaattccagaattacaataaaaaaaaaaaaaaaaaaaaaaaaaaaaaaaaaaaaaaaaaaaaaaaaaaaaaaaaaaaaaaaaaaaaaaaaaaaaaaaaaaaaaaaaaaaaaaaaaaaaaaaaaaaaaaaaaaaaaaaaaaagggggggcccttttaagggaccaaagtttacttcccggggtttggaaggtaaaattttttttttggggcccccaaaataaaattaaggggccgggttttaaaaacgtggggatgggaaaaacctgggggtacccaaattaaatggcttggaaaaaaatccccttttgccc

SEQ ID NO: 31058 - DNA, 350 bp, Gossypium hirsutum
  Clone ID: LIB3148-045-Q1-K1-G1
gaaaaaaagtttaagatagtgggctgacttgggctttaagattttaattaggttttgttttaatgttgggccatgtattggactatttttttgtttatttagtttgggttcttttaggccaaaattagctattacattaagagtgaattttttttaatcaaatttgaagttggatttacaaggtttttaattaaaagttttcacaatttaaaaaaaaaaaaaaaaaaaaaaaaaaaaaaaaaaaaaaaaaaaaaaaaaaatataaaaaaaaaaaaaatattaaaaaaaatataaaataaaaaataataaataaataaatataaaatataaataatttcatcctccctctt

SEQ ID NO: 31059 - DNA, 85 bp, Gossypium hirsutum
  Clone ID: LIB3148-045-Q1-K1-G11
attttattttattttttatttttttgtaagaaacatgtgatgaatattgaaaaaattgagatggagctgaaaagtattttgtttt

SEQ ID NO: 31060 - DNA, 424 bp, Gossypium hirsutum
  Clone ID: LIB3148-045-Q1-K1-G12
cccacgcgtccggtagaatttatgtttatttaaattaatctcaataaattgatcggtcagaaaaaaaaaaaaaaaagaaaaaaaaaaaaaaaaaaaaaaaaaaaaaaaaaaaaaaaaaaaaaaaaaaaaaaaaaaaaaaaaaaaaaaaaaaaaaaaaaaaaaaaaaaaagggggggcccctttaaaaaaaacaaatttaactaccccttcattccaactaaaaatttttttaaaagggccacaaaaataaaataaatggcccggtttttaaaaactctggaccggaaaaaaccttggcttacccaaattaaatctcttgaaaaaaaatcccctttctccaaggtggttaaaaacaaaaaagcccctaccctatcccctttccaaaaattttccaaccctaaaatgaaaatggaaccccccttta

SEQ ID NO: 31061 - DNA, 260 bp, Gossypium hirsutum
  Clone ID: LIB3148-045-Q1-K1-G2
cccactcgtccgcccacgcgtccggctgaattcatgcatagtgacttgtttaagctaactgattatcttaaagtgtgcattctatcattattttgttctatttgtattttgtattttgtattttgttatatttctggtgtagtatgataagtgcggtattttgtttggcgggatatatttatatcatagattattattcttttcaaaaaaaaaaaaaaaaaaaaaaaaaaaaaaaaaaaaaaaaaaaaaaaatattaaaa

SEQ ID NO: 31062 - DNA, 246 bp, Gossypium hirsutum
  Clone ID: LIB3148-045-Q1-K1-G5
atcagataatgggaattgtctactaatggtgtgtggggcaatgatttctacaaaaaaaagaagaaaaaagaaaaaaaaagagagagtaatggttcctctttctctccccaccctgtttgtaatagtaccatgtaatgtatgtatatctttgtggcagtccattcaaagaaattcaatcctaaattaaaaaaaaaaatatataaaaattaaaaaaaaaaaaaaaaaaaattaaaaataaaatatttg

SEQ ID NO: 31063 - DNA, 266 bp, Gossypium hirsutum
  Clone ID: LIB3148-045-Q1-K1-G6
caggattcttcatcttctcctttgtccatctccacaataagtaaagctctatcatgtcgagcatgcaggccatcgaccgttggattcaaaatttgagtgaaacaatgatgcatttgaaatgtttagagttttgaattttatgcgttatgatttttatcggttaaagaaaaaaaattcccgtaaagatatccgttcagtttaccctattttttttgttcccctgttataattatttttcatttttgacttattttggtttttttttt

SEQ ID NO: 31064 - DNA, 384 bp, Gossypium hirsutum
  Clone ID: LIB3148-045-Q1-K1-G7
gaacaataacatataaacatataaagaaaacaaaattaataaattttgttttccatctcgcagaaagtctctcgactctcactaagcctattcttcaataccatggacatgaagaagatctcctgcgccgtcattgtcgctgccgcctctatgagcgcggtcctggctgctggctccgctccagctccagctccagcttcagctccaggtgcagcttcagcttcagcttcagcagctgccccaggcccagactccaacgtcgcaacctcaacaatgcctgttcttgggtccttggttggagccacccttagttctttcttttcctactatttgcagtaagccagcaaaaatctacgaaaccatgaagtattgaagaatcaaaaa

SEQ ID NO: 31065 - DNA, 418 bp, Gossypium hirsutum
  Clone ID: LIB3148-045-Q1-K1-G8
cccacgcgtccgcccacgcgtccgcccactcgtccgtaatgatacatgggctagcatgagtacaatagctgatataaatgacaaatgggcttcccatgctggacctggaggatggaatgatcctgatatgctggaagttggtaatggaggcatgacttatcaggaataccgtgctcattttagcatttgggctttgatgaaagcccctcttttaattggttgtgatgtaagaaacatgactgctgaaacccttgaaattttaagcaataaggaggtcatttctgtaaaccaagactcactaagtgtccagggaaggaaagtttatgtttctggagaagctaactgccttcaggttagggcaggacctttgtctggcaatcgcttagtcgtagctttctggaatagatgttccgaagct

SEQ ID NO: 31066 - DNA, 147 bp, Gossypium hirsutum
  unsure (1)..(147): unsure at all n locations; Clone ID: LIB3148-045-Q1-K1-G9
ctaagatgaattcacctttaccctttttttataaagtcaactaaacataaaacggggccgattttattacaagattggcgctccaaacaaactaaactctaaatatccatattataantacttgatctctcaacataacatttattc

SEQ ID NO: 31067 - DNA, 316 bp, Gossypium hirsutum
  Clone ID: LIB3148-045-Q1-K1-H1
cccacgcgtccgtcacaatgtcaataacaaacttttcttgtttaaaaaaactgttactaggcgatgtcatataataataaaaaaacaaaaataaaatatatataaatagaagataaaaaaaacaccaggggccgccccttttaaagacccaatccttcctcccccttccttccaaagtaaaactctttttttggggccccctaattcaattccccggcccgcgttttaccacccccggaccgggaaaacccttgcgtttcccaacttaattccccttcaagccaacccccttttccccgcttgggttataacaaaa

SEQ ID NO: 31068 - DNA, 424 bp, Gossypium hirsutum
  Clone ID: LIB3148-045-Q1-K1-H10
cctgaaagcaaccttcaatatgtaacatttatatcatttctacttaccacatatggcaagtacatgaaagctaaaaagcagacatttaactgtggcagcctcttcgtcactccaaattcactaatcggacttgcaaaaagacaggtggattacatactaggagagaatccaataaaaatgtcgtacatggttgggtttggtcggaatttccccaagagaattcaccacaggggttcttcattgccgtcgttggcaaaacaccctcaaagcattggatgcgacggtggtttccagccatacttctactcatcgaaccccaatcccaacgttttggttggagctattgttggaggtccaaatcagaatgatggattcccagatgatcgatctgattattcacattctgagctctctacttacatca

SEQ ID NO: 31069 - DNA, 97 bp, Gossypium hirsutum
  Clone ID: LIB3148-045-Q1-K1-H11
cttttattttttattatttttccctttttagcgttgatttggggaatacctctgttttgctatgtatgttgaaagaaacttctcatgtgattctttt

SEQ ID NO: 31070 - DNA, 424 bp, Gossypium hirsutum
  Clone ID: LIB3148-045-Q1-K1-H12
ctctcctgaggttttgggatatccaagcaaaccaattggtctcttcataaggcgttccagtatcttccgatctgattctaatggtgaagatctagaaggttatgcaggtgctggcctttatgacagtgtgccaatggataaagaagagaaagtggtggttgattactcatcggacccgttgataaacgatggcaagtttcaacaagcaatcctttctagcattgctggtgcaggaaatgccatagaggaactgtatggatctccacaagacatagaaggtgtgatcagagatgggaaggtgtatgttgtccagacaagaccccagatgtgatcctctcatttgtttcattttagcataattatattctttgggcagtgtttttttgcctatgccgaggttgtaaaatgagtaaaacatacaaca

SEQ ID NO: 31071 - DNA, 274 bp, Gossypium hirsutum
  Clone ID: LIB3148-045-Q1-K1-H2
cttatggtcaggagaataatggaagggaatcacaggatgggaatggtcatccgtgatccggctgcagatgcaattgctgattttgcttgtgaagtggagatcacagagtgtgaacctcttcctgatggacgctttgttttggagattgaaagtcgacggatatttcgcatcctcagatcctgggatcatgatggatatcacatgacccactcatcgctttggatatgatttgtagcaaaagaactagctttgtgacccaaacttttccattttg

SEQ ID NO: 31072 - DNA, 195 bp, Gossypium hirsutum
  Clone ID: LIB3148-045-Q1-K1-H3
cccacgcgtccggatatagaacagtttgaggcttttccggtttcagtgaactgttacttgcgttgtcatatagtagtagaaaagcgagttgtagtatgtataaatgtggataaaaagaacaccacggaatgcgtgtttatgtaccgaatcctgctcgacaattgagtttgaatcaatttcaagttcccagccttc

SEQ ID NO: 31073 - DNA, 68 bp, Gossypium hirsutum
  Clone ID: LIB3148-045-Q1-K1-H4
acaagagtcaatgatataattatcaacaaggaaaatcacaataatacatcattgtttctggtttgggc

SEQ ID NO: 31074 - DNA, 359 bp, Gossypium hirsutum
  Clone ID: LIB3148-045-Q1-K1-H5
aaagcattgatcattatgatgaaaaaaattttaaaaaaaaaaaaaaaaaaaaaaaaaaaaggaaatataaaaaaaaaaaaaaaaaaaaaaaaaaaaaataaaaaaaaaataaaaaaaaacaaaaaaaaaatacatatttaataaaaaaaatactaattaaaaaattaaattgggcccccctttttttatacccaaattttaaatccccttaattgaaaaaaaaaattttttttttaaggcccccaaatttttttcccttcccccttttttacaaccgctttccttgtaaaaacccttcttttccccaatttaattcctttccaccaatcccccttttcccacgttgcgatttttaaaaa

SEQ ID NO: 31075 - DNA, 319 bp, Gossypium hirsutum
  Clone ID: LIB3148-045-Q1-K1-H7
tttattaatttgtaaaaaatacaccacggttttcctttttttacccaatcctgctcacaattgaatttgaatcaatttctatttcccaaccttcaaactgctaaaacaaaaaaaattaaaatatattataaaggggcgggcgttctatacaatccaatctttctttccccttctttccatttttttactcttctttattgtcacccaaattctattcactttccccccttttacaacattcgttacttttaaaaccctcccatttcccctctttttcgccttaaaaacattccccctttttcaaaattactttttatcc

SEQ ID NO: 31076 - DNA, 296 bp, Gossypium hirsutum
  Clone ID: LIB3148-045-Q1-K1-H8
gttcattgttaattttccctagaaatttcataaattttccatgaaaatgaattgtcaaaggacaaattttcacatccaattgaaaaaaaaaaggttagtggttgaaaattttaaaaaaaaaaaaaaaaaaaaaaaaaaaaaaaaaaaaaaaaaaataaaaaaaaaaaaaaaaaaaaaaataaaaaaaaaaaaaaataaaaaaaaaaaaaaaaacaaaataaaccttttttaggggggcccctttaataataacaaatttattccccctctttttcaacgcattatttttttttttt

SEQ ID NO: 31077 - DNA, 420 bp, Gossypium hirsutum
  Clone ID: LIB3148-045-Q1-K1-H9
cccacgcgtccggaagttgcttaacaaagtggatgttccatatatgaaaatgacattgggtatgatgggatatgaggatgtttcatcagcaccaagtgacccagttgagaaaactatttggacatttggaagaccagctactatggaactaacacacttttggggtaccgaaaacgatcctgaattcaaaggataccacgatgggaattcagaacctattggctttgggcacattggcatcactgtggatgacatgtacaaggcctgcgagagatttgaaagtcttggagtagaatttgtcaaaaaaccaagcgatggttttgcattcatcaaggatcctgatggttattggattgaaatctttgatttgaaaggaattagacaaatagttaacagtttagcttgagttaatgcttcacc

SEQ ID NO: 31078 - DNA, 276 bp, Gossypium hirsutum
  Clone ID: LIB3148-046-Q1-K1-A1
gtgaagaccaatgaaagcccaaatcgtgatgcatcatttgaggaatgcgcgagctcggattgtttaagctcaatggaatgcatgcaaggagctgcagtcgagcctaattttctggatttcactggaatggattttggttctgtttacggaatgaggagagcatttagtgaaggcgatataaaggtcagccttaaaattttttcggtggtttttgacatttttacttctgggaatgacgtggaagcatttttaggcatttatgtgggatattaattc

SEQ ID NO: 31079 - DNA, 102 bp, Gossypium hirsutum
  Clone ID: LIB3148-046-Q1-K1-A10
gctacctttcgtcacgcgttcatcattcttacaaaacaactggctgtagagcgaaattttgctgtggatggaatagtcttaaaatagtgaaaattttaaaaa

SEQ ID NO: 31080 - DNA, 441 bp, Gossypium hirsutum
  Clone ID: LIB3148-046-Q1-K1-A11
caagcttgccgtaggggtgaggccaaatgcacttatggaactggtgcctttatcctgctcaacacgggtactgcacccattaagtcaacccacggcctcctaaccacgcttgcattcaagcttggtccaaaagcacagacaaactatgctttagagggctctattgctattgctggagctgcagttcagtggctaagagacagtcttgggataatttcctctgcaagtgagatagaaagcctggcatcaaaggttgattgcacaggtggggtttactttgttcctgcctttaatggtttgttcgctccatggtggcgagatgatgctcgtggaatttgcattggaatcacaaggtttacaagcaagtctcacattgctcgtgcggttcttgaaagcatgtgttttcaagttaaagatgtattggattcaatgcacaaagat

SEQ ID NO: 31081 - DNA, 240 bp, Gossypium hirsutum
  Clone ID: LIB3148-046-Q1-K1-A12
aataactttgggccttggactgtttctatttttgtttgggttttatatttatttgtttgtaacgggctgggcaaatttggcccactacagaaatgatatgttcttcatattttaataaaaaaaaaaaaaaaaaaaaaaaaaaaaaaaaaaaaaaaaaaaaaaaaaaaaaaaaaaaaaaaaaaaaagaaagaaaaaaagggggtaacctaaaaaaaggcgccacttaaatgaaacaaaaat

SEQ ID NO: 31082 - DNA, 431 bp, Gossypium hirsutum
  Clone ID: LIB3148-046-Q1-K1-A2
cggacgcgtgggcggacgcgtggggtttgatttcttctaattagtgaatcatatggccagcactgtggccctcaagcttgcatgtggtgtggtcttgtgcttggttgtgggtgcacccctggctgaaggggccataagttgtggccaagtcatatcagccttggcaccctgcattccttacgtgagaaacaacggtgctggtggcgtgcctgcatcttgctgcaatgggatcagatctctcaacgaggctgcccaatcaactccagagcgccaatcagcttgcaactgcgtcaaagctttagctgccagcatttctggcatcaactatgaccttacgaacaaactcccaggcatgtgtggggtgcacagccctttcaagatcagccccagcactaactgcaaaagtgtcaagtgaagtatgccatggaagc

SEQ ID NO: 31083 - DNA, 326 bp, Gossypium hirsutum
  Clone ID: LIB3148-046-Q1-K1-A3
gtgaaattgcccaggacttcaagactgatttgcgtttccagagccatgctgttctagctctccaggaagctgcagaggcataccttgtgggtctttttgaagacaccaacctttgtgcgatccacgccaagcgtgtcacaattatgcccaaggacatccagttggctcgtaggatcagaggagagcgtgcttaatttccatgtgtgtggatcagtcgcttagaaagaagaaactattgtttatttttaggcaaatgtattgggtttttggtttttctaatcatcttttaggcccatgatgtagtggtaggttcaatgtgatgtgat

SEQ ID NO: 31084 - DNA, 95 bp, Gossypium hirsutum
  Clone ID: LIB3148-046-Q1-K1-A4
aatgggctttgtatgattaatgaactataattattgtttaaaattattattaagcttgtaaggaatggactcatttggtatttttaggtgctgct

SEQ ID NO: 31085 - DNA, 222 bp, Gossypium hirsutum
  unsure (1)..(222): unsure at all n locations; Clone ID: LIB3148-046-Q1-K1-A5
attcctctcccgtcagttcccttttttctttgtgtttgacgatttgtagacattggttgaaggtcatgggagaacttatgttgggaagtttttttccgggcctttgtttgctgcagctttatttcagctcttggtaaaatccccccccccctcccccactctctgtaactcgacgatatatatttattatatatattctaaaacttttatgtnnnanaaaaa

SEQ ID NO: 31086 - DNA, 319 bp, Gossypium hirsutum
  Clone ID: LIB3148-046-Q1-K1-A6
ttttttttttttttttttttttttttttttttttggtttggttttttttttttgggggtttgtataaaaatttttttttttttttataaaaaaaaaaaaaatttttttttttttaggaaaaaaaaaaaaaaattttaataaaaaaaaaataatatatttaaaataaaaaaaattaaattttatttttaaaataaaaaatattttttttcgggccctcctaaaaaaaaaaaaaaaattttaattttttaaaattaaaaaaaaaaaattttttttgggaaaaaaaaaataaattaatggggcataatcttataacaattgg

SEQ ID NO: 31087 - DNA, 94 bp, Gossypium hirsutum
  Clone ID: LIB3148-046-Q1-K1-A7
aaaaaaaaaaaaaaaaaaaaaaaaaattttaattttaaaaaaaaaaagaaaaaaaaaaaaggaaaaggtgaaaaaagaaagggggattgagact

SEQ ID NO: 31088 - DNA, 106 bp, Gossypium hirsutum
  Clone ID: LIB3148-046-Q1-K1-A8
attttccttctgctaccttctctcaacccaaacacatatttcccaggaaaaagaaaaagcttgagcgaacaagaaaatggccgatcagcttaccgacgatcagatc

SEQ ID NO: 31089 - DNA, 373 bp, Gossypium hirsutum
  Clone ID: LIB3148-046-Q1-K1-A9
tgtttttaagaaaaagttcaatgttagctttttaattggaaagatacagatgttaactacggtggactagctcatggcattataaaaataaaaggacaaatcatgtcaaattaaaatacagagaccaaattccaaatttaaacataatagaaggaccaaaccgaaatttgaccatttcctccctatctcaaagagagagaaaaaaaaaacccgccaatgatttccatgttttcctccatatgttgtatcatatattgggggagatagcaatattctcccctacatgcttagtgtgctggatttttgccctttgcttttcctatttttttctttttttttccttcaaatttctccattaaattagttgataagt

SEQ ID NO: 31090 - DNA, 232 bp, Gossypium hirsutum
  Clone ID: LIB3148-046-Q1-K1-B1
gcctgcaactaagatatatgttggttgctttgaattctcttgcttgattttaaagaatggtgtgcttttggtattttcctttttactcttaaaacttaaaccgtcttccggttgtcttaataaaaatggcggtggtaattgatctttgatcatctttgatatatgatgaaataaaataaatatataaactaggaaaaaatttacctagtatatattttatagtttacatgag

SEQ ID NO: 31091 - DNA, 397 bp, Gossypium hirsutum
  Clone ID: LIB3148-046-Q1-K1-B10
gttttatgtgtagccacccttggtgacatatttaagggagatgctgatagggcttgagtcaaagtgagttgttctcctttccaacattgaagaggtataatataaaagacagagtgttgatcgacttttcgatcgggggtttatctgatgtctgtctgagctgatttttggacaatgactagtaggctcaaggatttcgattgtgcaaggttggatttttcgtacggattttgtagcttcaagtttttcaatttcaatattagtcatatttgggtgatattctcgacttttttctttagtttgcttgagattatttgttgttattcttggtggagttgtatgctttttattgtggcttcatattgtgattttgtagcaaaccttttgagtggacttt

SEQ ID NO: 31092 - DNA, 341 bp, Gossypium hirsutum
  Clone ID: LIB3148-046-Q1-K1-B11
cacacgcgacacaactcttaacactgtcgtcaactcctgcaactcggtgtctggtaaggatctctgattttgttttgcttgcttgcttgtcttccaatggcgaatcaactcaagtatcccattccagcattaactggtctgattttccaaatgattttctttttggagcatcaactgctgctgcccagactgcaggatctgctaaatcacgaagcaaaggacccagtgtttgggaccaatatattcgagaatacccggacataataatatacacaagccacttgtatgcaactgctgattcatataaccgctacaaggacgatgtatcgattttgaaagac

SEQ ID NO: 31093 - DNA, 296 bp, Gossypium hirsutum
  Clone ID: LIB3148-046-Q1-K1-B12
attgtattattgttcaaaagcctttgaaaaacatatttaagaaatcaaagtacttacaaattcttgtgctgttttgcaaaaaaaaaaaaaaaaaaaaaaaaaaaaaaaaaaaaaaaaaaaaaaaaaaaaaaaaaaaaaaaaaaaaaaaaaaaaaaaaaaaaaaaaaaaaaaaaaaaaaaaaaaaaaaaattaatttgaaaaaaaaaaaaaaaaaataaaaaataaaaaacaaaaaaaaaaaaaaaaaaaaatgggggggcggcttaaaaaaaaaaaaattaatattcgggattttg

SEQ ID NO: 31094 - DNA, 112 bp, Gossypium hirsutum
  Clone ID: LIB3148-046-Q1-K1-B2
cagtattggagatggttgctgcttttgaaagggcatctgagaagaaaattcctcttgtaattgcgggacctcgagcccgtgattccggaattggttattctctaacccaaaa

SEQ ID NO: 31095 - DNA, 356 bp, Gossypium hirsutum
  unsure (1)..(356): unsure at all n locations; Clone ID: LIB3148-046-Q1-K1-B3
ncnngattttcttannaccttttnntaaaaaacccataaaagnatgtgtaaaagggtgtcctttcgtgtgtgggttctcaagtggcgtttctgtgcttctcaaggtccaattgcgtagtggggaccatgannagagaagggctttaagatgaggggcagcatctccctgtaagccgaaagatgccactttttgagttcaaggggtaagctcaactttgtttgaaaactttaaaaagctctgcttggagatgattcccaaaagtgtgggatggggccaacttctggggcttagctgatgagatttgcagctacctccagaatgggatgtagaaagttgctacttgaaatatgccgat

SEQ ID NO: 31096 - DNA, 160 bp, Gossypium hirsutum
  Clone ID: LIB3148-046-Q1-K1-B4
cggcaccacgcgtgcaataaaaataaattagaacaatttggaagagaattcattgtttcttctttatgattccaatctatgccagtttattttagaaaggaaggaaggcaaaaaaaaaaaataaaatataaaaaaaaaaaaaaataattaatatattatt

SEQ ID NO: 31097 - DNA, 239 bp, Gossypium hirsutum
  Clone ID: LIB3148-046-Q1-K1-B8
tgtaaattgggcttgggtaatttagtttgtgccattcataattgggcttgtacaccattagagtggtgagaagccaaaatgggtgattaaaagatccaaagagcatgctttgcttatgaaatgaatcccaccatcagaaattaatgccttattataaaaaagggttatataaagtttttttttttttattatttttttttatattaataaaaattgtttttttattttatatttatttt

SEQ ID NO: 31098 - DNA, 258 bp, Gossypium hirsutum
  Clone ID: LIB3148-046-Q1-K1-C1
cccacgcgtccgaccgagtccaagttccccccttatattcttcactaccatatgagatccgtcattgtcctttagatttcaattgcttgttggccttcacttatctccacatcaatttcattatatgtaattttactcttaaaacattggttttcgtgataatattatttaaatatagatcacaataacattatcttgtaagtataataagcttggattcgatttcaaataatttcatttcttattattatttattgt

SEQ ID NO: 31099 - DNA, 469 bp, Gossypium hirsutum
  unsure (1)..(469): unsure at all n locations; Clone ID: LIB3148-046-Q1-K1-C10
cccacgcgtccggtagcttcaaattaatttcattctttgcgctgctatgactcatattatgtcaggcctgaagcagttgctgcattttggttgcccctgtttgacattgatgatatgatatatgatatatacatatatatatctataggtttggactttcgtgccttaaggcttcttgcgcaacagttttgattttgaaagcggtttagattagatgtataatatgaaattatttttactgaataataaataaaaataatatttttttatttattattatttattttttttnttttttnttttttttatttttttttttttatttttattatttatatattttnttttttttttttttattatattattaattttttttaattttatattattttttatattttttattatttttattatttttttatattttatttttttttattttaattttttatattatattttt

SEQ ID NO: 31100 - DNA, 407 bp, Gossypium hirsutum
  Clone ID: LIB3148-046-Q1-K1-C11
cccacgcgtccgatttggaggtgatcctaatagtcagcgggagcacatatttctgcttgtgttcttttggagcaagcaatcaaagaatctagaggagattaagcctggatctgacattaaatcagagccgttggatggcaataatgataatcaggactccacgtggctggagcttggcaaatgatcgaatgggatttattattattatttatttgattttcttttaatcagtggatggcgatgttgatgatgagaatcggaaaggaacgcgccaacgtggtccctatggagcatgtttcgaagaatcacgtgttgggatgaaactatagttgtaccagtcttgccttactccattggtcgaaaacgattactacctagtattttgatagtaggatgatatgtatgta

SEQ ID NO: 31101 - DNA, 425 bp, Gossypium hirsutum
  unsure (1)..(425): unsure at all n locations; Clone ID: LIB3148-046-Q1-K1-C12
gttcagttttggaactgaagtgttcagaggggtttcttactctattgtggaaaaaaaagaggattttggaggttataattagacaagaagatgaattctggttctaaacaaggtttgttttgtctaaaatggccttgggatgttaacaaacagtctaaaagttccaatctttgtacctttgaaggtccttggttattcaaatctatgcaaaatcttggttcctttgttctaaattcattcaattcagtttcgggtttaaggtttagtaatttaaaccctacccaaatagcttttggggttagtcaaaatgagaacttgaagtttaaaaggaaaccattgagtcctgatgaacaaggggaagctgaacagagggcttttgcatcggcattggctagtgggaaatctgctacngtgatcgagtttac

SEQ ID NO: 31102 - DNA, 396 bp, Gossypium hirsutum
  unsure (1)..(396): unsure at all n locations; Clone ID: LIB3148-046-Q1-K1-C2
ggaanncnccgggnncgaccccacgccgtggcgagaatacccaggtnntgaatgaagggggattgcnntggcggctattgttatgagnngaagatnganntggtgccaggccgaatgagttacgagtcgtagttgcgagggagtgagggaccatnncgataagaatttannaatttctnncttctcttttnntttgtcattnntttgaatttaattttaagaaatatggnntggtgatatnnnttggcgtnnatggtcatgcctttattatagcaccaatggattgctggatttattgttattacacatnggatttanccttttattatgttaatggcattngtttctctttaaaaaaaaaaaaaaaaaataaaaaaaaaaaaaaattataatttt

SEQ ID NO: 31103 - DNA, 90 bp, Gossypium hirsutum
  Clone ID: LIB3148-046-Q1-K1-C3
tgttgatcttcctttgaatcacttgagttgaatttttcaataaattcaagattgaaaatagagacggtaaggaaaaaaaaggaaggaggg

SEQ ID NO: 31104 - DNA, 363 bp, Gossypium hirsutum
  Clone ID: LIB3148-046-Q1-K1-C4
ggccattgaagggcgtattggatgtgtgtgatgttcctcttgtctcggtggactttaggtgctctgatgtgtcctccaccattgactcttcattgaccatggtcatgggagatgacatggtcaaggtggtggcctggtatgacaatgaatggggttacagccaaagggttgttgatttggcacacttggtggcaagcaagtggccaggcatgcctgcaggaggaagcagtgaccccttggaggatttctgcaagacaaacccagctgatgaagaatgcaaagtttacgaggcttaaatgattgcaattttcattttttttttaaattgttttccatgctggtggtatagttagtggtcaagat

SEQ ID NO: 31105 - DNA, 248 bp, Gossypium hirsutum
  Clone ID: LIB3148-046-Q1-K1-C6
ggacacccacgcgtccgcccacgcgtccgatttggagctaattgctatccttgtctttaagacttcagtaaacaaatgcaaataactagtttaaatcttgtcagcggtttgtcaattgcaaaccacattttatgctgtcattctccattaaaataaagcttttacttttaattttttaccattttacacaatattatttttttttttcttatctttgtaaatcttttatattttattctttttctttt

SEQ ID NO: 31106 - DNA, 332 bp, Gossypium hirsutum
  Clone ID: LIB3148-046-Q1-K1-C8
gacgtagtagttctattatggtgtcaactaaaaataaactactggccgttgtacaacaacgtgactactggaaaaaccctgtcgctaaacaaattaatcgtgttgcagaacatccttttttcagcaggtgtcgtaataaagaagagggcagcaatgatcgttcttaacaacagttgagcatgcttaatggataatgggacgcgcgctgtagcggatcattaaccgcggctgttgtggtgactaccagcatgatgactgctatagttggcagcgtactagcggccgctccttttgctttctttcctttctttgtcaccacgttcggctgtttt

SEQ ID NO: 31107 - DNA, 451 bp, Gossypium hirsutum
  unsure (1)..(451): unsure at all n locations; Clone ID: LIB3148-046-Q1-K1-C9
gttcctctgccggttctttgttcctcttttccactgaagaagtctctggttctttgttccggttcggcaccaccggtgacaagtcaggagaccaacctagtggctagatgtcgacgagtatactgccatgctcatgattatcacatcaattttattcaaataacaggtagctagtgggttttgtttttattgcaattttgtggagttttggctccgtattttagtattatctgaaaatcaattgaagaggaagtattctttttctgggataatatgtggttgaatcacacatcttacattttttcttctctgatggaaaaataagtcttcattagctttantcaattttttttaattatttaaaaatttttctaacatttatttaatttatttctttttttttctctttttttttttttattctatgtttatctttttctatttttttttt

SEQ ID NO: 31108 - DNA, 431 bp, Gossypium hirsutum
  unsure (1)..(431): unsure at all n locations; Clone ID: LIB3148-046-Q1-K1-D1
atgtcctaggggggaggagcaacgatgttgagatagtgccttcaagtggacttcgaaaaagaaagcacagtagatccaatagtacgggaagcactccattggtgcattctaatgaaggatcaccacctcatcctgtagggaatgagggtcctcaagcttctgagcatgatcgactggttgttgatcattaccatccacagggaccttccgtacaggatgggggatggcttgctcgaattgctgccttgcttgtaggggaagatccaacacaatcatatgcacttatatgtggcaattgccacaggcacaacggacttgctaggaaggaggatttcccatatataacttattactgcccgcactgccaagccctgaataagccanaacaaccngaagagcatgtttctagatctagccccatcatggacccc

SEQ ID NO: 31109 - DNA, 300 bp, Gossypium hirsutum
  unsure (1)..(300): unsure at all n locations; Clone ID: LIB3148-046-Q1-K1-D10
gctagtattcaacataaagtacacacactttctgttggcctggggagctgacaaaagaccttggtgtgttagctatgatcatatcatgctataatgtgcagtcttatctctaaacaaagggacaggagacataaaatattctatatatcagaactgtacaagctagcacgtcaactaatattgacattgactaacgggactcgaattaatactcacacaagaatttggttcttcttgaactttattaaanaaaaaaaaaaaattaaaaataaatatttaaaaaataaaaaataaaatttt

SEQ ID NO: 31110 - DNA, 431 bp, Gossypium hirsutum
  Clone ID: LIB3148-046-Q1-K1-D12
cgaaagaattcaacgatatcggacatagcaagtctgctcagaatttgctcctcaagtatcagattggtgttctccagggtcacactttaaagaataatgaacaggttggttcaaccgaggagcccaaaaagaaagagatgagtgcattcgttatcaaggatgacctgacgcctaaatatgctgcagtcgtcgagttcgccgccccactcctggttgctggttcctatttctgttacagatacctcacaccaagctcataagtgctgtaatcaatttggttttcaagttcaacctcaacatgccccttcttccctttaaataattgttggcatagaatgtttacaatgatggtgtgttggtccttttcttttatcttcacttgtccttttggttattgctgttgatgattatataagaatgagagttatcat

SEQ ID NO: 31111 - DNA, 410 bp, Gossypium hirsutum
  unsure (1)..(410): unsure at all n locations; Clone ID: LIB3148-046-Q1-K1-D2
gcgcccacgcgntccgcccacgccgtccgcccacgccgttcgctttctcaatggnggttcggatcctcagcttgctttgcttatgctcccacagagaatcgtttccccaatcatcaaaggttgttctgtggagtggatgaaatatactgcatattcttgggggatttgaataatttgagcagcctgctaaagcagtatgggctgtcaaagggcaccaatgaagccatgtttatcatcgaagcatatcggaccctccgcgaccgtggtccgtacccggctgaccaggtccttaaggatcttgaaggcagctatggatttgtggtgtatgatagcaaagctggaagtgtatttgctgcactgggtgcaaatgaaagggttaaactctattggggtgtagcagctgatggatc

SEQ ID NO: 31112 - DNA, 310 bp, Gossypium hirsutum
  Clone ID: LIB3148-046-Q1-K1-D4
agcaattacggggtataagttgagcaaggagtgtatgatgaaagtggttttggatgggatgataagaggaaaatgatcgcatgtgatagagcgacatatgatgcagcagtgatagtaatatatgtatgtatatgttaagtatatttcaattgttttttacttgttattctaattgtgtataatatccaacaagcacacaagaagtatgaactatttttgaataaaagcattgatcattatgaaaaaaaaaaaaaaaaaaaaaaaaaaataaaaaaaaaaataaataaaaaatataaatataataaataaa

SEQ ID NO: 31113 - DNA, 235 bp, Gossypium hirsutum
  Clone ID: LIB3148-046-Q1-K1-D5
attggaaggtggacgcagtctggtacgacaaatttgggtatcccctatgaaggctggggtgcaggggagtgcggaatctaatgacgtgtctatgaggccatcccatcacataccgaatggcagaacttttaccagaaaagtatcgggatgagatagctccgcgtgatgccattataggctgtatactgatactgctaagcagaagacgacaattctactaactacatactactaa

SEQ ID NO: 31114 - DNA, 233 bp, Gossypium hirsutum
  Clone ID: LIB3148-046-Q1-K1-D6
cccacgcgtccgagctgatctaaataatatatgatgtatttgggtttttactattagaataaagcagctatggttcattaggtgttttgcttcttgtatccatggttgcttggtttgtgtatgtgtgtgtgtatatagtgaaatgaaattattttaactagctttgttgtgttactgccatgttatataactgatgaatgaatgaaggaaagctctatttgccttttgcttac

SEQ ID NO: 31115 - DNA, 347 bp, Gossypium hirsutum
  unsure (1)..(347): unsure at all n locations; Clone ID: LIB3148-046-Q1-K1-D7
cccacgccttccatcccgagcccccgccctnnnttnngttttttttttttttnnnnnnnnnnnnggaaccaaaagaaaagggattggttattggatgtcccattggatcctaacttactgctcttacatttgcaactataggtgggccgacctccccctttggagttgttcaagttttttcaatctttggtccgggccttttgtttttcttggtgtttggttggtagattggtttctagattagctaaaataaatttaatcaattaggctctttttgatagtctttaatgcatatgatacgatgcatgaaatgaatgcaaaaaggcgtcaattctaatttgatttca

SEQ ID NO: 31116 - DNA, 63 bp, Gossypium hirsutum
  Clone ID: LIB3148-046-Q1-K1-D9
catccgcctataagatggatttatcgtactagtattgtgtttgttgcatattaataatctcat

SEQ ID NO: 31117 - DNA, 414 bp, Gossypium hirsutum
  unsure (1)..(414): unsure at all n locations; Clone ID: LIB3148-046-Q1-K1-E1
ccgggttcctggttgaatgaaatgctgaaaactttgggttgctgtggtttgtacccatcattgtgtatatgtatatatgaggtatgcgcaggcttggttttctttctaaacaaagaggtgagtgtgtgtgtatatcttgtcatatacccttggtcaggcctaatcatgtatgtgaacagttagaagtaaagacagtgaatgccttttacatgtatttgccaagctatcgaaactcaataaggccatgcttggttggattgttagtggcgtctgatgttatttggtacagctgtaatttaacaagtcacgtgactgacttttataaatgagttgggggatactatatttatttaacactgttgttttgagtctttttnnanaaannnnnnnnnnnnnnnnnnnnnnnnnnncccc

SEQ ID NO: 31118 - DNA, 142 bp, Gossypium hirsutum
  Clone ID: LIB3148-046-Q1-K1-E10
cccacgcgtccgctttcggcagatatactaacatcaaatcccttgagctggatttttttaattatgatttgtacagtgcggaatgacatggcattcatactttttcccttttttaatttcatgaaattccttgtgattactc

SEQ ID NO: 31119 - DNA, 76 bp, Gossypium hirsutum
  Clone ID: LIB3148-046-Q1-K1-E11
agtcctcccatagtatgttctttccttcctggcttaatcaataaaagcatgttaatgctgctcaggtcatcgctct

SEQ ID NO: 31120 - DNA, 228 bp, Gossypium hirsutum
  Clone ID: LIB3148-046-Q1-K1-E12
ggacagtgtatatctagtggtgaaagatgtaagtattcaaataaacatttatttggataattgtatttatataaataaacatgaaattctttgaaaaaaaaaaaataaaatttttttttttttataaatataattataaaaataaattaaaattaatatataataatttatattttattattaatatttattaattattaatttttaatattggggcgctctttttaa

SEQ ID NO: 31121 - DNA, 242 bp, Gossypium hirsutum
  Clone ID: LIB3148-046-Q1-K1-E2
cgggaccaccacgcgtccgcccacgcgtccgcccacgcgttcgcccacgcgttcttcctctcgtccgaaaaaaaaaaaaaacaaagagctggtttaattgtgaaaggtggatcggaataaaaaaccacaataaaatactaacattcaccaatcaaaaataaaactcaaacttaaaattaattaccatctaacacaataaaaaaaacatgcccccccctttaaaaaacccaattttacttccc

SEQ ID NO: 31122 - DNA, 409 bp, Gossypium hirsutum
  Clone ID: LIB3148-046-Q1-K1-E4
cggacgcgtgggcccagtttgggtttagggttcttggagtcctcggagccgcagctgccacctccgtcctggctctgtcgaagtgctctcctcagaggtttcttcttctgtgaaatacactgtggagcctgtctacttggatggccttactttactcaagggaagggtgagtactaaagaggttcttgggttgcctaactcggatttagtccctggaatatatgaagggggacttaagctatgggaaggttcattagaccttgttaaagctctgcgctctgagattcaaaatggttgtctatcatttgagggaaaacgagtgttagagcttggatgtggtcacggacttcctgggatatttgcatgtctcgagagtgcagctgaggtgcattttcaggacttcaatgct

SEQ ID NO: 31123 - DNA, 407 bp, Gossypium hirsutum
  unsure (1)..(407): unsure at all n locations; Clone ID: LIB3148-046-Q1-K1-E5
gtgcattgctcgaggttgttgagagtgggggaaagaacatcgaagttgctgtgatgacaaaggaacatgggcttcggcagcttgaagaaactgaaatcgatgccattgcagccgagatcgaggcagagaaggaagcagccgaggctgcaaagaaggcccctccaaaggaaaaatgatgaagcatcaactgtttaagctatcatttcctttttctttttttttcttttctggtctgactgcttaatttctgcaattgaagtttcatttgccattgttggcattttatttgctttttagttgtttcagtttaagcaagtatcaatcacattcagataatatgcaaaaaanaaaaaataaaanttattaaatttaatatttttattttttttttattattttttnttttt

SEQ ID NO: 31124 - DNA, 437 bp, Gossypium hirsutum
  Clone ID: LIB3148-046-Q1-K1-E6
cctggccatatcagtttctcagggagaaattgaagaggaaaagctagattgttatgatgtccattgttatgcagcatcaagaaatgaaatagaagaagaagtgagaagagaaggttccttcgaattggaaagggtagagatgtttgagattgagcgagaagttcagaggggagagagctacggcacagcagtggccatgacagtgagggcaatccaagaatccatgctttacaaccattttggaaatgggatcaacttagatgccttgtttaacaattatgggaaaatgatagatcaagaaatggctaaacaagaaattaaacccatcacttttcttcttgttcttaagaaattatgatatggtatcatattagatatattacattaaacttgattttaaaccccatcagttttggtataagtattaaagttcaaac

SEQ ID NO: 31125 - DNA, 365 bp, Gossypium hirsutum
  unsure (1)..(365): unsure at all n locations; Clone ID: LIB3148-046-Q1-K1-E7
gggaaaggaaggtattgatgacagtattttcagttaggaatatattgtgacggtatattttgttttggttttgtttttaattgaatcaggggagagtggatgtgtttgtgtattgaatttaaggttatataatataatgacattattggggtttaaatatgtttaatatgaacatggcatttgcctaaaaaaaaaaaaaaaaaataaaaaaaaataaaataaataaaaaaaatattattttaatatatttttnttaaattaaatattttatttattttatattttttctttttatttatttaatatttattttttttttattataattatttttattttatattattatttatattatttttttt

SEQ ID NO: 31126 - DNA, 444 bp, Gossypium hirsutum
  Clone ID: LIB3148-046-Q1-K1-E8
cccacgcgtccgaaacaagcagcaaagatcgttgttgccacaatcttgatcttgaacctcttgcaagtggaagtacgcccaaggtggaagatccagctgatcagcttttgtcgagcaatcttcaacgcggctatggagagtgtagtttctctgctgcaggtctaataacttactctgggccaatagcatattcaggcagtctctctcatagatcagatagcagcacaacaagcactcgttcttttgccttccctatattgcaatctgaatggaatagcagcccggtaagaatggcaaaagctgagaggagacattacaggaagcaccgaggttggagacagggcttcctttgctgtagattctgaatacttctctattcaatccataggttatacaaatatattattttgcgcttatcaaaattatatttttgggtgggggggg

SEQ ID NO: 31127 - DNA, 360 bp, Gossypium hirsutum
  unsure (1)..(360): unsure at all n locations; Clone ID: LIB3148-046-Q1-K1-E9
aagaaaatggaacagaacgtacctgtcatgaccataatagtatggagcatngnaaaatcagttctcgtcatgtttttaaagggtctttgggctaatatatatctcattttttttttatcnttttttttatttcttttttattctttttttattatctttttattattcatttttttttttttatttatttttttattttttattttttttttttattttttttttttttttttttttatttttttttttttttttatttctatttttttatttctttttattttttttatttatttttttttattttttttttatttattttatattttatttttttattttttatatttatttcttatt

SEQ ID NO: 31128 - DNA, 382 bp, Gossypium hirsutum
  unsure (1)..(382): unsure at all n locations; Clone ID: LIB3148-046-Q1-K1-F1
cggacgcgtgggttctgatcgtgtggttgactcatcttgctgtttagtgactggcgagtatggttggactgcaaacatggagagaatcatgaaggcccangctttgagggataacagcatggctggttacatgtcaagcaagaagacaatggagatcaacccggagaaccccatcatggaagagctgagaaagagagccgatgcagagaagaatgataaatctgtgaaggaccttgttctccttctcttcgagactgctctcctcacctctggcttcagccttgatgagcctaacacctttggcaacagaatccacaggatgctgaaactcggcttgagcattgatgaggatgcangtgaaggtgaaggtgatgctgatatg

SEQ ID NO: 31129 - DNA, 439 bp, Gossypium hirsutum
  Clone ID: LIB3148-046-Q1-K1-F10
ctgctatagctgatgcatacaaccacacagattctgaatttttaaaatcagaaaacaaccagaatagggatgctggatcgaccgcttctacagctattctttttggcaaccgtttgctagttgcaaatgttggggattcccgagctgttatctgcagaggaggcaatgctattgctgtgtctcgtgatcacaagcctgatcaaagtgatgagcgacaacggattgagaacgcaggaggattcgtcatgtgggctggaacttggagagtgggaggtgttcttgctgtttctcgtgcatttggtgacagacacttgaagcagtatgttgttgctgatccagaaattcaagaggaaaagattgacaactctcttgagtttcttatacttgcaagtgatggactatgggatgttggtttaaatgaagaggcagtggcaatgat

SEQ ID NO: 31130 - DNA, 393 bp, Gossypium hirsutum
  Clone ID: LIB3148-046-Q1-K1-F11
cccacgcgtccgcccacgcgtccgcccacgcgtccgcccacgcgtccgtacaatttagccaactcttgtgtatttcatccacgatgaatcccttcaaaaccttgccaaccctttctttcctcttcttaacccttttaggcttagcccatgcagccacatttgatataaggaacaactgcccttacaccgtttgggctgccgcatctccgggtggtggcaagagacttgaccaaggtcaaacatggcaaatcagtgcagcctctggaaccacacaagcccgaatttgggctcgaaccaaatgcaatttcgatgcctccgggaaagtctcatgcgagacaggcgactgcggtggagtcctcgaatgcaagggatacggtaaagctcccaacacac

SEQ ID NO: 31131 - DNA, 364 bp, Gossypium hirsutum
  Clone ID: LIB3148-046-Q1-K1-F12
tttaaaagtttggcctttattatatgctttttcctggggtagctatcattttggttaaaaaaacgtatactcaatggtctctcctctttgcttttggcaaaacatagtgatagctttagccattattatatgctttttcatgggtgagctaccattttggttaaaatttctttaacttaatggtctcttatctttgcttttggcaaagcataatgatagctttggctgaggccatgacctctctatgttgatgaatgcactgggagagatattctgaagtaaaatttaggagaaaatgttagtcactctatgtttttagtttttcttcagatttggtaaccatatttaagtctcactgtcatta

SEQ ID NO: 31132 - DNA, 424 bp, Gossypium hirsutum
  Clone ID: LIB3148-046-Q1-K1-F2
cccacgcgtccgcggacgcgtgggaacgaagggttcatcgaccaacgccggttatatccgatgggcgatttgcatgaccccgaagtgaatccacagagacccacgaggagtagcatgagtagcacggtggaatcgtttagtggacccagaccggtccaaccaccgcaaaaatcggcggacttcgcggtggtttcgactaggaagtactatccgaggccgccgccagtagagccagaggattgtcatagtgactgtgattcatcatcgtcggtggttgatgatggggatatcgcgttgtcttcgtgtcggaaaactttgcctttcgatctcaattttccacccttggatgaagatgaagatcttcaatgtacccgctttatgtcttttgatcacgatgtcccgtgatgaaatgatgattgatcga

SEQ ID NO: 31133 - DNA, 146 bp, Gossypium hirsutum
  unsure (1)..(146): unsure at all n locations; Clone ID: LIB3148-046-Q1-K1-F3
gcgtcncnngcccacgcccgtccgnncccacgccgtcncnngctagatcgggcgaggcggctctngctctagaggganntccaagcnnttacgtagccgcgtgggcatgcnngacgtcannntagctctntnnctatagtgggtca

SEQ ID NO: 31134 - DNA, 129 bp, Gossypium hirsutum
  Clone ID: LIB3148-046-Q1-K1-F4
ggaggttcctttttgaaattgcgttgatgtatgtaactccttgttactgatggttttgaaattggtggaaccatgaaatgaaagtgtatccttttgtctatgttaaggaatcgaaatgtttctttgttt

SEQ ID NO: 31135 - DNA, 504 bp, Gossypium hirsutum
  unsure (1)..(504): unsure at all n locations; Clone ID: LIB3148-046-Q1-K1-F6
ggaatntcccggggtcgacgccagcgcggtgccgctttanncattgcggatgcccatacatggngnnactgcttataactatgtgtccanngcaggtgnnngcttagcnncactcgcgtatggcgcatacgctatggcgtcagaggcgtganacgcggggatccctntctcacaaattcnaaccaatangnncttggacccatcaatnncaatctgatggggctctcatttatttcaaacccacacctctnntctctttatcacanggagggaaccatattnagcagtggttctaagtggggataaaaccaggaatggctgttgaaatacgagccaacttggtgattatccaaagcaagtaaatgcacaatgaagcatngatggtaggtttcccactgttgcctgatgtgattcatcatcattgagttgtgtacaataatctatttggattgaccaaatgttggtccgttaccatggtactttatcaccataaaaaaaggggat

SEQ ID NO: 31136 - DNA, 347 bp, Gossypium hirsutum
  Clone ID: LIB3148-046-Q1-K1-F8
gaggaaaataaaaaaaaaagatctacacttcttctttcaatattaggccgaccgatggttacgcaggattgttcatctgcgtctcactgcgactccctggaacggtcgatcaaggttttattgaaccaaggagattcatgggtctcgcttaccagccccaaatcgccactgtgtttcgatggtggcgaaacaagcggaaactcgaaggcttcggaacgcaggtaagcttcatcacttttcttttttcttgttgatgatgaagtaacagatgactctagttgataataaaaaacaggaagagctgatttgttaaattaagtgagtgttttatctcctttttttttttt

SEQ ID NO: 31137 - DNA, 317 bp, Gossypium hirsutum
  Clone ID: LIB3148-046-Q1-K1-F9
ggttggttgtttttttttttttttttttttttttttttttttttttttttttttttttttttttttttaaaaaaaaaaaaaaaaggcccccctttttaaaaaaaaaaaatttatttcccctttatttaaataataatttttttttattttgccacaaaaataaataaattggccctttttaaaaaaatcttttaaataaaaaaaccttggctaaccaaaaaaaaaatttttttaaaaaaaaaatcttttttccaaatgttggaaaaaaaaaaaaaaaagcccccaaatattatttttttataaaaaaattttcccct

SEQ ID NO: 31138 - DNA, 158 bp, Gossypium hirsutum
  Clone ID: LIB3148-046-Q1-K1-G11
cccacgcgtccggtctcgaggaatggaatggtgcccctcttccaatctgctagtttgctttattgtttatagttgagatgtgtaatccaaatctttcgcatttgttgttggaatttccttgtaaaacaagttacttaactaaatgaatccattttcac

SEQ ID NO: 31139 - DNA, 87 bp, Gossypium hirsutum
  unsure (1)..(87): unsure at all n locations; Clone ID: LIB3148-046-Q1-K1-G12
gnaaaaaaaaaaaaaaaaaaaaaaaaaaaaaaataaaaaaagggagaaaaaaaaaaaagaaggaaaggtaaaatgggcgggcgtgct

SEQ ID NO: 31140 - DNA, 446 bp, Gossypium hirsutum
  unsure (1)..(446): unsure at all n locations; Clone ID: LIB3148-046-Q1-K1-G2
caaaattttcacctttcctttttctttaagaaaaaaaatcaaatattgttctaaatattagctttgtgaaccagccgacagaatgggcagtaaaattggggatgcgttagtgtcccctttgttcagattttgtggtgggtgtggctgttatatagagagaaacaagagggagggtttagggggatgaaatataatatttgattgtgggtagaaggggccaaattctctttgattgtagggtgaagagtaagtgaagacctcatctatagacagaccctctttgtatattagaatttagtagtaggtaggtaaaatttacttttgaagggggattttcttctttaatgccggggaaagaaaataaaaagcctaaatttattcccaaaaaaaaaaaanntnnatnanaaatnnnttntttttttttaatttttttttttttttttttt

SEQ ID NO: 31141 - DNA, 245 bp, Gossypium hirsutum
  Clone ID: LIB3148-046-Q1-K1-G3
ttccctacaagcttacagcagagcagaaaacctgtattaagcggttaatcggatctccctaagaattggtggtaccccttgtttgctaattgctacaatcagccaacttgtgtaagttaacatttttccttttcttttatgtttctgttttatatgttttatttttttttcttggaaatgagaaattcaagtgttgctgaactgggatgggctgaataacaattacctaggggagttcatgaatt

SEQ ID NO: 31142 - DNA, 435 bp, Gossypium hirsutum
  Clone ID: LIB3148-046-Q1-K1-G5
tccttcttcatcatttccaaattttgatgattttcctctttttttattttatttttatttaaaatttgaaactgctaacattattacattttcattagccttaagagaagaaaaaaaaaaatgtcatcgatttcaatgtctggttcatggacagccaagcaaaacaaagatttcgaaagggctttagctgtttacgacaaggacacaccagatcgttggtacaatgttgctaaagctgtgggagagaaaactgttgaggaagtgaagaagcactatgagcttcttcttgaagatgttagacgcatcgagtcgggtcgggttcctttccccgactattggaccgttaccgggaatcgtcaagcatgaaaaattccgaaggtcaaatgaagaagaaaaaatggtggacttgcatggatctcacccttatatatgtct

SEQ ID NO: 31143 - DNA, 173 bp, Gossypium hirsutum
  Clone ID: LIB3148-046-Q1-K1-G6
cccacgcgtccggaattgaaatttttgttgtaaactttaatcattgtttatttggcgtttgtttgatggtggaattgatataaaccagcaaataatgcagtaaatggcaacgtaaactagtcccgatgtatatatatatataaaaatccatataaggcattcttgtttgggat

SEQ ID NO: 31144 - DNA, 212 bp, Gossypium hirsutum
  unsure (1)..(212): unsure at all n locations; Clone ID: LIB3148-046-Q1-K1-G7
taattaagtaagaaagtttttttttctctgcncggatggatgttaaaccagcgggttattatacggatgtgaggaaggtccaaaaaactgttctatccttttagatgcctgtacttttttggggagcatcaaagcttgttgctgttggttatggcatcaagaatcttcatatcatgctttccataatttatgattctttattctgttgatac

SEQ ID NO: 31145 - DNA, 427 bp, Gossypium hirsutum
  Clone ID: LIB3148-046-Q1-K1-G8
cacaaagatggcaggcgcagcaaattgggtttccataaccttactgttttcagtatgtttatgggcgtcctatggtaagaggaccggaatctccaccatggctgacggagccgatgggtttcaaccaagcaacggttttccgcatgaagctgatcctgattcttcaacctctatcgatcctgatcctaccggattcggtgctggcataggtataggttatgaaagaagcccttactgtatcgactgcgacgatgtggatatcatgggcggcagcttttgcggcacctgcaattacggatgcccttaccgcaggttcaataatgggtgtggtggtggtatcgcttatatggatgaactcaaacgaacgattaaggaccttaccatgaaacttgatgccaatggtcttttagggaaaaagaaggccatg

SEQ ID NO: 31146 - DNA, 445 bp, Gossypium hirsutum
  Clone ID: LIB3148-046-Q1-K1-G9
cagcaatggaaagttcaagagcattctccacaggtggtctggttaataaggagaaggttaggagctgatgggcagttttctgtgagccaccgaaggataagatcatccttaagccactcccggagactgtctctgagaccgaacctccactgttccctcctcgtacctttgctcagcatatcgagcataagctgttcaggaagacccaggataatctgtccaactgaaactagtatttttatttgtcgcgataacctatttctttctgtactctgatgaatgctatatttcgttggggggttaaacccttggttgtggcgtctgtctccactccttggctcctctttacctgttttatttgaataatgagagctgatttggttctttaaaaaaataatattttttttttttttttattattttttttttttattttagtttattt

SEQ ID NO: 31147 - DNA, 148 bp, Gossypium hirsutum
  Clone ID: LIB3148-046-Q1-K1-H1
cccacgcgtccgttataatgtggtaaagatggaatgtatagtgcatgctcaatttcttattaatgcaagtgttgcctgatcgaccgatgattgtgtaaatgctttgaaatacttcgttagtgctcaataatattgagtatatgatgaa

SEQ ID NO: 31148 - DNA, 121 bp, Gossypium hirsutum
  Clone ID: LIB3148-046-Q1-K1-H10
acaaaacccaagaacaaaagaacaagtgaactctgaccatcgaggagcccaagtgttgaagacaacatccaagaagaagattaaaggcttgctgaaaagaagtcaaaacttgaagaagaag

SEQ ID NO: 31149 - DNA, 451 bp, Gossypium hirsutum
  Clone ID: LIB3148-046-Q1-K1-H11
cccacgcgtccgtcatgatgtctcccctatcatctctccaaaaacaacccacaaactttctcgtgtacccatttccagtgttttcaggaactggttccatttttgccactggttcccctttcttgataagggaatcatttaaccaaaggaaacctgtatgtaaagcaacaacatttaccattacatgtgagcaaagcaccaaggggggtagcaccaacagtttggatgtatggcttggcaggcttgctatggttggttttgcagtagccattactgttgaaatatccactggcaaaggactcttggagaattttggccttacaacacctttgcctacagtggccttagcagtgactgcgttggttggtgttttgacagctattttcatctttcaatcaacctctaaaagttcttaagatttatatgtttaatgctgggttctttttttggg

SEQ ID NO: 31150 - DNA, 300 bp, Gossypium hirsutum
  unsure (1)..(300): unsure at all n locations; Clone ID: LIB3148-046-Q1-K1-H12
cccacgcgtccgcccacgcgtccgctctcatttcctggttgaatccttagggaattggggttgtgtttataagcattacttgtagatactgtggtatatttctggttgtgatagagttgcttaaatcttttcctcttaggttttgtagtcttgggtaaaaccgcagagaatgatattgttgtactggtttgtactgttaaatggttgtattgaattatttgatcatgttggtaagcaaattttctatattcnnnannaaaaaananttattaaaaataaattttttttttttatattttt

SEQ ID NO: 31151 - DNA, 359 bp, Gossypium hirsutum
  unsure (1)..(359): unsure at all n locations; Clone ID: LIB3148-046-Q1-K1-H2
gcgcccacgcgtccgccaatattgaagcaacatatttttgttttatagactctaaaaaaacaatcaaccaggttggtgttgaattgtatagtgtgttagatgaatnaataaagtgcagagatactggtcattcgaaagagcaagtcaggtttagggctgtgcccaacaatgtacttaaattattgctttgtttattaaatgggataactatcatttttagttcttttctaattaaataagcttttttatttaatgcttttcttaaaatatattttttcctttcttctatatattatatttttatttattaatttttattattttttttaatgttatttattttttataattttttattt

SEQ ID NO: 31152 - DNA, 92 bp, Gossypium hirsutum
  Clone ID: LIB3148-046-Q1-K1-H3
gtttgttctagttgttctcatttgtgtatatattgtttttatacatgggttgggatgacttgcttagaaataaaagacagatgttatggttg

SEQ ID NO: 31153 - DNA, 453 bp, Gossypium hirsutum
  Clone ID: LIB3148-046-Q1-K1-H4
agatgaacactttgggaattaatgaagataatttggagacaaagggtgtgaggatcccgttaccttgggaacttttgaggccggtagtgacaattttagggcattgtttgtttggtcctttaaattcacaagatgtgaaggactccgcctcggtcgcggttaggtgtttatacgcgagggcatctcatgatttggcaccccaagcgatcttggcattgcagagtctgataaggcttgataagaatgcaagagcagctgcaacaacggctgctacggtgacaacaaacgcttcttcgaatgctaacactcctagcaaggctaagaagcccgaaatcctattggtttccaagtgatttcatggttttgctttttcaggtaatggatgtgcatagtgttttaagcttctggtatctttgtgtaagaaaattcacacttgtggaaattcaattttac

SEQ ID NO: 31154 - DNA, 277 bp, Gossypium hirsutum
  unsure (1)..(277): unsure at all n locations; Clone ID: LIB3148-046-Q1-K1-H5
gcccagccacgcgtacgcgtccttcatcttccttcttcctcttccggttctcctagccctcttcaacgccgccgctgtcctcttggccgacggtagcaagtgggctaggaagggcctangtcggccgccgccgttgtaggtgcaacttgggtcggtggctgccagagggatcaaatcgtaaacgcaggaaaggtttttggggccaaagtgtaatttagagaaaatatttgggtcaaattgtaatttataaaagttacggggttaaaatatacttttc

SEQ ID NO: 31155 - DNA, 311 bp, Gossypium hirsutum
  Clone ID: LIB3148-046-Q1-K1-H6
cctacgcgtacgaccacgcgtacgaccacacataacgatttattttttaaaaaaaaaaaaaaaaaaaaagggttgtggttataagcattacttgaagatactgaaatatattaaatggatgtgataaaaaaaaaaaaaatcaattgggggggggttttttaagggttcaaattttccgtccccgggtttgcaaggtaaaatttttttttttgggacaccaaaataaaataaatggcccgcgttttaaaaacggggggatgggaaaaaccctgggttaaccaaatttaatccttttgaaaaaaatccccttt

SEQ ID NO: 31156 - DNA, 92 bp, Gossypium hirsutum
  unsure (1)..(92): unsure at all n locations; Clone ID: LIB3148-046-Q1-K1-H7
gcgtccacccacgcgtccgtaaccacaaatgtttatatttatgtatctacnttcctaaataaaatgaagtggccaaagccatgtttttttgg

SEQ ID NO: 31157 - DNA, 343 bp, Gossypium hirsutum
  unsure (1)..(343): unsure at all n locations; Clone ID: LIB3148-046-Q1-K1-H8
ggtcccaccccgcgtccggttgtaatatgtttactccctcgttttttattttataaaggaactgtttagttcaaaaaagagaaggtttatttttatatggtggatgggccaaaaaaattaaaaaaatataaaaaatttaataaatgtgttttttttttttgtgttttnttttttagataatgagattaaatatatttatattttttttttttttattttttatttttttaaatattttttttttttgtggcccctttttttaaaactcctttttttctccccttttcttccttttttatatttttttttttgtcccccatatttcttattctccccccttttt

SEQ ID NO: 31158 - DNA, 422 bp, Gossypium hirsutum
  Clone ID: LIB3148-046-Q1-K1-H9
gcattttcactcttgattccctgaaactatgtgttcttcatcatggaaaaccatggcggtcgctttgttattgatagagctgtggtttaccattgaatcttctgtagctcaccctgataaaattgttaagcttccagggcaaccccctcgcttgagctttcaacagttttcagggtacgttacggtggattacaagaagcataaagccctgttttactactttgttgaagctgaaactgatcctgcatctaagcctttagtcctttggttaaatggagggcctggctgttcttcacttggagttggggcattctctgaaaatggaccattcagaccaaatggagagtttctagttaaaaatgattacagctggaacagagaagccaatatgttatatttagagacaccaattggagtagggt

SEQ ID NO: 31159 - DNA, 326 bp, Gossypium hirsutum
  unsure (1)..(326): unsure at all n locations; Clone ID: LIB3148-047-Q1-K1-A1
gacgtaaaggtagtcaatctttttactgcttttcaacaaagagagaattggatgaccgattgcttcacagatggagttcatctatctgctgaggggagcaaaatagtggtggcagagatactaaaagtactgaaagaagctgaatggaagccatctctgcattggaaatccatgccaactgaattcgccgaggactcgccttatgatattgttggcgctgatgggaaaaccacgttgaatccgtccgaatggacntttcaccgagagaatcaatgggattagagttcagagttcttgttaagatcatgatctncaaaatcccatgg

SEQ ID NO: 31160 - DNA, 93 bp, Gossypium hirsutum
  Clone ID: LIB3148-047-Q1-K1-A11
aaaaaaaaaaaaaaaaaaaaaaaaaatttttttataaaaaaaaaaaaaaaaaaaaaaaaaagaggggaaaaaaaagagggaaagaaggaaaaa

SEQ ID NO: 31161 - DNA, 440 bp, Gossypium hirsutum
  Clone ID: LIB3148-047-Q1-K1-A12
ggtgatgttgtgcccaaggatgtcaatgctgctgttgccaccatcaagaccaagagaactattcagttcgttgactggtgcccaactggattcaagtgtggtatcaactaccagccacccactgtcgttcctggtggtgatcttgctaaggtccagagagccgtttgcatgatttccaactcaaccagcgttgctgaggtgttctcccgcattgaccacaagtttgatctcatgtatgccaagcgtgcctttgttcactggtacgtgggtgagggtatggaagaaggagaattctcggaagctcgtgaggaccttgctgcacttgagaaggattatgaagaagtcggtgctgagtcaggcgagggtgatgaggaagatgaagatgagtactaaataagtaatgtttgagtggagggcttgcattttgctacccaatgatt

SEQ ID NO: 31162 - DNA, 375 bp, Gossypium hirsutum
  Clone ID: LIB3148-047-Q1-K1-A2
cagagttttctctgccatcctattttcctttggtttttgatcccttggtttagactactacttcccttccatccttttgttgcatggtgttaatgaccggacgcccaatctctattcatttacatatgttggtgatacctttgagatcaatcaagtggtttgacatatgtatcttttttccaaattttagtcttggatttttccggagtgtcttctttcttgtgcctttacatatgttggcgatatatataccatcaaggatagcagtggctatcttggcattactgtatgagtttacttttagccacccaactttaaggctctacttggaatgaaagatggaaacgagtgacaatggaaaaatttgtaaatcta

SEQ ID NO: 31163 - DNA, 292 bp, Gossypium hirsutum
  Clone ID: LIB3148-047-Q1-K1-A3
cggaatggaaggagccgacccaagcgaccgcccacgcgtccgatgattttggttatctcattgtttcaggcttggaatatatctttggaagatggagacttttgtaatgtataaactagtagtcttccatggaaaaaaaaaaaaaaaaaaaaaaaaaaaaaaaaaaaaaaaaaaaaaaaagaaaaaaaaaaaaaaaaaattttataaaaaaaaaacaaacaaaaaaataaatatttttaataataaaagttaaattaaatttaaatttgaccggttgttttaaaaataaatt

SEQ ID NO: 31164 - DNA, 307 bp, Gossypium hirsutum
  Clone ID: LIB3148-047-Q1-K1-A4
tatgtttgttggccatggcagtggcttgggctgtactttgtagggtttcataaaccagagacacagcaacagagttcaaatgaaatggagctttctgaaccactttctgaacctcttctctgattatacttctctctttttctgtgtaaaatcagttcatagtaatttcattcttcaaagctccttcatttgcaatgattttgtcacttctataattctgacatggcaatgatttccgagagttgaatctttcttgttcatacttccatggcaacgaatctttataatcaaactcatctattttcca

SEQ ID NO: 31165 - DNA, 339 bp, Gossypium hirsutum
  Clone ID: LIB3148-047-Q1-K1-A5
cttttaggtccaaaaaaaaaaaaaaaaaattttttttaaaaaaaaaaaaaaaaaaaaaaaaagagaggaaaaataagagagaaaaaaagaaaaaaaaaaaaaaaaaaaaaaaaaaaaaaaaaaaaaaaaaaaaaaaaaaaaaaagggggcgccccttttaaagaatcaaagtttacttccccttgcttgcaaagtaaaaatttttttttagggccaccaaaattaaattaactggccggggtttaaaaacgtgggaactggaaaaaccttgggtttcccaaattaaatcgctttgaaaaaaatccccttttcccaagttgggttaataccaaaaaggcc

SEQ ID NO: 31166 - DNA, 332 bp, Gossypium hirsutum
  Clone ID: LIB3148-047-Q1-K1-A7
gcagaaattagctgcttgtgggtttgctgatgaggctgttgagaaatgggcatcggcttcgaatttggcttcgctttctcttttggcagagccgcgtcttcaaggttccctccttaaagttacggcatttttattcaaccaagcgaagaacattagagtggaagaagatcgtgaagaaagcagcaaagaaaactggagtcaaacaaagatgaaaatgataacatcgtggctgccgttgttgtgcagagggagcaatggcagcgacgtgccggtgctgagcataagcgaaagagccgagctcgagaagatattggaggacgccattgaaaagc

SEQ ID NO: 31167 - DNA, 433 bp, Gossypium hirsutum
  unsure (1)..(433): unsure at all n locations; Clone ID: LIB3148-047-Q1-K1-A8
tttttatttgggagaacctcttacggtcttggagctggatgagaaagatgggcaagtaaaactaacatgtcttggacctgatttgttgaataatcagaaggtgcagtacacagtgcctccaaatgtttggtttggtgcatttccaacaaaagatttcaacatttcgactgatggggcagtgacgaaaaatgatccaagggatgctgagagccattattcacttgtaggatgcacctgtgcacctgctttccagttccaagacttcgagctggcaaaacgatccgagcttgtaactcgcttccccaaacatgagcatctcatttctttactcacttatcctgattgatacaaagcttcacaaattcatctcacaatcatgaaatcggtntattttcccatcttcttgctgtgtagtataaagtaaaaacgatct

SEQ ID NO: 31168 - DNA, 305 bp, Gossypium hirsutum
  Clone ID: LIB3148-047-Q1-K1-B10
gcaattccagaagcaggcacctgctgccggtgctggtgacggtaccggtgcagccattactcaggaagaggacgatgaggaggtaccagatcttgtacctggcgagacctttgaagctgcagcagaaggccaagctgctaaatagagtttttatctttaattttattttgttatatgtttttgatgaatttaactatttgtttctttttccaaattttctctatttgtggtttttgtttgctctaccttgtactcttaatggtttggttcagagtaagccttctagaattcctattattattgcc

SEQ ID NO: 31169 - DNA, 297 bp, Gossypium hirsutum
  unsure (1)..(297): unsure at all n locations; Clone ID: LIB3148-047-Q1-K1-B11
caattctccagccctagcccttttgaagaagtcctttagcagcccaaatgctctgccagggaagagaaggtaaatttcctaacctggaattcaggaaatctgaatctttaaaatatttagctttcaatgtacgcgctagtaaagagttaggattacataataatcgccaaccctgtttggcaagtaaagcaatattaaaaagattcaaattacgaaatcccattnaaaaaaaaaaaaaaaaaaaaaaaaaaaaataaaaaaaaaaaaaaaaaaaaaaaaaaaataaaataataaaaa

SEQ ID NO: 31170 - DNA, 434 bp, Gossypium hirsutum
  Clone ID: LIB3148-047-Q1-K1-B12
cccacgcgtccgcggactcgtgggcgtacttttgggcttacgctcgattacctcacgaggagagaaaatggccagagtgttggccaactgtgagcgaggaataccagaagtcagttgaaaaggctaagaggaagctcagaggtctcatcgctgagaagaactgtgctccactcatgctccgtctagcgtggcactcagctggaacttttgatgttaagaccaagacaggaggtccattcggaaccatgaagcatcctgctgagctcgcacatgctgctaacaacggccttgatatcgccgtcagacttctcgagccgatcaaggagcagttccctaacctcacctacgctgacttctatcagctcgctggtgtcgtcgccgttgagattactggtggacctgaaattcccttccatcccggaagaaagacaagc

SEQ ID NO: 31171 - DNA, 426 bp, Gossypium hirsutum
  Clone ID: LIB3148-047-Q1-K1-B2
ctcagtttctccggactcccccaaaggcatttcttttcaagatacactcacaaaatgcggactcggagcatctgaaggggagaccaaaatctgtgctacctcttttgaatctttacacggttttctaagcaatgcatttggaccccatgttgatttcaagttcataagcacaaggcatcccaccataacaaccccactctttcaaagttacacaattttagaatcccctcaggagattgaatcttcaaagaaagtagcttgtcatccaatgccatatctttatgcagtttatttctgtcactttgatgccactgagactaaagctttcaaactccgtttagttggtgatgttacaagagataaggtggatgctgttgttctttccatatggataacttaagtttgagcttttatcatgtcgctttt

SEQ ID NO: 31172 - DNA, 78 bp, Gossypium hirsutum
  Clone ID: LIB3148-047-Q1-K1-B3
attttaaagcttgtatacgttgatgataggaaattgaaatgccttcatttagctatatgtggagttcttcttttcagc

SEQ ID NO: 31173 - DNA, 205 bp, Gossypium hirsutum
  unsure (1)..(205): unsure at all n locations; Clone ID: LIB3148-047-Q1-K1-B4
caattcaccaagtgtgnccggttgagacagactcctgaagtagnaagctttactatgtaagacatagtttcgaatgtgattgagtcgatgagagttgccaagtttacccagtgattgggatggatttacctgttctgctatgnaattctgaattccaagtgtttgagaattttatacgggattaatgcagttttgttatgttttt

SEQ ID NO: 31174 - DNA, 460 bp, Gossypium hirsutum
  Clone ID: LIB3148-047-Q1-K1-B5
tcctgaaaacccggggcggcccaacgcgtccggccgctcctctattcgcatcttccatggctactataccagttaacccaaaacccttcttgaacaatttgactggaaagactgttatagtgaacctcaaatgggggatggaatacaaaggttttcttgcatctgttgattcatacatgaacttgcagcttggcaatgctgaagagtatgttgatgggcaattcactggaaatttaggggagattttgatcagatgcaataatgttctctatcttcgtggggttccggaagatgaagatatagaagatgctgacaaggactagatggttcacatgtggttgaaatagaacctttggtatttgattagaagtgctgtaacttttgtttatcatggttgaatgtcattatgtcatttagtcgcccggacagacaaaccgcgatgtagttaattgtgcttttg

SEQ ID NO: 31175 - DNA, 136 bp, Gossypium hirsutum
  Clone ID: LIB3148-047-Q1-K1-B6
gtgactctatcagtaattttacatgttttaagactttttattcgtttgaaggcattttggatgaggaatgttttcaagaattttactagctatggggaaaaaatgttgctaaaatcttcaatcaataatctcttcc

SEQ ID NO: 31176 - DNA, 144 bp, Gossypium hirsutum
  Clone ID: LIB3148-047-Q1-K1-B7
cccacgcgtccgcccacgcgtccgtgtattcatatccgagatgtgtcggatacgggtttcagatacaattattgtaagaaaaacaaagagtcatatagtaacatagctagtttaacttgcttcataaagaagaaataatgattc

SEQ ID NO: 31177 - DNA, 200 bp, Gossypium hirsutum
  Clone ID: LIB3148-047-Q1-K1-B8
tatttaggtccagagcggtacacccatgaacatatggccattgatataatgcggggtgagattttcagcagttgcagatcatgttcctgaattatttatgctatttctttatttttgtcattctattttcgttgatatatagacactctttattttactcgtaaattatatgcaatggaaggaggacaaactttatagcc

SEQ ID NO: 31178 - DNA, 220 bp, Gossypium hirsutum
  Clone ID: LIB3148-047-Q1-K1-B9
cccacgcgtccgggttaatgccactctttgtcaatattttcaataataacaactttggcctttattaaaaccttggattaaggttggaaaatccaatctcaaagataatggaactcctacaatttggctttcttctttttcttggtgcagtggaagatactgtaagatgcttgaggtgaaagttgagataataagtgttgaatttagctcccaacctttc

SEQ ID NO: 31179 - DNA, 277 bp, Gossypium hirsutum
  Clone ID: LIB3148-047-Q1-K1-C1
gaaaatagaaaaagagatgtcttctccaagcaaacgccgagagatggacttgatgaaactgatgatgagtgactacaaggtggagatgatcaatgatggcatgcaagaattttatgttgaattcaatggaccaaaagacagtaaaaaaaaatcccttctttaaaccctcttttaattttcatttattttcatgatctatctctttacttttgctcaaaacttgattttattgggtttttctcattcatctcaaaagttatcttctttttttcgcgtg

SEQ ID NO: 31180 - DNA, 364 bp, Gossypium hirsutum
  Clone ID: LIB3148-047-Q1-K1-C10
actacgtgaaaccgatgctatcaatggattacgtgaagaaagcttttcaaaagggtttgggcaattacaattcggagtacattcaaaccgattcgatccagcctctttaccatgtctgtttcggtgggatggtcttttcttacctcgtcgctctcccaaatgagcgtcgccatctcgagcaccagcaacacgccaaggaacatggtcatcactgatccctgctcaggttaaagagtggcatttatggcataatgcttctggttgtaatttctgagcaatttaggcaggaagatactgtctttgatcaaatgcattgcagcattgtggtgataaaataatattaaaaataaaatggatttttgtt

SEQ ID NO: 31181 - DNA, 82 bp, Gossypium hirsutum
  Clone ID: LIB3148-047-Q1-K1-C11
cccgactctattgtcgaattcgagttacgttataccattcttgttgtcggaacaattatgatcaatttcaattcaatttaac

SEQ ID NO: 31182 - DNA, 155 bp, Gossypium hirsutum
  unsure (1)..(155): unsure at all n locations; Clone ID: LIB3148-047-Q1-K1-C12
cccacgcgtncgcttctctattggttaatacaacagccttagagatcaactgcatttgtgcgtcccccaggcttttcctttctaataaactcaatggcccgccaaattggtgttcttgctttggtcaccatggccctctttgccttggtttccac

SEQ ID NO: 31183 - DNA, 302 bp, Gossypium hirsutum
  Clone ID: LIB3148-047-Q1-K1-C2
cggaaaggggggatcccattttattgttgtcataaaatttggggggggggtggggaatcaaacccaaacatttttcagggtggggagacacacccatttttagcttaaaacccatttattttcatagggaatgcttaggatgaaaaagagctgtttttttttaaaagcatcaaattttgggtgtaggggatgaattagttgaagctcaaacatcaaattttattttgatatccattttttccacactcactcgaacctaaagaatttaatcagttcttttctaaaaaaagaagacaatttta

SEQ ID NO: 31184 - DNA, 419 bp, Gossypium hirsutum
  unsure (1)..(419): unsure at all n locations; Clone ID: LIB3148-047-Q1-K1-C3
cccacgcgtccgcccacgcgtccgggaggcatcatacgacaggatatattcgattgaaatgtttgagcatatgaagaactatcacgatcttctcaagaagatatcaaagtggatgaaagaggatagtcttctttttgttcattatttctgccataaagcatttgcttaccactttgaggacataaatgaagatgactggataaccaggtacttctttacaggaggtacaatgccttcagctaatctgcttctatatttccaggatgatgtttctgttgtcaaccattggcttgtgaatgggaaacattatgcaaaaactagtgaagagtggctgaagaggatggaccgaagcttggcttccattaagccaataatggagtccacctatggcanggatcangctgtgaaatggacagtgt

SEQ ID NO: 31185 - DNA, 430 bp, Gossypium hirsutum
  Clone ID: LIB3148-047-Q1-K1-C4
ttttctttttcttgcaagagcttttatattgaactgctggaatggctgagggtcataaggtcaccttgaatgtgtatgacttgagtcagggaatggctcggcagctttcgatgaccttattagggaaggttattgagggaatatggcacactggtatggtagtttatggtaatgaatactatttcggtggaggaatccaacacattcctgctgggacggcaccatacgggagaccaattaaagtgatcgatctaggtgtcactcatgtgcctaaagatttgtttgagatgtatttacaggagattagtcctcgttacacagccgagacctacagtttgcttacccacaattgcaacaacttcagcaatgaagttgcccaatttctagttggtactaacattccagactatattttgcaacttccaaatga

SEQ ID NO: 31186 - DNA, 198 bp, Gossypium hirsutum
  Clone ID: LIB3148-047-Q1-K1-C5
cccgactctattgtcgaattccagttactttataccattcttgatgacagaacactgatgatcaattccaactggattgctcaaatagaatattaagacacctaaacatatttcaaataattttgatagcaaatttgtacttgtgttcaaaaatatatcgaacttccagttaggtttggtggacttaggctgcaaatt

SEQ ID NO: 31187 - DNA, 332 bp, Gossypium hirsutum
  Clone ID: LIB3148-047-Q1-K1-C6
gcaacccaggtggggtatatgacaagcaaaggtttcatggtacctctgctcaacagtcttgtccagatcagccttcttcaccccacctccaaagaggactttgattttattgccaaatctgtggctgaagacgaggattctcggcccctttcttttccatcagagggaagaaataatggagtgccattcgtgaaaagccccttacaaggcatgtttgttcacatctcactcgagatggtcaaccattggcttgtgcctgtatgtacattatgaatgataaaatcatttttttaaaaaaaaaaaaaaaaaaaaaaaaaaattatttatttttt

SEQ ID NO: 31188 - DNA, 355 bp, Gossypium hirsutum
  Clone ID: LIB3148-047-Q1-K1-C7
agcagctcaattcagacatccggggttcccttattataaccaacttattgccatctacgcaaaagatcgagccactagaaaagatgctcaaagagctgctgatattattgaagaaataaatgctgaggatgtagctgctacaaatactcatgaagaaagaaacgatttccatggatccgaagctgatgtttctttggatgacatggatctttcagctacacaaccgcaaccagaaccacaaccagctaaaaaccaaggtgattctgcattttcaaagaagaaaaaaaagatttctgatgcaagtgatttttctacttcatttaatgatgctgccgctttattggtggaaagtata

SEQ ID NO: 31189 - DNA, 61 bp, Gossypium hirsutum
  Clone ID: LIB3148-047-Q1-K1-C8
gcccacgcgtcggccttatttagttttaaataacaaaaacaagcatttgttgttgccaggg

SEQ ID NO: 31190 - DNA, 363 bp, Gossypium hirsutum
  Clone ID: LIB3148-047-Q1-K1-C9
actggcaccaccagtaatgaagttcctcagaagcagattgaggttgtgaaggaaactgtgcaaaaaccgaccactgcttcaccatcatcgggtgatgccaaggagatccctgcaggtgttccagggagcaaaacgaacaactatttccgagctgatggccagaattgtggcaactttcttacggagcgcaggacaactaaggttcacgcagcgcctggcggtgggtcttccttggattacctgtttggtggcagcgagaagtgatatgtgagatattaaatgttggaaccactgcttatggttgtcctaaaaggtttgggacagaaaatatttaagtataaacaatatgttggtttcccttcc

SEQ ID NO: 31191 - DNA, 422 bp, Gossypium hirsutum
  Clone ID: LIB3148-047-Q1-K1-D1
ggcggccgggatatgacgacggtgaggttgttgatgaagcagaagcttccaccggcgacgatatttccggcgtttacgtgtagggtaagggtacaatacagttgtgggaaggataggaaatcgttgacgttgccgtgtgatgtatggagaatgaacggcggcggaattgcatggcggctcgatatcaacgccgctctttgcttgggccggtgagaacaaaaaaaaaaaggggcaagaagcagccattttctttgcatgaagaaagcttagcatctatatattctggtcatatgccacgagtccgaggcttgtaggaattctgtgaacaaaaatggaactccgacaacgtaattaaagaacgaggtgagcaatcaccgcaatggtcttgtaatttaatggtagttttttttttttttgttaaa

SEQ ID NO: 31192 - DNA, 391 bp, Gossypium hirsutum
  Clone ID: LIB3148-047-Q1-K1-D10
catggttatggtgtttggtgagatcacgactaaggccaaagttaactacgagaaaatcatgcgggatacttgtagaggtatcgggttcacatccgcagatgttggccttgatgctgataaatgcaatgttctagttaatatcgagcaacagagccccgatattgctcaaggagttcacggtcacctcacgaagaaacccgaggaaattggggccggtgaccaaggtcacatgttcggttatgccactgatgaaactcctgagttgatgcctctaacacatgtgcttgcaactaagcttggtgctaagctcactgaagtaagaaagaacaagacgtgtccgtggttgaggcccgacggtaagacccaagtgactgtcgagtataaaaatgat

SEQ ID NO: 31193 - DNA, 335 bp, Gossypium hirsutum
  unsure (1)..(335): unsure at all n locations; Clone ID: LIB3148-047-Q1-K1-D11
aaaacccggccgacccacgcgtccgcccacgcgtccgcccacgcgtccggangttgaggattttgtttgaagccaatttttgagtgttttagttattggaaacattgaactctggtgttattgccgggtaccttctttgttatacaaattttccattgttttcaaaaaaaaaaaaaaaaaaaaaaaaaataaaaaaaaaaaaaaaaaaaaaaaaaaaaaaaacaaaattaaataaaataaaaataaaaaaaaaaaaataaaaaaattatacgtctatctaaacataataattataatctggggccgccttttaaaagaatccaaaacttttttcc

SEQ ID NO: 31194 - DNA, 290 bp, Gossypium hirsutum
  unsure (1)..(290): unsure at all n locations; Clone ID: LIB3148-047-Q1-K1-D12
cccacgcgtccggggggcatgcggcgtcataaagggttagggaaccctagggttttgttgtgactttgttgaatgtttgggcttagtttggattaagggttttgggccatattgggccattgtaatggattatttaattattttaattttggctgttttgctggtatggctcaggcaaaaattaggctctacaatttttataattttnannttttaaatcaaatttttatcataaaaaaaaaaaaaaaaaaaaaaaaaaaaaatgcaagagaagggattctttataaaat

SEQ ID NO: 31195 - DNA, 374 bp, Gossypium hirsutum
  Clone ID: LIB3148-047-Q1-K1-D2
cccacgcgtccgggaaaatttaggtgatacaccggcgttatacataacatttgcaaacaacaagttcaccggtcggatcccgccaagtattggcaaagctaaaaacctcctcgaagtactattcctcaacaacgaactcactggttgtttaccgtacgagatcggctacttacaaaacgccaccgtttttgacgtcggaatgaataaactaaccgggccgataccacattcgttcggttgtttgaaaaagatggagcaactcaatttagccggcaatgaattttacggcgaagtaccggaaatcgtttgccggttatcgaatcttcaaaacttgtctttgtcgagtaattatttcacccaagtcggaccggcat

SEQ ID NO: 31196 - DNA, 302 bp, Gossypium hirsutum
  unsure (1)..(302): unsure at all n locations; Clone ID: LIB3148-047-Q1-K1-D3
cccactcgtncnnngactcatgttcggacttgatggcctatctcagattgaataacccccgcaggagtttacagggaaggaagggggtcatataaaatatctttaaaaatccaagacctatgatacatgtatgcattgactgtacttggagattatatttgctttataaatttatccttatgatttttaaaataattagaattaatctactaattaaaattgatttataatatatataaaatatattttttttaaactctttcttattacttattattattatttttatttattatatatat

SEQ ID NO: 31197 - DNA, 434 bp, Gossypium hirsutum
  unsure (1)..(434): unsure at all n locations; Clone ID: LIB3148-047-Q1-K1-D4
gaccgacgcgtccgcccacgcgtccgaccaggcaaaccatcgaatcacaactagaatgcaaaggcgcatttacagtcatgcaactgatgctgcgatacgccccttggatgaggagaaagctgtgcaggctgctgtagatcttatgggggagctttttgtcttcacggttgctggagctgtcttgatctttgaagttcaaagaagttctaggtcggaagccaagaaggaggaagcacgccgaaaagatttggaggtattcattgagcagtctcctttctttttattgttttcctcttttgtatcaaggtgataaacatgatgctaaccaagatggagtttagtcctatgttgctctaactcttcatatttgttgaaatacccgtgtgcgacatctatgttcatgaaccaacacatactcngaaaatgatacaaaa

SEQ ID NO: 31198 - DNA, 130 bp, Gossypium hirsutum
  Clone ID: LIB3148-047-Q1-K1-D5
gggttccttttttttttttttttgctttctttaattattaattactgtatttggtgagaggagaggatggatgggagagacatttttgtaatatatcgtgtttgatcaatgacactctcatccttcctcc

SEQ ID NO: 31199 - DNA, 413 bp, Gossypium hirsutum
  Clone ID: LIB3148-047-Q1-K1-D7
gtgaaaagcttagaagattcgctttgtatctccgagctggtggtttgaccgatgtaggcctcagttatatcgggaaatatagccctaacgttagatggatgcttttaggatatgtcggggagtcagatgccgggcttttggcattctcccgtggatgtcctagcttagtgaaactcgaaatgaggggttgctgctttagcgagcaagcaatagcacaagccgtgatgcggttaccctctttgaggtacttatgggtgcaaggatatcgagcatcaccagccggtcgcgatctattagccatggcacgtccattttggaacatcgaactgatccctgcaagacgagtcaatatgactaatcaagtcggagaaccagtcgtggtcgaacatccggctcatatacttgcctattac

SEQ ID NO: 31200 - DNA, 327 bp, Gossypium hirsutum
  Clone ID: LIB3148-047-Q1-K1-D8
aaaaaaaaaaaaaaaaaaaaaaaaaattttattaaaggacaaccaataaaaaaaaaaccgagagcgaacttaccgaaggttgcgagagaaaaaactttcttttatttataacctacattaatttcattgccctgctttttaccaccctccctttttgttaaacccccccctttccctacctaattccctttgtatccaatccctttttttctagttccctttttttccaaaagtccggccctttacccccttcccaccttttcccaaccctgattgtaaaatggaacccccccctgaccgtccttttaaaccattcccctttttttt

SEQ ID NO: 31201 - DNA, 435 bp, Gossypium hirsutum
  unsure (1)..(435): unsure at all n locations; Clone ID: LIB3148-047-Q1-K1-D9
gcaacagaaagttgctaggccttctgtttccacaacggaaagtgcgattgacaaagcaggtggattacgagaaccgtttcaatcaaaaccggaaggcgagaagttgccagtctctgccttagaggaaaacatagttctcggtgttgcattagagggctcgaagagaacactacctatcgatgatgagatgactccgcgcacatcagaagcaaaagagttggcttccacaagccgaaatggaaccggatcaagtgctgaagacaagaaaggcggtcagatctggcccacatctggtaaccccgatgatcagtgatatattgaaagctaactactaatccccagagctcacaacttgcatttgatggacacttgacacttncactgaggctttctttcattaagcttgccccatacatgtatatcttcactctttta

SEQ ID NO: 31202 - DNA, 219 bp, Gossypium hirsutum
  Clone ID: LIB3148-047-Q1-K1-E1
gccaggcgtacagcttgaaggctggggccatgcatatttaataaacccgataatgtggagagttgtgatgaagggagcctgttcatgttcagtcaagaaatgattctcaaggagggtaatatatatacatggaccggtgttcatgattgtgatttctttttttttatatgaaatttccgtagacgaaaaaaaaaaaaaaaaaaaaattaaatttaataa

SEQ ID NO: 31203 - DNA, 166 bp, Gossypium hirsutum
  Clone ID: LIB3148-047-Q1-K1-E10
aacagcttaaagcaatctccagtttgttctataataatatacccacgagtttagtcatgtaaaatctatccatgaatcatgttcttagtaatggataaaatgatagtactttctgtatcacaagggtctggcgataaatttattagtattttaagtaacttttcag

SEQ ID NO: 31204 - DNA, 437 bp, Gossypium hirsutum
  unsure (1)..(437): unsure at all n locations; Clone ID: LIB3148-047-Q1-K1-E11
cccacgcgtccgtgaatttagacacattttgtgaactacattatcagatacatgactcgggttttggtttcttgttcatatcattgttgtcctttgctcgggttcctctgataacataactggtttatgatggtgcctgaaaacagtgcaaggtgtgtatgcaaacattcatgtgcaccacaacggaagtgaaatgtcgggagcacgctgaggcgaagcatccaaagtccgacgtgtacacgtgttttcctcatcttaaaaaataaacatcaaaactctacagaaagaacggggatgtcaagacagcttgtaatgcatatcatctatctatgttgnatcttggtactctacaatttatctttaattctctttcacaagcctgtaaaaaactcactagctgattttactcgtgcaaactaaatgtttgtgttcaatca

SEQ ID NO: 31205 - DNA, 347 bp, Gossypium hirsutum
  Clone ID: LIB3148-047-Q1-K1-E12
gtttgttttcaattgaaagaatggcagtttttttcaaaaaaaaaaaaaaaaaaaaaagaggaaaaaaaaagaaaaaaaaaaaaaaaaaaaaaaaaaaaaaaaaaaaaaaaaaaaaaaaaaaaaaaaaaaaaaaaaaaaaaaaaaaaaaaaaaaaaaaaaaaaaaaaaagggggggccccttttaaagaaccaaattttactcccccgtttttccaagtaaaaactttttttttggggcccccaaaataaaattcatggcccgctttttaaaaacgttgggacgggaaaaaccctgggttacccaaattaaatcccttggaaaaaaatccctttttccccggttggtt

SEQ ID NO: 31206 - DNA, 320 bp, Gossypium hirsutum
  unsure (1)..(320): unsure at all n locations; Clone ID: LIB3148-047-Q1-K1-E2
cacagattaggcaactgagccccagcttaactgaaaaagggcttgaattaagtccaactcgtagtcctgctccatctacacttggacaaagcagtcgtgattcatcatcaagctaaaatatacatgcatacatacacaattaaagaaaagcatgctcttcatttctgattctgatctctagaggtattgtacttagtttattgtgagactagagttgtcttactctggttctgtgcaatgaatgttgctatcaagttaaaagcaaagcaaccgtaaacttttnnaaaaaaaaaaaaaanaaaannaaaanananaannna

SEQ ID NO: 31207 - DNA, 279 bp, Gossypium hirsutum
  unsure (1)..(279): unsure at all n locations; Clone ID: LIB3148-047-Q1-K1-E3
cccacgcgtncgaaggcccatgaatctggactggtctgacagtcaactatcaacaatcaagggcggataattaccgaagtgaagcgagccaccttaaccgtgtgcatatattttgatcttacgtcgagggcccatgagatcaaagactagggtggatttgggcttcttgttatctttattgcgactattagaatagattggattgtaatgtgtgttaccgcatgcatggctgatacatctaagaagttaatttggttgaatagtaccgacgaaacgatc

SEQ ID NO: 31208 - DNA, 377 bp, Gossypium hirsutum
  Clone ID: LIB3148-047-Q1-K1-E4
cccacgcgtccgcccacgcgtccgggagtaggaaggctttgaaggacggtggatcttcacactccacgttatgtcgttttattgatgatgtcgtggacaacatgccatgaaacttcagcacattgccattgctattattatttctaaaataatgtattcaaaatcaagatttagcttagcttatttaatatacttatattagaaatttataaatttggcacgctcattttgtgataaaatgtataatatattgctatttctcctagtgcaggagaggggtttctttatagaatatttttaataatgttgaggttgttacgagattatgcgtgtaactactcaagtttcatatgtgaaaatttatcttatgaaggaat

SEQ ID NO: 31209 - DNA, 230 bp, Gossypium hirsutum
  Clone ID: LIB3148-047-Q1-K1-E5
gagtagggtttattaggttattggaataatatgctatataacattaattcttttggcagtggtattttagggtgtaatagtaccttaaaaaattgaatgagtttggtctttccgaggaggttctgtcactgctcaacttgtgatattgtctgggattttgggagtgaaatggcggctgtaagctattcaacagtcttttctaatcaaatcaaaattaaagttttgaatgt

SEQ ID NO: 31210 - DNA, 424 bp, Gossypium hirsutum
  Clone ID: LIB3148-047-Q1-K1-E6
cagaaagctcttttgtggcctagctgccaccattttctccatcattatgtatgcttctccgctttcaatcatgaggctggtgatcaagaccaagagtgttgagttcatgccatttttcttgtcactatttgtgttcctctgtggtacttcatggtttatctatggtctccttggtcgtgatgcttttgttgctgtccccaatgggtttgggtgtgggctagggaccatgcaactcatcctttacttcatctaccgcaacaacaaggggtctcaggaaattaagaagccaagtggtaatggaacaagcattgagataggtgagaagaaaccccgccaagacaagcagcaacccaatggcaaagtccctcaagatgaacaagtttaaaatctttgtttcaaatttcagttttctgcatcttaattt

SEQ ID NO: 31211 - DNA, 256 bp, Gossypium hirsutum
  Clone ID: LIB3148-047-Q1-K1-E7
cccacgcgtccgaaagcccatgaatcttgactcggctgacagccaaatatcaacatgaatgtcacataattaccaaaatcaaacgatccaccttaaccgtgtacatatattttgatcttacgtcgtggcacatgagatcaaagcctcggtttgttttgttcttcttcttttcttttttttttttattaaataaattggattttaatgtttgttaccgcatgcatggctgataaatctaaaaatttaattttgttgg

SEQ ID NO: 31212 - DNA, 430 bp, Gossypium hirsutum
  Clone ID: LIB3148-047-Q1-K1-E8
cccacgcgtccggccaaaactggtggagtacgtctacagaagaaccgggaagacggcggtgatagtgaaactagaggcggagacaccgaagacggaagaagaaaaagccaaagatgccaacaaggacgagaaaaaaagtgaagaaagtggcgaaaaagacaagaaagaagccggtggagaagagctagactcaccgagggatgctctttcaggaagaagggtgattgatctcatattttgctattttatgattcacaaaaacaaaagaaagtaatctttggatcaaatatgggaatcatatgagtaatctttttcatgtgtttcagttatgacatatgtttgaaagttatttttgtagtaagttggtacttgatgatggtattaatcaattattgattgctttgtagtggataaagttatttttttatgc

SEQ ID NO: 31213 - DNA, 160 bp, Gossypium hirsutum
  Clone ID: LIB3148-047-Q1-K1-F1
aaaaaaaaaaaaaaaaaaaaaaaaaaaaatttttttttataaaaaaaaaaaaaaaaaaaaaaagggaggggaaaaaggggggggggggtcggttttaaaaattcacgttcacgtacacgcgcatgcaaaacttttttttttttttaccgtaacctaattt

SEQ ID NO: 31214 - DNA, 401 bp, Gossypium hirsutum
  Clone ID: LIB3148-047-Q1-K1-F10
cccacgcgtccggtgaagctggcagtgattcttggaaacaatacatgcgacggtcaacctgcacaataaactacgggagtgagttaccgctggcccaaggaatcaatttcggctaggaatgcagacatgggtgaggcgtaaggaaacaaatttgcattcctgcaaaatcaactcccagaccttttatgctctacatatagggtgggatttggttcacataattgtcgctgaaaaccatgaatagtaacataataatgaaaagaggcataatgaagaaatcaatgattcctgaaacacactttgttacgaaaatcaagtgtagtgtgtgtgctgtaataattcttataatagaagcacattattgatcttgtgtcatgggttctagccccgtgacacttgca

SEQ ID NO: 31215 - DNA, 324 bp, Gossypium hirsutum
  Clone ID: LIB3148-047-Q1-K1-F11
cggacgcgtgggtagttctagatccctagtttccgccctttttttttttattttttgccggcacaataaagtaggggagtgagttacctttttcccaattaattaattttttctataatgcatacatgtttgatgcaaaaggaaacaaataaacattcctactttatcaactcccataccttatatactctacatatagacaagggatttgcttcacataattgtcgctcaaaaccattaataataacataataatgaaaagatgcataattaataaatcaattattccttaaacacactttgtttctaaaatcaattataatt

SEQ ID NO: 31216 - DNA, 64 bp, Gossypium hirsutum
  Clone ID: LIB3148-047-Q1-K1-F12
cccacgcgtccgaaaaaaaaaaaaattatatttaaaaaaaaaaaaaaaaaaaaaaaaagaaagg

SEQ ID NO: 31217 - DNA, 364 bp, Gossypium hirsutum
  Clone ID: LIB3148-047-Q1-K1-F2
gcttcatagcgtcaccgaatatcaacattaacgctctacaatgtccaacaagctagaaggcaaggtagccataatcaccggcggagcaagtggcatcggagaagccaccgtccatcgtttcgccctcaatggtgcccgtatgatcgtgatcgctgatatccaagatgaattaggccaaaaagtagtcgaatccatcggttcaaataagtgttcatacatgcactgtgatgttaccgatgaagaacaagtaaaaaatttagtccagtcgacggtccaaaactacggcagcctcgacatcatgttcagtaacgctgggacagttagcaactcaattcaaaccgtccttgaactagactttgcagcg

SEQ ID NO: 31218 - DNA, 381 bp, Gossypium hirsutum
  Clone ID: LIB3148-047-Q1-K1-F3
gaaagatcaatatctctttgactattagtgaaaccagtgagctaaagttaagtgctggaaatggagattgtgtgcttcacatgaaccctcttgtacctgaagggaactttttcttaaaccttccttcttatgacaagttgctgactccagtaaatggcgcatacttcttgattgcaaccattgtaattttgggaggatcatgggcttgttgcatgtttaggaaagggaggcggcatgatggtggtataccttaccaagagctagaaatgggattaccagaatccatgcaagctactgaagtagaaacggctgaaggttgggaccagggttgggatagcgattgggatgaagacaaggcagttaaatcaccaatgggacgac

SEQ ID NO: 31219 - DNA, 134 bp, Gossypium hirsutum
  Clone ID: LIB3148-047-Q1-K1-F4
cccacgcgtccggtttgtactctacgcactcatataaccatggcttgtcaaagtatcccttatgcctatatccgaaaagatttgtagaatgtgatttgaactatgaagtacatgctggcatcgacattgttttt

SEQ ID NO: 31220 - DNA, 321 bp, Gossypium hirsutum
  Clone ID: LIB3148-047-Q1-K1-F5
cccacgcgtccgaatttgctcctctaaaagggttttccctttgaaaaatatcgatcttccgcgagatcaaattctctgctaaagagctaataaactaaaacacggtagttatgggactaatcttttagttttttctctataacagcaggaactgaggctgctatttgctgcatgtgcattgcttatctttttattgttcttgtgtgtgtgtgccttgaatgctattaaaagtgccatagcattatcaataggtaggtatccttgtaatttatctgaaagtctttaatggtgaaagatgtcgtggcagtagcataattatct

SEQ ID NO: 31221 - DNA, 78 bp, Gossypium hirsutum
  Clone ID: LIB3148-047-Q1-K1-F7
aaaaaaaaaaaaaaaaaaaaaaaaaaataattaaaaaaaaaaaaaaaaaaaaaaaaagagaggaaaaaaaaaaaaaaa

SEQ ID NO: 31222 - DNA, 243 bp, Gossypium hirsutum
  Clone ID: LIB3148-047-Q1-K1-F8
cccacgcgtccgcccacgcgtccgcttatttaattcaaggcccaaaaaggtgttttagtggcttctttctgcagtaaggagctaggccatgtaatcttccacttcaatctttattcttagctgcggttggtcggttaaaaaaaaaaaaaaaaaaaaaaaaaaaaaatattaataagaaaaaaaaataaaaaaaatattataaaatttaaatataatataataaaaaattattatgggggcggc

SEQ ID NO: 31223 - DNA, 331 bp, Gossypium hirsutum
  unsure (1)..(331): unsure at all n locations; Clone ID: LIB3148-047-Q1-K1-F9
cccacgcgtccgcccacgcgtccgcccacgcgtccgcccacgcgtccgattatattgaaatataaaaattaaaaatttgtaattagatatggacacgattgtattattataaaaattatttttttatttttaattaattaaacacttatcaatttctgtcaatgtattgtaatattataatgtttttgttctaatatatgataatgcacattatttgtcatatttttgttccgatttaatgcacactactattttagtgcaatgtttgtcaataattgtttcaaaatggtatgaactttggaccaaatgaaaaaaaaaaagtttttttnna

SEQ ID NO: 31224 - DNA, 386 bp, Gossypium hirsutum
  unsure (1)..(386): unsure at all n locations; Clone ID: LIB3148-047-Q1-K1-G1
cccacgcgtccgttcttcttgtatggtgcacttggcaaaggcctcgacgcctttgaacccgaatttgctaaaggcggaccacctccgattggtggcagacgggccaatctcgactaccttacccgtcggatcatcgaggaattcggttatcaagaaatcggtcataatagggaaattgtgagaagaaccggtgggattccaaggcctttgattgatattagctctgaaaactttgcaaaattatttgataaagcagcagggtacaatttggatcctncatttgatccttatgaagatcccatcaagtatatgttagcagtatatgctatcccctatgtgggactcaatggctatgttggtacaacccctttgcctcaaaaattcgc

SEQ ID NO: 31225 - DNA, 138 bp, Gossypium hirsutum
  unsure (1)..(138): unsure at all n locations; Clone ID: LIB3148-047-Q1-K1-G10
ggaanttcccgggtgcgaaccgcacgcgnntccggtattatntnngtgtattttaaagttggaaatttgttatgcaagttacctaaacctttnngtgtataaagtcagatnnggattctaagatagtgttagttcgtg

SEQ ID NO: 31226 - DNA, 254 bp, Gossypium hirsutum
  unsure (1)..(254): unsure at all n locations; Clone ID: LIB3148-047-Q1-K1-G11
cccacgcgtccgatttcaaaccagcatagttgaaccttgttttcaaaattaacgttatcggcgaatgtatgtttgtaattggcgttgcctctacgagcacttaacaagccttaccattttttggatttttttttaaggcaacctattggaaggggaccggtttttccaaaaaaaaataatnaaaaaaaaaaaaaaaaaaaaaaaaaattaattaattttaaattaatttataataaataaaattaatatttttt

SEQ ID NO: 31227 - DNA, 303 bp, Gossypium hirsutum
  unsure (1)..(303): unsure at all n locations; Clone ID: LIB3148-047-Q1-K1-G12
aaaaccgggccgaccgacgcgtccggggctagcttgtatgtactcatgcttctttctctcnaagatgaggaatcaatacatggttggcagatacaccgtagccagatgggtgccttcatctttgctgcgaggtctgcgccttgtgtcaagaataccgcgagctcaaaagccgtggcttcgatatgtacattggatggcatgcgaacatggagaatatgcgaaatcgtgctatgcaaatgtcaatgcctccggtggtggaagatgggatgaaacgataaacaacgatgattctcttttctaaat

SEQ ID NO: 31228 - DNA, 115 bp, Gossypium hirsutum
  unsure (1)..(115): unsure at all n locations; Clone ID: LIB3148-047-Q1-K1-G2
caagcatgaagaataagaaagtttaaacattttgattgttacgttgtattattatttaatgaaggtctctctctttgcggaattaataatggtaaaatagtgaaacangcnnaat

SEQ ID NO: 31229 - DNA, 378 bp, Gossypium hirsutum
  Clone ID: LIB3148-047-Q1-K1-G3
gtgattatgctttgcagattgttaggcctgaacctgatacatctgcaaaacaaggagacaccatgcctagtggaacaattattaggttgcaacacatgagaactagaaaatggctgcatagccatttgcatgcatctccaatatcaggaaacctagaggttagctgctttggaggagaatcagaatcagataccggtgattactggaggctcattattgagggaagtgggaagacttggaagcaagatcaaaagatccggcttcaacatgtggacactggtggttacctccatagtcatgataagaaatatgccagaatagctggtggacaacaggaggtttgtggtgttcgagaaaaacgtgttgacaatgtatggt

SEQ ID NO: 31230 - DNA, 55 bp, Gossypium hirsutum
  unsure (1)..(55): unsure at all n locations; Clone ID: LIB3148-047-Q1-K1-G4
naaaaaaaaaaaaaaaaaaaaaaaaaaaaattatttaaaaaaaaaaaaaaaaaaa

SEQ ID NO: 31231 - DNA, 216 bp, Gossypium hirsutum
  unsure (1)..(216): unsure at all n locations; Clone ID: LIB3148-047-Q1-K1-G5
cccacgcgtccgcccacgcgtccggatcacttgaggcaggtgtttagtaatcaaatgggtcttagcgaccaggacattgttgctctttctggtggccacaccctgngaaggtgccacaaggagaggtctggatttgagggaccatggactaccaaccctcttatcttcgacaactcttacttcaaggagctcttgactggagagaaggacggcctg

SEQ ID NO: 31232 - DNA, 450 bp, Gossypium hirsutum
  unsure (1)..(450): unsure at all n locations; Clone ID: LIB3148-047-Q1-K1-G6
cgtccgnccacgcgtccggaggcataccttgttggttttgttcgaagataccaacctgtgcgccatgcatgctaatcttgtgagagtcatgcccaaggacattcaacttgctaggaggattcgtggtgaaagggcttaataaattcacctctctgatttgcttgtttgttgttaggatatttgctttctttgatgtttaatgaattcagaatggtctgatgctgtaaaaaccttaacctataaatatagtttgtgctttttattacgaatcacgaagagatgttattgaagctaagaacgagaagaattacgactcacgactttgaggcacatgaaaagcaaccgccttgtacctttgttaactacttgcaagaatcaaccaacttacgaatttgaaggtttgttgaaaaaaaaataatattttatttatatttatttttttattaattt

SEQ ID NO: 31233 - DNA, 353 bp, Gossypium hirsutum
  Clone ID: LIB3148-047-Q1-K1-G7
caacttttaaagagaaaatccctcagttggtggtggttatcgaactcattcgtgggtggggtccacatttgaagggctgttacaagaacaaaaacgagcgggtggtatgcgtgaagaatatgactcctaaagatatccttctttatgcaaccaggctaagaaacgcattgggaagaaaggtggtgaaattaaggacagggcatgtaactaaacaccctagtgtgcaaggtacatggacaactgatgtgaaattttgagacacggtagtaccaagttcttcacaattttttctgtattgttctttattgttcaatgtagtcatgatggcaactttgtttaaacattcactcttt

SEQ ID NO: 31234 - DNA, 314 bp, Gossypium hirsutum
  unsure (1)..(314): unsure at all n locations; Clone ID: LIB3148-047-Q1-K1-G8
gtaaactttgtcggttacacatacaagaactttgaaattgtagatgacaatcaattacctggcattgcggagttgaagaagaagagctcaaagcccaagagaccctccatcaaatccctttttgaggacgagtccgccgcagctgccagtcaacctgttcaagggagtttcataaacctcttgccgccgcaacatgaagccccagagaatcattatagaaaatgacctgactcactttagtggtatccatgggataatagctatcgccctggaaatccaaagataacaaagctntaatattatctggtaagtag

SEQ ID NO: 31235 - DNA, 477 bp, Gossypium hirsutum
  unsure (1)..(477): unsure at all n locations; Clone ID: LIB3148-047-Q1-K1-G9
gaaacccataaacccctccctctccttgatgctnaggaacaaaatcatgttgttgtttgcgattttaaagagtgggtgggaagagaaataactgtttaactttataactatttgtctatcattatgaaccctttatttctcttgatcaatacctttaatatcattttttttttaattcttttgttttgtcataacataatttatgtatctcttatattcttttttttattcttaacttttttttaattattctctattttttttatttcctattttttactctttcttttacttatatatattattttttcctttaattttctattttatttttatatttttaattactttttatttcttttttttatattttcctctatactttttctatttcttttttctttttttaatatttttttcttttctttttttatttttttatcttttatttttatttattatttattttttttattt

SEQ ID NO: 31236 - DNA, 441 bp, Gossypium hirsutum
  unsure (1)..(441): unsure at all n locations; Clone ID: LIB3148-047-Q1-K1-H10
gaaaacccgggcgcgacgcgcacgcgtnnccgcggacgccgtctcgctccacgtccgtccgcctcacttctgtccnnngcccttaaatttaatnntttacctcgtccagtgtcatactccgtgttgggtgcccaaganngattttgaaaccccggatcgcttanntggcaattgggcttcggaaggaaaaaccacccgcattatgcccaatcactgtnngacagggccatacnncttcttctaaccattgatttgcattatgnctcatnntgctcccgtaatttagaaaggatgtnaaagtttggtggtgatatgattcccaaaaaggcattgcagaggaacccatttcttaaacacccatctccggtnnggcgtgttcactgtgcnagtgaagacccaatggaacgttgaaattcttggctattttcataaagggtgaaa

SEQ ID NO: 31237 - DNA, 398 bp, Gossypium hirsutum
  Clone ID: LIB3148-047-Q1-K1-H11
gggttctactgcgaggcatggaaagatattcttgaaagctgctaaaagctgtttagagaaaggtgcttactaccccaagaaggaaattgagcggctgcagcgcatgcttgacaagtcaataagcccagcaaaagctgatgaattcacgctcaagaagaacatcctatcaacatttgcatcttcttagatcaatgtatttcacctcgtctagtgctgcggcaggttcaagtttcatcgaccttttcaaggactgggatcatcttagcgttttatgttttgggtatctttcagcagcaaatcgctaggccttgattaggacttgggcaccatttgcgcgcagcagcaccagttactagtaaaagttcttatgatggaaattttcttctattactagtttt

SEQ ID NO: 31238 - DNA, 344 bp, Gossypium hirsutum
  Clone ID: LIB3148-047-Q1-K1-H12
cacgcgtccgtctaacctgaagaatgattagagtttatgagaattccccaaatggatgggtttcaatggcacaagattgctgctgtttctggaatagcagcccttggattgggcacttatggcttccacatctttaaacctgaaaatcccgtttacaaggaggtatggcaaatcgcttctacttaccacttgtttcacacagctgctcttctttctgctcctattaccaaacgcccccacatttttggaggccttttgactgctggcattctttctttctctgggtcgtgttacacggcagcatatctggaggacagaaaatattcggcccttgctccatttgg

SEQ ID NO: 31239 - DNA, 426 bp, Gossypium hirsutum
  unsure (1)..(426): unsure at all n locations; Clone ID: LIB3148-047-Q1-K1-H2
cggacgcgtgggcggacgcgtggggttggactataaaaaggaaccatacaacgggatggtgtgtttttactaaaatttattgatgatttgtggttagatggttagattttgattttggtaggagtttgtgtgtggggtggatggtaagttttggtggaagagaaatgaggtctctgcttgaagaagaccaaatggggtttgaataaggtgatggggattgtgtgggagatgatattttgccattggtgcagtccagttttgctgcatctggtttttaattaattaatcaaaaaaagatgcaactttgctttaaannaaaataatnttttttttattttttttatttattttttttttttttttttttttaattttattattttaattttttttttattttaattttttttataattttttttatat

SEQ ID NO: 31240 - DNA, 95 bp, Gossypium hirsutum
  Clone ID: LIB3148-047-Q1-K1-H3
ccacgcgtacgtctgttattttctgtgtgcacttgtgaattgttttttgcacaaacatattgggacttaggtgggataaaaagaaggggggaggg

SEQ ID NO: 31241 - DNA, 210 bp, Gossypium hirsutum
  Clone ID: LIB3148-047-Q1-K1-H4
cccacgcgtccgcccacgcgttcggtcagatttttagtttggccttcgaatatgatgatagcactatggtaaattaggttcttattaccagccaatggtttagattggtttttggctgaatattctttgcaactgatcttggaatccaaaacccagttttatattgtgaattacatcaaaattttcaatcaagaaataacaaggttgagt

SEQ ID NO: 31242 - DNA, 124 bp, Gossypium hirsutum
  unsure (1)..(124): unsure at all n locations; Clone ID: LIB3148-047-Q1-K1-H5
accaaaannaatttggnntcttcaatannagcatggtnntaggagannattgggaattgggtcctnngtgctatttannatttgcnntggatctnnntagtggtaannntataaaggggcatgt

SEQ ID NO: 31243 - DNA, 393 bp, Gossypium hirsutum
  Clone ID: LIB3148-047-Q1-K1-H6
gaaccctgggtagggagctgctgagcgaaagcaagctgaacgatcttctgcatggatcagaatatgttctcacttatgaggataaagatggtgattggatgcttgtgggtgatgtcccatgggagatgtttactgatacctgcaaaaggctgaggatcatgaaaagctctgatgctattggactcgctccaagggccgtggaaaaatgccggaaccggaactagctagtttaatacatgatttttgctatccgaagcagttctttctgaagaaataagaggatgttggagcgggcaggagatcacagggtatctgttttcacatggtgctactttttatcttctatttgcattggaatttatatcatgtacgcttgtttttatctactaaaat

SEQ ID NO: 31244 - DNA, 302 bp, Gossypium hirsutum
  unsure (1)..(302): unsure at all n locations; Clone ID: LIB3148-047-Q1-K1-H7
ctttttaaaaaatttacagagcccaccttctcattttttcttcttttcctctgctaggttgtcaaagcctagcttgcgccgaaataaaaagaaacaaaataggttttcaatctttctctgctagggcaaaagagttagcccatccttgcagctgctccgttgtgcgcacaccaacgatggcggccggaaaaaaaatcaacggtaagggtattccctccctttttctttttgattttcgaatgtaattntnnanaaaaaaaaaaataaatataatataaataaaaaaaaattaataattatat

SEQ ID NO: 31245 - DNA, 278 bp, Gossypium hirsutum
  Clone ID: LIB3148-047-Q1-K1-H8
cttgatcaatgcaccagaatatcacattaattgtcggagcaattacaattaattgtatatggatttaatttttggattcagaaaaaaaaaaaaaaaaaaaaaaaaagaaaaaaaaaaaaaaaaaaaaaaaaaaaaaaaaaaggagcaaacaaaaaaaaaaaataaaaaataaaaaaaaaaaaggggcaccctactggacgttaaaaaacaacgtcaatgttaaaaaaaaggccggggcttaacaaaataaacccatagaaaaacctccggttttcaaa

SEQ ID NO: 31246 - DNA, 346 bp, Gossypium hirsutum
  Clone ID: LIB3148-048-Q1-K1-A10
ggagaaaccagaaagaacggaatatatataaataaaatccacactcaaatgtaacaaaccaatgccgaagacatgaaaattccaaaacccatctctccttttaggctttcatctcttcttcgcacccaaaaagacccaaccctagccttcaaccttgtcaaaaacccaaacccagacctccgtcctatgacctcatcatcaccaagctcggtcgcgtcaaaatgttccaagaaatggaacaagttcttcaccaactcaaaagcgacacgcgcatagtcccagaggagatcattttttgcaatgtcatcaagttttatggtcgggccaagttacacgaacgtgcact

SEQ ID NO: 31247 - DNA, 204 bp, Gossypium hirsutum
  Clone ID: LIB3148-048-Q1-K1-A11
gccaataataatcgctgattcaccagtacccaccgtgtgggacaatcaaatctcgtgttggatagttctgtattgcatgtctgatttgaatattttatcacattattattattattattatttttgcataagctctgtaattccattaaaccagatgcaattttgtggggttggaaataaatgcatcaaattttcattgataag

SEQ ID NO: 31248 - DNA, 203 bp, Gossypium hirsutum
  Clone ID: LIB3148-048-Q1-K1-A12
attagattttccggtgccgccaccgccatggtctcatcctggtcatcattcttcatgcagttgttaaaataagtgtatcccatttttttatatacaaagaagaaataatgaattttatcgtttattaaaaacgagaagttagtgttttatttggatttgtaaaaatttgaactttttcataaaatacaagaattagatttgac

SEQ ID NO: 31249 - DNA, 396 bp, Gossypium hirsutum
  unsure (1)..(396): unsure at all n locations; Clone ID: LIB3148-048-Q1-K1-A2
ccacccttgtcaaataatggcagatgcactcactattattgaacatatcggtcagttggaaggaacgaaggttgtctatgtcggggatggaaacaacattgttcactcttggttgttgctggcttctgttgttcctttccactttgtctgtgcctgccctaaaggttttgagcctgataaggagactgttgagaaggcacaaaaagctgggatcagcaagatcgagatcacaaatgatccaaaggaagctgttaaaggtgctgatattgtgtattcagatgtctgggctagtatggggcagaaggaagaagctgcccatcgtcgccaagtgtttcaaggatttcaagttgatgaaactcttatgaagatagcangcccaaaagcttatttcatgca

SEQ ID NO: 31250 - DNA, 364 bp, Gossypium hirsutum
  Clone ID: LIB3148-048-Q1-K1-A3
accacgcgtccgaataaatcccactgttgtttctaaaattttcatttacaagtttaatggcaaggaatgaccggcggcaatgttgaaatggggtgccattatatgccaattaaaaaaaaaaaaaaaaaaaaaaaaaaaaaaaaaaaaaaaaaaaaaaaaaaaaaaaaaaaaaaaaaaaaaaaaaaaaaaaaaaaaaaaaaaaaaaaaaaaaaaaaaaaaaaaaaaaaaaaaaaaaaaaaaaaaaatcaaaaataacaaaaaaaaaaattaataaaaataaaaaaatatatgggggggggcctttataaaaaaaaaaaagtatttaattcccttgcttaaaaataaaattttttttattggggcc

SEQ ID NO: 31251 - DNA, 240 bp, Gossypium hirsutum
  unsure (1)..(240): unsure at all n locations; Clone ID: LIB3148-048-Q1-K1-A4
ggccgacccgcgcgtccgcccacgcgtccgatgaattgcagatgtcggtctttgagactgttgcaaattgcaacacttagaacagttgtatggtaggtattctttaataaagaacatattgattgttgtcaaagatgtaagaaaaccgaaagatgaatcggagtgtttaggaaggcttgattataatcttcatagtttttcattctattacactngttaatgaacatgcaatnttaattg

SEQ ID NO: 31252 - DNA, 363 bp, Gossypium hirsutum
  Clone ID: LIB3148-048-Q1-K1-A5
gggatctgcagcttatgcacctgaaaatgatgcattaatgtggaaaataagatcttttcctggtggaaaggagtatatgttgagggccgagtttactcttcctagcataacagatgaagaggcaactccagagagaaaagctcctattcgtgtgaagtttgaaattccatattttaccgtttctgggatacaggttcgatatctgaagatcattgaaaaaagtggctaccaggctcttccatgggtacgatatattacaatggcaggcgagtatgaactaagacttatttagtgccagttcctttaatattgagagatccagttcaccgcatttttcgagagttagaatggacataaggatac

SEQ ID NO: 31253 - DNA, 273 bp, Gossypium hirsutum
  unsure (1)..(273): unsure at all n locations; Clone ID: LIB3148-048-Q1-K1-A6
gataattgaatgatgtttagtaaacctaaactgttgaaatcaagagggtctaattccccggtgaaatatatatatctatgtgatacgcttgctcgcgcgcacatatatatatattactgagatacatcagcaggttgggacttgtatggggaaattaaaaatatatatttggaattacatgggtactgtttctactaattttatattctcatgtttggttaatgtactagtggttgccttttgcctttgtttagttggagaagttatgangtt

SEQ ID NO: 31254 - DNA, 400 bp, Gossypium hirsutum
  Clone ID: LIB3148-048-Q1-K1-A7
ctcaaaatctcaaaagcttatgtgttcaagtaagataagctgtttcagttgccatcggcttgtcgattgaagaacgctagcgtcagtgattgcccaaagcttcttgggttatctccgagctcaccagacgccgtcatcttcaccaactcctcctctaaagcaacgacacccagtacttcagcaaccaccgcaacgccgtcttccgcggcggataaaaccgatagcatatccagtggaaccaagcttggtcccactttgtcggttcacgggggcgctactggttctacaaccggcctggtttttccttgttttccaagcgggattggtttaataagttaagggttttgccttggaatttgagaattggggggttatttattggtgaaggtctttttgtttt

SEQ ID NO: 31255 - DNA, 311 bp, Gossypium hirsutum
  unsure (1)..(311): unsure at all n locations; Clone ID: LIB3148-048-Q1-K1-A8
gctaatatggatttcacggtcaacattcctaaaggtgtgcaggttgattgggaagccattgtgaacttcgatgctaactccttcatggattcagttaagagttggctgtatccatccctaaagatttcgtcatcgtggaaagattttcccgatgtaacctcaacttttgcaacgacgggatcggttgtcgccgctctgagctcatatgatgattgaattattcttcttaacgtaaacagaattactgccagcgcaaatgtaatatctgcagttgctattttattggagtggatntttttcctgcatgtcgt

SEQ ID NO: 31256 - DNA, 415 bp, Gossypium hirsutum
  Clone ID: LIB3148-048-Q1-K1-B1
gcgctctttacatactggacctagccctccttaaaaacacaatattcttgttagttgtttgtgtgaaaattatgttgcaaaactgaaatccccttttcttaaaaaaaaaaaaaaaaaaaaaaaaaaaaaaaaaaaaaaaaaaaaaaaaaaaaaaaaaaaaaaaaaaaaaaaaaaaaaaaaaaaaaaaaaaaaaaaaaaaaaaaaaaaaaaaaaaaaaaaaaaaaaaaaaaaaaaaaaaaaaaaaaaaaaaggggggggccctttaaaagaaccaaagtttacgtcccggggattgcagaggaaaattttttttttggggcccccaaaaaaaaataaccgggccggggtttaaaaacgggggaaggggaaaaacccggggttacccaaaataaattgctttgaaaaaatccccttt

SEQ ID NO: 31257 - DNA, 237 bp, Gossypium hirsutum
  Clone ID: LIB3148-048-Q1-K1-B10
gacattcagaagctcctcgcgacatgaatcttgaggtcacagtgacttgaaccgcttctgcttgcaatgaaaataagtagatagatagtacaagtagatgtcaggaaaagaagatggaacggtgttttcggctatatgtctgatatggacttttttgttttctgttttccatggtcatggtctgcattatctgatcaaatttcccttttcaacagttatacaaagttgtttactttg

SEQ ID NO: 31258 - DNA, 402 bp, Gossypium hirsutum
  Clone ID: LIB3148-048-Q1-K1-B11
acgaagtcgaactgtttcacacagcagccatggtgaagtattcaagagaaccggacaaccctactaaatcttgcaaagctaggggttctgatcttcgtgttcattttaagaatacacgagaaactgcattcgcaatccgaaagctacctttgacaaaggcaaaaaggtacttggaggatgttattgcccataagcaagcaattccattccgccgcttctgtggaggagttgggcgaaccgcacaggctaagaatcgacattctaatggacaaggccgctggcccgtgaaatctgcaaaattcattctcgatttgctcaagaatgccgagagcaatgctgaggtaaaaggtttggatgtagactcacttatcatatctcacatccaagttgaccaagcacaga

SEQ ID NO: 31259 - DNA, 385 bp, Gossypium hirsutum
  Clone ID: LIB3148-048-Q1-K1-B12
attattacattttcattagcctcaagagaagaaaaaaaaatgtcatcgaattcaatgtctgcttcatggacagccaagcaaaacaaagatttcgaaagggctttagctgtttacgacaaggacacaccagatcgttggtacaatgttgctaaagctgtgggagggaaaactgttgaggaagtgaagaagcactatgagcttcttctggaagatgttagacacatcgagtcgggtcgggttcctttccccgactattggaccgttaccgggaatcgtcaagcatgaaagattccgaagctcaaatgaagaagaaaaaatggtggacttgcatggatctcacccttatatgtgtgtgtgtgtgtgtggcagtaattgtagtacttaa

SEQ ID NO: 31260 - DNA, 334 bp, Gossypium hirsutum
  Clone ID: LIB3148-048-Q1-K1-B2
acccttccaatcactcctaaccggagattgacctatattgtttctccttcggtctacagtcagccaggggtgtgcgagtggagttccattccacatgatcaaaatgactactgtattatcggaaactggaccagagaaatcattgcaataaagtcaattgtaaagttgatggccttagattgctcaaaattctgtcattttttggtgctcagttgccacattagccgcatctaaccaattcagtggatagctcagttaataggtttttttttttttttaagatcttcaatttttacatatttcccacttttgtatataggtaaatatgtaaatg

SEQ ID NO: 31261 - DNA, 342 bp, Gossypium hirsutum
  Clone ID: LIB3148-048-Q1-K1-B3
accggggcgggatcacgcgtgcgacaaatctgctagacctagagaataagatgatcgttgtctatatatgagtttgtatattcattgcactagcactattatgaaaagaagacttcaccgatggttgaatcggaagaggatggcatatatttttcatatccattctggaaatttagatgattgaagctatatagattgtacaaagcagaagtttgggtgtaaattgcttaataacaggtagagttccccaattaggtgaagtctttttgaacttttgagatttttttatgggaagctatatatatatatatatgtaaatatgcagcaaagttttggactgtt

SEQ ID NO: 31262 - DNA, 184 bp, Gossypium hirsutum
  Clone ID: LIB3148-048-Q1-K1-B4
gccattaatgtatttaggaagaggaagaatagcttaatgtgtgatcattgtttcctcttttgttggtgtttttaattgaggaaggaatgttattgtaatatatatatatataattatgtagcatatgaagtgtttttattttgagaaaatcaatagaacaataatgctaaagttggaggccccc

SEQ ID NO: 31263 - DNA, 321 bp, Gossypium hirsutum
  Clone ID: LIB3148-048-Q1-K1-B5
gtggaaagcggatctttctccttccacagtgttatgctgagaaacaagctctcggggaagtgaggccggatctgctggacacccaggtgaacccagctgtgtgggaaattagtgggcatatggtgttaaaaaggaggaaggactatgatgaggcgtctgatgaaaatgcttggaggctcctggctgaggtttctctctctgatgagaggttccgggaagtgaatgcactcatctttgaagtcattgccagtggcgaagatggcattgaacatgatgctaagagtctgcctaaagagcccgatcctaaagctgaatccactg

SEQ ID NO: 31264 - DNA, 101 bp, Gossypium hirsutum
  Clone ID: LIB3148-048-Q1-K1-B6
ggaaaacccgggccgaccgacgcgtccgcccacgcgtccgcccactcgttcgaaaaatatatttaaaaaaaaaaaaaaaaaaaaaaaaagaaaggggtctt

SEQ ID NO: 31265 - DNA, 369 bp, Gossypium hirsutum
  Clone ID: LIB3148-048-Q1-K1-B7
aattttaacaaaacaggaatgagacctgttgtaactacagcttgggttgtaacagttggggctataaagaaaacactttctcgacttctcatactttcagtttctatgggctatggtgtcgtacgcccaactttaggtggtcttacctcgaaggtgcttcttattggagctacgtattttgtggcatctgaattgcttgacattactgagcacgtagggaccatcaatgacgtatcaggaagagcaagactcttcctaggccttcccgatgcattccttgatgcatttttgatattgtggattcttacatctctttccaaaacactagagcagttacaggcaaagagaatatcagtgaagttggacatc

SEQ ID NO: 31266 - DNA, 409 bp, Gossypium hirsutum
  Clone ID: LIB3148-048-Q1-K1-B8
ggatattccatcatatgtatgggatatgactgacaaaggagccggtgggatgattgtggactcaggtactaccgtaacgcatctggtggaacaggcgttcgataaagtcattgctgctttcgaaccttctttaagcatgtataacaagacgaaaggtaatttggattattgcttcaatgctccaccagctgaaatttttgatgagagtatcattccccgagtggccatccatttcgaggggggagctaagctcgagccggcggtcgacggttatatcttcgacgattctaaaggagtgaaatgccttgggtttgttagggtagcttggcctgaaatgaacataatgggcaacctcttaatgcaaaatcatttgtgggaatttgatctcgcaaacaaaaaggtgggtttc

SEQ ID NO: 31267 - DNA, 385 bp, Gossypium hirsutum
  unsure (1)..(385): unsure at all n locations; Clone ID: LIB3148-048-Q1-K1-B9
cccacgcgtccgcaaaatctaccctgtttcaaaagaactctttgctttgagttacgatgtggtccaaaagcctgacttgaggtatttcaagttctcaccggacggtaaaaaatcacccgacgtcgaaattcccttgcccgtacctaccgcatcaataatttagttaattaaataacatacatagtgcagtcaaaaggtaattaactgggggaattctattccctctttacatcattccattctgacggttgctacgtcacctgcttccacttccaccttttatattttctgaattgattttgntccangagaaaagaaaggaaactcggactgaaatgaacataatgggcaaacttttaaatgtaaaaatcatttgtggcaattt

SEQ ID NO: 31268 - DNA, 432 bp, Gossypium hirsutum
  Clone ID: LIB3148-048-Q1-K1-C1
cccggcgtgcggacaaagaagctcagagcaaagtaaaaatcctttagaacccagaaattttttctcaatgttacccaaagttgagttcaaatgcccttcctttgaccaacaatcggaaaaaccagatgcttcggttgaaaaagaggagcaaattgaaattgcgaaaccaccatctgttttcatgggaaaccgccggaaaaatcctccgccgttggaattcgaggcggaggagtgccttgggagaacttctaatcctatagttctctggcaggtatatgccattggtggtttctttttactgaaatggatttgggcaagatggaacgagaggaaagagatgggatccaagaaggaagcgtcggacgatgacgaacagccacctgctgtggatgactcccaatatgtgtgattctctttcgatttttggtttac

SEQ ID NO: 31269 - DNA, 411 bp, Gossypium hirsutum
  unsure (1)..(411): unsure at all n locations; Clone ID: LIB3148-048-Q1-K1-C10
gtctgccaggcctacacactcaaacgtatccgtgacccaaattacaatgtgaagttgcgggcacatatctctaaagagatcatggaatcaagcaaacctgctgatgaacttgtgaaactgaacccaacaagcgagtatgcccctggtttggaggacaccctcatcttgaccatgaagggtattgctgccggcatgcaaaacaccggttaaaccaccgacatgctacacaaggtgtgcttaaagttttttaaatccagagaagatgaattattcatcaaagacagatgtcatttcggcgaaaacctttcttatgggtaaacaaaagaggcggatatatatataaatgctctntaaagctgtatgattatgctgttatgnctttaagactcngtttattatatatatatatgt

SEQ ID NO: 31270 - DNA, 172 bp, Gossypium hirsutum
  Clone ID: LIB3148-048-Q1-K1-C11
ttttttttttgtggtttttggatttgaatgacatttctgttatattattatcttatgttgtttggagttgatcttgaaatgagattttcaatttattttggtcaattatatatcaagtttgcgacgatttgggttaaaaaaaaaaaaagaaaaaaaaatttatttttataat

SEQ ID NO: 31271 - DNA, 421 bp, Gossypium hirsutum
  Clone ID: LIB3148-048-Q1-K1-C12
gagtgccataacggtttgaacgcatatgattttggtttagatattggggcttatgaccagaaagataccagtgacgagaaaaaccttggggaatatatagcgataaaacattccgcaaagaactctgacacgtccttaatggattcttgttcatttgcttcacaagacattagcttgtcaagcatcggctctctatcccttgcagacaaggacaagttggaagagatgaaatcggagcttgatgcaatagattcacagtaccagcaatgtttccaagagctcttaaggatgagagaagaagcaatggaaagcgccaggaagaggtggatatcaaagaagaaagtatctgtgatgtgatgtacaatatcttttacttgctaaccatcaaagtttttctcctcttcccttagcttatgatagt

SEQ ID NO: 31272 - DNA, 82 bp, Gossypium hirsutum
  Clone ID: LIB3148-048-Q1-K1-C3
cgcgtccgcccacgcgtccgagtactttctgtatcacaagggtctggcgataaatttattagtatttgaagtaacttgtcag

SEQ ID NO: 31273 - DNA, 416 bp, Gossypium hirsutum
  Clone ID: LIB3148-048-Q1-K1-C4
aggaaatgttcaggcgagttagcgaacaatttaccgctatgttcaggaggaaagcttttgtgcgttggtacaccggtgaaggtatggacgagatggagttcaccgaggctgagagcaacatgaacgatctcgtgtccgagtatcaacaataccaggacgctaccgctgacgaggaaggcgaatatgaggatgaggaagatttggatgaagaacacatgtgatgaaagcgaaaaccaaacgaagttgtcggtaatgcagcatatacaggtatgtgattcgagtggatttgtatgtaatgagtaatgaaagtgtcttttccctatttttccctttcacgaagttgctttttttggtttctatttgagagagtaatgtataatatatccgaaaatagtatgtaatacctatatctatgt

SEQ ID NO: 31274 - DNA, 258 bp, Gossypium hirsutum
  Clone ID: LIB3148-048-Q1-K1-C5
gcagaggctgcttaagaagatgagcgaacaacaaagtcttagctcggtctaatgatggatgggggtggactttgtgcgtaattgaagaccttctagtaattatcaactcagtagattcattatttttctccaattctgttctttaaatgcattgctagactgtcatgatgaatgcaaaatatgtaagtgaccccacaaggcaatgttcttgatgccaaaacctaccttgagaaaattaatatgcaagagttcttaagc

SEQ ID NO: 31275 - DNA, 270 bp, Gossypium hirsutum
  Clone ID: LIB3148-048-Q1-K1-C7
aaaaaaataaaaaaaaattatataaaaaaatttaaaaaaaaaaaaaaaaaaggaataaaaaagggaaagatttaaagggcataagtggaaaaaaaaaaaaggttttctattttaaagatttctaaattttacttcccgtgttttttacattatatttttttttttaaccctcttttttccaatttattgcccgtcgttttacatcctcttttttgtaaaaaccttttttttaacaaatttatttctctttgtgcttatctcctttttccc

SEQ ID NO: 31276 - DNA, 349 bp, Gossypium hirsutum
  Clone ID: LIB3148-048-Q1-K1-C8
gaaggatatgtgcttaagcacgtgtgttttaggtgaaaggttcgagggttggtattccagaagaaaaaaaaagaaaaaaaaaaggacaaaaaaaaataaaaaaaaaaaaaaaaacgtgcgcgttcatgcaaaaacaataactaataaatagtgcaaccaaaatacaaactactggccattgatagacaaattcatttacatggaaaaccctgaaaaaacccaacttaatcaaaatccatgacatacccatcttgacacgcttttgtaaaaatgaagaattccgaaactgtcgtcattacaaacaggtgcgcacccaaaatccataactaaacgcgccctgtctcaatgc

SEQ ID NO: 31277 - DNA, 301 bp, Gossypium hirsutum
  unsure (1)..(301): unsure at all n locations; Clone ID: LIB3148-048-Q1-K1-C9
cgagcttgaagattaaatgaaatcagatattatcgtctctttttctccttggatatttttgcagtgggtgaattggggggggggggagtgtttttggtggcaactgcgagctatttagctgcaggtttttgtgaactgtggatttgagattgtataacacccacgtctacaatctgataattaatctaaacataccccaaattaatgtttgtttgcatgaacatgatccccttcagttccaaattgatgaatggattggatttgttttcttttcgaagcannnnantntaaaaaaaattaa

SEQ ID NO: 31278 - DNA, 259 bp, Gossypium hirsutum
  Clone ID: LIB3148-048-Q1-K1-D10
gtttgattggagcaatatttcctttgcgttaactggattggactggagtgagatgcaaggttatggatggttttaagtggtgatggtggtagactagcatattttgcttgtacaaatatgagttcactgtaatatgctatgaattgaaggtatcaacactcatatgatggatggatgattattgcttattagtaaatctgttgtgtttgggttcaaaaaactggtttccgttcttcaaaagaaaaaaattattggtttc

SEQ ID NO: 31279 - DNA, 420 bp, Gossypium hirsutum
  Clone ID: LIB3148-048-Q1-K1-D11
cccacgcgtccgactaaacgaacagtcatgtaatcccggtttcgtgccaaagcgcatttgctgtaacatgtcatcgaatggaagaaaggctaacatactctaacacagaacaggatatggttttgttgcaccatgaagtggaagtagatttccctgatagcaaacagaccgagcgccataccgcgactttactggaattcgggaaggctaagaatggaaaaatgatatctgctatggcccttactgttggcgttccagtagcaattggagctctgcttttaattgtaaacaagatcaaaacaagaggtgtattgaggcctattgttcctgaagtttatctaccagctttggaaattgctcaagcctatggtatcaaactgatggagaaaaccgagtgaccaccatttctcaagatatcta

SEQ ID NO: 31280 - DNA, 358 bp, Gossypium hirsutum
  unsure (1)..(358): unsure at all n locations; Clone ID: LIB3148-048-Q1-K1-D12
gattccaagtgataatttagaactggtcctggcttgaattgttgtcgaacatcataattgataacgatgcattgatgcctgttatatacacctgcttatactttcacgagttttgcaggattaaaaaaaacactcgtaatgtcacattgcgatagttatttcatggtttacatcgatattcagtgtggacagtggtagcatcatttgtgctttcggcgatgagcgccacgcttcggggttgcaatttaaaatctccttggtggcaaagctaagaatttattcccaaannaaaaaaannaaaaaaaaaaaaaaaaaaaaaaaaaaaaaataaaanaaaaaaaaaaataaaaaaaaataa

SEQ ID NO: 31281 - DNA, 338 bp, Gossypium hirsutum
  unsure (1)..(338): unsure at all n locations; Clone ID: LIB3148-048-Q1-K1-D2
cgtccgcccacgcgtccgnaaaaaaaaaaaaaaataatataaaaaattataaaggaaaaaaaaaaaaggggaaaaaaaggaaggaaaaaagggaaaaaaaaaaaaaaaaaaaaaaaaaaaaaaaaaaaaaaaaaaaaaaaaaaaaaaaaaaaaaaagggcgggggggccaaaaaaaaaaacttaatttaccctcccttgcaaccaaaaaaaatctttttttttttaccttaattaaaatcaaatgcccggtctttcaaataaaacctcttggaaaaaaaaaccctttcccaaaccaaattaaattgcaaaaaaacacactcccttatacgtggtatat

SEQ ID NO: 31282 - DNA, 441 bp, Gossypium hirsutum
  unsure (1)..(441): unsure at all n locations; Clone ID: LIB3148-048-Q1-K1-D3
ccggggcggaccaagccgnccgaccaatgtacacaaatggagtccccagctgttgtttaggtttctcaccagctattgaacgcattttccgtcgggctgctgaagggctaagtgaaattataccagaagagccagagctttttgaagacccctgttatgttcctgatccggtatccttgcttgggcctgtttctgagtcgcttgataattttcagttggacttgggtgctgggtttgggatggacgtgggaacggaaaggccttgtggtttgaagaatatatctgcttcttctgaaattaacaagccctcacctattgaatccccattgtcaaggtcacgttgtgctaccccaaaggccccaagatcttcaaactttttctgtggatgatactaattgcaatgagaaaaggacgtggcaaatgtggagcagttcttccctt

SEQ ID NO: 31283 - DNA, 329 bp, Gossypium hirsutum
  Clone ID: LIB3148-048-Q1-K1-D4
caaaaaaacactggaaattggggttttcacaggctattcccttcttactactgcccttacattgcctgaggatggcaaggttatagcaattgaccctgataaagaagcatatgagggtgaagaagggagcttcgatttcgtatttgtagatgcatacaaaagcgactacctaaaatttcacgagctgacgctaaaattagtaaaggtcggaggaattgtagcttacgacaacacgttatggtatggatcagttgcgcaatcggagaaagaagtggtggaggatctcattaagaggtaccgaaattttgtgatcgaattcaatagcttta

SEQ ID NO: 31284 - DNA, 199 bp, Gossypium hirsutum
  unsure (1)..(199): unsure at all n locations; Clone ID: LIB3148-048-Q1-K1-D5
gtgctctttgtaccatctctgttgtaaatatttatttaaaaaaaaaaaaaaaaaaaaaaaaggaaggataaaaaagaaaggagggaggacaaaaaaaaaaaaaaaaaaaaaaaaaacacaaacaaaaaaaaaaaaaaaataataaatataaaaacctaaataaaaaatcnggggcccccccttttaaaaaaacaaaatt

SEQ ID NO: 31285 - DNA, 359 bp, Gossypium hirsutum
  Clone ID: LIB3148-048-Q1-K1-D6
gatgaatgctgtctgcggaaactgctaaagctatttgttcgacatcctgcaatttgcatgtgatgtcatattatcacactgaagcttttgatgatcgattcaatggtgttggaatagtttggtgcggcaatgtaacacgctaaagagtggatcaaggtgcacaatctctggtccgtatagcatgtggtgtattatttatatgttggggtttgtaatttacaccatttctttttggagttaactgctttgttgtatgtttcattcacatcatacacatgatcgatttatttgtagaatatccttggaacaagtttatagcattgtattcaggaacatctctgagaaattatagtgatata

SEQ ID NO: 31286 - DNA, 167 bp, Gossypium hirsutum
  unsure (1)..(167): unsure at all n locations; Clone ID: LIB3148-048-Q1-K1-D7
cccacgcgtccgggatgatgtaaaatacctaataatgtttgtgtnaaaaaagaaaaaaaaaggaaaaataaaaggaaaaaaaagaaaaaaaaaaaaaaaaaaaaaaaaataaaaaaataacgtacgcatgcataaaaaaaaaaaaaataaagggtgggggcatctaa

SEQ ID NO: 31287 - DNA, 353 bp, Gossypium hirsutum
  Clone ID: LIB3148-048-Q1-K1-D9
agccactcttttcttcattctggtgagagtgaagaagaaaatcctaagaggccaaatatgcgagctggtcacggtttacgtgctctaacaagggatttgttcgccagaccctttagaaagaagggttacattcccttgtctacttacctcaggacctacaagatcggcgactacgtcgacgtcaaggtaaacggtgccgttcacaagggtatgccccacaagttctaccatggtcgtactggtcgagtttggaatgtcacaaaacgtgccatcggtgtctaagtcaacaagcatgtgggaaacaggattatcaggaagaggattcatgtacgtgttgagcatgtccagtcttc

SEQ ID NO: 31288 - DNA, 275 bp, Gossypium hirsutum
  unsure (1)..(275): unsure at all n locations; Clone ID: LIB3148-048-Q1-K1-E1
ccaagccggcggccaacccttccgcccacccgtccgcctggagacaacttgtatatgtgtgtcatgtcatctaatcttgagcctggctagatacggtatattaatgtttgaatatgtgtcgttttccttcttttcttccttactcccagntcgaatttcctacgatctgaagctcattatagatttgatgcatcgtagacatcctgttttaagctatatttttcgtgccatgttatttggccaccacatatttaataaatcttggggatacatnt

SEQ ID NO: 31289 - DNA, 420 bp, Gossypium hirsutum
  Clone ID: LIB3148-048-Q1-K1-E12
gacggcgcaaagtttgtggatcctgaggatcaaaatggactatgctctcctttgaaggtggaaatgcttcacccattgcgtgtcatcatcgcaaaccgtgggcctgatacagaacttctggttgctaatccagttgagttatctggaaaggggagaccaagagttttctatgatgttacactagctctaaaggctcttggaatttgcatattctcggctgaaatcggaagatattcgagttcagatcgagaatgggaagtctacagattccttttggacgagaactgcggattccaattatcgagtacgttagctagaaatcagattgtagatagagttagaagaatgctgatgggttggtgagtccagtcaatcttctttgtacatgtcttatgagtccctccataaaaaatgatattt

SEQ ID NO: 31290 - DNA, 274 bp, Gossypium hirsutum
  Clone ID: LIB3148-048-Q1-K1-E2
gccagacggttctatgccagccgactggcggtagagctagactcactgagggctgctcttgtaggaaaaagggtgactaaatgcgatccagcggcgacgagtcgaggaagagttgtttttttgtatggtcccactctggttatctttttgatgtggtaaaatttgtctcaaatcttggaagtagaattaaggattttagaatgactattatgtgctattgttcttgatttagtgtggatggtttttgggtttaatgaattttgttttgagttgc

SEQ ID NO: 31291 - DNA, 357 bp, Gossypium hirsutum
  unsure (1)..(357): unsure at all n locations; Clone ID: LIB3148-048-Q1-K1-E3
catcatttccaaattttgatgattttcctctttttttattttatttttatttaaaatttggaactgctaacattattacattgtcattagccttaagagaagaaaaaaaaaatgtcatcgatttcaatgtctggttcatggacagccaagcaaaacaaagatttcgaaagggctttagctgtttacgacaaggacacaccagatcgttggtacaatgttgctaaagctgtgggagagaaaactgttgaggaagtgaagaagcactatgagcttcttcttgaagatgttagacgcatcgagtcgggtcgggttcctttccccgactattggacnncgtaccgggaatcgtcaagcatg

SEQ ID NO: 31292 - DNA, 429 bp, Gossypium hirsutum
  Clone ID: LIB3148-048-Q1-K1-E5
cccacgcgtccgggtcagcatagttcatttcagcaagagggatctgtaatattcactgagcaacctcattctgagaagttcccactctccagcatagctctctatggagaagtcccttcgaagcccagatgctcttctaggtgagaaaaggtaacagatctacatgtgactctaaactctcgacacacagtaggatgatgcagtaccaggagcgccgaacagatctagacagaaaacaataaaaccagaataaaacctaaagacgcataccagaggcggcagacagaaacgtgctagggtagcagactttaccattagtctacaactatatttaaaaacaggcttaatgcacattttagttattgaagtatactacttttttcactttagtccttacaatttcttttagtccactttaatatttaacgt

SEQ ID NO: 31293 - DNA, 264 bp, Gossypium hirsutum
  Clone ID: LIB3148-048-Q1-K1-E6
ccattttatcatttggtttggtctctcgccggcactcggcagagaaacaaaaagcaaaacaaaaagaaaaataaggaaagaaaagaaaaataagaagaaaatataaaatatctcttcttgatttggagctctgcatttgggtacgatcaaacatatggtgcaaaaaaaagaaaaacacggggcggcacatatcaaagatcccagattacttactcgtagcacccgacctcacacatcttctatagacgccacctaaattcaatc

SEQ ID NO: 31294 - DNA, 401 bp, Gossypium hirsutum
  Clone ID: LIB3148-048-Q1-K1-E7
ggatttttaaagaaaatacaattacaggtgttgggtaagttttgcaggctgcacgattccgactagaaagggggagaaacagttgaagaaaattcccctttgtcgtataaattggagaaacaaacaaataaggggccttatatttgtggacataattagtttggtcctctaatgcatatgcggaagtgatgcttctgcttgtatttggtgttatggagaggcactgtcgctgttataaattaagttataaacactattatgtgcatgaaattattgaaaaaaaaaaaataaaaaaaattttttaatttaaattttatttttattttttattatttattttttttttatttttttattattttttatttattttttatatttatttttttattttttttttt

SEQ ID NO: 31295 - DNA, 327 bp, Gossypium hirsutum
  unsure (1)..(327): unsure at all n locations; Clone ID: LIB3148-048-Q1-K1-E8
cccacgcgtccgcatcattgtactgtctgtttgtcacggcttcaaatgttcatgaattggatgtccgctctacattccatcggcaactcccagatcagaattattgcaatcacaagtaatgtctaatgcttcttctagttagatttcttttctttttttgtgaaattacatgtgggtcatgtataaccatatcagaagactgcatttagaatataagtttgtgtttctggatcccannanaaaaaaaaaaaaaataaataattaataaataataaaaataaatttttaaatattatttttttttttattatataattaattttattt

SEQ ID NO: 31296 - DNA, 170 bp, Gossypium hirsutum
  unsure (1)..(170): unsure at all n locations; Clone ID: LIB3148-048-Q1-K1-E9
cccacgcgtccgctcttctttttgtagacagccatggctttagcgttttggtgttcctccggaatgttcaagtggtgtataattcatgggcaaatatatagcaagcttggtttcgtnaaaaaaaaaaaaaaaaaaaaaaaaaaaaaaaaaaaaaaaaaaatttaaaattt

SEQ ID NO: 31297 - DNA, 115 bp, Gossypium hirsutum
  unsure (1)..(115): unsure at all n locations; Clone ID: LIB3148-048-Q1-K1-F1
agccttcggccaacccttccgccaacccttccggtggacctggtggtggccctggaggcggtgctggtggtgggttttggagggtggnaaaggtggganggataggangtggggt

SEQ ID NO: 31298 - DNA, 322 bp, Gossypium hirsutum
  Clone ID: LIB3148-048-Q1-K1-F10
cccacgcgtccgcccacgcgtccgccaagtactggctcttcatgcactttttctcaatggataaatacgctcttgatgcgcttcttatcaatgagtattcttgcctggtgtcaaggtgttttctttggtacaatgaaaccagcacttgcatggtaacaggagctgatgtattacaaaagaaaggcctccatgagagacaaagatggacaaacatctacatcttagttgggttctttgtgttctatcgtctcctttgtttgctagttttgattagaagggtttcaagatcaaagaaatgaagaaattaagtttcaattgtcac

SEQ ID NO: 31299 - DNA, 424 bp, Gossypium hirsutum
  Clone ID: LIB3148-048-Q1-K1-F12
cccacgcgtccgcgtaaatcatggtcttcttctctggaatcgaactaggcagcagtgggggggaaacaagaagtctgaaaatcggcctcaaaaggttcgggaacccaaactgagttggaatgcgagttacgaaagtttacttggaaacaacaaaccattccctcaacctattcctctccctgaaatgatcgattttctggtcgacatctgggaacaggaaggattatatgactgagcaaacagtacagcaaagcacattcgggaaaaaaaaaaaagggggttagatattaatacccttattgttgtaacattttactagcttcattatgaaaaaggcattagagcataataaactggcatgtatgtcgaccggaacggtcttggtcttgtctgtccgtggcttgctcatttttcactttttttt

SEQ ID NO: 31300 - DNA, 207 bp, Gossypium hirsutum
  Clone ID: LIB3148-048-Q1-K1-F2
gtccgcttcaatgtacgttttatacccatgttagacctgtttgggacttctcaaatgcacttgcatatcctgggatgatactctatatggtgttagacatgtatactgtctgaaattgcccaaatccaaaatggtgtttatgctttgtgcaacagtcacctatttccgtaggcaatcatagtatatacattagtagcctttcaagct

SEQ ID NO: 31301 - DNA, 367 bp, Gossypium hirsutum
  Clone ID: LIB3148-048-Q1-K1-F3
gtccggtcagtattgtagatcattaagatggagaagaaaggttttgtcagattgatgctacttttgctgggtttttcttatcttcttctttcctgtgctgctgttcccagtactagaagcctcaaatcaaacaaggaactcccttcttctgtccaagatttacttgctcaggatgtaatggaattgagttatggagaggaagtgatagcggaaggtgacggattcaatggggaaaggatgttaatggaaagcactgattatccagggacaggtgcaaacaagaaccatgatcccaaaactccagggagagcttagaaaacattaagatccataacctatttgttttatgtatagcttaagacatgac

SEQ ID NO: 31302 - DNA, 427 bp, Gossypium hirsutum
  Clone ID: LIB3148-048-Q1-K1-F4
gaaaaaagaaaacagagggtctttaccctctctccctctctctgctcatttcggctagggttcttagaaccttcatcgccgccttcaccgcagcgccaccacaggcggtggttggggtgtaaaccgggctttcaagcccctgtttaaggcgaactcaatagcgaaaacttcctcgaccaaagaagatccaaagaaggaaccccctacgacctcttcgggtcgaatccgacgacggaggagcgatctccgacgacggtcacttcgattcggtcatgggagtgtcagacgcgtggaaggccggtgattggcgccccgagcggtggtggcgcgcgtgagaaggctggtggctgaaggcatgcggctaaaaactttggtggccgctgaaatttttttttaacatagtgggcttgggctattagggtttata

SEQ ID NO: 31303 - DNA, 231 bp, Gossypium hirsutum
  unsure (1)..(231): unsure at all n locations; Clone ID: LIB3148-048-Q1-K1-F5
tcgcccacaccttcgggccaaagaaaataaacgtgtttgttggaaaacactgaatttagtaagtgcttggaaaaatattggagtgagtgcttacctacatgtaacctgaccaatggcttaaaaaaaataattttattaaagaaacaaagaaagggagatcttctaaaccttgttgctttttttnnaaaaaaaatttaatataanntatatttttattttttataatataaa

SEQ ID NO: 31304 - DNA, 165 bp, Gossypium hirsutum
  Clone ID: LIB3148-048-Q1-K1-F6
gctcaaaagatggaataagcttttgaaactctgctgggcggcagtgccattaaggcatggaatctggatgccaacagcataaaaagaataagcgtttatcacattaaattgcatgttgtataaaataatatagggatgttgtacacaatggactttgtttaaatc

SEQ ID NO: 31305 - DNA, 417 bp, Gossypium hirsutum
  Clone ID: LIB3148-048-Q1-K1-F7
cacaaatgtcacaaagctggttggctattgttcagagcatggacagcacctacttgtctacgagttccacaaagatggctcactccatgagtttctgcatctatcagatgagtacagcaagccattgatttggaactcccgtgtcaaaattgctttggggactgcacgtgcattagagtacctgcatgaaggttgctcgccatctattgttcataagaatatcaagtcagaaaacatcttacttgacgctgaactcaatcctcacctttcagactcaggcttggcaacctttttttccaaatgcagatcaggtactaaatcatgatgatgttaccatgtctggatacggtgcacccgaagttaccatgtctggtcagtattctcttaagagtgatgtttacagttttggagtggtta

SEQ ID NO: 31306 - DNA, 145 bp, Gossypium hirsutum
  Clone ID: LIB3148-048-Q1-K1-F8
cgaaactttccgatatcatatacgaaacggtatagcggtgcatgtttcagaataactttagtgcaaagccgagaaccgccggtcggaaaagattgatctcggtggctgtaatatatatatttttatttaataatggtttttgtct

SEQ ID NO: 31307 - DNA, 137 bp, Gossypium hirsutum
  Clone ID: LIB3148-048-Q1-K1-F9
cttgggaatgctagagatcctctatattttataagggtcgttatcacagagggagttcttgcttcagttatattgctatatcgttccatacaatatcataatatgtttacatttgtgctcctaatgaatgatcttac

SEQ ID NO: 31308 - DNA, 300 bp, Gossypium hirsutum
  Clone ID: LIB3148-048-Q1-K1-G10
cccacgcgtccgcccacgcgtccgttgcttccccatgcagtttcttgttattttccaaaaggggtttcagttattggagtacagttggagaacgatgtctctagagctccccttgttgctatttgctggatcttgtttttgggccttttcttcgattttgctttggattacttttgttttaggcttttgtttgtttggttttttagtctgtttgttcagactggtcttttaagactcataaccttatggctttgattttatgttgtcctttttgaataaaatccagcgattatttcttca

SEQ ID NO: 31309 - DNA, 188 bp, Gossypium hirsutum
  Clone ID: LIB3148-048-Q1-K1-G11
cccacgcgtccgtccacgcgtccgtccactcgtccgcccacgcgtccgcccacgcgtccggcagttgttgcatgttggtttccccttttgatgagattttcgtatcttgcagttcggtattttgatttgtaaacgcggcttagatgttgtataacgtcacaataacatatcattcatattggagattt

SEQ ID NO: 31310 - DNA, 413 bp, Gossypium hirsutum
  Clone ID: LIB3148-048-Q1-K1-G12
ggcaagcgtaagctcaggcttgaggcttggttcggctccaggaagactagcgccgccatgcgcaccgctctcagccacgtcgagaacctcatcaccggcgtcaccaagggataccgttacaaaatgaggttcgtctatgctcactttcccatcaacgcctccatcactaatgccaacaagtccatcgagatccgtaatttccttggcgagaagaaggtgcgtaaggtggatatgttggaaggggtttccatagttcgatctgagaaggtgaaggatgagattgttttggatggtaatgatattgaacttgtgtcacgatcagcagctttaataaatcagaaatgccatgtgaagaacaaggatattagaaagttccttgatggtatctatgttagtgagaagggaagaatcgc

SEQ ID NO: 31311 - DNA, 279 bp, Gossypium hirsutum
  unsure (1)..(279): unsure at all n locations; Clone ID: LIB3148-048-Q1-K1-G2
cggggcggcccacgcgtccgaaattaatcagttgcagtggtctgctgctcagcctgattggattgccattgccttctccaacaaaatgcagcttctcaaagtgtgaggttccctgcttgaaatgtattcaactctcatttttgttgcatatactgctcacgcttgtaattaggtgggagttaaaaactgtagaatcagttttattggctgataattttgttagtactttgtaagaccagctttaatctacaattatttgttaggtctcaccccccanna

SEQ ID NO: 31312 - DNA, 383 bp, Gossypium hirsutum
  Clone ID: LIB3148-048-Q1-K1-G3
cggggcggaccaagccgtccgatttctttctgcaaccagcggcacccaaagatgcaaatcttcgtcaaaaccctaacggggaagaccataaccctagaggttgagtcttccgacaccatcgacaatgtcaaagccaagatccaagacaaggaaggcatcccacccgaccaacagcgcctcatctttgccggcaagcagctcgaggacggccgcaccttagccgactacaacatccagaaggaatccaccctccatctcgtgctccgtcttaggggaggtgctaagaagagaaagaagaagacctacaccaagcccaagaagatcaagcacaagaagaagaaggtcaagctcgctgtgctacagttctacaaggtggatgaatc

SEQ ID NO: 31313 - DNA, 363 bp, Gossypium hirsutum
  Clone ID: LIB3148-048-Q1-K1-G4
gtgtatcttaatcggcgttcgttagtaacagtccggtgatgcttggtgtattgtgcgcacgacctcccaagccttggatcctcaactccctatctctgatcgcccacggtggttcagcggctcaccatcacgaaaatcgtttcttgcactggccatcacatttcgccgatttatctgccgctaatcggcgctgccggcaccattcaacggcttgtcggcttggtggcggctcagagggtggtgcagcttctatatggcatgcgattttgccatgcggaggagacagaggagtgaagaatagaggagatgtgtggaagaatgtggagaggaaaggggaaggttcctggaatgtgtcgtgggatg

SEQ ID NO: 31314 - DNA, 314 bp, Gossypium hirsutum
  Clone ID: LIB3148-048-Q1-K1-G5
cccacgcgttcgaaaaataaaataaaaaattttattaaaaaaaaaaaaaaaaaaaaaaaagggaaggaaaaaaaaggaaggaggagaagggaaaaaaaaaaaaaaaaaaaaaaaaaaaaaaaaaaaaaaaaaaaaaaaaaaaacataaaataaaaaaaaataaaaaaaaatggggcttcttgttttataaaaaaaaaattttatttccccctatttaaaaacttttttttttttttttgtgcccccaaattaaaataaattgccggtgttttaaaaaatttttacttgaaaaaacctttgttttcccaatttta

SEQ ID NO: 31315 - DNA, 415 bp, Gossypium hirsutum
  Clone ID: LIB3148-048-Q1-K1-G6
tcttgatataattacagtcagcctatgtgatatgagactaggtaatctttctttgactagcttggattttgagtactgtaatgaagttcgatcagctttgaccagtctgcagggaccatttgttgcaatatatgaggcagtggaaagggagaggagctaaaatcatctgactagcttggtgatggtcactccaattatagactcatttttattcgacattactgtaaaagtagatacattaatgatagttagacattagtgtactatacactggtatttttgtagtcttgtaagaatagggctacaatcttgttttttcgcttgccctttgatcaccattaatgcagggatatctatgatattttttttaacaaaaaaaataaaaaaaaaaaaaaggaaaaaaaaaaaaataaaa

SEQ ID NO: 31316 - DNA, 214 bp, Gossypium hirsutum
  Clone ID: LIB3148-048-Q1-K1-G7
aaaaaaaaaaaaaaaaaatattaaaaaaaattaaaaaaaaaaaaaaaaaaaagaaaaaaaagggaagggaaaaagagaaaaaagaaaaaaaaaaaaaaaaaaaaaggggggggcggctttaaagggtccaaattttcacctacgtgcatttgacgggttattttttttttatggtgacacaaaaaaaaaaaagggggggcggatttaaaaagcg

SEQ ID NO: 31317 - DNA, 420 bp, Gossypium hirsutum
  Clone ID: LIB3148-048-Q1-K1-G8
gttttaggatcccatttccgagcgcaagttgactattttattgagtatttgaagattcagagtgattataagggcataaacatggatcaatggatgggtttttttcggttctgcaatgagtggttaaaatttccagttcttgcaacaacactttctctggcagaaaaaattgaagaatacaaatgataagtttcccggacttcagtagttataatccggaccttgcttggccattgatcctggataatttcgtagagtggatgcagtcgaagcagacctgaaattatttggtttggtcaacttctcagctgtaacctccatctatctatataaaggctggtgctttaaagtttaaactcccccttttctttgctccctttttctagagccttatgtagatttcccgatagggcataaatt

SEQ ID NO: 31318 - DNA, 261 bp, Gossypium hirsutum
  Clone ID: LIB3148-048-Q1-K1-G9
aaattgtgtgccatccgtaatttgtctgttaagggaaataagtggtcccctacctgtagtgatagtttgaatgggagggtggggatattatgtagacttaattttcttagaaaatgcaatggggtgctgggatcattttgtaaaaacataccagtcattgtcataattaaaatagtttcttctattacgtaaatgtgaagtacttgcttattgcaattggcctgtgaaaaaaataaatacagtataattttttatattgga

SEQ ID NO: 31319 - DNA, 388 bp, Gossypium hirsutum
  unsure (1)..(388): unsure at all n locations; Clone ID: LIB3148-048-Q1-K1-H10
gggagattctgagtttatattacatcattcttaattccacgaggatatgttttagatgggttagggttgaacttaatttccctttttaggcatgagtgtgcgttttaaaggatgttggtccaattgttgattgttccctttttatcgtgtgtttttattcctctggaaagatagttgtatacatttatacatgttcaaccgttattccctattcaaggtttggtttcagcaatcattttagggtttaggtgcaaaaacctaagatttgctccctcggcaacgatgtctggttttgttatttgcatggtcgttgaaactgagtcctgngtcatgttggtctgaactgagattaaattggttggaccatcaatagttatgattggaatat

SEQ ID NO: 31320 - DNA, 337 bp, Gossypium hirsutum
  unsure (1)..(337): unsure at all n locations; Clone ID: LIB3148-048-Q1-K1-H2
gggagacccacgcgnngcggccacgcgtccgnccacgcgtccgttctcatacttatgacttcatagatgactggntgaagattggtttggctgcaaagaagaggggtcctggaataaaataatggcctgccttgcgaagaactattgaagctttgcgaaaaggaatcagtgaataactcactgggaaatctactgacatatccatatgtgagagatgctatgacgagtggacatttggcactgagaggaggttattatgacttcgttaatggacattttgagcaatggagggccttcacaccacctccaccagtaatgccacccatgccccagcctt

SEQ ID NO: 31321 - DNA, 365 bp, Gossypium hirsutum
  Clone ID: LIB3148-048-Q1-K1-H3
ggaagacccaggcggccgcaataggccggaaatatgtaatcccaagccatcaccacatagttacctgccaaatgagcatatctgtggcaggcctttgggtctccggttggataagaacactggtgatttgtacattgctgatgcatatttggggttgttcaaggtgggtccggaaggcggattagcaacaccacttgtaactgaggtagatggggtgcccctgaggtttaccaatgaccttgacattgatgatgaaggaaacatatattttactgatagcagcagcaaattccagagaaggaacttcatgcagctagtttttttttcgagaatagtgggaggcttctgaagtataatctttacac

SEQ ID NO: 31322 - DNA, 396 bp, Gossypium hirsutum
  Clone ID: LIB3148-048-Q1-K1-H4
cggacgcgtgggctccggtgggatacagggtggaatatccaatggggaaattatcaacatgagagtagctttcaagccaacacctgctattagtaggaagcagcacacagtgactcgtgagaaaaaagagatagaactactagtccacggtcgtcatgatccttgtgttgcccctcgagcggtgcctgttgttgaggccatggtagccttggtgcttgtggaccaattaatggcacaatatgcacaatgtaacctttttcctatcaatgcggagttacaagaaccgttgagcttaggtttccccaacttcgaaccagcaatgatttgaatggttgcagaatgttctggttttaaggttttatcaaccctaagtcgaagggctttattagcattctg

SEQ ID NO: 31323 - DNA, 423 bp, Gossypium hirsutum
  Clone ID: LIB3148-048-Q1-K1-H5
cctttttgaaaaacataaaacatggtaaaggttcctttagttgtgttctcattggctttggtgctctcaatccaattcgtagtgggacacgacgagaaggctttagatgaggcagcatccccggaagctgaagatgcaggtttaagttcaggggcagctaaacttgttgaaaactttaaaagctctgctggagatgattcccagagtgtggatgggccaacttctgacttagctgatgagattgcagcttctccagaatcagaagttgaagttgatactgaatctgtcgatgggccacattctggcttagctgatgagattgcagtttctccagaatcagaagcagaagttgctactgaatctgtcggcgggaggaagcgtaaaatggcatagtggaccgcgatgatgtttagaaagcaacat

SEQ ID NO: 31324 - DNA, 130 bp, Gossypium hirsutum
  Clone ID: LIB3148-048-Q1-K1-H6
attcaaaaaaaaaaaactttcatcaaaaatttcactcatccgggcgaaatctacaaaaataggatcggatatacatgttgaggatatggtccaaaataatgtctcttcccctatcctaattgatcaaaaa

SEQ ID NO: 31325 - DNA, 384 bp, Gossypium hirsutum
  unsure (1)..(384): unsure at all n locations; Clone ID: LIB3148-048-Q1-K1-H7
tgccgctccgttgggtcaagagcttgaggatgctgtaaaagtcaagtttcctggtgccaagtttggacagggtgatggaatgacagaagctggaccagttctagcaatgtgtttgggatttgccaaggaaccctttgaaatgaaatccggaacttgtgggactgttgtaaggaacgcggagatgaaaatcgtcgaccccgaaaccggtttgtccttgccgcggaaccaggccggcgagatttgcattcgaggagatcagatcatgaaaggataccttaatgaccctgaggccactgctaggaccattgacanaagatgctggttacataccggagacattggttacattgacgacgatgatgaactcttcatcgtcgatcgatt

SEQ ID NO: 31326 - DNA, 385 bp, Gossypium hirsutum
  Clone ID: LIB3148-048-Q1-K1-H8
cccacgcgtacggcgaaggttttctctacattcgttgtcgatggaatatctaacgcaatcgtcaagacggggatgcgctgcagcatcacaaggagtagcgtcaaacggagtaaaggaagcagcaagaaacgctgcggtgttgaagaaaacaggggaagacatggcaacagcaactaaagacaaggttaactgggttccggaccctgttaccggattctatagacccgaaaacactgtgaatgagatctgccccgctgaactcagagccacgctcttgaagaagaactaaatatacatgcatgcatatgttacgagatgagattggtttcaaatgttatgtggtgcaagcacagggaagattttggtttttggtttttttgttcaa

SEQ ID NO: 31327 - DNA, 349 bp, Gossypium hirsutum
  Clone ID: LIB3148-048-Q1-K1-H9
gttttgaaaaactcctttatgagttttaattattatgtcactgcttatgcatagagcacgggtgtgttgaaaatggcgacggtgctgctgttatgttattgttaataaagtgcatgcggctatgatgattttgttgagttcatacagcttggatgcatgctgcaacaattgtgcatgttgtagcaacatattttctgttttagttgcaatgtaatttagtttggttgaaaacgaagtgtttaggtgatgattaagctaataagtcagcttattcatatgtacaagcaatgttttactagtcccaaatgctgattagtgggattagttgaatattttggtgatgaatttt

SEQ ID NO: 31328 - DNA, 342 bp, Gossypium hirsutum
  Clone ID: LIB3148-049-Q1-K1-A1
cggacgcgtgggcggacgcgtgggcggacgcgtgggaacatttcatgcatccagccagaacataaaacatcaaaattgatacaagactcagtatctcctactcgacatgggacacaaaggaaagtactatcgttggacaaccaccatcgatctgagcctgtctcaacggcacgtaagtctcaagcagcctcttttgctcctttattctatatgagtattagctggttgtgaaaatgccttatttgttatatgtacatgtaaacatggtttgatagtaaaagataaaagacttttaaggtgaaaaagacagtaaaaaggtgcttgtgaggaaaaaagtaccat

SEQ ID NO: 31329 - DNA, 306 bp, Gossypium hirsutum
  Clone ID: LIB3148-049-Q1-K1-A10
catataacttatcagacgggctgaatttttacttaatgaactctacttgattgatttaattttgtatgggaaaacaattcactgcaacttgccttgaacaaaaaaaactatcgctgttcttccttttgttaaccaaagtcaatgactgatctgttataaatgtgcataaaaagccggactttcaagcttgccggaagttcctgttctaagcactgctttcacggacattctcatgcgcgctgtttttcgaacgacatgcttactgctcacaagctgacctatatcgtaccttctttccacaattgt

SEQ ID NO: 31330 - DNA, 129 bp, Gossypium hirsutum
  Clone ID: LIB3148-049-Q1-K1-A12
cccacgcgtccgaaaaaaaaaaaaaaaaaaataaataaaaaaaaaaaggaagggcgaaagagaggatggatactaacttacgcatgcatgcatgcgaaggggctgtcttttatatggatctaaattaaa

SEQ ID NO: 31331 - DNA, 102 bp, Gossypium hirsutum
  Clone ID: LIB3148-049-Q1-K1-A2
cccacgcgtccggcctgtttaagagttgaattttttgggctgggttacgcccgacttgaatcaacctaaactttctattttgttgacatttcattgttgttt

SEQ ID NO: 31332 - DNA, 399 bp, Gossypium hirsutum
  unsure (1)..(399): unsure at all n locations; Clone ID: LIB3148-049-Q1-K1-A3
gtccttggcagatttgctgctccttttttttttttctttttttcctttccttttacaggtatattagttctgtaggtgttagcctcacatcttcaaacacacacacactgcaataacctttgttaagctggttacctttataccaagtaaatggggcgcctctttgtctttgtctctgtctgtttctttccacatttattatggcaggctaaggctcgggctgtcttgttatccatatattctgctggtgctaggtggtggccgagatttggtttatcaatcatctatatttataagtaacgatagaaacaagttgaattcactaaaacagaacataacatattaaatttattcaaatgtaatcggttggtttaattccttctttttcaaannaaaaaa

SEQ ID NO: 31333 - DNA, 280 bp, Gossypium hirsutum
  Clone ID: LIB3148-049-Q1-K1-A4
gttttaccaccctcaaccttggaagaaagaagaataaagaaccaaaagagggtaaccagctcttccaagttacaaatatgacttagcatttgtatttgtacggaatacttattattttccctaaaaattacgggcagaattgctccatttaaattgtgggttaacccgcccatggttttacactcctatgattaaattgtttggtgttttgctcacagcaatccctggatattcatttcttgaaatgcagaggagctttaatgctagcatttatcgatcc

SEQ ID NO: 31334 - DNA, 427 bp, Gossypium hirsutum
  Clone ID: LIB3148-049-Q1-K1-A5
cccacgcgtccgcccacgcgtccggtcccattaaaaatccagttacggaaggtcaaaatcttcttcagccgaaaacccaacagcaacaggacgagttcttccgtggtcaaagcctttccttcttcaatgagtccaacatacccgctaataaccagattttaccacaaggggaagctcaattcgaccagttgaagacctcgaattctccattcgagaccacctacaacaacaacaacaacggtttcaaactgatgttcggctctccattcgatttgtcttcattcgattacaatgatgatctccaagctgatggaatggacgccatgccaaaacaagatgtctcaatctggttctagtaacaatctcaaggctgaaactgaaaccgtacccgactcaaccctgctgagccccgtgtcgtgtgtttcat

SEQ ID NO: 31335 - DNA, 419 bp, Gossypium hirsutum
  Clone ID: LIB3148-049-Q1-K1-A6
aacggagcaaccaccccggctggtctcgtagccgccgctctagctcatggcttcggtcttttcgtcgctgtctccgttggcgccaacatctcaggtggccacgtcaaccctgccgtcaccttcggtgcttttgttggcgggaacatcactctcttgcgcggcattctttactggatcgcccaactcctaggctcaaccgtcgcttgcctgttgcttaagttcgctaccggcgacctggctgtacccgcttttgggttgtcatcaggtgtgggcgcgtctaacgcattggttttcgaaatcgtgatgaccttcggattggtgtacacagtgtacgccacagccgttgatcccaataagggaagctagtgaacaatcgcaccattggcaattggtttcatcgtggtggccaacattttgca

SEQ ID NO: 31336 - DNA, 427 bp, Gossypium hirsutum
  Clone ID: LIB3148-049-Q1-K1-A7
ggattttgaagagggttaaagaggaatttggggttggggaagaagtgggatttgtttgtttaggtgggtttgagaataaacgagaggtttttaattggaaaaatctgaagctggaagtggatgagactaagtatggttttgggatatgttatgagctggaatgtgaaagtgaggatcctgatggcgttaagaaattgcttgaggagttcttgaaggaaaatgggattggttattcctactctaagatgacaaagtttgctgtttttaggtctgggaaattgccttagcgaagtgagtttgaggatgtcctgcggtatgattatcccattgttccttacatacaagcaatggtagagaagcaaggtttatcatcttcctcgcaaaaataaatgtttactttcacgcaacgcaattccgagatcttgca

SEQ ID NO: 31337 - DNA, 428 bp, Gossypium hirsutum
  unsure (1)..(428): unsure at all n locations; Clone ID: LIB3148-049-Q1-K1-A8
agtttctggatatctaaatttggggttggtttttgttattctcttttcattcctctgggagttttttcttttaccctttttcacattcgagcaagaattcagtgttatttcttatcttgttcaggttaattgcatttttacccattttttatatttacagaggtgtaaagacgatcctcgaaagcatcttatgaaagaaatgtaaaataatgcaggggttctatcactttgagtttcatatatatctgaaatgtaaaaagttttagtggagtggagagacatttatgatttatgtcaattcactgagggttggaatttttctgaaggggcagtagtatagatgttcctggcttagttgatatcggntagtctttagaatcttgaccttatctgtatagtggttgctgagctcactttgtatgagaaat

SEQ ID NO: 31338 - DNA, 406 bp, Gossypium hirsutum
  Clone ID: LIB3148-049-Q1-K1-A9
aaaagggaattttcagttgaaaaagatgggtcgcggagttagcagtggtggcgggcagagctcattaggttatttgtttggtagcggagaagctcctaaagcagggacaaacaactcccaagctgctcccgctgaagcaccagctgtctccaaacctgcccctgctcctgaaccagtagatatttccaagcaaattccggctggtattaacagtatttccgcaaacaattacatgcgtgctgatggtcagaatactggcaatttccttacggatcgaccttccaccaaggttcattctgcccctggaggcggatcttctctggactacctatttggtggacctggaggtagtaaatgagattgtgccttaataacatctttgataagggagagtattgtttgtgga

SEQ ID NO: 31339 - DNA, 434 bp, Gossypium hirsutum
  Clone ID: LIB3148-049-Q1-K1-B1
ggcaggtcaaatagctataattgactacccataattacatattattgcaccttattgtaagttataattttttttcattaatcaaaggtttgatcttctaaataaaacaccaaaactataaatacataacataaaaaataaaaaaaagctatactaaaaaaacggactgaggataaatggagttcataagctctgggaatacaacaatgttgggaaacgatacaaagacatttctgtgctaggacagaggcaatcagaggaatgaactcatccttttctttctctttgtggatgttttgaagttttttatttgaggaatgggtatgagcatatatctatgatgtagcaatgctcattgttgcaataaaatgtcacttttttttttttggggggaggaggggaacgtacatctttattaacaatgagtcgattga

SEQ ID NO: 31340 - DNA, 368 bp, Gossypium hirsutum
  Clone ID: LIB3148-049-Q1-K1-B10
tatgtaggcacaaggagagaaaaccttttgcctatggactttgtaatgaatgttatgaagaggtgagcacccatgtacctactaagcgttcctatcttcttttgcccgctacaattgtaccactggaaactgttctatcattgaagctcgagttcatgctgttactggttggtgtagttcatgaaggtttcaagagggcttgatggaagatcagatccacctgcattccagcgtgctgagaaagagagactggcaaaattatctatttaggaaaatgctaaagtatgttctgtaatcatactttctaaaggtttaaagacagtgaaaggttgaaaaatcctaattgtaatcacttgatatattttact

SEQ ID NO: 31341 - DNA, 313 bp, Gossypium hirsutum
  unsure (1)..(313): unsure at all n locations; Clone ID: LIB3148-049-Q1-K1-B11
ccgtccgcccacgcctgtccgcccacgccgtnnccgaacttgagnntaaattttttgtagggttnttaaatgtatggctcatatgtaataaacgcataggcttgaaaaanagaaccaaanaaaaagaacctttttgttgtattcctatatctccaatgngattcatgcaagggaatgccaaanaaaacattgaatctcatctttcgtagagctttcataaatgcaaaatatgttgtttcgggctcctgaaatatacaaaaactaaataaaggctatcgatgaagccctaaaatgtaaaagggagttgaaaata

SEQ ID NO: 31342 - DNA, 161 bp, Gossypium hirsutum
  Clone ID: LIB3148-049-Q1-K1-B12
tgttatcctaattttgagatgttttcattccagattatgaactaaattccctagaaaaaaaaaaaaaaaaaaaaaaaaaaaaaaaaaaaaaaaaaaaaaaaaaaaaaaaaaaaaaaaaaaaaaaaaaaaaaaaaaaagggcggcagaaaaaaaaagaacca

SEQ ID NO: 31343 - DNA, 432 bp, Gossypium hirsutum
  Clone ID: LIB3148-049-Q1-K1-B3
gtcagcatatctggaacttggcaccttggaaagctgcaggtggggctgtctcgtgctcgaagacttgcacagggacggtcgattaagatacaactctttgctgcattgcctgttcaaattgatggagaaccttggtctcagcagccttgtacattgtccatttcgcatcatggacaggccttcatgttgaagaggacagccgaggaatcgctaggtcatgcagctgccataataactgatgtgctcgagagtgctgaaacaaatcatgtaattaacgcatctcagaagcgagctcttcttcaagaaatggcattaaggctgacttaatggctttcttctatcacggtacttgctggtcagttagtcggtggttctcgttgcaccgaatttttctcaaaaatgtgttattttatatcaatatatgatctttct

SEQ ID NO: 31344 - DNA, 426 bp, Gossypium hirsutum
  Clone ID: LIB3148-049-Q1-K1-B4
gtcgattaggtttttttcatgtcgtcaacaatgactacactcattggttcatgtatgccattggcggtagtagccaccctacaattatcagccagggcaataggtatattgcgtcaagcatctatgtaactaagcaagcgaccagtaggggctacttatcaccggaacagtggaagaattggaactgggtatcacagggtgaccacttcatgaacggtgcctattttactacatccggtgatcctaatgccagcaagctattcgatgctgacaaaataatgtctttccaacccggtcgattggtccccagactcacaaggtatgccggaacactccactgcagaattggtcgcccttgttaaaaacattattttgatatgcatacatcctctctttttggtatgtacaacattagatacccgtgca

SEQ ID NO: 31345 - DNA, 430 bp, Gossypium hirsutum
  Clone ID: LIB3148-049-Q1-K1-B5
cccacgcgtccgcccacgcgtccgcccacgcgtccgcgaatacggtctctcggacgagaacaaagacttccagctatcccaaagagagcagctttatagaaccattcaggacatcatttataaatctgcaaagaagaaagggtcgggggcaggtgctttagtctggcagttctttgtagaaggaatgcaggaatatagtgatgatttcgggatggtaccatggcagtccccgccaatttacaaactcaccatagaacactcgtgcaaattggctagaatccaaggacttattcaagaaaacggaaacctcaaacaactgtgttccaagagaaagtaaagctagcgcttgctatcagaaaattcaattctttctggtgaggtaatttgtgcgagatatatattggtattgtatcaatttttttcttctaat

SEQ ID NO: 31346 - DNA, 426 bp, Gossypium hirsutum
  Clone ID: LIB3148-049-Q1-K1-B6
gagccctgaatgtggatgtgactgagttccagactaacctggtcccatatcccaggatccactttatgctttcttcttatgcccctgtcatttcagctgagaaggcttaccatgagcagctatcggtggctgagataaccaacagtgcttttgaaccctcttcaatgatggccaaatgtgacccacgccatgggaagtacatggcttgctgccttatgtaccgaggagatgttgtgcccaaagatgtgaatgcggctgtggccaccatcaagaccaaacgcacaatccaatttgtggattggtgccctactggattcaagtgcggtatcaactaccagccaccaactgttgttccaggaggggaccttgccaaggttcagagagctgtctgcatgatctccaactcaaccagcgttgcggaagtgt

SEQ ID NO: 31347 - DNA, 258 bp, Gossypium hirsutum
  Clone ID: LIB3148-049-Q1-K1-B7
cccacgcgtccgagagattgcttcttctgatctgatttttcgatataaatactagacaaagtatggatatttcttgtcatttgcatttactactgttagtaaaataagattctcttattaggatcttagtttcttcacttgtattagtcttaacaatggcttgcattgcattggtgttgattttacctaaatttcgaggtttacaaattttaatttttattaattacttaaaaaaaaaaaaaaaaaaaggagaaacaa

SEQ ID NO: 31348 - DNA, 226 bp, Gossypium hirsutum
  Clone ID: LIB3148-049-Q1-K1-B8
tatattcatatatatatgatgttgttcctatttaaaaaaaagaaaaaaaaaccacggggggagggaggaattaaactgacataagcacaccacaacagaaagtaaaaaagacaaacgctgaggaggttcgtaagggtcttcgctagtcttggctcttttcatcggcgtccattgcgttggtgtcgcttctacctatatagtgtggtttacctgtgggggggccttt

SEQ ID NO: 31349 - DNA, 410 bp, Gossypium hirsutum
  Clone ID: LIB3148-049-Q1-K1-B9
cccacgcgtacgcccacgcgtccgattttcattagccttaagagaagaaaaaaaaaatgtcatcgatttcaatgtctggttcatggacagccaagcaaaacaaagatttcgaaagggctttagctgtttacgacaaggacacaccagatcgttggtacaatgttgctaaagctgtgggagagaaaactgttgaggaagtgaagaagcactatgagcttcttcttgaagatgttagacgcatcgagtcgggtcgggttcctttccccgactattggaccgttaccgggaatcgtcaagcatgaaaaattccgaaggtcaaatgaagaagaaaaaatggtggacttgcatggatctcacccttatatatgtctgtgtgtgtggcagtaattgtagtacttaagaatagccat

SEQ ID NO: 31350 - DNA, 435 bp, Gossypium hirsutum
  Clone ID: LIB3148-049-Q1-K1-C1
agcagatcccagcaagagccactctctctaccttaagaatcgccatggactacgcttctcgaagaagtcaaggaggcctattcgaaggtctctacagagtcatcatgcgccgtaactctgtctacgtcacatttgtcatcgccggcgctttcctcggagaacgggctgtggattatggagttcataagctctgggaatacaacaatgttgggaaacgatacaaagacatttctgtgctaggacagaggcaatcagaggaatgaactcatccttttctttctctttgaggatgttttgaagttttttatttgaggaatgggtatgagcatatatctatgatgtagcaatgctcattgttgcaataaaatgtcacttttttttttttgggggggggaggggaacgtacatctttattaacaatgagtcgattgattg

SEQ ID NO: 31351 - DNA, 356 bp, Gossypium hirsutum
  Clone ID: LIB3148-049-Q1-K1-C10
ctctctttccccctaaagccaaaaaacccccaaatctctccttgtctctcttttcatatccatttttttctctcttctatttcttcccttttgcagggcaaaggaaaaaaaaaagcaacaaaaaatggctcaaagaaccgaaaaagaagaaaccgagttcaaggtaccggaaaccttaacgctttgcgtcaatgattgtggtgttataggaaatccggccaccaataacatgtgtcaaaattgtttcaacgctacaacgcctaaatcaaccgctgccgtcgtctcctcttcaaccggtggtgctagttcaagtggtgtttcgatcctgaaccaaagaatctccacgtcgcgttcta

SEQ ID NO: 31352 - DNA, 80 bp, Gossypium hirsutum
  Clone ID: LIB3148-049-Q1-K1-C11
ctttatttgttgatttgcgttttttatcttttgaaatttcgatcttataatttatctattcaagaatatacttaacctcg

SEQ ID NO: 31353 - DNA, 296 bp, Gossypium hirsutum
  Clone ID: LIB3148-049-Q1-K1-C12
aaaaaaaaaaaaaattaaaaacaaaagaaaaaaatatacaccatgcaatacaagaaacacatagggggggtagttgaaataaaacaaggttgaccggctgataacaaaaacttaaaaagacacacaaggatgcttatcataaacaaatgcttaccctgggggtggctggttaccatatgtatgcagcctgtccctccgctggtaaagttttatttattgatcctgctgctcgaaatgtttgatttgctcgagcaagaacaggacggtacttgactaaacatgcatttgcccaatta

SEQ ID NO: 31354 - DNA, 431 bp, Gossypium hirsutum
  Clone ID: LIB3148-049-Q1-K1-C2
cccacgcgtccggccgaacgagccctagcaacgatagaactcttatgccggatcccctcgggttgctccgccttcgcctcacacgcgctcactgtcccgcttttggtaaagacgatactgaggatctccgacagggccacggaatacgccgctggtgcgttgatggcactctgttcggaatcggaacagagtcaaaaggacgcggtgagcgcgggcgttctgactcagctgctgctgctggttcaaagcgattgtacggacagggctaagaggaaagctcaaatgctgcttaaattgcttcgggattcgtggcctgaagattccatcggaaattcggatgatttcgctgggagtgaaatcgtacccttttgaaaacgataagtacttcacccagattctccattaaaaagaagaccaatatttttaaattt

SEQ ID NO: 31355 - DNA, 297 bp, Gossypium hirsutum
  Clone ID: LIB3148-049-Q1-K1-C3
gtccgaatgtgttcggttggtagttaaacgtagctactattgaaatattgtgatgtttagtatgttgcaaataatgtgccatctatatggtgctttgaacttgatgttctgttgtaatgagttcagcttttgatggttcatctttttatgagtggtggttgtcatccaatgaaggagagcctatatgtaccctttcgtttttcttcaagtatcttcatactaataaatttttgcaaaaattttgaaatacgaatatcctaaatatatataaattaaaacgtgggttaaatggttttt

SEQ ID NO: 31356 - DNA, 267 bp, Gossypium hirsutum
  Clone ID: LIB3148-049-Q1-K1-C4
gtgaaatccatctactattatctgcaaacataaatactaaagaaaaaaaagaaaagaaaaaagaggggaaaaaaaaagagccagaaatagggtagcccggaacttgagggtacagacgcatagaggccaggtcatcgagggcccaggtatttaatgagtggtgcgtgtaattgccatgaaggagagcccgtatcggaccgtataaggccgtggtgaagcgcggtccttacctaattaattttttgttgaaagtttgaaatacattgg

SEQ ID NO: 31357 - DNA, 339 bp, Gossypium hirsutum
  Clone ID: LIB3148-049-Q1-K1-C5
agaagaacatgtccttacggaagctatggaagtgattatgttttattatttattgtgctttcgcggttttggggtaaattcaaacatggaaacccgatttaatatatgaacaatgtatagaatattatattatttgcctggctagtactacacacgtctacttttctagacaaggtaagagcacattttatgaaatcatatttgctaagttttgaattctaaaataaaaaaaataatatcaaagtcaaaataaaaaaatattatataatttaaaactttaattaggcgggctcttcttaaagaaagaatattaaggcctcctgtatggcactttttata

SEQ ID NO: 31358 - DNA, 250 bp, Gossypium hirsutum
  Clone ID: LIB3148-049-Q1-K1-C6
atgacatcgtgatctaattaccacctacgtagtgcttgttttagaattatgttcatacaaataaaattttgagcgaaactctttcggttcttccataaaatatactatgaacattaggtataacttctttttattggcacgtctagtaatacaaacggctatttttctagaaattgttggcacacatttcattaaatcttcttagctaagtttcgtatccacacatacacctttacgcagctggcttaat

SEQ ID NO: 31359 - DNA, 80 bp, Gossypium hirsutum
  Clone ID: LIB3148-049-Q1-K1-C7
aaagagttcggccgggatttaaacctttctactcatggaataatgcgaattttagggtggagcaaaacaggcgccaccta

SEQ ID NO: 31360 - DNA, 187 bp, Gossypium hirsutum
  Clone ID: LIB3148-049-Q1-K1-C8
cattttcgaaatgggaatgatttttcattgatgaaaaaaaaaaaaaaaaaaaaaaaaaaaaaaagggcaaacaatataaaaagataaaaaattaaatacgcgtgcttgcaaaaaaaataacatggtctttcgtgtgacctaataacaattatctgtccgttgttgtcacacgttatgtctgttatat

SEQ ID NO: 31361 - DNA, 328 bp, Gossypium hirsutum
  unsure (1)..(328): unsure at all n locations; Clone ID: LIB3148-049-Q1-K1-C9
aactacctgggctaagaatgtcgatacttaccttcttaatgtctaattaaataattaaggaaactacatatatgaataatttgatcatatgtctcgttcttaaataaattatacaaataatcataataaacatgcatttaaatattttataatagctgattaagcattagcttagttggcaacgtttgctgagttcaaacgtacttatgaaagcacaagtatgtatgttattgtcatgaaaattaatgtaacctttgctttgtgtatgaaagtngaaaaaaaagaaaaaagaaaataaataaaaaaaaataataaaaaatattgagat

SEQ ID NO: 31362 - DNA, 400 bp, Gossypium hirsutum
  Clone ID: LIB3148-049-Q1-K1-D1
cccacgcgtccgcccacgcgtccgaattttttatttatgatcttgctgtcttgttatggtttttttgtaaggaaactctgtaagttgttaaccatgtaatatagtttttttatggtttattatgttgtgccacgtattgctatatccaacaaaagaaaggagactgtgcttttgattttgaaagacggttaggcatgtagaaaggtgaaatgcgtttctttcaaaatacgtaagtttgattactaagctactaagtaagtagctcatcaccatttctatgttttaatacagttctttgctgctaatataacttctatatttcttgatatataaatcaacataaatcttaatatggtcctgcaggggtttgggccccgattttcaagttttggttcgaaaa

SEQ ID NO: 31363 - DNA, 310 bp, Gossypium hirsutum
  Clone ID: LIB3148-049-Q1-K1-D10
agtgaatcgtcatcccagaactcgtatcgctctgaatggccctcgtagctgtaaataaggacccatatgccacagcaaagcaatcgaccttgtttgggagtgctcttttggaacatccaagacaataccgaaagacatgagataaatcttcctccccagatctacatcgagaacaaacagcagtgtcgactactcgtttagatcgtaaattaactagagtaggcatatagttccatgatgatctcaaaactgtaatagtaatctttgagggtaactgtaaaatcgagagggttttgtagaaaatttttaa

SEQ ID NO: 31364 - DNA, 377 bp, Gossypium hirsutum
  Clone ID: LIB3148-049-Q1-K1-D11
gattctgagtgtgagatacaagtatcatcacatcagagtccatttacttctgaagggactcctatggcactggtagagcatactccaaaaggaatctatggtcatatcactgctctagttatttccttcttgacccttttttctatcatccgaacaatggtgttgcatctgatgaagaagtcgagtgtaagtgatttgacatgtaacattcctgaccagcatgttgagtcaacgttcaaagacgaaaccccgcctccttcaactgctccaaggtttacaaaaggagacctggtgtcatctggtgtaagaaagcttggtgatctaaaaaaaaaaggtgagaagctacaatcaaaaagatttgagatgccttattagaa

SEQ ID NO: 31365 - DNA, 287 bp, Gossypium hirsutum
  Clone ID: LIB3148-049-Q1-K1-D12
actgaatggacgtaccacaagtcgaattgctctgaatggccattgtcgctgtaaagaacgacgcggatgccacagtagagcaatccaccttgtttggaagggctctttgggaacatcctagacaatacctaaagacgtgagattattattcctacccagatctacatctcgaacaaacagtagtgtcgactactctgttagatcgaagattaacttgagtaggcatatagctccgtgaagagctcaaaactgtaatactgatctttgagcgtaactgtaaaacccag

SEQ ID NO: 31366 - DNA, 328 bp, Gossypium hirsutum
  Clone ID: LIB3148-049-Q1-K1-D2
ggactgcctgcaaaaaaaaaaaaaaaaaaattaaaaaaaaaaaaaaaaaaaaaaaaaaaaaaaaaaaaaaaaaaaaaaaaaaaaaaaaaaaaaaaaaaaaaaaaaaaaaaaaaaaaaaaaaaaaaaaaaaaaataaaaaaataaaaaaaaaaaaaaatatttaaaagtaattgtaatatataatatatataataaagtttaaattgggggggggcttttttaattttctttttttatatgttgggtgtattactaatttttcttttttagtagctctcaaatatttattattttttttttggtttttatatattttaatttgtaaaaa

SEQ ID NO: 31367 - DNA, 273 bp, Gossypium hirsutum
  Clone ID: LIB3148-049-Q1-K1-D3
gttctagatcgcgagcgccggcctttttttttttttttgggggacaaaaccttgaaattttcggattggaacgggtaatatggtacataaaattttccataagtggagcactaaaaaaccaaccgagcacaccaattaataaaaattacaagttcaagttggtgattgaagtgatcttcctacagaaagagaagcttatactactactactactactactactactactactactactactactaccaccaccatactagcgagatacaaaca

SEQ ID NO: 31368 - DNA, 288 bp, Gossypium hirsutum
  Clone ID: LIB3148-049-Q1-K1-D4
tgctgatgccgagggcagcaagatggaagaagttgactaagctttttaacatgtttgtgaagagttcatttggtagtctcatttttagcttttaatataatattctggaaaattggtcaatgctgagttttctttgtaatggtaaatgaatctttagtgctcgtaaatggaatctagtccactgccgtgaaaaataaaaaaatggaaaaataaaagctagtctactactaatgataataatacttataagtggagtgggggcgagattcaaacagaatatttttactg

SEQ ID NO: 31369 - DNA, 292 bp, Gossypium hirsutum
  Clone ID: LIB3148-049-Q1-K1-D5
aaaacaggaaaagcaattacagactattgatttgctgcaataagctacttcgtctttcacttaaatgtaattgctgattgctgaaaaaaaaaaaaaataaaatctttaaaaaaaataaaaataaagactaatattgctatatttaaaaaaaaataaaaagagctgtggtattaaatttcaaaaaacattttagcctgttaaataggataaatacgttatatcttataatatatgagtttataatcattaactactgagggagaggggttatgaccatttcttttttttaata

SEQ ID NO: 31370 - DNA, 52 bp, Gossypium hirsutum
  Clone ID: LIB3148-049-Q1-K1-D6
ataataagggaaactgggatgactcaatttaccggctgctttataactctat

SEQ ID NO: 31371 - DNA, 427 bp, Gossypium hirsutum
  Clone ID: LIB3148-049-Q1-K1-D7
cccacgcgtgcgggaggatattcacatgaggttcatgaaaaattatggtagagtggctcgttatgcaccggcatacgcgatgaatgatgagttctcacgggtatcgcatcaacaaatggagtttttctccagtagtccaagtgcagatactctcaatcgtgttagaggtgaagtgggtgagatacgttcaatcatggtggaaaacattgagaagatactcgagagaggtgacaggattgagcttcttgttgacaaaactgctacaatgcaggatggtgcttttcacttcaagaaacagtctaaacgccttcgtcaagcactttggatgaaaaatgccaaactcttggccatgctaacatgcttgatcgtgcttatactctacctaataattgctgcttgctgtggtggtatcactctaccatcatgc

SEQ ID NO: 31372 - DNA, 296 bp, Gossypium hirsutum
  Clone ID: LIB3148-049-Q1-K1-D8
cggacgcgtgggccaacacatcgcaacattgacaacaaattcagtgggaagaactactcgagtctcgcgctggtagacgaggagggtctacgctatttcaaacagcagcaaatcactgtctacaggctgcccttgcacgatacctgattatttcaaaccctcacatttcatcaactaatataagccgagaaggtctgatcattactttttctttcatcatatgaaaaatacattgattgtcactattgaaatctgcaagctcccttcacaaaccggatctaacttgcattgaataa

SEQ ID NO: 31373 - DNA, 266 bp, Gossypium hirsutum
  Clone ID: LIB3148-049-Q1-K1-D9
ccggttcagctttttctctattcatcacccctttgtttggtttatttgttatgaggaacctagtttatcaatttcaggtgtcgaatctttggacttgatttggttgttttttgaaccctagtctgttttcaatgaaattttggttgctcatagtcaaaaaaaaagaaaaagagctacctaaagtctaataaattgaaagaaatatacaaaaaaggttcttcactatacgggttcaagtcttacttttatcagactgcaagacaata

SEQ ID NO: 31374 - DNA, 435 bp, Gossypium hirsutum
  Clone ID: LIB3148-049-Q1-K1-E1
ccacggacttcattgggttaaaccagtatacgtcgaggttggtttcacatgccaaagatagtgtcgaagaaggtcattttgagaaagctcaacaggttgccaaaattgtggaatgggaagatggtgaaataatcggtgaaaaggctgcatcggaatggctctatattgttccttgggggatgcggaaggttctcaattacatatctcatacatacaacaacccaccaatatatatcatggagaatggtatggatgatgaaatgaatgaaaatgtcccaatccctgaaatgcttgaggacaaaaaaaggattgagttttacaaaggataccttgcttctgttgctcaagcaatcaaggatggagtagatgtgaggggatattgtgcatggtcattattggacaaacttgaatggtctcatggctacaccaagcgct

SEQ ID NO: 31375 - DNA, 136 bp, Gossypium hirsutum
  Clone ID: LIB3148-049-Q1-K1-E10
gggggaggggtggatctggggatcaaccagtagcgagagaagggatcgcttcttccttgaattgaggagttcgttcaaaaaattcatctctctgattgatgagccataagacaattcatggttcagacgactcgtc

SEQ ID NO: 31376 - DNA, 331 bp, Gossypium hirsutum
  Clone ID: LIB3148-049-Q1-K1-E11
aaaaaaatagaaaaaatttaaaaaaaaaaaaaatttaattttataaaaaaaaataaaaaataaaaagaggggaaattaataaaaaaataataaaatagataggtgtgggcatttataaagattaaatattgtgtggcttttgggtgggtctttttacctgtttttttttgtttcctggtttttttggattggttgtgtttttatgttttttgtagtgtgaataattttgttgggtttgtttaaagcattttttttttatgcgctttttttcctctgtgttaaaaagtttgggtgtttgtccttattttcttttagaagatttggaaaattt

SEQ ID NO: 31377 - DNA, 370 bp, Gossypium hirsutum
  Clone ID: LIB3148-049-Q1-K1-E12
gtcactctttgagcaaatgatcagaccctcaaacagaggtattgttctgaagatatctatggtggaggttagtccccagtgcttgactcccgactgaacggagagtcctcatcgggttcacggagtttatgtgggagcgcccgatccaataataccaagtgcgagtgttcttgcccaataatgccttttaagggcgtggattggaacccccactaaaatgtgtgaactcgtcgacagcttttcgtaaagtacggagacaaaaacctgtggctttaaacgagcataggcatcctgagaacaatacttacatttaggatccaagaccggcctagagagtgacttcctctcaacattacttctactcgggaga

SEQ ID NO: 31378 - DNA, 411 bp, Gossypium hirsutum
  Clone ID: LIB3148-049-Q1-K1-E2
caatctcatctctctcctttgttttcccttttgtctctctctctctttttccaaccctaaccctacctcaccaaccaggattcaacatgaagggaggaaaatccaagtcagatactaagagtgccaagctatccgtgaaatccaaagctggaaagaaatcggggaaggctgccaaggatccaaacaagccaaagaggcctgctagtgccttctttgttttcatggaggagttccgtgagcaatacaagaaggatcaccctaaaaacaaatccgttgcggctgtcggcaaagctggtggagataaatggaagagcttgtctgaagctgaaaaggcaccttatgtagctaaggcaaaaaaagcggaagttgagtatgaaaagaacatgaaggcctacaataagagacaggctg

SEQ ID NO: 31379 - DNA, 417 bp, Gossypium hirsutum
  Clone ID: LIB3148-049-Q1-K1-E3
ctattttgaggggaaaccatgagagccgccagataactcaagtgtatggcttttatgatgaatgcttgagaaaatatggaaatgctaatgtgtggaagtatttcactgacctctttgactatttacctctgactgccctgattgaaagtcagattttctgcttgcatggtggactctccccatctttggatacattagataacatccgttctcttgaccgtattcaagaggttcctcatgagggtccaatgtgtgatctcttatggtctgatcctgatgatagatgtggatggggaatatctcctcgaggagctgggtatacctttgggcaggatatttctgggcagttcaaccacacatatgggctgaccctgatttctagagctcaccagcttgttatggaaggatataattggt

SEQ ID NO: 31380 - DNA, 263 bp, Gossypium hirsutum
  Clone ID: LIB3148-049-Q1-K1-E4
cccacgcgtccggaggtaatgatgatttgacattcactaaaaaatataaaaaaaaaaaaaaaaagggagaaaaaatacggaattgcataatgagaggaagtatactcaacagtcaaatttgactatttacactatgactgtcctgatccgaaagttatatgctatagcttggatggtggactggtttcaatatttggatacatggggggggcggtctcttatattgactcgatttaagacgcgcctcatgaggttacaatgtt

SEQ ID NO: 31381 - DNA, 304 bp, Gossypium hirsutum
  Clone ID: LIB3148-049-Q1-K1-E5
cggacgcgtgggcggacgcgtgggcggacgcgtggggtttgggtacatccctggtattatttatgctatctatgccatcaccaagtagtcctctaatcccgtccttctcatctgtggagatttggagtaggattctggttttgtttgaatatgtgtcggttatagtattttatttcaattaatattttgtctgttaatttgatggtgatgtaaagcttgttgttatgttatgatgatgatttatattgtggggaggggggggggtgtcccagggtcatgttacgtttgtgtcgatctactgatc

SEQ ID NO: 31382 - DNA, 420 bp, Gossypium hirsutum
  Clone ID: LIB3148-049-Q1-K1-E6
cccacgcgtccgatcctccttcatggggacacgcttccccgacgtctacacaagttcagggagattcgtcgccaggtttggttttggcggcaaaaaagcagctcccaagaaagcctcgaaacaaacctccgaccgccctctatggtacccaggagcggtggctcctgattggctcgatggaagcttggtgggtgattacgggttcgacccgttcgggttagggaaaccagcggagtacttgcaatatgatttggattctttggaccagaacctggctaagaatatggctggtgagatcattggaactaggaccgaagttgccgacgtgaaggcgacgccgtttcatccttacagcgaggtttttggtctacagagggttagggagtgtgaattgatccatggacggtgggccatgttggc

SEQ ID NO: 31383 - DNA, 417 bp, Gossypium hirsutum
  Clone ID: LIB3148-049-Q1-K1-E7
gaacatcgttatatttttcatgttgtgcatactcttgtcgtttgtccttacaagtaaagggagattcatcgccaggaatgacttatggcggaaaaaaatcaactcccaagaaagccttattatcatacctccgaccgccctttatggtaccctttagcggtggcttctgattggctcgatagatgcttgttgggtgattacaggttcgacccgttccggttagggaaacgttccgaatacgggccatatgattagaattctttggaccagaacctgtctaagattatggctgggagagatcattgtaactaggaccgaagtcgccgacgggaaagctactccgtttcagcctcacaacaaagtttttggcctactgaggtatagggagtgagaattgatccatgggctgttttccat

SEQ ID NO: 31384 - DNA, 85 bp, Gossypium hirsutum
  Clone ID: LIB3148-049-Q1-K1-E8
gaaattatggttaatatgtaattgatatctgatagatactctgtaagtaatacgtaagtttttgtattctgaatgtgctcgattg

SEQ ID NO: 31385 - DNA, 373 bp, Gossypium hirsutum
  Clone ID: LIB3148-049-Q1-K1-E9
cccacgcgtccgcccacgcgtccgaagagaagaaaagtgaagcagggactccctctgaagcaccggtggtttctaatatgaggggcactgaaataatccggcagctcgaccgtgatgctgatgtcgggttgagattgaggcatgttaattaaaaatgatgctaacgaaacacattaggaggggtttttttttttggaaagctggtatgaatgcattgataaaatataatttgacaagctgatatttcacaatgctgggtagtatgtggccaagaatggtgttaaaaacagtataattggctgtttaatcttgggcaccagaaacacgggtggtagggttcctttttggaacaaaaaacataatgttgctttaa

SEQ ID NO: 31386 - DNA, 418 bp, Gossypium hirsutum
  Clone ID: LIB3148-049-Q1-K1-F1
cccacgcgtccgcgtctttataacagattgttgtataggagcaaacaaagaggatttctggagctggatttggttttgggaaaatgggttgaagaacatatccattccatggatgaaaatggaattaaagctcttgttaatgtcctcgatttggaaaaccccgacctttggaaatggctaaccggtcaagaacaaccacccgaagcagtgactcttaatcctgtcttctctgctgtgcaacagaaggtcttgaagaacctcaacaaccattcctctctcgagacccgagcaacccctggccggccatgggtgagagggtgggatgatataaaaaaaggtcgcgacagcccaatcaccggaaatcagtagcttttcttttgcctttgaggtaacaggttctgaaggcttgtttatttcg

SEQ ID NO: 31387 - DNA, 169 bp, Gossypium hirsutum
  Clone ID: LIB3148-049-Q1-K1-F10
cccacgcgtccgatccactgtagtcatatatgcactggtagaattttgattagatgttttaaataacaatcagcatgcttacagaataagagtacggatttgtggcctgtaaaaacaaaattaattgtagcatccacttttattgttatatatcatcattagattaccc

SEQ ID NO: 31388 - DNA, 326 bp, Gossypium hirsutum
  Clone ID: LIB3148-049-Q1-K1-F11
tatgaactgtttgtgttttaaagtgggtttgtggttgtttaagggaactatgctttgcggtgctgaaatggtcagtgaaccacatgtttaattactatatgaataaagttttatgtttataattaacagattaaaaaaaaaaaaaaaaaaaaaaaaaaaaaaaaaaaaaaaaaaaaaaaaaaaaaaaaaaaaaaaaaaaaaaaaaaaaaaaaaaaaaaaaaaaaaaaaaaaaaaaaaaaaaaaaaaaaaagggggggcctttttaaagaatcaaagtttatttccccgtgtatgcaaagtaaaaatttttttatggggcccccaaa

SEQ ID NO: 31389 - DNA, 425 bp, Gossypium hirsutum
  Clone ID: LIB3148-049-Q1-K1-F12
actcatgcatccgcctggctgcatgaattccgcacgagtttttttttttttttactttttattttttattttcgggtgggtttttttttttttttttttttctcttttcccgaacaaggattattttattaatcactttgggatattgcatttccaagcaatgaaacttcattttttgccaacaaggggttggattttttttttttttttacaacaaaaagttgactgccagagaagccaaacaaggggtgggagatatatatatatattcttattcttattcttatcatgggggggcttttcattttttggaatgaaactttataaagccctcccagagatgatttatcttcatattattttttcaataaaaaacaatcattctcatcccattcaaataatgcctcttaagtttccttttttga

SEQ ID NO: 31390 - DNA, 409 bp, Gossypium hirsutum
  Clone ID: LIB3148-049-Q1-K1-F2
cccacgcgtccgcttgtgaaccttctagcctcccaaaatatccccccagtaaagagatggatgcaaaacggcgagatgatgaagcacggagactcaaagcagctagtaaagccccaggtgacggtgcaaggaagacacgaacacgtgatcgtacaagggcagtgcctgccccagaagccaatgccgagcttcagtctaatcttgatagaaggcggttaataacccatgcaaacgcatagagcaaaagcgaaaagttccccccaccacaccaagatggagcacttggctttcctttaggagcatcacaacacattgatccttcatgtgttcctcctgatgtccccttcagcactacattcacatattcgaaagaaccaattcaaacttggtctggtccgctggtcgagtc

SEQ ID NO: 31391 - DNA, 418 bp, Gossypium hirsutum
  Clone ID: LIB3148-049-Q1-K1-F3
gccacgcgtgcggtcaggcgagcacgcatttattggtcccagcctttgctgctttcaacaatgtagtagcccatcagcagcagtgtcgcgaagctgatttctctaaaaaaaaaaaagagaatgcatgcctctcagacgtatctcacccaattggttcgtgcaggcgctcgctcaacagtctgaggctcgtttagtgggctgctttggtgtggcctctgacacacactcagactggacatcctcgttcccatctaatggtgtcacataatagtgaagtagagagcgtgttcatgacagcacgcgcgggtgctcttccataactctcgatgactcaaaatccgaagctgctggattaagaagctggctactctagtctcctacatgtagagataatatctgatgcatcatatctttttat

SEQ ID NO: 31392 - DNA, 367 bp, Gossypium hirsutum
  Clone ID: LIB3148-049-Q1-K1-F4
cccacgcgtgcggttggatttgctgatgaacgtgtagaggaacgtatcgctgatgatgacgtgggtacgattaaagggaccacgagcacaagtgcggtttccatgatcctcaagggtgcacatgactatatgcttgatgaaatggatagagctctacatgatgctttatgtactgtgaaatggactcttgtatccaacacggtagttgcaggtggaggtgcagtttaagctgctttatcagtgtatttggagtatctagccacgactttacgatcacgtgagcgggaggctactgcagagcttgcaaaaactcctttaattattccgaacgtgcctgcaatcgatgctgccaaggatgccactgaat

SEQ ID NO: 31393 - DNA, 379 bp, Gossypium hirsutum
  Clone ID: LIB3148-049-Q1-K1-F5
cccacgcgtgcggtgaggaacatcgtggagcaagctgctgtcagggatgtccaggaagcgtgcgtctatgactcgtacactctgcccaagctgtatgtgaagatgcaatactgtgtttcatgtgcgatccattcccatgttgtgagggtccggtcccgcaccgacaggaggaaacgtgacccacctcatcgctgcattagacgcagggatgatatgccaaaacctggtctgcctggtcaggctcctcgtgctggtagtgccgctcctgctcgtgcataaggctctagaagtttaagatgaatttgtgttgcgtgctttgctttgagatatcattgctttgatttagagaactaggatcatgtacggagtttttttttat

SEQ ID NO: 31394 - DNA, 380 bp, Gossypium hirsutum
  Clone ID: LIB3148-049-Q1-K1-F6
ctttggtatgcttattgccttacctgtagcattggtctactatcttcttttagcattgtgaaaatgttttcctggaaaaatactgcaaattttctttccagaagcagtaacctgacatcagtttctgggaaacttcatagatggacatcatatatttatagatgtccaattcagttttctggaaaattctttgacattattgattgtttcctgggaaaaaacaaactatatttatacaagttattacatttaatacaacagagaactaaactgttgattgagtgaaatatattctcgtatttattctttaatttttttttcaaggttttgaataacacaaattcagccaaacagcaacgtgtttggtgttcaaaagtttt

SEQ ID NO: 31395 - DNA, 311 bp, Gossypium hirsutum
  Clone ID: LIB3148-049-Q1-K1-F7
gcatggtgtgcttattggcatgcctgtgtctcttttcgactatggccttctaacatcgggggggtcttttccaggaaaaagacttccccttttttttccagagtctgtatcacttcatcagttactgtcaaacttcatatttggacatcatatatttatagatgtgctattcagtcttacggataaatgtttgacattattgattgcttcctgggaaaaaacaaactctatctatacaagtttttccgtttcatacctctaagaactaaactgtggatcgtgcgaaagaatagctcgtatttattctttaa

SEQ ID NO: 31396 - DNA, 308 bp, Gossypium hirsutum
  Clone ID: LIB3148-049-Q1-K1-F9
cctcacgcgtatcgaagaacaagctaggaagcatttttttttatccgaacactggtctatggcgtgggggatttcatttccgtttaaaatcaccagctcatctggaaaaatcatcacacgtaatatccattcactcagaccgtgttgctctggctgatcaaataataactcctcgccgtatcactaattgattatacttgcaggaaagccaatggactccagccctttgctaaacaacttcgtcccccattagctcctctttaaataacatgttgcgctataaatgctaatgtatacttcttattact

SEQ ID NO: 31397 - DNA, 359 bp, Gossypium hirsutum
  unsure (1)..(359): unsure at all n locations; Clone ID: LIB3148-049-Q1-K1-G1
cccacgcgtccgacgagcactatctgcgacccttctttatgaacccacaacagacgattaacatctggtatgttccgagaaagaaggattccttcagtaagccggacgatattttaactgccgcggagaaatacattgaagagaatggaacagatgcatttgagaagctcattcatcgggctgacaagtccaggagtagtagttatggtcacatatatgatgatgatggctacaggcattgatatccttacagcaaccccgctatattttgttgctcttgtgaagaactcttgaatgcttgtttaaagcgtgtaaattatcttaatttgcttgttagtgcaagtttctaaacactnttt

SEQ ID NO: 31398 - DNA, 417 bp, Gossypium hirsutum
  Clone ID: LIB3148-049-Q1-K1-G10
ggcaattcaagaacagggacgaggacagatactaaatacagtggaggaaatccaagaaagacatgatgctgtagttgagattgagaaaaagcttctcgatttgcaacagatttaccttgatattgcagtacttgttgaatcccaaggagaaattttagacaacatagaaagtcagattcgtttgcattctcaaatctcttagaatgggcatttaagtgcatattaggttgaatgacgtgttctggtcggtcttgtgcgttaatggaatcttgttcaggtttcgactgccgtcagtaacgtccaatccgggacggttgcccttcaaaatgcaaagaagcgacagaagagtacaagaaagtggacgtgcattgccattataatcctcctaatcatagttgctgttatagttgttggagt

SEQ ID NO: 31399 - DNA, 405 bp, Gossypium hirsutum
  Clone ID: LIB3148-049-Q1-K1-G11
ggcgttgaaggcaaccgcagtagaaggtacagaccctattagtttgtgggagtgtggacatcaggtagcgcttttgctgggaaacaggagacagacgttgtagttggatgaatggtgaaggggactgtttaaccaccctcttatctctctcgttcactgcctccatacccaaaatcgtggattataaaacgaaattagagagtgaaaacaatgttggaatggggaaatttggagcatcatatagaaaacttaaaaaggtctgtaggagaggtacttgaaattatattgttcgacaagtttagttgtacttggtggattgctttattgttacatagcaggaaacagaagttgggttttgcttataactctagaggctatatacaggctccactccgtactccatgt

SEQ ID NO: 31400 - DNA, 419 bp, Gossypium hirsutum
  Clone ID: LIB3148-049-Q1-K1-G12
cgagaaatgccaaaattggagacatgcaggatgaacatgctaccgaattgccaaataattcccgggaatccttaacagatcggtacaatactctacgccaagaagctattaagtacgttgaagaaggggcgaaatctattcatgtttacaatgtggcaatggatgctttacaagaggcactgaaaaaggttagctctgcaaaaaaccaaagccctatatctgctgaagatggagcactgagcaatggacgtaatcaagagttgcatgcagctggagatatcgagacagtggcatgtcaatctgcggacgagaaggaaaagaaaatccgggaattgacaacagagttggagagcataaaccgccgatgcgaagtgtacagagcgaatctgctggctgtgttgagggacatggaagaacag

SEQ ID NO: 31401 - DNA, 430 bp, Gossypium hirsutum
  Clone ID: LIB3148-049-Q1-K1-G2
cccacgcgtccgaaagaggagccaccgaggaagaccacaaccaattcatctttgacaataacgactgtgagatatggggagtgtcaaaggaatcacgctgccagcagcggcggttatgtcgtcgacgggtgtagggaattcatggcaagtggagaggaaggaacgagtggtgcccttgcttgtgctgcttgtggttgccataggaattttcatagaagtgaagttgaaactgaggtagtctctgagtgttcttcacctaataattcttccagtagagcataaataaataatatataggctttcatttattaattatatgatgttttggtaattggcttttagtttttgtgccaaaaacctcttccttatcaataatttgcgttgtgtttctttgatggtttttttttcttaaacttgttctgtatgtaat

SEQ ID NO: 31402 - DNA, 355 bp, Gossypium hirsutum
  Clone ID: LIB3148-049-Q1-K1-G3
gttggggatcattgtaagatggtgtacttgatattgacgtattattattttagcttttcaccgtatcaccaccattaagatgatgggtcctatggagatggcggtgggcggacaattggtgcttaattccttccttacaatccatctttgaaccatgttgctgcttaaaaggatgtttggagctggagagtggattgtggtgcttttttattttattttattttattatttaatattcaagggttttgagaacattaatgttaatagctattattgtacgagatttttttttgaaaaattagtgtcagtttgcggtcaaacttctatggaacttatatttaatacctggttttgg

SEQ ID NO: 31403 - DNA, 138 bp, Gossypium hirsutum
  Clone ID: LIB3148-049-Q1-K1-G5
tccacgcgtccgtaaagatcctagaccttatctgaatgtcatcttcagtactgtaaatagaatgaaaatacttggaatatatgaaaaagcacaagtcttaaaatcaaataaaaataaaaaagagaaatacatttcaat

SEQ ID NO: 31404 - DNA, 406 bp, Gossypium hirsutum
  Clone ID: LIB3148-049-Q1-K1-G6
ccaagctgcagtttcttcaatagctcaaactactatcataaccatgcaggatgttcttgggttggacagttctgccaggatgaacattcctgcaacacagcatggaaactggagttggaggatacctaattccacgagttttgatagcttggaaaaagaagcgttaagattaacagagatgctttccatgtacggtcgaaagtagtccaggaaagcttcatatctttcttttcctcggtcattacacatgaatttagtgccacccccaccattatgtgtctagtctagctttgaataagttcttttgctgatgactgagggtttagagttgaattttatttataaactaataaaaagcttgataccctttcaaaaaaaaaaaaaaaataaaaaaatatattttaat

SEQ ID NO: 31405 - DNA, 312 bp, Gossypium hirsutum
  Clone ID: LIB3148-049-Q1-K1-G7
gcagcagtgagcaaaagaggaggttagagtttctttatgtttatggatttgtaacttctcctgggacttatccggatttctgctttggcctgagttaaaatgagtttgtataattttgcttttcagaataaacagtttgattcccccaaaaaaaataaataaaaaaaaaataaacaaaaaaaaaaaaaaaataaaaaaaaaaaaaaaaaaaataaaggaaaaaaataaataattatataaaaaattatgggggggcccctttaaaaaaaccaaaattttttaccgctggttgccaagtaatatttttttttt

SEQ ID NO: 31406 - DNA, 298 bp, Gossypium hirsutum
  Clone ID: LIB3148-049-Q1-K1-G8
aaagttcaaaaaaaaattaggacacagattttggtctttaattattgggcaatctaatttgaaatttgtgtttttctttttcactacagatagtgtctgtagtttgtaattttgtaaatactaaagctttttttttcttctttgtagaaagtttttaactgatgggcattatcactttgttttagactagcataattttttttcccttatttctatttttggaaaaaaaaagggcactatctcttatttatcatcccaacaaatattaaaataaattgtctatgaataaatagtttta

SEQ ID NO: 31407 - DNA, 332 bp, Gossypium hirsutum
  Clone ID: LIB3148-049-Q1-K1-G9
actgtacctaatgcttcaggggatcccacgttcttaacattattagatactcataacactaatttgggtgcaactgaaaaagatcctcaaaaatcaaaccatgaattgacagtcaaggattccaaataccaaaaggctgtccttagtttgtacaacggaaaagcttatcttgttgtcaatgttgcttataaatgtgcactcactgataaaaattatgcccacttgactgatctttacaacaaattcaacggcccaggactggagatttattcattcccatgcaatcaggatttgagccaagaacctgttaccagacaagatgcacaggaatt

SEQ ID NO: 31408 - DNA, 306 bp, Gossypium hirsutum
  Clone ID: LIB3148-049-Q1-K1-H1
cccacgcgtccgagcctttgctggattcgtctcggacaagctgagcatgctttaacagatgcaagggcttgcaaagcattaaaaccagactggccaaaagcttgctataaaaaaagggctgcattgcggttggtggcaaaaatttattgaacaacttatggcctttaccaaggtgtgccagttggcccccaaaattaaaaacctgtaaatgcctttaaggaaaccagtgaaaccgggaagaaggttcatgggacccatcaaaaaaaatctaattaagtttcccagccgattcacccaaaatttgag

SEQ ID NO: 31409 - DNA, 420 bp, Gossypium hirsutum
  Clone ID: LIB3148-049-Q1-K1-H10
aaggaaaagggaggaaggttgaggagctactaaaacgatgcccaaatcttaagaaaattattatttttagggttatttcaaaagccaagccacacaaggaatgccagggaagtgtatgcagtatccattgttggtccttttcctattgctgtaactaatttattggatttaacaaataggtagcttgggagactgagtttccattgattgcaactgcaaaagctttacaaattttcaagaagaggagccaatgtttgcatgttattcaagtatatttagtctattggtattcttgctttgtattttccagcttctaaaatacattcattgatgcaaggaagccttatatgtccaacaaaaaaaaaaaattcaatgaacgacaaaaaacaacgtcgagactggaaaaaccatggcaatacc

SEQ ID NO: 31410 - DNA, 401 bp, Gossypium hirsutum
  Clone ID: LIB3148-049-Q1-K1-H11
caaaaaccagccctaacagagcagctgaacctaacatcatcatcatccatggcggcaccgatctggctatgggctttctctgtagccctaactctggttccgtctgtttttggaaactctgaaggagatgctcttaacacgttgagaaaaagtttgaccgatccagataacatactccagagctgggatccgaaccttgttaatccttgtacttggtttcacatcacttgtaaccaaaataatcgagtcactcgagtagatttaggtaattctaacctgtctggacatttggtacctgagcttgggaagcttgagcatttgcagtatctggagctttacaaaaataagatccagggaaccatcccaactgaacttgggaacttgaagagcctcattagttt

SEQ ID NO: 31411 - DNA, 420 bp, Gossypium hirsutum
  Clone ID: LIB3148-049-Q1-K1-H12
tccatacgtgttaggatgtagactcgctcttttagacaaattacctacatatggcagccgaactggatgcggcttaactctatggctgtgacacatagcatgattggcacatggatgacatatccacatacgaattaattcctaaaagatgagagcgaacgattctcataaacttccttaatagacctaaaacgtttaaatatttataaaagattgacatctcatccactttgcaacccatatgtatgtcacattatcgtagattaagaaacttttacttttctatgcattttggggcgttttcacggaaaaaaataaacttacccgctcatagaagcgaataaaaaatgttatcctggaacttacgtcaatttacactaggaatattgtcaatgttaatcgagtgaaaactcagtccac

SEQ ID NO: 31412 - DNA, 435 bp, Gossypium hirsutum
  Clone ID: LIB3148-049-Q1-K1-H2
gttttctctacttccccttctccttctgctctccaatggctaactgacaaatacgagtccccacccattccaccaaacatgtttatcttgtctttcagaacaaaagaaacaacaccaccagcctaagcctaaacagatccgagctttctattttggctaaaccaagactatatcttgttctatattgttggtgggtctgtttgtttccaaagataacttcactgcattttctttgctttttccaaatggatgttttctagcttccttcttttggagatcttaatgtgatttgagcaagatcaaaaggaaacagaagatgcttgtagatttgcggaacaaaatgcagctgcacagagatattttgttgaagttttgtgtgattgatcggatgtgtatgccggctttcatcaactactttcgaaggccttactagga

SEQ ID NO: 31413 - DNA, 433 bp, Gossypium hirsutum
  Clone ID: LIB3148-049-Q1-K1-H3
cccacgcgtccgtgcagttgttgaggaaattggagtgccagctacatccttgtcagatcctctttttatcggcatatcccgcagggtcttgaatgttagaccagctatctttttctttattaaatgcagtcttgaatcaaaagaaatccatcaactgtattctaaggcacaagatggctatgaatccactcaactttatacagtctcaatgattgaagtagagcatatgacattaaaaatgcctggctgtcatcaaggtggatttgctctctataaactaatggttgaagcgttgaagaagaactgatgatagttcattgctgctgctctcttcgatttcaaatttctactcttctatatattttccatcttagatttcaaagcaataacatcgagttcataaactttgatgtaactataacggcatttaatt

SEQ ID NO: 31414 - DNA, 99 bp, Gossypium hirsutum
  Clone ID: LIB3148-049-Q1-K1-H4
tcggccacgcgttcgcaaattatcttcttctggtttttttttaaatggctaactttgcaagggacccgcttggaatctgctaaagataatttaatattt

SEQ ID NO: 31415 - DNA, 414 bp, Gossypium hirsutum
  Clone ID: LIB3148-049-Q1-K1-H6
gccctagaatttttgttagaatctcttggatttgctaactgtaccgatgtctttcccgtgggtatcggagatgatcggaccgatgaagatgcattcaagatattgagggacagaggccaagagttttggtattcttgtatccaagttccccaaggacactaatgcatcctattcattacaagaaccagatgaggtcatggactttttacgacgtctggttgaatggaaagaattatctctaagaactcagtcgagaatgtagaagaaaataagatagtggaagtatatatctgtgcaccctagcaaagaaattgtgcaggggggtgtgagattaaagtagcaaaattattgttttaagatgagagaaatgattattaaagctttgtacatctttgtaactagttggggtacaaa

SEQ ID NO: 31416 - DNA, 265 bp, Gossypium hirsutum
  Clone ID: LIB3148-049-Q1-K1-H7
cagcaaccaccgcaacgccgtcttccgcggcggataaaaccgatagcaaatccagtggaaccaagcttggtccccacttcgtcggttccacggcggcgctactggttgctacagcggccgtgtttttccttgtattcccagctggatttgcttcaatagtttagggtttttgcatgggatttcgagatttgggggtttatttattgttgaagtccttttgtttttaaacagtctcagaaaaaagatggactgagttgacaattta

SEQ ID NO: 31417 - DNA, 347 bp, Gossypium hirsutum
  Clone ID: LIB3148-049-Q1-K1-H8
cccacgcgtccgcccacgcgtccggtttgttcctaaactctgatacttgatgatggccttaatcaattatggatagtctttgttgtggttaacataaaaaacaaaaataaagggtcacacaaataagaacaaaaaactccatcaacttatcaaatgacacctaaaaaccgaaaatgttagccaaattagagtcggctcaacaacaaaaagaatgtttcaccagttaatgtaaaagataactggtaatataaaaaaagaaaaagagaggttggcctaagaaatatgggcccgattggacaatggcaaaggcattgtcaccaatgcctatttcctcatccgtccctccc

SEQ ID NO: 31418 - DNA, 264 bp, Gossypium hirsutum
  Clone ID: LIB3148-049-Q1-K1-H9
cccacgcgtccggcgatgtaaacgagcttaattacagcaatggttttgattcgtcaccctcaccggatcagcctcctatggatttctccgacgaaatgctaaaagagtggacggccgccgcctccactcactgctgtcaccaaagtgcggcttccaatctccagtccttgcctccatttattgaaaatggaattgaatgaccttgaaaaaataaaagacgaaaaatattttctcatgtaaactaaataaacacatcttccatca

SEQ ID NO: 31419 - DNA, 279 bp, Gossypium hirsutum
  unsure (1)..(279): unsure at all n locations; Clone ID: LIB3148-050-Q1-K1-A1
cttcgttgtttattactggcagttttaactttaggatgctttcgtgttgatgttcatggatagtcttagaatagttgcatttaaggttttcaatagtgcagccgcctcacaccatagggaggcagaatgtcttcttttttggtttattttgtagccttagcttatatgttttgaacaattgtaaacagaaattttttccctttttaatttgttttagagtttgcttcnnnaaaanaaaataataatacaatttttttttataaaatatttataaaatat

SEQ ID NO: 31420 - DNA, 244 bp, Gossypium hirsutum
  Clone ID: LIB3148-050-Q1-K1-A10
cccacgcgtccgcccacgcgtccggaacaaactacgtcgagggtacatgttcttctctagggacccattttggtgcgccaaaactaattttgtcacgactatattgttattgcttgtattctcctgcctatcattattttatatctgcaactctttggtgtgaaatgttagatccatggtaatttacaaaaattatttatattaaaattgtttttcctaaaaaaaaaaaaaaaaaaaaaaatat

SEQ ID NO: 31421 - DNA, 105 bp, Gossypium hirsutum
  Clone ID: LIB3148-050-Q1-K1-A11
cggacgcgtggggtgttttttacattatttgtgtagctgcccaaataattatgtcaagatacaagaaagcatagtgatgaatgacaataaacaattctatttatc

SEQ ID NO: 31422 - DNA, 64 bp, Gossypium hirsutum
  Clone ID: LIB3148-050-Q1-K1-A12
acaactcacagtaacaaggatgaaggattcttaaattaaagattttgatgagatttttggcggt

SEQ ID NO: 31423 - DNA, 433 bp, Gossypium hirsutum
  Clone ID: LIB3148-050-Q1-K1-A3
cccacgcgttcgcccacgcgtccgcccactcgttcgtccacgcgtccgcccacgcgtccggcttagtgcatgggagctttaccaaaaatagtttactccgaaatcgtcttctttgtttagttatgttttgttttgttaatgttttttctaaaaaaacaaaatgtttgtttgttcttcctaaaaaaaaatataatattttatttttttaataaatattttaatattttattttttttttatactatttttattatattatattatttattttattaatttatttttatattattactcattttttatttatattaatttaagtgtggcccctctttatatatgttctaattttttagtcgccttgtttataatattaatatattttttttattggggcccaatatttatatatattttggcccctttttataat

SEQ ID NO: 31424 - DNA, 440 bp, Gossypium hirsutum
  Clone ID: LIB3148-050-Q1-K1-A4
gcaacttctagtgtctccacagggattatttaggatggatttcaacttgcgtctcatatgttactttaaattgaaccatcaaggatttcaaagcttcattttgtaacctggcattgggcttttagtgccagattgtgcagaatctttgaaaccaagatggttatcttcctgtgttgagcaaaaaaaaaaagcacttgctttgctaacccgtatgaaaaatacaaccgcgaggatttcttcaagcggctgctatcttgagaacggcattttttatataccctctttgacaagaaagaaatgttctttttaggagaatctagaggcgtgagagtgtaccagttgcaaataaaaaaaatcagaaaaccagagtgctttatagataatctggtcatacaaaaaattattatgattctaagacagcgatgttacatttgaaaaat

SEQ ID NO: 31425 - DNA, 397 bp, Gossypium hirsutum
  Clone ID: LIB3148-050-Q1-K1-A5
cccacgcgttcgaaaaaaaaaaaaaaaaaaaaaaaaaaaaaaaaaaaaaaaaaaaaaaaaaaaaaaaaaaaaaaaaaaaaaaaaaaaaaaaaaaaaaaaaaaaaaaaaaaaataaaaaaaaaaaaaaagaaaaaaaaaattaaaaagggggggtttttattatattttatatttaatttatgtgtaatttatggtgtttgtttaattttttgttatggataattttttttatttttgttatttgtgaaaaaaattgggatttgttaaataatttaatttatttaaatattttttttttttaaaatattttttattatttataaaattgtttatatataattttttttttaattgtttttatcttttttaattgttgtattttttttttgattttttt

SEQ ID NO: 31426 - DNA, 241 bp, Gossypium hirsutum
  Clone ID: LIB3148-050-Q1-K1-A6
cccacgcgtccgaaagtgaagcatatgtagtaacttttgtttttcaccgtaatcttgggtcggcgttttccttttattttgttggtgattgaggtggtgctaatagttagtacaaagtccagctagtggtaaaatgttgttaagggggctgaagcggctgcaaatcaaggcaaaaaatgtagcccgcagctcttggtcttagtcattatatatatatactaatttttatttttactgctct

SEQ ID NO: 31427 - DNA, 404 bp, Gossypium hirsutum
  Clone ID: LIB3148-050-Q1-K1-A7
gccgcaccgaatacatgggcaagcctcaaacaatcaggaacaataattcaccgttgtcggcagctgtgatatgatgataaggcgacctggttctcggttaaattttatttggaagcctggaaggcctcgtttcatgcttatgttacagctccgtagctgctggatttatcatctcctggtgtagcttctatagaatagttttctttttccagacagctttcatagctcatactgcaaagcaaaagaatgtaaccgttcttttgtaagttttgttttgtttttccctgtacttcttaaaccacttgggagaaagaatgcttgagattatgcttaaaaagtaatgctatgcccggtactacctagagaatctgttacttacaacctgaattcctttcctatatgtg

SEQ ID NO: 31428 - DNA, 375 bp, Gossypium hirsutum
  Clone ID: LIB3148-050-Q1-K1-A8
cccacgcgtccggaactctgttttgccttttctcatccttggtggtaccatataatgtaaaagggaatataaataatatatgaaaaataaatcttccagtgaaaaaaaaaaaaaaaaaaaaaaaaaaaaaaaaaaaaaaaaaaaaaaataaaaaaaaaaaaaaattaataaaaataaataaaataaaaaaaaaaaaaaaaataaaaaaggggcgcccctcttaaagaaccaaaatttactaccccggtcatgcaatataaaaatttttttattgggcacctaaaatttaattcacgggccgtgtttttacaaagtctgaattggaaaaacccttgcataccccaaataaatgtttttaaaaaaatataccctttt

SEQ ID NO: 31429 - DNA, 431 bp, Gossypium hirsutum
  Clone ID: LIB3148-050-Q1-K1-A9
ttcctttgttccagcagacactcctttgaaacttgcagactttttcaaaatcgatggagtttatcgtattggaagcatatcagataaccctactggtggagggatataccttgacacttcggttatgaattcggactataggtctttcattgagattgtgtttcagaatgatgaggatattgtccagagctggcatctcgacggctactctttcttcgttgttggtatggacggagggcaatggacggctgctagtcggaacggatacaacctccgtgatgccgtttcacggtgtaccactcaagtgtaccccaagtcatggactgccatttatgtggcgcttgacaatgttggaatgtggaacttaaagtccgagtattgggcgagacagtacctgggacaacaagtttatttgcgtgtcttcacaacgt

SEQ ID NO: 31430 - DNA, 457 bp, Gossypium hirsutum
  Clone ID: LIB3148-050-Q1-K1-B1
cccacgcgtccggccaacatcttggccgctggtccattctctggtggatccatgaacccagctcgcgtccttcggaccagcagtggctagtggcgacttcaacggcatatggatctactgggtgggaccactgatcggtggcggattgtctggtctcatctatggaaatgttttcatgaactctgaccatgcaccattgtccaatgacttttaatcaagttattctcaggacagtctaatttgcttaattcgatctcttaatccattgcttactgtaataaaattggcaccttctagttggtgcttttcctttttttaagctttgggtttgggttttggttttgatatttgtttggtaaaagatatttggtcctcaaatcgtttgcttattgggggaaatttgaatgaagggtgggttttttttttttttttactaaatatattttactgtgtatta

SEQ ID NO: 31431 - DNA, 277 bp, Gossypium hirsutum
  Clone ID: LIB3148-050-Q1-K1-B10
cccacgcgtccgcttcaatttcctttattttctctatgttgctcatcggtatcgttgcaagggccaagcacgaatagaaccgaaatctgaacccgatgtagagctaagttcgatgtaaccatgaaaccaattaagctgttgtagttttaatgtatatcacatgctaccaaataataaaaaacgtactcatttgaggttaaaaaaaaataatatatataataaaaaatattatttttatttatttttatttatttttatattatattttaattaaatg

SEQ ID NO: 31432 - DNA, 353 bp, Gossypium hirsutum
  Clone ID: LIB3148-050-Q1-K1-B12
cccacgcgtccgcccgggcctattattttgttgcattggagtggtaaagggaagccggggttgaggctggactcgaggaaaccctgcgttgttgatcatctttgggcaccctatgatctttatggctcatcagatcactctttggaggaataagggaaactgagtacaccaatccagtctgcttttaaccatggccacaacaagccctttaacttttcattctacatatattcccagaaccataactttgaagtctcagtatgaaagggataagattatgtttcgatttataaattaataaaaattatagggggaaagagtgagtgaggatttgtatattatttacttatttg

SEQ ID NO: 31433 - DNA, 430 bp, Gossypium hirsutum
  unsure (1)..(430): unsure at all n locations; Clone ID: LIB3148-050-Q1-K1-B2
cacaaatgaactcactttggcctggccacactcaacaatgaagatgcctgctgcattctgaattaaacagttgagcgcttggggctcgggcatcaacttggtgactgttcttgcatcgaatatgcaacacccttagctgtcaaactgggaaagaatggtggagaatcaattttcttatagatccagtcttttgttctttcttgttgagtagttttttaagttttcttcacctcactaaaaaatgactgcttttgacaccttntttctttagaatctcaaatntactttggtcagagtgtttgttcctcctcttcttctgggtggtgcttttagagtttagatgtaagactcgtgtttatggatcttaatatgataggagtcttctatagttttcaaattttatatattgttcatttattatatttatttt

SEQ ID NO: 31434 - DNA, 288 bp, Gossypium hirsutum
  Clone ID: LIB3148-050-Q1-K1-B3
cccacgcgtccggttttccgtaggtacagagagattatttctgatcgcgtgtccaaggagaagagtgagtttgtgaatgtcactgtttctcttataaaagcttgatcattatcgtcatcatgatcttcctttattttattattagataaataatcactggttatctatgctagaaatgaactgttcgaagcaaaccgcagtatccagtcaagagtaatctcttgcaagcatattgtttttaattatagctctctcgcatgtaatttgattaaatcgaaacaaccaatt

SEQ ID NO: 31435 - DNA, 370 bp, Gossypium hirsutum
  Clone ID: LIB3148-050-Q1-K1-B4
ggaaaaggtaagggtgcagcagaatatgagtaaatgatggaactttcataagggcccaaacaactaaaagttgacaaaataacaatgtacgacaaacgagagtggaattgcattttgcaatactgatttggtttgtaggaaaatgtgaaaatctttgtgtaacccataatcacaaagccatgtagtgctaatactgtttaagaaggttccaattacttagtttcatgctcaaaaaaaaaaaaaatattttatatttaaattattattatttttaaattatttttttttatattattttttatttgggttgtcttttttaagatatacttaatttttttttttggtgtttatttttatgattttttttttt

SEQ ID NO: 31436 - DNA, 427 bp, Gossypium hirsutum
  Clone ID: LIB3148-050-Q1-K1-B5
cccacgcgtccgggcaaggccacggtggaactgaaaccaatctccaacgtcatatcttcctttctcaatatcatgaaatatcgaggatacataaagaacttcgaagttcatgatccacatagagtgggcaggataacagttgacctgcaaggaagggtaaacgattgccgggcactcacttacaggcaggacatcaaagcaaaggaaatcgaaaaatacaaaacacttaaacttccaactcatcagtggggttatgttgtgatttcaactccggatggttttttggatcatgaagaagccattcgaaagaatgtaggtgggcaggttctgggttattttcattagacttggttatctttctgataagtggttgagctctgctttatctgtgaactttcaatcaaatatctatctgaaatttgtatcg

SEQ ID NO: 31437 - DNA, 412 bp, Gossypium hirsutum
  Clone ID: LIB3148-050-Q1-K1-B6
cccacgcgtccgaccactacaaacagtctttccaactcgacgttcaatgcgcaaatctccaaaacaagaggactctgcaaggttcaatgcaaaattaaacaccggcaataaaagtgtaaaggaaccaataagaaagaaagtaattgaagctcaaccatcttcgtacaagaagattgaaactgttgctcgtcagacaccagacaggattaaccaatcagtcagttcaactaggggagacgcgaagtcaaatgccagaagattccactttaaaagtggagaacgagcagaaaggagaaaagagttctatatgaaattggaagagaaaatgcatgcgaaagaggcagagatgaaccagattcaagcaagaacacaagaaaagacagaagctgagattaaacagttgcggaaaaag

SEQ ID NO: 31438 - DNA, 399 bp, Gossypium hirsutum
  unsure (1)..(399): unsure at all n locations; Clone ID: LIB3148-050-Q1-K1-B7
gagaagatagacctagtatttcagccatttgcagaggatttggagctcaaagttccagaacaggaagactgcaggtgggatggaaaatacgaaaactcagcatacgcaaagtgaaaggactgagagatgatatggatgaagcacaagaaaaagttcatggttaggagctgctgctttccaggaaacactactttcaccatggaggaaatctcatatctttagataacaggtttttgtatccactaccgggttcattttctgtgtttaactatcgaatctttactctttgaataaaggtattaatttacttaanaaaaaaaatattttaattattaattataattttataaaatttaattaattttattatttttatatttatatttattttattttttt

SEQ ID NO: 31439 - DNA, 151 bp, Gossypium hirsutum
  Clone ID: LIB3148-050-Q1-K1-B8
gtgatatgtataatgtgtcgtaatctttatttaaaaaaaaaaaaaattaaaaagagggggggggtaaataaaaagagagtagaaaataacaaataactaaataaatacaaaactattaagccacgaaaaaagtattaaactttattttatg

SEQ ID NO: 31440 - DNA, 422 bp, Gossypium hirsutum
  Clone ID: LIB3148-050-Q1-K1-B9
cccacgcgtccgggcggatatggcaccgtattatatggcaccagatgctaaggcggatgcggagccagcatcaaaggccagaactaaattataaaacacatttgaccgactatgctttcaatagcgaacaccggaccagaaaccaacatacctcatgagtgtatttgcacgactaatactaagtgtctagaacagaagcacataatgtttgaacaattagttgaaagccttgatgtggttcgagacattgagaaagttgggtctagtggtggaagaacttctaaaccagttgttattgccgtttgcggacaactctaaaattaaaaagacagccacagtggttcatgtctgaaagtttaagcttcattttatgctgctttgttttgttttaaatggttagtggttttggtggttcttgaaaa

SEQ ID NO: 31441 - DNA, 193 bp, Gossypium hirsutum
  Clone ID: LIB3148-050-Q1-K1-C1
aaggctttgagctttgacttgagctcctagtttcaatgtcttcaaattgtacatttgtctgagaaaaaataatttctctgttaaattaaattgatgaacaataaaatttttgtggtcatcaatattaagctaataaacttccattatgtatacaaggaaaacctatgttataggggtttccctttttcttctt

SEQ ID NO: 31442 - DNA, 223 bp, Gossypium hirsutum
  Clone ID: LIB3148-050-Q1-K1-C10
cccacgcgtccggaggtcttaaatttagggtttcaaagtgggcttgggcctatattgttatgggtttggtttgggtttggtagttggtaattctaaagttactctgttactgtttggtttgggttctctcgtttttgatcgatgttgttactgttctcttaaaagcataaaaatggaatgaagtatcttcttttcaaaaaaaaaaaaataaaataaaataaaa

SEQ ID NO: 31443 - DNA, 363 bp, Gossypium hirsutum
  Clone ID: LIB3148-050-Q1-K1-C11
cccacgcgtccgatgaattcaggaggtattgcacggtataactggcatccgcacaaattgcgcggagtcaggatcgaagataacctgtaaatgttgcctgccacatttaccatttcattgtgggtattcctggaaattggggggggggatctgctgattgtaatgctatatatatagtgggatatatattcattagcctacggtgtaaatggttttacacttgttcctgaaaatggagtcttattctgcatatttttcatggatggggtggctttttgcaatatatttgttttttataggtgcattgtaatttatatttttccatttatgtaattttttccatcttctatgttgtttgtttat

SEQ ID NO: 31444 - DNA, 80 bp, Gossypium hirsutum
  Clone ID: LIB3148-050-Q1-K1-C12
cccacgcatccgctcctacatattatatatatgcaatcaattgttacatggatgcctggggggttaatcaactctaaaaa

SEQ ID NO: 31445 - DNA, 128 bp, Gossypium hirsutum
  Clone ID: LIB3148-050-Q1-K1-C2
aaaaaaaaaaaaaaaaaaaaaaaaaaaaaaaaaaaaaaaagggcagacgataaaaaaagaaaagaaggggacgtacgctttcatgcgaaccacacaacccttctcttgcgtccccctaaattcaattt

SEQ ID NO: 31446 - DNA, 427 bp, Gossypium hirsutum
  Clone ID: LIB3148-050-Q1-K1-C3
cccacgcgtccgaagataatggaattgaatgaaatcaatgattgaggagatttaaatgaatcagaaatggatgagcttagacgattgaatattgaattgtgggtagcaattaaatgtcgtgaaccgatttggtgtcaaaaataagaattattttgttaggtgaaggtgattccaattttgtttctttcataaagcagtgaaaattagatcgaaggaaaagatagtgcatggcttaaaatttgaggattcatggtgcaatgatacaaagtttttgaaggaaaaaatgttcaattcgttcagtaattactttaacagctcatcgagaaaatggttagtggatatggctttgaactttaagaagattttcgaggaagatgcagcgaaacttaagttatctttcacgttgaaagggattaagaaagcatta

SEQ ID NO: 31447 - DNA, 438 bp, Gossypium hirsutum
  Clone ID: LIB3148-050-Q1-K1-C4
gcagcctcacgtcctctccgctcaacttgagcttgctggctctaccattctcgtttctgacatcgctgataactctactcccagggtgaaaaccgaggggactggatgtgtgctctgcctggagactgaggacgtcgaagctgcaattgccaaggctgtcagcgctggaggcgttgcggagggtgaggtaactgagggcgatggcgcgtgctgtggtggtcgcgtgggcaaggtgaaggatccatatggatacgtttggcttatctgctctcctgcgaagaagtgcggtgacgcggaagcttagatgccgttcgatctttgatctactttctgttaatctctgagctttaatttgtcagtaaaaaaaatggcttctagccggtaggattaagtgatcaacagtgatagactctttggtattgactcttttgatactgg

SEQ ID NO: 31448 - DNA, 302 bp, Gossypium hirsutum
  Clone ID: LIB3148-050-Q1-K1-C5
ctaattcaacatccttcatttaccacaatcggaaaatgcacataaaataccacgcacaagattggcttctccctctcatctaatctataataatttacgagcaaaataaaaggaagaattagttgtttcgtatgttgatttgttccttattgttgtgacccacgcatgccagaaacatgtccttgaataaagtattttatttttaaaaaaaaaaaaaaaaaaaaaaaaaaaaaaaaaaaaaaaataaaaaaaaaaaaaaaaatataaaaaattaaaattaaattaaaaaatatatttttttt

SEQ ID NO: 31449 - DNA, 234 bp, Gossypium hirsutum
  Clone ID: LIB3148-050-Q1-K1-C6
cgtaaacgtaccccctagtctcgatctgtttggggccatttattagaaatctacttaatttgtagctaaggaaacctttagcaatgaagaactttatgacccatttagttcatcctaataaaatataggattgtaatggagtagtcattatttgataatggaatgtaatggaattaaatagacataacaggttgaaatttataaaaaaaatttatttttatatattttatttta

SEQ ID NO: 31450 - DNA, 333 bp, Gossypium hirsutum
  Clone ID: LIB3148-050-Q1-K1-C7
ttctcttcctcctatctcatagcagccatgatcattccagagaagaaccgccgcgggatgtgcatgtacctctttcaagagggtgtttgctttgcaaagaaagattacaacttggctgaagcacccataaattgatgttcccaatcttcaagttataaagctgatgcaaagcttcaagtcaaaagaatacgtgcgtgaaacttttgcatggatgcattattactggtaccttactcaatgatggcattgagttccttaggacatatttgaatctttcttctgagaatgttcccgctactttgaaaaaacaagctaagcccgctggtcgttcca

SEQ ID NO: 31451 - DNA, 347 bp, Gossypium hirsutum
  Clone ID: LIB3148-050-Q1-K1-C8
catcgattcatttttggtacagttttcgtagtatcgatcaaacatgagtttcctgggtgggaagagaaaaactcccgcagagcttctgcgggagaataagaggatgctggacaaatctattagagagatagagagggagaggcaaggtcttcagaaccaagagaagaaactgattgcagagataaagaaaactgcaaagcaagggcagatgggagctgtaaaggtgatggcgaaagaccttatccgaactcgacatcaaattgaaaagttctataagctgaaatcacagctccaaggcgtatctcttcgaattcaaacattgaatcaacacaagcaatggagaagca

SEQ ID NO: 31452 - DNA, 413 bp, Gossypium hirsutum
  unsure (1)..(413): unsure at all n locations; Clone ID: LIB3148-050-Q1-K1-C9
cacgtgggtgaggccgacgcatggcggtggtgcagcacgtgctaagggaagcctggactcgactgcggcgcaaggattttcagaaaccctagaagcttctggggtattcctccgatttgggctacggtttgggcttgtaattcgggtttgggtgtgggtaaatggttttgggttagtgaatttgtgctttgggtttgtattgtatttggactagtatcggcttttgtaatttggacattaactggactttattatttttttgttttnnaaaaaattatttattttttattttttataaatatttaatatatatttaatgtttattattttattaatttatagtttttttatttatttatattttattaatattatttatttatatgtattattttatatttaatttataattt

SEQ ID NO: 31453 - DNA, 205 bp, Gossypium hirsutum
  Clone ID: LIB3148-050-Q1-K1-D1
taaaaaaaaaaaaaaaaaaaaaaaaaaaaaaaaataaaaagggcaaccgatctaaaaagaggcagcttacaaacacatacatgcaaacggccaacctcttttatggtgtcccctatatttaatccagtttccgggcgccgtacatcttatttcctggctattctatgggttcacccaacttaattcttttgctttgggtccccaa

SEQ ID NO: 31454 - DNA, 280 bp, Gossypium hirsutum
  Clone ID: LIB3148-050-Q1-K1-D10
cttttctgtattgtcataatactttcaaggaatgccatccaaagctacaccaatggcggtcgaaggatctcatgtgcctgtaagagcaacagatagagttcccacttcagtttcattccttcgaaaccccttatctaatggactatgttgctggtttatctgctgaaggaaaaatgagcatattttttggatagaaataaaaatgttgttggtctatctatggcttcataagataaatctttgttgttcaacatcatatgtttttatggagtttactttt

SEQ ID NO: 31455 - DNA, 432 bp, Gossypium hirsutum
  Clone ID: LIB3148-050-Q1-K1-D11
cccacgcgtccgacgaaagatgcagaggcttctttctctgaaacaagcttcatcatcagccttctccagttcctgctcttcacttctccattcgcttccgtacaaaaccttctcttccgtcgccagcttaaccccccaaaatcactttataagctctgcattctcgaaccaatggcgatcgaagccttgttttactggggaaactcatggttttctctcatacccaaaatttccaaagcgtttttggttttatttctcaaatacccatcataagttttcaagcaaaagtcttttgggttgcagagttcggtttttcagacctcagattcccaaaagcagatttggttttggtccgaattcgggtcttctgaagagccgttggagattattggtccaaaagttttcagcaagtgatatggttttgggccctgt

SEQ ID NO: 31456 - DNA, 260 bp, Gossypium hirsutum
  Clone ID: LIB3148-050-Q1-K1-D12
gttatgcatgagctcctagagcttgcatatatgatatcattgctgtcttggttgtatgagcaaaaaaaaataaaaaaatataaatatataaaaaattttgaaaaaaataattatatattatatttagtttattattataataattatagtgtcggctgttttaatgtatcaaaaattactaacctttctttttaatataattattaatttattattttttttaaatttaattatatttttcatttttttataattttttt

SEQ ID NO: 31457 - DNA, 372 bp, Gossypium hirsutum
  Clone ID: LIB3148-050-Q1-K1-D3
cagacacgattgataatgttaaggccaagatccaggataaggaaggaattcctccagaccagcagaggctgatttttgctgggaagcaacttgaagatgggaggacccttgcagattacaacatccagaaggagtccaccctccacctggtccttcgcctccgcggcgggatgcaaattttcgtgaagaccctgactggaaagaccatcaccctggaagttgagagctcagacacgattgataatgttaaggccaagatccaggataaggaaggaatcccaccagaccagcagaggctgatttttgctgggaagcaacttgaagatgggaggacccttgcagattacaacatccagaaggaatccactttgc

SEQ ID NO: 31458 - DNA, 387 bp, Gossypium hirsutum
  Clone ID: LIB3148-050-Q1-K1-D4
cccacgcgtccgcaacaaccccatttatcatcaagtgtggagcaaattccaattccgaactggttatcaaagcagatgcaaaggttcaggaacccaagggtggtgaaattgtaagggttgttcctagaccctctgttttagaaaatatgagcttggatgaaatgaaacaaatattctccgaacttccagaggctctgagcttacttgccctagccaggactgcggatggcacccgagctcggtattccagattgtataggacattggcgatgaaggttccatcgctgagggatctagtcggggagctcgaaaaggggggagtgttaaaagatgttaacctgtgatttgacgtgctctggagggatttgcggaatcaaatgtattgga

SEQ ID NO: 31459 - DNA, 252 bp, Gossypium hirsutum
  Clone ID: LIB3148-050-Q1-K1-D5
gggaaatgaagggagagatgctcttaattggtagcttttcatggaagttcacaaccactgtgggtgtgatcatctttgggaaaagttaaatgaaggcattgtaggttaacccctcatgattttatgtttattttcgctttgaacgtttcttgtaactgttgtttgatatgcatagggacttttgatttagccatgtacaaaaacagttcatgtttcaaggaaagctcttcccccccccccctccccccgccc

SEQ ID NO: 31460 - DNA, 228 bp, Gossypium hirsutum
  Clone ID: LIB3148-050-Q1-K1-D6
gctatgactcatattatttcaggcctgaagcagttgctgcattttggttgcccctgtttgacattgatgatatgatatatgatatatacatatatatatctataggtttggactttcgtgccttaaggcttcttgcgcaacagttttgattttgaaagcggtttagattagatgtataatatgaaattatttttactgatattggagaattttagaagtcttagattt

SEQ ID NO: 31461 - DNA, 297 bp, Gossypium hirsutum
  unsure (1)..(297): unsure at all n locations; Clone ID: LIB3148-050-Q1-K1-D7
cccacgcgtccgtgcatatttggctttctattctagtgttttagattctctggcggttgaattgaaagcatcaaaggacttctctaagttatatgcaggcattgcaatactttggcttcatcaatgaatattgttttagaaatagtaatactttgtgagtgtgtctgtgtgttttttttatgtattaaattacatattgaatcaatgtttatgtattaaatttaaattcattnannaaaaaaaaattaaaaaaaaaaaaaaataaaaataaaaatattaataaattattattatttt

SEQ ID NO: 31462 - DNA, 361 bp, Gossypium hirsutum
  Clone ID: LIB3148-050-Q1-K1-D8
gtactatgaaatccgagctataatggcactttacatgccattggatagtcaagcgggggtgccgaaccatgtaagcgatagtctagcatgaatactaaaaactccagtatttgcagggagtagatgtggttcttcttgttatacattgattcaattggatttggtgcaaggattttattgatatgtaaaatatattgagcattaaatgaatacagaatataaatggctcttttgttttttaacatattttttggaaaaaattattttttaccttatttaaatattctttaattttttttctttttattttatatttggttttattttatttattttttctttaatcattatattttttttt

SEQ ID NO: 31463 - DNA, 429 bp, Gossypium hirsutum
  Clone ID: LIB3148-050-Q1-K1-D9
ttgacaccattggagtttctcaagattcagcaaccacaaaaagctcaagattcagcaaccataaaaagaaaggtatttgagcagcctaggttcttgagaatccctttcctatgtagtaagtttgcatcatataaccaaatttagagccctatctgaatcatcatagccagccatagttatagctttgagttgctgtaaattctactattactataagaggagttgaaatgctgaaaggcttgtggatgatggccttattttgtgatgcaacgcagctaccagataaagcttcataactgatatgtctgtcaatacttttgatttctattttctttttgctcagttttacatatatatgaacaataggtttaaatgggtcaagttctttcaaaaaaaggaaaaaagttcaagtttgctatttagtccatg

SEQ ID NO: 31464 - DNA, 122 bp, Gossypium hirsutum
  Clone ID: LIB3148-050-Q1-K1-E10
accatatatcaattgttacaattcactctcataactaccatatcaaaacaaattctggggaggataaaaaaaaaaaaaaacacactatatatcaaataataatataaacaaaaatcttaata

SEQ ID NO: 31465 - DNA, 432 bp, Gossypium hirsutum
  Clone ID: LIB3148-050-Q1-K1-E11
cccacgcgtccgcactaaccagcaggctcaatctatggggttgtttcagccattggaatgcaatccaactttgcagatagggtactgcaatcctgttgcttcagaccagatggctgcaacaactcatgctccgcaagtcaatgggtttatccctggatggatgctctaaattttttggtttcagcaatgtggtcaatggccacaaactagtagctaaaaatgcttcttgatgttggaaaatgtgtaaaaatagtttcaagagcatatgcataatatactgcattgacataaacactactgcagtgactgaatttgctggtaagactattgagaccttgagccaaagacaaaaggcatgttattgattaagtttatatatatgacaatggaatacttgacaaaaagctttatatattaaaattatggtcaaaa

SEQ ID NO: 31466 - DNA, 352 bp, Gossypium hirsutum
  Clone ID: LIB3148-050-Q1-K1-E12
tgcatacaaccattcctacgaccctgaattctgaccccaggatgaatatcctggaatgcggttctaataagaagtacttggactattactattaatactttttttactatgactatctatttttcatatttgtttgattatgtattttctttatttttatctaatttaaatattttttttttttaatattttttttttatttattttattttttttttgttatttttattttatatttcttatttttattttatttttttttatttatttatttttattattttttctaatttttttttaattttttatttattatttttattattttttcttttatttcttatatattata

SEQ ID NO: 31467 - DNA, 434 bp, Gossypium hirsutum
  Clone ID: LIB3148-050-Q1-K1-E3
ttcatctgtctcattgtacgaggttcttggtgtaccagtgagtgcaaacggtagtgaaatcaaggcagcttatagaagacttgcgagaacgtggcaccctgatgttgtgtctgtaaaccagaaagaaatgtctgctgatcggttcatgagaatccatgcagcgtattccacgttgtcggatcctaatcaacgtgcggattatgataggaatcttagacggtggaaccgtccctttacgactatggaagcaactgcgacgtcggtggcttcgtatgggttttctagttatggtgctaataggaattgggagaccgatcagtgctggtagttaattatatgtattttttttatgttcgttttatatccatgaaatttaatctttttagaaattatagttatctctaacttttattcttaaaaatgtaatatatttt

SEQ ID NO: 31468 - DNA, 417 bp, Gossypium hirsutum
  Clone ID: LIB3148-050-Q1-K1-E4
cccacgcgtccgcccctatatttgatgagcaagttctctacatgttgtttccttcctctcgtgaatgagctgatttctggaaaaccagattagccataaagtaatacagaaaaggcgacattgttccgcagttcctctcttgaaaacccagggcattgacgaaaaatatgaggactatcttcaactcaataacggcaacgaggacatctgtcacttgcagaaactcttctatatctgagattagctagatgatggatgaaatcccaagagattcgccaaataattatagtgatttttgaaggaagttgtaaaccctataattttttgtagaaatctgtaatttcggtttgtattaagaaattactaggatccggattagcccattgtaataattataggcgctgggaactaaaaatt

SEQ ID NO: 31469 - DNA, 132 bp, Gossypium hirsutum
  Clone ID: LIB3148-050-Q1-K1-E5
cccacgcgtccgattcaactccaaggcgatcaacgcaagaacgtgtcgcagttcctcgttaatgccggcatcgtcaagaaagaccaaatcaagattcatggtttttaaggataacccaagttgctatttatg

SEQ ID NO: 31470 - DNA, 431 bp, Gossypium hirsutum
  Clone ID: LIB3148-050-Q1-K1-E6
caaaggtggcaagatcaaggatggcgagaaccaccttgggttgaggacaaggagcgatggtgatggcatctcccttttcggagcaaccaacgtttggcttgaccacctttccgtttacaagtgctccgatggtatcatcgatgctattcagggttctaccgccattaccatttccaactgccacttcactgaccacaacgatgtgatgctgtttggagcaagcgacagctacagtgctgatgagaagatgcaaatcaccgttgctttcacccacttcggtaaaaatttggtacaaaggatgcctagggtccggtttggtttcgtccatgttgtgaacaacgattaccgtcattggatcatgtccgctattggaggcagcagtcaccctacaattatcagccatggcaaccgatttagagcctcacgtaaca

SEQ ID NO: 31471 - DNA, 349 bp, Gossypium hirsutum
  Clone ID: LIB3148-050-Q1-K1-E7
agaatgtctgttagatacgtttctcgtaggttctcgagtgggagtgggaagatactcagtgaggaagaaaaggctgctgaaaatatttacatccagaaaactgagcgagagaaattggagaaacttgcacgcaagggacccaagccagaggagaaaccggatgctggttcagggggtgctgcgaccgatggtagcactacctctacatcgggaacatctgctgagaaagtatcaaccgataagtaccgaaactacggggttcttgctggtgttgcaacccttggtgctgctgtgggatggtatctcaactctaaagacaagaagccagaagcctgaaatgggggttaat

SEQ ID NO: 31472 - DNA, 369 bp, Gossypium hirsutum
  Clone ID: LIB3148-050-Q1-K1-E8
cccacgcgtccggaacaacaacaataaattaatcaatcatgagggctttcccagcgctttgtcttgcatctcttgctttagtgttgggcgcctctcgtgctgatcctgacttgcttcaggatgtatgtgttgccgatctttcttctggaataaaattgaatgggttcccctgcaagcacccctcaactataggagcaaatgacttcttctttgccggtctggccaatccaaacttccctaacaacactttgggatcgcttgttacggcagctaatgtggaaaaaatcccaggtttgaacacccttggagtctccatgtctcgtattgactacgccggcggtggggttaacctctcccacacccacccac

SEQ ID NO: 31473 - DNA, 269 bp, Gossypium hirsutum
  Clone ID: LIB3148-050-Q1-K1-E9
ggatggtgacaaaggggttatttacacccacagggatcttactcagtaaacttaactatagtctgcttcaagagatgcaaagaaatttgtctttttattgtctttttcatgcttattattattagtttctatcttgtaatatagcactgcagatctgcttaggtaactgcgtatggcgttactcttttttttccccagttgttttcacccttactatcatattatgtcttggataaagattttaagattaacgaataaaaaaaaaacta

SEQ ID NO: 31474 - DNA, 321 bp, Gossypium hirsutum
  unsure (1)..(321): unsure at all n locations; Clone ID: LIB3148-050-Q1-K1-F1
ggaaatcttcaagttccatgcaaactaggaggcggtaattgcctcccaccaccatcaaacggttatgacagaggatgttctcacctaaaacgatgtcgaagtcattatacaacgcccatctttcattgaccacaactagaaaatgcacatcattaacttctcccttttttctataaaattatgtgaaaaaaaggaattaatcatttcatatgttaattcattcctgattgttgtaagccatgaattccggaaatatatacttcaactatttttttaaaaaaaaaaannnnnnnnnaaaannnnaaaannnnnnnnnnnnaa

SEQ ID NO: 31475 - DNA, 379 bp, Gossypium hirsutum
  Clone ID: LIB3148-050-Q1-K1-F10
accatatccaaggtgttgctgtcaatctgctcactcctgacggatccaaatcctgatgaccctttggtgccggagattgcccacatgtacaagacggataggaacaagtatgagacaaccgctcggagctggacccaaaaatatgctatgggttaaagtgctactacgtatgtaataggagggcttcattccctgtgactttggtctttaaattaattgtgtgattgtctcctctttacatactggacctagccctccttaaaaacacaattttcttgttagttgtttgtatgaaaattatgtttcaaaacttaaatccccttttcttaaaaaaaaaaaaaaaatataaaatatttaaataataataaaaatgggcggt

SEQ ID NO: 31476 - DNA, 408 bp, Gossypium hirsutum
  Clone ID: LIB3148-050-Q1-K1-F11
cccacgcgtccgtttcttccagtacattcctgggtgttgcggttatcttaggtctggttgttgctagtatgtcaccctatgttgaggcacagtctgcgtctccagctccttctcccactagtgatggaacttcaatagaccaagggattgcttacgtgcttatggcggtggcacttgtgctcacatacctaattcaccctttagactcatcttcctacaccttcttctaaatcattgtttacaacaatagaatgatttatttatgtcaggctactttttaaccaaattgctttgttgattatatctattaaaatctgttttcttttttttaaattattatattaatatttattatattaattttaatacttattaaatattttgtaatatttcttttatattttttat

SEQ ID NO: 31477 - DNA, 420 bp, Gossypium hirsutum
  Clone ID: LIB3148-050-Q1-K1-F12
cccacgcgtccgcccacgcgtccgtcctcgtaaactatgcagacgagccagccttaaactcagcttatctcgaaggagggacgatttcatgtccccaaacatgatgtctcctcactctcccatacctcaatcaccccttgtccgtgccaggacttaagctgatcaactaagacttttgaccatattatagtattcaaacctttgtctgctacattctatatgaaacccctatttgttcaacaattgtaagttttttgggtctttcctcacatgtaaaagtgcaatactgcgaggaaagctcaacattggtgagcacagctcgttcacatatatactattgttggttgattttctttttttcttttttatttacaacaatgtacgaaggaacaaaaaaagatgtttgtgaatttgtaagac

SEQ ID NO: 31478 - DNA, 371 bp, Gossypium hirsutum
  Clone ID: LIB3148-050-Q1-K1-F2
cccacgcgtccggttgggaacctccgtcacaagaggttggtcaatttgatcggctgttgcgccgagggggacgagcgcttgttggtcgctgagtatatgcctaatgataccctctctaagcatcttttccattgggaaaaacagcctttaccatgggaaatgcgccttagagttgcttaccatattgctcaagcccttgagcactgcaacgctcaaggccttaaaatttatcacgatttaaatgcttacagagttctttttgatgaggaaggtgatcctcggttatctagttttggactaatgaaaaatagccgagatgggaaaagctacagtacaaattttgcatatactccttctgatttttgaggaca

SEQ ID NO: 31479 - DNA, 418 bp, Gossypium hirsutum
  Clone ID: LIB3148-050-Q1-K1-F3
cccacgcgtccgaaataataacaatcaccggcggatccccattcaccagttattaaacgcaggtctcattcatttccagtgcgtttaataacccctttatacgccatggacatgaagaaggtctccaccgccatcattgttgctgccgcctcaatgagcgtcgtcatggctgccggtgcaccatctcctgccccttcagccggtggttctagtcctagctcctctcctggttccgccccagcatcaggaccggattccagcgtggctgccgctaccttgcctgttcttggatcattggcctccattgtttctttgttttcttacatgctgcaataagttacatgtatgaaaaatgaacatgtcaacgaatgttttattttatttcttttcgaaagaacatgtgatgaattttgaaaaa

SEQ ID NO: 31480 - DNA, 361 bp, Gossypium hirsutum
  Clone ID: LIB3148-050-Q1-K1-F4
cggacgcgtgggcggacgcgtgggaaaaaaaaaaaataaaaaaaaaaataaaattataaaggaggggtttattattaatagattgtcctctttttataaaacttattcttaaccactttcatacatccattttttactttaccataaaacattcttttggttaaagttctactacgtatgtaataggagggcttcattccctgtgactttggtctttaaattaattgtgtgattgtctcctctttacatactggacctagcccttcttaaaaacacaattttctttgtagttgtttgtattaaaattattgtacaaaacttaaatccccttttcttaaaatatatatactttatattattt

SEQ ID NO: 31481 - DNA, 256 bp, Gossypium hirsutum
  Clone ID: LIB3148-050-Q1-K1-F5
cccacgcgttcgcctacactttcgtccacgctttcgttcacacgttcgctcacgcgtacgggaggcttgttcttggcgttgcaccccttatagagcactttgattgatcttaaatggaaactggggctgaaaatggttgcaaatgtggagataactgcacttgcatcctttgtaattgtaaatgataaaaaaaagcttatcatattatggaagctgatctaaataatatatgatgtatttggggtattactattta

SEQ ID NO: 31482 - DNA, 353 bp, Gossypium hirsutum
  Clone ID: LIB3148-050-Q1-K1-F7
gggtcattgaagactttttgagatgaatctagatgagttgagaagcaagtccaaaggtgagaaaagtatagctttcaagtgacaacaccattccaattgaaggtaccactgctatcaaagacgtacaagagcaaatggtgctacttactcggaacttcaataaagtcttcaagaagttgtcaagaaagaacaaaaagtttgatgtagccaaaaacaagataaaaggagtggtaattagtgaagaatctaacaaggagaaaaagaaaagaattcaatgccattaatggcatggatttagccgcataaaagttaaatgtgccaataccctaaaaatctgtgtaacctggagtgat

SEQ ID NO: 31483 - DNA, 406 bp, Gossypium hirsutum
  Clone ID: LIB3148-050-Q1-K1-F8
cccacgcgtccgagcacaacaaataagaattttaatggggtttccagtaggtttctcagcggttctcttcccaaagccacttctccctacattaactctcctcctttaccttcgcgatttcatttccgctctcttcctttttctgggtttccctgatttcctcgaaccccacgttcccccgactcacacggcggacaccggcgttcccgccgcgcgccaccgagatacctcgatcaccgctctcctgttacgggaattactacccgtcgtcaagttctctgacctcgtggacccgccggacagttgcgccgtctgtttttacgacttcgaaagggaggatgagatcagatggctaacgaattgtcggcatgtattccaccggagctgtttggatcgttggatgggg

SEQ ID NO: 31484 - DNA, 281 bp, Gossypium hirsutum
  Clone ID: LIB3148-050-Q1-K1-G1
aaactgactaggctatcaaccaatgataaaatctgacaggtttatgccagctggtgtgctctctgcgacggtcactgaggaggtaaacccgatctgatattgtgaatgattgcaaacatactcctttatgcttgggttgtatgctctgatataacttagaactgtgtccatgaactggatagtttcaaccaatgcgatgtatgatttttttttttggtagaataaacaaaggattatatagaagtgttcataagtaaattgccaatagtgtttttttcttt

SEQ ID NO: 31485 - DNA, 429 bp, Gossypium hirsutum
  Clone ID: LIB3148-050-Q1-K1-G10
cacgcttccgcccacgcgtcctaacttttcccaagaacttagtgacttggccatggaatctgcacaaattgatggccggttagctcggcgtccactaaaggatagccggagagagttcaaggcacataagatgttatcatctcacatcactcagttaatgcagaaatatgatacagccattaagtctcttcctgtcaattccccctcaatgagtaacactttcactcttctgaggcaaatggctcatgatctcctaaccggtgaacttcgtgttctgaaatctgcatccatatggttgaataattactgtgcggttctgaaatcaacaagcaactgtcggagtcaattggaaaaccgtatctgaaaaagtgaactgtaaacactggctatatatatgcaagctttttggagtcattctttttgcccact

SEQ ID NO: 31486 - DNA, 267 bp, Gossypium hirsutum
  Clone ID: LIB3148-050-Q1-K1-G11
cccacgcgtccgtgcacatatcataagactgattgatccgtccttaggattcgacctaggggtattgcaaaatgatgaaatatggtaatagataattgcatttgtcatcgggttctaacatatggctaatttagtatacgagtttattaggctgccttattaatattatctgatccctgaacagcaacaaagattttgttttggcttaccttaaatggtcgtaaatgattgatatttgtacctgttgtgtatttaacagagtatgaa

SEQ ID NO: 31487 - DNA, 324 bp, Gossypium hirsutum
  Clone ID: LIB3148-050-Q1-K1-G12
caagtgtggagacaactgcacttgcaacccttgcaattgtaaataagagggggggaaaatgaacaacaaagagaagcagagaggcctttgtctttttaactaaataaattctattactttagtatgtatcagcaaatcttcatgaggatttggttcttaattatgtgtaatgtgggcttttctgctatgtcagaatgtattatgatatttaagaaagttttttttcaattgaaagaatggcagttcctttctctttgactaaataaaaaaaagaaaatatgattacatacataaaaaaaaaaaaaatataaaaaaaaaataaaa

SEQ ID NO: 31488 - DNA, 322 bp, Gossypium hirsutum
  Clone ID: LIB3148-050-Q1-K1-G2
aaaatattaaacaactgtcattgttatacttctgttatacttttgtccttgatccctttgcatatagatgtgttcaatgtaagaatttatgttaaatttccgttggatttgttttgttctttgtttcggggataaggaacttaaatcaaggaaatcgttaaatgggtgtgtttcttgttttttttttttaaaaaaaaaaaattaaataaaaataattatattttttaatataattttatttaaaatatatattttaaaatttatttaatattattttttattttcttatttttttttattttttatatttttattttttttt

SEQ ID NO: 31489 - DNA, 229 bp, Gossypium hirsutum
  Clone ID: LIB3148-050-Q1-K1-G3
gccacgcgtacatcatttagtgcaccaaataatgttccataagaagttgctgacatattagcgggcgaattacagtaacactgccatgaataaagctctgatttgctgtctcatctgttgcacaagaatatgccccatacttacatgaaagctaacagttgaccgctctgttacacgctttggaaaaataaaaaatatatatttttataaattttatttatctatattt

SEQ ID NO: 31490 - DNA, 108 bp, Gossypium hirsutum
  Clone ID: LIB3148-050-Q1-K1-G4
gctgaactcccttcaatgattcaataatatttatctttactggctgaaccttgatctttactggctgaaccttgatattgttaaactttacagttgaaaatgtgaatg

SEQ ID NO: 31491 - DNA, 338 bp, Gossypium hirsutum
  Clone ID: LIB3148-050-Q1-K1-G6
cgattttcgccgcctgtggagcgttttggtggttcattttgcccatgttaccctcactcttaatgaaatttgtttaagggtcaaatggacatgggcggtaattccatcattttattttgttataatttgtaagtatcatacaaataagtaataaaaatattttgttaaaaaaaaaaatataataaaaaaaaaattaatataaattaaaaaaaataaataataattaaatttaaaaatatattattattttatttttttttatatataatatttaatggggcggccttttttaagattccaagtttatttcctcttttttcctaatttataattttttt

SEQ ID NO: 31492 - DNA, 324 bp, Gossypium hirsutum
  Clone ID: LIB3148-050-Q1-K1-G7
atttttggtgtttttgaagatctttgaagatgagacttatgcttatgattttatgtgtatgttgtctttctcctttattatagtctcctcctggttgaattttcaattgtaactttatttgtaataatgactatataaagagaattaatattattatgctgcataaaaaaaaaaataaaaataaaaaaaaaaattaataatataaatatatatataaatatttatttttttttatataaaatttatattttaatttatttttatttttttttatttattattttatttttttatataattttatttaaatattatatttatttt

SEQ ID NO: 31493 - DNA, 274 bp, Gossypium hirsutum
  Clone ID: LIB3148-050-Q1-K1-G9
aaaaaaaaaaaaaaaaaaaaaaaaaaaaaaaaaaaaaaaaaaaaaaaaaaaaaaaaaaaaaaaggggcggccgttataaaaggaatccaaagctaacaaacacgggcgtgcgactttataggtcccatgtttgcgtcccctaaattcactccactggccttttttttacagccccttaattgaaataaccgggccgttacttaacaaaatcgcgttggggaaaatcctgcttttcccaacttgaatattttcgaagaggcccccccttttccgc

SEQ ID NO: 31494 - DNA, 354 bp, Gossypium hirsutum
  Clone ID: LIB3148-050-Q1-K1-H10
cccacgcgtccgataaaaaaaaaaaaaaaaataaaaaaaaaaaaaaaaaaaaaaaagggagggaaaaaaaaaaaaaaaaataaaaaaaaaaaaaaaaaaaaaaaaaaaaaaataaaaaaaaataaaaaaaaataaaaaaaaaaaaaaaagggggggccccttttaaagattcaaatttttcttccccgggaatccaatgtattttcttttttttatggcccctaaaattaaatttactgccccttttttaaaaactttggaattggaaaaacctggtctttcccaaattaaatttcttatgaaaaaatttcttttttttccagttgtgttaataccaaaaaggcccgccttttt

SEQ ID NO: 31495 - DNA, 408 bp, Gossypium hirsutum
  Clone ID: LIB3148-050-Q1-K1-H11
cccacgcgtccgcccacgcgtccgcaaagatatcactataatgtggcagatgtgaggcttgctcaacatatcgagaaaggaagtgaagacgggttatttataagtagtgtggcttcttgttctaacctatgggctcttattatggatgctggcactggcttcactgctcaagtatatgaactctctccatactttcttcataaggaatggattatggagcagtgggagaagaattactacatcagtgcaattgcaggagctaataatgggagctctttagttgtaatgtctaaagggacccagtatttgcagcaatcctacaaagttagtgattcatttcccttcaaatggatcaacaaaaaatggaaggagggttttttatgtgactggcatggccactgctggaag

SEQ ID NO: 31496 - DNA, 80 bp, Gossypium hirsutum
  Clone ID: LIB3148-050-Q1-K1-H3
aaaaaaaaaaaaaaaaaaaaaaaaaaaaaaaaaaaaaaaaaaaaaaaaaaaaaaaaaaaaagggaaggaaaaaaaaaaaa

SEQ ID NO: 31497 - DNA, 432 bp, Gossypium hirsutum
  Clone ID: LIB3148-050-Q1-K1-H4
gtttttcgtctgcagttcaaacgtgagcttatcttcaaagaagatggccaagaatacgcccaaggctcacgcatgttgggtaacggccgctgcgaagctatgtgcatcgacggcaccaagcgcctctgccacatccgggggaagatgcacaagaaggtctggatcgccgccggcgacatcatcctcgtcggccttagggattatcaagatgacaaggctgacgtcatcttgaaatacatgcccgatgaagctaggcttctcaaagcttatggtgagctacccgagaataccaggttgaatgaagggattgctggcggcattgatgaggaagatgatggtgcaggcgatgactacatcgagttcgaggatgaggacatcgataagattaaaattctcttcttctttttgtcatatttgaattattttaagaat

SEQ ID NO: 31498 - DNA, 435 bp, Gossypium hirsutum
  Clone ID: LIB3148-050-Q1-K1-H5
ggtgaacctactgatagctatgaggctttcactgctagccttccagccgatgagtgtcgatacgctgtgtatgactttgattttgtgaccgatgagaactgccagaagagcagaatttttttcattgcctggtctcctgatacatcaaaagtaagaagcaagatgatctatgcgagctcaaaggacaggttcaaaagggaattggatggcatccaggtagagttgcaagctaccgatccttccgagatggatctcgatgtcataaggagccgtgccaattgaaatgtatgtaccatttcttcattgaaatggaactttatactatgtggttcacataaatgtaatgtctatatcaactttggatcttggaacttgctttgatattgggttatatctgtggattcttatggggtatgtgtgtgttccccctttggg

SEQ ID NO: 31499 - DNA, 199 bp, Gossypium hirsutum
  Clone ID: LIB3148-050-Q1-K1-H6
atttcatctaaaaaaaaaaaaaaaaaaaaaattttttttttaaaaaaaaaaaaaaaatatggggagatagagaaaaaaataaaaaaaaaagaagccaatatacaaaaattataaaggtctatatggggtggccgttctctgttttccttctttcttttccctcccctgccttgtctttgttttccttttttttcccttc

SEQ ID NO: 31500 - DNA, 344 bp, Gossypium hirsutum
  unsure (1)..(344): unsure at all n locations; Clone ID: LIB3148-050-Q1-K1-H8
cctaccttcaattttcactgatatttgacaaccctaaaacccatggctttgctcaagggggtctggggctataaaccagccatattcattaactaatttgctcaatttttgcaagcagccgcatacccaggaagtgaagctgaggattgatcctgtccatgtggtgagcaataaggtaattgctgctgcagacagttttagattcttaaacatgtaaaaatacccttggagcctgttatgcttgttttgtttcagacttgaatttcatgtggttctattttgttcattttcgataatatatattacgcaaatagacatccaatgggaaacgattatgagtttnt

SEQ ID NO: 31501 - DNA, 414 bp, Gossypium hirsutum
  Clone ID: LIB3148-050-Q1-K1-H9
cccacgcgtccgtgtgaacgatggaagaatcagggttaagaaggtttgtgagatgcaatagtggattagggaggaaaaggattgaaatatcaaacgagattgaggaattttcgcctattgattcaccaacaaaagttccgttattgaaaaggcattgcagtgagagaataaagaagatgatgatgattgatgattgtgatgaaaaatctgttcttgaatcacttcctcaagatgttcttgttaagataatttgtggtgtggatcatgaagatttgaagcaactctttaaggtttctaaatcaattagagaaattactgtaattgcaaagaagatgcattttgcttatagtacaccaaggaaggtcaaggcttttagaacctccattgatttggaggaacggagtgagttaaaag

SEQ ID NO: 31502 - DNA, 384 bp, Gossypium hirsutum
  Clone ID: LIB3148-051-Q1-K1-A1
gcaccctgatattctcagcacagctgtaatctttgggatgctaatagctttgcccataacacttgtctactatatattattggggatataaattaagcggcaaatgcaaatgcgcaatactcttttgatgttccacattcaaaggccaaagaaatcctggaccgacacatcatgactgcattcatgattaatgtctctctcctttacttttaatccttagttaaatttgtaaaatctttatttgtagtcaaattatagggggaactgttttttgttttttttttctagctaattatctttttattccaaacaattttattccttgtcatgatagcttaaaaaaaaaaagaaatttaacccctcgatatttgtgatggaagtttg

SEQ ID NO: 31503 - DNA, 420 bp, Gossypium hirsutum
  Clone ID: LIB3148-051-Q1-K1-A10
caaaatttcaacctatgggggtatattcgactctatgggaagctgatgattgggcaacaaggggaggacttgagaaaattgattggagcaaagcaccatttttggcttattacaaggattttgacattgaagggtgtccagttccagggccagcaaattgtgctagtaaccctaggaactggtgggaaggtactgcttatcaagctcttaatgccatggaagctaggagatacaggtgggttcggatgaaccacatgatctacgattactgcaccgacaagtctcggtacccggtcaccccaccggagtgcatggcaagtatatgaagtactatcaagagttcccattattccatatccaactgaactgtccagaatatttgatataccaatatgtttcttgtcatatatactttgatgt

SEQ ID NO: 31504 - DNA, 198 bp, Gossypium hirsutum
  Clone ID: LIB3148-051-Q1-K1-A11
cccacgcgtccggtgaagcatggcatgtgatatatatatatatgttaatggatttcatcagtctgaaatcaacggaagcttaaatacattattacatttcttattatttttttatttttgatctagagtctatttttttgtatgaactgagaatgaaatttgtgaatataaagtaagtaaatttgactcttgattaac

SEQ ID NO: 31505 - DNA, 435 bp, Gossypium hirsutum
  Clone ID: LIB3148-051-Q1-K1-A12
cggacgcgtgggctatttttatgcaataaaatcttagtttctttgttttcaaaaaaaaaaaaaaaaaaaaaaaaaaaaaaaaaaaaaaaaaaaaaaaaaaaaaaaaaaaaaaaaaaaaaaaaaaaaaaaaaaaaaaaaaaaaaaaaaaaaaaaaaaaaaaaaaaaaaaaaaaaaaaaaaaaaaaaaaaaaaaaaaaaaaaaaaaaaaaaaaaaaaaaaaaaaaaaaaaaagggggggggggggtttaaaaaaaaaaaaatatgatgggggggttggaaaaatttaatttttttaaaggggggaaaaaaaaaaaaaaataggggggggttttaaaaaaattgggggggggaaaaaaaggggggttaacaaaaaaaaatatttggaaaaaaaatttttttttccacgtgggggaaaaaaaaaaaaggcccccccctt

SEQ ID NO: 31506 - DNA, 373 bp, Gossypium hirsutum
  Clone ID: LIB3148-051-Q1-K1-A2
cccacgcgtccgcccacgcgtccggggctttgctgggatcccaaaacttgtgcatgtgcaaggcttaatggttctgattttccttatgtgcaccgtgatggtggcaggttaattgaagccaaacatgttgtttttgaatgtggtccaaaatgtggctgtgatccaagttgtgtaaatcgtacatctcagagaggattgaaatatcgacttgaggtcttccgtactccgaagaaaggatgggccgttagatcttgggattttatacctgctggtgcccctgtttgtgaatatattggagtgctcacgaggacagaagagctggataatgtctctgagaataattacatttttgacattgattgcttgcaaacta

SEQ ID NO: 31507 - DNA, 424 bp, Gossypium hirsutum
  Clone ID: LIB3148-051-Q1-K1-A3
cttcttttggggtttcctaacccttcggccgccgttcagcccacgccccaatttcgtcagaagggacaccagctcgacgactccggcgaaaggtaagtctcccttcttctttctttttcgtattttaagcgaaaaaataaataaaaaaaatgaatcactaagaatgatgaaccgaaaaaaaaaacttttttattccaaaaattatcggatctgctctttcaaatccttcttttttcctctgtattctcttttgtccaaaaaccccccattacagaataaaagttggccttatatagcccgaaaaatcaaataccagtgccgtctttccctgtttcttttcttttggactcttttgagtccgtgtttgcaggtgtatgtgcgcatatagggaggatcggccccgagacgtgcggcgcttgggacg

SEQ ID NO: 31508 - DNA, 322 bp, Gossypium hirsutum
  Clone ID: LIB3148-051-Q1-K1-A4
gcttattagacacccacctttttgcacaaccaaacatgaccagaacttctaaacctacatgttgaggattcacactcaatgagcaagaaacatctcagcaactcattgggatcgagcagtcaaaattcagaatcaagtggcgcacaagagctagatttggagcttagattgtgattgtaatcagtaatttttttgctactttaaatgcatgctcatggaactacattttatgctttcctagaattgtaagttcaaataaggtgttgatctgcaatttatacatacaacttgagcaagttgatatgaactgcgaaaaaacaaa

SEQ ID NO: 31509 - DNA, 315 bp, Gossypium hirsutum
  Clone ID: LIB3148-051-Q1-K1-A5
cgactcttctggttggtttttttggggattctctgtttttagtctcttcatatggaacttgtactgtaaacgtatttctacataaaacgcatacggttgttcaatcaaaaaaaaaaaaaaaaaaaaaaaaaaaaaaaaaaaaaaaaaaaaaaaaaaaaaaaaaatataaaaaaaaaaaaaaaaaaaaaaaaaaaaaaaatatataaaaaaataaaaaaaaaaatataaaaaaaataatggggggggcctttttaaagaactaaaatatattaaccttgtttgtcaatttaaatttttttttaaggtgcccctaaa

SEQ ID NO: 31510 - DNA, 425 bp, Gossypium hirsutum
  Clone ID: LIB3148-051-Q1-K1-A6
cccacgcgtccgcccacgcgtccggatttctatatccgagaagttgctgccagcatatcggtcatttctggggcggttcaggagccaaatagagagtgggaaacaccctgagaattacatcaagtactcagctgaagacttggaaactgctgtgttggatttcttcgagggataccctgcgtcctagcacttgatcatggatgctttgtagaaactaggagacattctttcaattcttttgtggagggtattcgggtgatggtggtgctggtaaatctgtggctgccttgagctctccaatttgtttaacaattgttgatcgaatcatttccactgttgaggaagcaacaaagatcaggtgttagcattccagaatagccaggcctcctggaacctgaatgctttctgcaccgtcagcattatgg

SEQ ID NO: 31511 - DNA, 209 bp, Gossypium hirsutum
  Clone ID: LIB3148-051-Q1-K1-A7
aaaaacaatgctttcttgtttcatcctaaacttctattccatcctcaatcccaaaacttaatttcttacgcctttgtattactaaggtaatggcatgtcttgtctcgcactacctaatgactcaatatatttttatttaaaaatttataatatgaaactatactatataaagtccataaaacagtaagagactgatcaatagaaatatg

SEQ ID NO: 31512 - DNA, 423 bp, Gossypium hirsutum
  Clone ID: LIB3148-051-Q1-K1-A8
gctggagaaaataaacatttgacatataaatattatatatataaaaattagttcatgtttttaaaaaataaaatatatttagcataatgataaatatcaaaattatatatttttattatataattattataattattaatttatttatataaataaaggagttattaatttcaaatatttaacataaagatatatataaaatatatttttaatatataattacatatttattatttgatttatgaaatgaaagagttattaattaaaaaaaaacttgaaacaatatgaaataaaaaaatataagtgtgcttagaagaagaattgaacttaggactcaataatgaaatcattattatgtaaccatctaactaaaaaaattaatataataaaaatattagataaaaaatataaaaagtttaaaac

SEQ ID NO: 31513 - DNA, 420 bp, Gossypium hirsutum
  Clone ID: LIB3148-051-Q1-K1-A9
ctcgaatcaaaacttggccaggcgaatctcctgggatagtatcagatgtacattttgaggatattatcgtgaataatgtctcttcccctatcctaattgatcaaaaatattgcccatggagtaaatgcaagataaatgaagaatcgaaagttaaactaagcaacattagcttcaagaacatccgtggcacatctgcgcttccagaagctgtcaagtttatttgcagcggttcttcgccatgtcaaaatgtggaacttgcagacattgatattaagcacaccggacctgaacccgcaacatcccaatgtttgaatgtcaagcctaaaactagtggcaaattaaacccgactccatgttccagccctgtcccaaaaaccctaagtgccaccgcttaaaccataccaacagattcagtgcaat

SEQ ID NO: 31514 - DNA, 430 bp, Gossypium hirsutum
  Clone ID: LIB3148-051-Q1-K1-B1
gtgaagtacggcaaaaaattcacagtacaaatccgtggaaatggcgaaattgaccaacaaaagcttcaagtgacgatttactcacctccgtttgtgacccatgggatctccatgaatcagagattgattcaattgggaattgtggaatttaacaaaaatgttacctcaaatacaaacaacattattcttcaagctcccatgaatggcaacattgcgccacctggttattacatgctcttcgtaaactacaatggggtgccttgccgccaatcgatgtgggttcaatttttgccatagatatttcactggaagcattgaatcgcaaagtcgttatatgaaattattatattctcttataaagaaaaattaatgaatcactttgttcacgttttgttgcacacattattcttttaaagatcatatacaatac

SEQ ID NO: 31515 - DNA, 408 bp, Gossypium hirsutum
  Clone ID: LIB3148-051-Q1-K1-B10
atcgcattgatgaatcaaaaaaacgtacagtggcttctgctggtcgtgcaaccctggggaggcctacatagttgcaagcatccgtggaaccagaatatgtaaaccaaaatgtggcagggcctcagaaagcctctggcaaacctgtgcaaaatggtcgtcgcctgtcgaaaagtgaaagcattagtgcttcaaggtgtgtgggcgtcattcgaaaacctcaagggatgcacggagaagtgcataaactggtcgcttaacatgcttgggaacttgcaaacgtttgactaagaaaaatctgccgattcttggttttcttttgctatgtccatgatattcctttggaggttcttaatctgccttaatcaactaatatgtgctactagtatttactttattgtactctggaca

SEQ ID NO: 31516 - DNA, 116 bp, Gossypium hirsutum
  Clone ID: LIB3148-051-Q1-K1-B12
ctaaaataaggtgtggggtgcatgtcactgtgctttctaggctaaaacatactggattggcttgtttattgtatcagcaatagcatgaaatgaacatttccgcttgattttctttt

SEQ ID NO: 31517 - DNA, 418 bp, Gossypium hirsutum
  Clone ID: LIB3148-051-Q1-K1-B2
ggaatcgactcttcatctggttctacgtcttcgaggtgggatgcagatcttcgtcaagactttgaccggtaagaccattactttagaagtggagagctcggatacgattgataacgtgaaagcgaagattcaggacaaagaaggaattccaccagatcagcaaaggttgatttttgctgggaaacagctggaagatggaaggactttggctgattacaatattcaaaaggagtccactcttcaccttgttcttcgtcttcgtggtgggttctaagccttaaggtcttccttaatgtgggttttctggttttacgtgaaggattgtgccctttgatggccttttaaataatttctagtctttgtttaccggttgcatctatgtatggtttctctttgaatggaaattgcatatttacct

SEQ ID NO: 31518 - DNA, 390 bp, Gossypium hirsutum
  Clone ID: LIB3148-051-Q1-K1-B3
gtcgacttcttcgagaaatgcaagacagactcatcttactggaccaaaatctctgagggaggtgtgaaacgtatcgaagagaagtacacatggaaaatttactctgagagactattaaccttgaccggtgtctacgggttctggaagcatgtgtccaacctcgaccgcctcgagagccgtcgataccttgagatgttttacgctcttaagtaccgtaagctggccgaatcggtacctttggcagttgaagagtaaattgaagttgccggggaaagaattgggagggatttccgagttcttgagaataatctttgttgatttggcattttgatccaactcttttagtttctctgatcttttatgtgaatttgtctttgttcatgttttggg

SEQ ID NO: 31519 - DNA, 421 bp, Gossypium hirsutum
  Clone ID: LIB3148-051-Q1-K1-B4
ctgtaatagacctaaaattgaagtggcgaaagcaagggatttccttgatgaaaacggatttgtttttgctgttcagaaaacaagtgggatggttaaagctttaacggagagatgggttcttgaaggaatggaaaagatgctctcatattgtttcgatgttcttaaagaagcatctgagtcaaagcttcaaattatatctgttgcagggtcgcctcgatttggtgtttatggaatagattttggatggggcaaaccccagaaggtggtagttgtttccattgataagagtggagctatttccatggcagaaagtagagatgggagcgggggggttgaaattggtttggctttaaataagcacgagatgaacaatttttcttggttgtttcctagatacgttaaacgggagggtttattttaa

SEQ ID NO: 31520 - DNA, 184 bp, Gossypium hirsutum
  Clone ID: LIB3148-051-Q1-K1-B5
cttggtatgtagccaagcccaagaaaaaaaggaacgaggggaagaatcgacaaggaatccatggcgagaaaaaaaaaaaaaaagaagaaaaaaaaaagaaaaaaaaaaagagaggggggcttgtagggagggaaaaagatattatgaggggggggtggatgttcaaagattatgtttaggggaa

SEQ ID NO: 31521 - DNA, 416 bp, Gossypium hirsutum
  Clone ID: LIB3148-051-Q1-K1-B6
caacttttgcgcttcttattttttaataggaacccttttttcggtctgcctttttgttgctttcaaaactggataaattctcgttgctaagcgtatctcgcttgatattttagagggcgaactggcgaaacataagtcttacgccgaatatctgcttcaacagctatttcgtgcgaagaatatacatttaagggagggggaaacttttaagggagtagtagaaaatcatttggtttttgaagagcccttaaaagagcaaattgatgggctctatcaaatctgttgtgatctcattctaaatggggccaacagtagctactttctaaaaattgtggaattttatggatccacgcttggtatgtagccaagcccaagaaaaaaggaacgaggggaagaatcgacaaggaatccataac

SEQ ID NO: 31522 - DNA, 421 bp, Gossypium hirsutum
  Clone ID: LIB3148-051-Q1-K1-B7
cccacgcgtccggatgactcaaactattcaggaagctaaaggggagcttacattagaatcaaacattgtgtgctctctttcgatgacatgaaatcgcactgatgactgccttcttaaatcatggacttgaaggaaactatgtacatgttatatgaaactttactatatcaagtcctcagcggttagtgtctgttcagttgttgtctttaagctagtgtcttccttaagcgtctgatacaatgtatataactgtagtttgtagattcacctctaaattgcttaccccaaatccttaggtttcttttcttattctttttcccattatccttctttccttggtctagactttagtgtcctttgtttctaattgtctaacttggattagcccctttgtttctttttacaacctagtctaaattag

SEQ ID NO: 31523 - DNA, 387 bp, Gossypium hirsutum
  Clone ID: LIB3148-051-Q1-K1-B8
atgttgaatgaggatgagttgagggatgctgtgcttctagtatttgcaaacaagcaagatcttccaaatgctatgaatgctgctgagattaccgacaagcttggccttcattctctccgccagcgtcactggtatatccagagtacatgcgccacatctggtgaaggactgtacgagggactggactggctctcaaacaacattgcaaacaaggcatagatggcgtaattgacttgtcagtctcagaaaatgccagccccttttggaattattgatgtttctacgtccgttaaaatgttttggtttttcatgttcttttgtttcttgcaaactttgtcatttgttcttgtagtttaagaataattgataaaattttcgggttcaaaa

SEQ ID NO: 31524 - DNA, 411 bp, Gossypium hirsutum
  Clone ID: LIB3148-051-Q1-K1-B9
atcgcattgatgaatcaaaaaaacgtacagtggcttctgctggtcgtgcaacccttcagagccctacaaagttgcaagcatccgtggaaccagaatatgtaaaccaaaatgtggcagggcctcagaaagcctctggcaaacctgtgcaaaatggtcgtcgcctgtcgaaaagtgaaagcattagtgcttcaaggtgtgtgggcgtcattcgaaaacctcaagggatgcacggagaagtgcagaaactggtcgcttaacatgcttgggaacttgcaaacgtttgactaagaaaaatctgccgattcttggttttcttttgctatgtccatgatattcctttggaggttcttaatctgccttaatcaactaatatgtgctacttgtagttactttattgtactctggacaagg

SEQ ID NO: 31525 - DNA, 342 bp, Gossypium hirsutum
  unsure (1)..(342): unsure at all n locations; Clone ID: LIB3148-051-Q1-K1-C1
tacttgaggacggccattcttggtcaatttaagaaacttgataagcaattttgtgtattgatggacactttccaagaactcgagcctgaaatcgttgaatacatgtccaagttttgccttataaagactgttggtccattgttcaagtaccccgaagtaccaaacaacacgatccgttgtgacatcatgaaacctgatgactgcatcgagtggctcgactcgaaaccggccgcgtcagtgatatatatctcgtttggtactggtctttacttgaaacaagaacaagtggatgaaatagctgaagcgctgntagccactggtatctcatacttgtgggtgatg

SEQ ID NO: 31526 - DNA, 129 bp, Gossypium hirsutum
  Clone ID: LIB3148-051-Q1-K1-C10
cacccttccagtttgtttattttcaccatatttcttttgtttgtttcctttgtatttgtgtgtaagaatttgtaatatattgctccaatttaagtgaaatccaatatatatatatattctcttttgaag

SEQ ID NO: 31527 - DNA, 406 bp, Gossypium hirsutum
  Clone ID: LIB3148-051-Q1-K1-C11
gaagctgtgaaaatgtccaagcaagctggatggggtgtgatggccagccaccgcagtggtgaaacggaggatacttttattgctgatctttcagtcggtttggccacgggccaaattaagaccggagctccatgcaggtctgagcgtttagccaagtacaatcagcttctgcgaattgaggaggagcttggtgcggaagctgtctatgctggagccagcttccgtgctccagttgcaccctattaagatgcttgtttagatgataatttgctgagactggatgcgtgcggcagagcttcagtggtttattgtgaccctaaaacatgtttcaataattttgatagcaattttgtacttgttcagaattatatcaatctccgtgttatttttgttggactttgcctgc

SEQ ID NO: 31528 - DNA, 417 bp, Gossypium hirsutum
  Clone ID: LIB3148-051-Q1-K1-C12
gatctgctaaggcctctgcgtgacctcaatgatggacctaacctttgcatatatcttgaatcgttttacaccttgcgcaagcctgtggcatccaccatcaatacattggctggcgccctgtacaaggtgttcagtgcttcacctgatcaagcaaggaaggaaatgcgccaagcttgcttcgattatctaagccttggtggtgtattctcaacaggaccaatctccttgctctctggtttgaatcctcgtcctttgagtttggtgatgcatttctttgcggtggcaatatatggtattggtcgtttactggttccattcccttcacccaaaagaatctggattggagctagattgatcacgggggcatcaggaatcatcttccctattatcaagtcagaaggagttaggcaaatgttt

SEQ ID NO: 31529 - DNA, 348 bp, Gossypium hirsutum
  Clone ID: LIB3148-051-Q1-K1-C2
gttgagccacaggtgagatctggtataaagtatgtaaaattgtatatcatattagtttgtttccattaaactcatggagattgggatggtggaaattgggttttgaatataaagcttggaggggctttccaagctattctttttcctttgtaaacaggatacacccatgtggttctgtgatcttttttttatttattgaaatccacatggattagagggagatgatgaatttagagaatgcagattttatttttctaaatccaaaaaagaatagaacctaaaatagaatagaacaattgcagacatactaaaaacaagggtctgacttcagaagttgtaaacaatcaa

SEQ ID NO: 31530 - DNA, 330 bp, Gossypium hirsutum
  unsure (1)..(330): unsure at all n locations; Clone ID: LIB3148-051-Q1-K1-C3
atcatacttatggatattaggctaatggcccgttcctgatatcctcacgtttgttgaatcttatgatttatgagaaactaattggaatttggtgtnaaaaaaaaaaaaaaaaaaaaaaaaaaaaaaaaaaaaaaaaaaaaaaaaaaaaaaaaaaaaaaaaaatttcaaatggaaaaaaaaataaaaaaaatggtgaggctggaaaaaatgaatcaatattaacttacataatcaatctaaattaatagtatattttaatttttttccttattgttaataatactaaaattttaatatattttaaatttaatatggttttttatatatatt

SEQ ID NO: 31531 - DNA, 423 bp, Gossypium hirsutum
  Clone ID: LIB3148-051-Q1-K1-C4
gacagatttgtggtggaaagcgatatcccgaagttggcataccttcaggcagttgtgaaagaagttttcagactgcaccccggcgttccgctcatcatccctcgtcgcaccaacgaggcatgcgaggtagctggctaccatatccccaagcactgcatcgtttacgtgaacgtttggggaatggcaagggatcctaatgtgtgggaagatccactggagttcaagccggagaggttcatagggtcaagcgtggatgtgaagggccaagactttaacctcttgccgtttgggacggggagaaggtcgtgcgtgggatggccactggctcatcgcatggtgcactattacttggctgctctgctccatgctttccagtgggagtcacctccagatgtcctgaatgatctgggggagagagtgggg

SEQ ID NO: 31532 - DNA, 328 bp, Gossypium hirsutum
  Clone ID: LIB3148-051-Q1-K1-C6
cccacgcgtccgaagaagctcttcgagaacctctcgtcctccgattgatccctttttagttgtcttctggaaacttggtcgatggagtgagagaagaaataaaaaatgctctatgatattctgtaatgctgaagaagactaaagagcagatgaactcgagtattttctttttcattgtaatgttaagcatgaacttctgaaatgttgcacttttggcaacacttgctaatgtttacgctggtggtgtattggagatttgttgcttccaaattccttgtgatcttctatttgcaggtctatgaatcattttggattaaacccaagaaaa

SEQ ID NO: 31533 - DNA, 156 bp, Gossypium hirsutum
  Clone ID: LIB3148-051-Q1-K1-C7
ggtcggtagtattcatcccaagtagtatgcataagcttttgctggtctcagaatccaccatcttgtgggtttctagtatgtgtcatctggaattatgtattcagacttttatgtattctggctttagacaaatgtatttagatgtactgaagctca

SEQ ID NO: 31534 - DNA, 324 bp, Gossypium hirsutum
  Clone ID: LIB3148-051-Q1-K1-C8
cccacgcgtccgaaagctacatatccttcatctttagtttttaatcattgcagtattagagttttctttttttatgtatggattctcagcccattggcgacataaattattgaatctctctttacattttgaaaaaaaaaaaaaaacaaaaaaaaaaaaaaaaaaaaattaaaaaaaaaaaaaaaaaaaaaaaaaaaaaaaatttaaaaaaaaaaaaaaaagaaaaaaaaaaaaaaaaaaaaaaaaaaaaaaaaaacaaacaaacaacaaaaaaaatggggggaaaatttagggggggcccgttttaatggcccgtctttttaa

SEQ ID NO: 31535 - DNA, 164 bp, Gossypium hirsutum
  Clone ID: LIB3148-051-Q1-K1-C9
gttcttcatttttttgtttcttttttaaatattgatttgtttaatgttttaagcacttggaattggctgtacaaattttaaaagtttactaatttttttcctactttttttttataatatttcattgtagtaaagtcattccaggataagatattttctgattg

SEQ ID NO: 31536 - DNA, 410 bp, Gossypium hirsutum
  Clone ID: LIB3148-051-Q1-K1-D1
tgttattgctcagctggttgccactttgatagctgtctatgcaaattggggttttgcaaggattaaaggaatggggtggggatgggccggtgtaatctggctttacagtgtggtgacatatatccctcttgatcttatcaaatttgcaatccgatacgttcttagcggcaaggcttgggataaccttttggacaacaagactgccttcactacaaagaaagattatgggaaagaggaaagagaagcacaatgggcagcggcgcagagaactctgcatggccttcaaccacctgaaacctcaaatcttttcaatgaaaagagtagttacagagaactttcagagattgcaaagcatgcgaagcgcagggctgaggttgcaaggcttgaggagctgaatacactgaaagggc

SEQ ID NO: 31537 - DNA, 310 bp, Gossypium hirsutum
  Clone ID: LIB3148-051-Q1-K1-D10
ctagtttgtagtttgaagaagagtaacaaagtgactttttttggaagttgattcgttgaggctagaagtaacataagaaaaagcttactaagtacgttgtatacgattcactatgtgtatagaaagaatacatctgtttgcaaaaaaaaaaaaaaaaaaaaaaaaaaaaaaaaaaaaaaaaaaaaaaaaaaaaaaaaaaaaaaaataaaaaaaaaaaaaaaaaaaataaaaaaaaaaaaaaataaaatggtgtgtgtttttataatattatttatttttatgtattgtagattaaatttttatttttttt

SEQ ID NO: 31538 - DNA, 418 bp, Gossypium hirsutum
  Clone ID: LIB3148-051-Q1-K1-D11
cccacgcgtccggttgatgcatagggtctggtttttaatagtagaaatgaatgaagggttgacaggataactagtttgctcattgatttaacatccagtgattcatttgcctacttttcttagagggtgcaaaatgcaaacggactcctagtacaagggcctccatgaagctgggggtgtggtcacagatgctgcatggcagccattggatttttcaaagggaaagtatcttgatctggacacaggcatcattgtcaccaaccagaagttgatgccattactgtttaatgcagttagaaaatctatccaggagaaagcttcatctttgttgattcattttagaggcaggcttcatcctttcctcataacttgctctgttaagctggttgaaacttgattatttttgccttcaatgctt

SEQ ID NO: 31539 - DNA, 412 bp, Gossypium hirsutum
  Clone ID: LIB3148-051-Q1-K1-D12
atggaacatgatctgaaagggctgatggagacaatgaaacaaccgtttagccaaagggaagttaaatgcctgatgcttcagctgctggagggtgtcacgtatcttcatgataactgggttctccatcgggacttgaagacatctaatcttcttttaaataaccaaggtgaactgaagatttgtgattttgggttggctcgtcaatatggaagcccattaaaaccatatactcatttggttgttactctttggtacagggcccctgagcttcttttgggagcaagacaatattccactgcaattgacatgtggtctttgggttgtattatggctgaactactatcaaacgaaccactttgcaatgggaaaactgaatttgatcaacttgacaagattttcagaactcttggca

SEQ ID NO: 31540 - DNA, 426 bp, Gossypium hirsutum
  Clone ID: LIB3148-051-Q1-K1-D2
cgaacgccaattcggagttgccagtccggaaatgtttacattgtgcggcggaaaagacgccgcaatggaggactgggccgttgggtccgaaaacattgtgtaatgcatgtggggtgaggtacaagtcgggccgattggtgccggaataccgtcccgcagcgagtccgacatttgtttcggcgaagcattcgaattctcataggaaagttttggagcttaggagacaaaaggagttccaaagagcacagcatcaacagctgatgagtcaaacttcggttttcggcatatccaacggtggttgtcctgatgatttcttgatccaccatcatggtgggcccaattttagccacatgatttagcaatatataatctttttttttttaaaggtagttcttttcctaaaatttgatcttaaaagaaaagaaa

SEQ ID NO: 31541 - DNA, 335 bp, Gossypium hirsutum
  unsure (1)..(335): unsure at all n locations; Clone ID: LIB3148-051-Q1-K1-D3
ggtgaaaagaacaaaggagggaaaggaaacaatggggaaggagataaaaagagtggtaaaaaaggaggaggtggtggtggtttgcttggatttttcaagaaggataaaggtgaaaaagatttttcaagtaagggtaaaaatgaatgggatggtagtggtggtaaaaacaaaggttcccacaatggaaatggaggcaatggtggtggtggaaacaataatggccatggagctaaaaagggtggagctggatttggtgggggcgctggtgctggtggtggcgttggtggaggtggtgggcttggaagaggtggtggtggaaggttcngaagaagtgg

SEQ ID NO: 31542 - DNA, 189 bp, Gossypium hirsutum
  unsure (1)..(189): unsure at all n locations; Clone ID: LIB3148-051-Q1-K1-D4
gaaatatataggaaatgtgaagaaaaaaaaaagggggggacacaattatgaaagggagagagaaaaggttgtagatctgtggagatgaggtgtaataatttggtgggctctgcttaagaaaaagggcaggtcttgaccgttgatttttcatatcaaaagaaaagaatgaacttgtgattgaacaacana

SEQ ID NO: 31543 - DNA, 388 bp, Gossypium hirsutum
  Clone ID: LIB3148-051-Q1-K1-D5
cttagattgcaagcggagcggctagacgatacgagctaacctacccgtccctgccatgcgatagcttttctattgtgtcacgtaacctaaattcaatggactggccgttacaacacaacgactggactgacaaaaccgtgacccaacttaattgaattgcattacatcacattttcgtctggtggggtgatatcatagaggacaggaccgaacggattgcccaacagaagagcagcccaaacggaatatggaacgcgacccgcactgtagcattacattcagcgcgtgtggtggggacgctccgcgcaacctgtacacttgactgggcagtagcgtacggtccgttcgctttgtttccttcctttcttgtcacgttacgtgggtttgc

SEQ ID NO: 31544 - DNA, 364 bp, Gossypium hirsutum
  Clone ID: LIB3148-051-Q1-K1-D6
cccacgcgtccgcttattccgtgaatcggaggcggggcacggcccctctttttggacccaaggccggcttcggccggccgatccgggcggaagacattgtcaggtggggagtttggccgggtgctggctcaagtatgtagtttttatattattcagtaatagttcaaagtggttaaattttgggtatttagaacttgcagaaaatatggtatcaccatgattctcttttactatcatttgagggaatcatgaattttggacattcactttattaaggttgcagcaatttatatatgtatttatatatacactgaagccggcaggatgaactgctcaataataaatatgatctgtgtcttatttt

SEQ ID NO: 31545 - DNA, 386 bp, Gossypium hirsutum
  Clone ID: LIB3148-051-Q1-K1-D7
cccacgcgtccgtcaaaccaagtagtgtgcatcagctcatgcgggtcttacattggacgagggcgtgggttgctaggatgagtcgactggaataatgtattaagactgctatgtgttctggcgctatacaaaggaattctgatgtactgaagctcaccattattatatttggtacagaaatgttaatcttgaacttgtgaaatgtttcaatttaggctgggcctgcttctgtttacactgaaggtatattggatatttggcgattccaaatttattgttagcgtctatatgcttgggttttatggctgctgctttacaccgttgtagactgctgaaacaccttgacgttatgaactgtaattttgtttttaataacattacctttt

SEQ ID NO: 31546 - DNA, 395 bp, Gossypium hirsutum
  unsure (1)..(395): unsure at all n locations; Clone ID: LIB3148-051-Q1-K1-D8
aaagaagcaagttactggatcgagttgtgtcagttgaatatgctttaagggatgatgatgagagggatggtagatacgatagtcccagaagaggaggtaatggcagacatggggatagtccatatcggaggtctccaagccctgcatatcgaaggcgaccaattcctgattatggtagggctcggagtcctgtttatgatcgctataacggtcctgcttatgacaggcacaagagtcccgaatatgggagatatcgcagcagccgatcccctgttcgaaggtcccagacatgaatggcggtcggaatgattgagaagaatatgttaaaaacatgcacttattagagtttgcagtttgagtagaaagntgagtagcatttttcttgattgaactct

SEQ ID NO: 31547 - DNA, 393 bp, Gossypium hirsutum
  Clone ID: LIB3148-051-Q1-K1-D9
cggactccatggcaaaaaatgacggtacggtaacatattgggcgacctgactggcgggaacggtggactataccattagcgaactatggaaacaatatcaagcggcctcaacagataatgaaaaacaaacgctaacacagatctatacaataacagccgtagtgcttgagatgacaaatgcgccagttatggtgtgccccatgctaaaaaaggcatacgctatttaaactacgcatagacactaaacaacaaggtcttacattgaaactctagaggcgtcagtcggaacataagccaaagcattagcaatctgaaacaccgattcattggtatcgtacccaaagcatcttgctattcaagttctacaagtttagctaggaaccattcctatct

SEQ ID NO: 31548 - DNA, 371 bp, Gossypium hirsutum
  Clone ID: LIB3148-051-Q1-K1-E10
actgctcttcacttcttgtgctcccttccataatgcacccctagccaagttgtgaaagtcgcaaaacaacatcatgcccttattatctcaacacccaactcatttttctcaataaaaatgtgcatcatacaacgtgctcctaagattccatcagatcatccttgtgcttataagtataatgttatattgctaattcattactgctattcaattactccgatagactgagctatttgaagatcatgatacagatgcacttaactggtgatctccttggtagactttagcactccttgccatgtgctcaaatataaaatggggggcaagtttactaagcacaaaattcatctccttcactgaacagttctagt

SEQ ID NO: 31549 - DNA, 106 bp, Gossypium hirsutum
  Clone ID: LIB3148-051-Q1-K1-E11
gcaagtcccgggccagaccgcacgcgtcacgcccacagctgtccgtataaataataaaaaatttaattataaaaaaacaaataaaaaaagggctgtgccgggtcgg

SEQ ID NO: 31550 - DNA, 415 bp, Gossypium hirsutum
  Clone ID: LIB3148-051-Q1-K1-E12
gaaaatcagaagcctcaatcccatcaaaacctctcttcttcacctaataaatcaatcccagaaatcgaaagcaacgccgcctctgatttctcgggccatcaaagggtccgtttccccaacccacccgacctcactaaccctgacccttctaccctccgagatcaatggaggtacgccatccggcagtacagtcgttggtactctcacgcctggggcactgctattcttgctggggtttcctttttcgccctcggttgggtcatcaaaggctctaatcccctcccctctttcaactccgacacaaacaaaaatgactccgacactaacaaaaatgacaatagcaagtgatcttccaaccatcctcaatgttctgtggatatgtttggtcaccacaactgttgaagaggccattttg

SEQ ID NO: 31551 - DNA, 426 bp, Gossypium hirsutum
  Clone ID: LIB3148-051-Q1-K1-E2
cccacgcgtccggattcgtggctaaagcaacttagagtccagcaccatgacttcaattacttcacggggattcgacgtggctaaacacataattgcttgctgtagttttctgttgagaaccccatggaagtgactgaccactaattaacaaaaacaaaaaagaaaaagaaaaaaagttaaaaaaaaagcctctttttgggttttaagaatttttggttttgtgcttgggagtaatagtgaggattgtgattggcacttgttatcaaaacccttttgacggttcactctgaggccagccttgacaggaactttcagcagaggctatgtgagtttaccctctttatgtttgtgggcttttattgtaaagaaatgggtgagggtctaaaagagtacaaaagtggggctctgaaacgttagaaactcttt

SEQ ID NO: 31552 - DNA, 132 bp, Gossypium hirsutum
  Clone ID: LIB3148-051-Q1-K1-E3
cccacgcgtccgaaagcataagctctaggattttcatccgatctctgtaatagtttataggcacttcggaccttaaattcacccgacatctcacctccccaaataagaaagtcttcataaggtgttcgtgct

SEQ ID NO: 31553 - DNA, 417 bp, Gossypium hirsutum
  Clone ID: LIB3148-051-Q1-K1-E4
ctattcttgggtttccagtttcttggtcaccgaatcaaagtcaatgggctacgagattgtcaactaattatgattcaactagaactgttttataggcgtttccagctaaaataccctagagcttatgaaatgagcttatgcagatttcgttgaatggtttgtgacagttttgctgagtataaaatggtgctcctgcttagtagaatatgtaaacagccgtaacgagaagggcaccgtcaatatccaaccggatttcaaatatggttgcgtgattcttcacaactttgcaggctgtagccatgatttggggggcagactgcgagtccttgcaatgatttggagcaggggaacatcgtgcaaggtaacttgcacgcggaccataaaaaccattccagggttttatctaatgttcccaat

SEQ ID NO: 31554 - DNA, 60 bp, Gossypium hirsutum
  Clone ID: LIB3148-051-Q1-K1-E5
aaaaaaaagaataaaaaataacaaaaaaaatataaaaaaaaagcataaaaaaaaaaaaaa

SEQ ID NO: 31555 - DNA, 375 bp, Gossypium hirsutum
  unsure (1)..(375): unsure at all n locations; Clone ID: LIB3148-051-Q1-K1-E6
tcgaagtgtcagtttgattttacattcgctgtgaagaaattgttgtattagacttgggttaatccggctttgcatttaagagtagctcttggttcctaaatatgtctgtactctttctaaaggtcaaaattcggtcagatcgaccagatgatgtcaatcgtactagatctcaataaacatctgcaaagcagtaccaaacttttgttttggcattccatgtttcattgacaaaacaaattttaatggtgtaaattgctctctaacagaaggctgattacttccatttatattgcaaggcaaataaataatgaccttcggcctcgtataatcaaanaaaaaaataaaaaatatcttttattttttattttttaaaat

SEQ ID NO: 31556 - DNA, 222 bp, Gossypium hirsutum
  Clone ID: LIB3148-051-Q1-K1-E8
cttagatcgatagcattaaggagtttttgtagtagatatgccaaaattttcatatttctccacccaatgcttcgcttcgcgattctgacttaacactttccgctgatcactaatttatgttagttttctgttttagttattttatttttgagacatatatgctttgttttttgtttattatgcactattatttttattattttataggttgtttgcttttct

SEQ ID NO: 31557 - DNA, 328 bp, Gossypium hirsutum
  Clone ID: LIB3148-051-Q1-K1-E9
gccacgcgtccggccctttggtcttttggttgccgaagaaccaactaactttgttaggagggggaaatgcttactctagctcgtcttcctaaacgcgatacctcggtcgctagttcatactacatccatgctcgaacaagcaaatatcgaacacacataacgttacgcttaatagtgcaaagtgaagtttcataccaactactggacataagagagcatctcagacgtgtccagctccaagaacatgatgcagcatctcctcactggcgatctactctgttgagccaacctaatcctgctatgcgcgcatattgtatgctcgggaaac

SEQ ID NO: 31558 - DNA, 330 bp, Gossypium hirsutum
  Clone ID: LIB3148-051-Q1-K1-F1
cggcccggattccggttcgaccaacccttccggtggaaggcctttaacaccactatttaaaggacaggttgaaaaggaaaagggtggaataaagactgatgccttttttcaaaccaaggggttctaaatgtatatgctgtgggtgatctaaccccttttcctctgaagttatacaatgaactgaaaaaggtggaacacgttgaccatgcccggaaatcagctgaacaagcagttaaagctatcaaagcaagtgaagaagggaaatcagttgacgaatatgactacctaccgtacttctattcacgttccttcgatctatcatggcaattc

SEQ ID NO: 31559 - DNA, 422 bp, Gossypium hirsutum
  Clone ID: LIB3148-051-Q1-K1-F10
gactactggtttctggccaagttacaagtcttttgatctcaaccttcctgctgagatgattaagtgtgttgaagttttcagggacttctatcagacaaaaacgaaacacaggaaacttacttggatatattctttgggtacttgtaaccttattgggaagtttgaaccaaaaacagtggagttgattgtcacgacatatcaggcttctgccttactgctattcaattcctccgatagactgagctattcggagatcatgatacagttgaacttaactgatgatgacgttgttagacttttgcactcgttgtcatgtgctaaatataaaattctgaacaaggaaccaagcacaaaaaccatctcctccactgatcagttcgagttcaactccaagtttaccgataaaatgaggaggatcaaga

SEQ ID NO: 31560 - DNA, 411 bp, Gossypium hirsutum
  Clone ID: LIB3148-051-Q1-K1-F11
gccaagttacaagtcttatagatctcaaccttactgctgaagatgattaagtgtgttgaagtggtcagggacttctatcagccaataaacgaaacacaggaaacttacttggatatattctttgggtacttgtaaccttattgggaagtttgaaccaaaaacagtggagttgattgtcacgacatatcaggcttctgccttactgctattcaattcctccgatagactgagctattcggagatcatgatacagctgaacttaactgatgatgacgttgttagacttttgcactcgttgtcatgtgctaaatataaaattctgaacaaggaaccaagcacaaaaaccatctcctccactgatcagttcgagttcaactccaagtttaccgataaaatgaggaggatcaagat

SEQ ID NO: 31561 - DNA, 323 bp, Gossypium hirsutum
  Clone ID: LIB3148-051-Q1-K1-F12
cccacgcgtccgcatgaactggacactttcaggaattgcatcaaatacatgggaacgaatgcactagaagccacctgaacctggaaatcgtatcaaatattcgcaatttattctggagctttcatggacatttattcatttgaacgcagctggagccttataaaactgtttccttttttcttttatgcttgttttcacgtgtcgcaaataaactttgattctgcatgttctggacatgcaaagtgtatatgatgaaagatagaaatggattatttcctattatttcttgatcgaaataaatgaaagtaaaaaagtttagagtt

SEQ ID NO: 31562 - DNA, 320 bp, Gossypium hirsutum
  Clone ID: LIB3148-051-Q1-K1-F2
gaagaatttagtcctttttattattgcttttgtctcttgttttcagtactctgctaaagacataaattatttgtggtttttgatgtttttgttttaattgtttgttgttttatcatggaatggtttctatttttatgggttggctaaacaataatttaactctttgttctattactacttgattttattggaaaaaaaaaagatataaaagcaatgtacagaatgaaaaacaattcacaaatattactacctaccttacttgttatgcacgtttcttccatctatcatggttattttatttttgacaattgtacgatatt

SEQ ID NO: 31563 - DNA, 416 bp, Gossypium hirsutum
  Clone ID: LIB3148-051-Q1-K1-F3
cccacgcgtccgggaaacccaaaattgtgccaaaaatccattacaaaatgaacgctgtatcgaggcgagctattactggaatctttactccagcgagacaggggatcaacttattgagtcatgatctgagtcaggttcagcaaatgagagggataagggtgaaggtaaggaacggcaacttggagcaagcgttggcggtgatgcagcgggtgatgcaatctagcggaatcgaacggctgataaagcaggaacaaactcatcacattaagaattcggagaaacggattttggcacgcaagattttggagcgtaagatcaaatcacaggaccacgctcgcaagctgcaaaccatcctcatcaagaaagtcaggggtctgtgagggcaactttggtgtaattttctgggtaaacttttg

SEQ ID NO: 31564 - DNA, 419 bp, Gossypium hirsutum
  Clone ID: LIB3148-051-Q1-K1-F4
aaaagacagtatttgtttggacgtgtcagcatgaagatcaagcttatccccggtgactcggccggaaccgtcaccgccttttacatgaattctgatacggacactgtaagagacgagctagatttcgagttcttgggaaaccgaactgggcaaccatacacggtccaaaccaacatatatgctcatggtaaaggtgatagagaacaaagggttaacctctggtttgatccagctgctgatttccatacatacacaattatgtggaaccatcatcatattgtgttttatgtagatgaagtgccaataagagtatacaagaacaatgaagcaaaaaacatcccatacccaaaatttcaacctatgggggtatattcgactctatgggaagctgatgattgggcaacaaggggaggacttga

SEQ ID NO: 31565 - DNA, 417 bp, Gossypium hirsutum
  Clone ID: LIB3148-051-Q1-K1-F5
ctttcattgtctttgacaaatccacctccactttgtttgtggcttctgatcaatttggtaaggttgctctctattggggaatcaccgccgacggatatgtggcctttgctgataatgctgaattgctgaaaggtgcctgtggcaaatctcttgcttcttttcctcaaggctgtttctactccacagcagtaggaggattaagaagctatgagaatcctaagaacaagatcactgcagtgcctgctgaagaagaggagatatggggtgctaaattcaaggtggaagggccaacagttgttgctgccacagagtagtcctttgctttctccttctaaatctatggatccatgggaatataggagctgcaaatgcatagcatatggatcagtctccatgtgaataactgagttccagtac

SEQ ID NO: 31566 - DNA, 263 bp, Gossypium hirsutum
  Clone ID: LIB3148-051-Q1-K1-F6
gtagagattgttagaattgtgtgactcaaattctaagagattgcttataagtcaagttaaacaaaaatatattttctttctaaaaaaaaaaaaaaaaaaaaaaaaaaggacagcaaataaaaaagaaaaaaaacgaaaaaaaacgggcatgcgaaaaaaaaaaaccaaaaaaaaaggaaactagcggccattcactgggccggctttttacaacgccgagaatgggaaaacgggggggctaattaaagtaaccgaaatggaaa

SEQ ID NO: 31567 - DNA, 389 bp, Gossypium hirsutum
  Clone ID: LIB3148-051-Q1-K1-F8
cccacgcgtccggttggtttcatacaaggttaaaaagggaacactaacctctgaaagttgtgcagaatattatcggtttcttttttgagttgatttaagttgaattccattataaaaaaaaaaaaaaaaaaaaaaaaaaaaaaaaaaaaaaagaaataaaaaaaaaaaaaaaaaaaaaaaaaaaaaaaaaaaaaaaaaaaaaaaaaaaaaaaaaaaaaaaaaaaggggggcggccttttaaaaaaatcaaattttactaccgggggctggcaacgtaattgtttttttttggggccacaaaaataaaattcacgggccgtgttttaaaaacgttgggactggaaaaaccctggccttaccaaaataaattgcttaggaaaaaatccctt

SEQ ID NO: 31568 - DNA, 421 bp, Gossypium hirsutum
  Clone ID: LIB3148-051-Q1-K1-F9
gatagatgcaagttccatcaccccattgatcggttaacaaccaacgaagcttctcaggaagctattaagctcactcttgctggattacctagaagagagggatctgttcattgtccgtactacatgaaaactggaacatgcaagtatggtgcaacatgcaaatttgatcacccgccccctggggaggtcatgtctgtgactggagtacaaggaacatccacaacaatgtcgggatgaggaacatgatatgaaaactcagctatgggaagctactttgtgatgacgatttatacgggtttatagggctttctgtatcaaggtctgttagcatgatgcctagagtggatgggcaatatgaatgtacctagagtggaccatgtgaatttaatgtatttgtcaattaatttttgagaacacaatg

SEQ ID NO: 31569 - DNA, 339 bp, Gossypium hirsutum
  Clone ID: LIB3148-051-Q1-K1-G1
cccacgcgtccgatggagatgaacatgcagcaaggacctaagaagcaatgtttgcgaagaacacggaccggtccatggtgaagtgaaaacattgtgcttgtggttcttggttagcagatagttgtacaaatttaagtcaaagggtagtagttgatatttctttagattttaatagatgaaattagtgcacagtagataaaagaaaacaccaatattggtagtattctttttttatgggcaacatgcatggttttattaaacaatatctgtaaatataagaatctcagagttccttttgttggttcttattaattgaagtaatcatgtgtgtctttttct

SEQ ID NO: 31570 - DNA, 412 bp, Gossypium hirsutum
  Clone ID: LIB3148-051-Q1-K1-G10
aacgaagagagtcagaagccatataaacacaagggaaaaaaaacttggtttgttctgattatattttaagtttaaacatcagttttattgttaatattttctattatctaattaagtatttatgtttttaggagcttgacaatagaagtgttcaatatgatgaggaatatatcttgaattctcgaggtttaaagctatttacatgcaaatggattccagtgaatgaagaacccaaaggtttaatcttcatctgccatggttatgccctggagtgcagcatcaccatgagctctacagcaaatcggttggtgaaagcaggatttgcagtttatggaatagattatgaagggcatgggaagtcatctggtttgcaaggctatatctcaagttttaacaatgttgttgatgattg

SEQ ID NO: 31571 - DNA, 409 bp, Gossypium hirsutum
  Clone ID: LIB3148-051-Q1-K1-G11
ccaaactttgctctcctaaacaatgccggaggctggtgcaaccctccactccagcactttgatatggctcaacctgcctgggaaaagatcggtatctacagaggcggaattgtgcccgttttgttccagagggttccatgcaataagcctggtggagtaaggttcactatcaatgggagagactatttcgagcttgttttgattagcaatgtgggtggagcaggatcgatccagtctgtgtccatcaagggctctaaaactgggtggatggcaatgtcgaggaactggggagctaactggcaatccaatgcctatctcaatggtcaatcattgtctttcaaagtcaccactactgatggagttactcgacagttccttgacgttgtgccatcagactggggtttcggca

SEQ ID NO: 31572 - DNA, 385 bp, Gossypium hirsutum
  Clone ID: LIB3148-051-Q1-K1-G12
tgccaatgtcatgtaggatggaataagcattctcaacggttgaagcaaattggaaaagctttttcagtcattgccactggaactgctgccactagccctggggaagttctgtcatttcttaatgtcccttcttgttaaactcttatttcatggtaaagtactttgtgtcaattcttactgcatagaggatctattttgctttatttaagcaggttcttctcagtattatgaacgttattattcttgatcagtgatgtgacagtgaacattgctgttaagaacaaagctcttgtttttcaattcttctgggttttggtttgtaatagatagtgagaatattgtaaacttagttagctcaaccttaataagattttgatctttacgt

SEQ ID NO: 31573 - DNA, 420 bp, Gossypium hirsutum
  Clone ID: LIB3148-051-Q1-K1-G2
caagaccttgagttgggaaaatcaccaaatgcagatgtctgtacacgattggggtatgaagaaaccagcatttctgagatcggaaagtgttttcttcaatatacaatcagagtggcagataagacagagtgtaatgaagtcgaagagatgcttaagagccaaatggttctatgtctaagcagcctaggctactgtcttaatgatttgaagagagaagccacagaaacagagaaagaaatagccgaactactgaaatgggagaatccaacaaggcatgtaaattttcctgaactgttatccaagcttcatgccacatgataaaaatacaaactcacacgaaacctgtcaaattgcaagctatacgaagaagcctcaacggtgacccagctattggcaacctctggttcaatttcatttttc

SEQ ID NO: 31574 - DNA, 310 bp, Gossypium hirsutum
  Clone ID: LIB3148-051-Q1-K1-G3
tcgaccacaagattccttctacgcttcgatttcaacgaagaagacggaatctcttagcacatccgcaaggtacggaggcaacgtggcgggggtagctggcgtgtatggatgttgctggtggcgtagctgctgctagggctagggtttgctgcaaacatggtttaagttttgggccctttttgggcttaaggttttattagttttgggttttaaatttgggtttgggtttgtaatgttttgggttttaaatttaggtcatgtaatttggattttgatgatggactattaatttatttagtctttatttttg

SEQ ID NO: 31575 - DNA, 415 bp, Gossypium hirsutum
  Clone ID: LIB3148-051-Q1-K1-G4
gcccatgtaaattcctaatctcatgggttgtaatcttgtatgtgcattcgccgtaaacggagttgctatatcggagtgaacgaccgtctttgatgccaagatctcgctcctcacatctcgtactatcagacccgaagcagatttgaaagattgttggtcaaaggctacatcaaaaaagattgcaacctttgttcttcgattaacatgtttagggcctctgtcaacttgaaagattaaccaaagcccacaacagaaaagttgacactgttcactagtcccccgactaaaaacccaggacactgtcaaaatatatgattactatcttccttatattggcgacaccgagggcaataatcgtccacagccactttcttatgcttgaggttaataagagtaggaataaaactccatgaga

SEQ ID NO: 31576 - DNA, 243 bp, Gossypium hirsutum
  Clone ID: LIB3148-051-Q1-K1-G6
acgctctgatgatatttgaaagtaggaaatggttaattttatatcgatgtttatatatagataggatgggctccctttgagagaaatgataataagtggaactacatgacaaggaaagttacagatggagtgattaggttttgttgcaacaaattatattgaatcagaatgcatatatgtatacgaaggggggatggagttgatagtgtctgcctatctcatgtgagattatagatgttaact

SEQ ID NO: 31577 - DNA, 167 bp, Gossypium hirsutum
  Clone ID: LIB3148-051-Q1-K1-G7
cccaaacttactctataggaccgatattgttttctatcgatctctcaagtatattaaggtgggatttttatcaaaattactatataaaatatcataggtgaaattttaaaatttaatgtactacatgaaatcatactatatataaaaaaatttatttatcataaaaa

SEQ ID NO: 31578 - DNA, 271 bp, Gossypium hirsutum
  Clone ID: LIB3148-051-Q1-K1-G8
accaaacttttatggaatgtttttatttattttgccgcatgttcaagccttatttgcaagccgtttataagcgaattgattacctcattactctatactatcttgagagggacaaagataaccccaatacattccggtatttggcatgataacctattcataatcccgcaatgaatcggtgactggttccgctgcaaataactcgtatctgcttgatatgatctgttctttactaaagtttcatacacataaaaatatgctacttatattc

SEQ ID NO: 31579 - DNA, 381 bp, Gossypium hirsutum
  unsure (1)..(381): unsure at all n locations; Clone ID: LIB3148-051-Q1-K1-G9
cccacgcgtccgggaaaagcttgttgatacaaatggtgcaggtgatgcctttgttggaggctttctttcacaattggttcaagggaagtccattgaggattgcgtaagggctggttgctatgcatccaacgttatcatccaaaggtctggatgcacatacccagaaaagcctgaatttaaataaagctattccactttcctgatctcctctccactgttgttttcaagtttctgattgttaagaaccctcttgctaattgaattttgtttttatttttcctatttgccggtgtcatttcgatgcctgcatcttgaaatggcatatgagaataacattttatgtttattcnaaanaaaaaaaaacctaaaaagaaccaaaaa

SEQ ID NO: 31580 - DNA, 419 bp, Gossypium hirsutum
  unsure (1)..(419): unsure at all n locations; Clone ID: LIB3148-051-Q1-K1-H1
cccacgcgtccgcaggcctgtcatccctgagaagtaccttgatgagaagacaatcttccaccttaacccatctggccgctttgtaatcggtggtcctcatggtgatgcaggtctcaccggacgtaagatcattattgacacttatggtggctggggagcccatggtggtggtgctttctccggaaaggacccaaccaaggtggacaggagtggtgcttacattgttaggcaggctgccaagagcattgtagcaaacggacttgcccgcagatgcatcgtacaagtctcctatgctattggtgtgcctgagcccttatctgtctttgtggacagttacggaaccggaaagattcctgacanggaaatactccaaattgtgaaggagaacttcgactttaggcctggtatgatcaccatca

SEQ ID NO: 31581 - DNA, 171 bp, Gossypium hirsutum
  Clone ID: LIB3148-051-Q1-K1-H10
aacagacgtagggtcaatgaatttatagatatgggaagaacgaattgagtttgtgggagggttattaaggtaaatattgctaggtaattgaataaagaggtgatttttgattgactgtattacatgcaaactagcttatgaaaggatggggccacaatgagaaggaatgta

SEQ ID NO: 31582 - DNA, 113 bp, Gossypium hirsutum
  Clone ID: LIB3148-051-Q1-K1-H11
gacaaactcaaggtcaatccatatatacatatgggaacaactaattaagtttgtgggggagctatacagcttactacttgcatggaaactgtacatacgacactttatttgat

SEQ ID NO: 31583 - DNA, 324 bp, Gossypium hirsutum
  Clone ID: LIB3148-051-Q1-K1-H12
gtgatggttcttactcccagcagcaacaggtgaggctcaagttggatgtcaaatgcccttgggatcggttggattgcttgaaaccctgtagtttgcagtatctattttgttagccataataagtagttttgaggcataatagatgcctttattcggttgtgctactgagtgtagttttatttggcgtgctttctttctttttgtcttgctgctccagtaccttatgtttggtagtgtttaagtaagctttaatagtttatataaaaaaaaaaaaaaaataataattaatattttattaaattttaattttaaaataaattaatg

SEQ ID NO: 31584 - DNA, 414 bp, Gossypium hirsutum
  Clone ID: LIB3148-051-Q1-K1-H5
ggttatgaagatctcgacagaagatcacatgccaggatggataccgggcaacctgaacaagggtcacctagactggttttacttcctcttagctggactaacgacaattgacttgattgtctacatagcatgcgcccgatggtacaagagtatcaagctggaaggaaaaactgcagaaaatattgatgaccaagttagctttaagctataatatatacatatcggtgctaaaacatataaataacggtatagattaatagaataatgaggaaactgggttagagggttggtacccaacatgatgatgttgagaaattaaagatttaagtcgaaagaaaagtggggtatcgtgagagagaagtcaattttcctctcaactctcttgaattcccatcacttgaattgtcctatctg

SEQ ID NO: 31585 - DNA, 354 bp, Gossypium hirsutum
  Clone ID: LIB3148-051-Q1-K1-H6
aaaagacaatatttgaaagtacgagatgaattataatagatggcctgtacacagtgaataggggtgggctgtctttgtgaataaaccataattcttggaccgacacttgcaagaaacattccagggtgtgggcgattttgaggagccgaactagatttccctgcactggccagactatcttttattctagggggcctggagttaattaaatgggccgtaattttaaaaacatagtaagctgaaaatcctcttacatacacaaatatattgcttggtaataatactccgttttacgtccctgaatattctcaaaaagtctgttacaattcttcattataaaaaattccccaacct

SEQ ID NO: 31586 - DNA, 279 bp, Gossypium hirsutum
  Clone ID: LIB3148-051-Q1-K1-H7
cccagacctactaataaggcacttcatgagtttgttcggataactttattatatgctaatggtcaaacgtagcataatcttatccatttttttttggtctttttttaaaaaaaaatattatttttaaaaaaattaaaaaaaaaagaattgaaaaaattaaaaaataaatgtctaaaataaataaaaaaggttttatattatactaaaaataaaaagaaaattaaattataaagttttttggggggtccctatttaagggccaagtttattttccctaaa

SEQ ID NO: 31587 - DNA, 300 bp, Gossypium hirsutum
  Clone ID: LIB3148-051-Q1-K1-H8
ggtggttatggaggagctggtggacatggatgtggtgctggtggcggtaatggtggaggcagagctagtgcaggtggtgcttctgggtatggcagtggaggtggcaacggaggtggagctggtagtggtggcggctatgaaggagctaatggacacggaggtggtggtggcaatggtggtggaggagctagtgctggtggatatggtggaggagcttctggatatggaagtggaggtggtgaaggaggtggagctggtggtggttatggaagagcctgttgacaaggaggtggtgctagt

SEQ ID NO: 31588 - DNA, 299 bp, Gossypium hirsutum
  Clone ID: LIB3148-051-Q1-K1-H9
gctaataccgccgcgtaggcatttggttgaataagttgggtttggttcgttttggcgaggcgtgcatgcttaattctatctagcagacgatgtaaactgtgtgcttaatttctatactcttccacatgctttgataaacaaagaatgtgaccccaataaagaattagatcctcaatcaatatgaaggtcttgcacttttattgaagtactaagtaccttcgaaactatagatttcaaggggtacaatactttaaaaggcgcggctattttaaagtttttcagtcatatctcccggttct

SEQ ID NO: 31589 - DNA, 92 bp, Gossypium hirsutum
  unsure (1)..(92): unsure at all n locations; Clone ID: LIB3148-052-Q1-K1-A1
aaaattttggaaaatagctcattttgtcggccaactgtaccatctaaactagaattgcttttttcttatccatccatgaactccgcnnntna

SEQ ID NO: 31590 - DNA, 317 bp, Gossypium hirsutum
  Clone ID: LIB3148-052-Q1-K1-A10
caattcgcttattctcaccataaagagtctcctttacggcccagatcatttgctgtgaaagatgaaatcttctgcttgtttgagggagcccttgataacttggggagtttaaagcagcaatatggtctggcaaagtcggcaaatgaagtgattttggtcattgaagcttacaaggcccttcgtgaccgagcaccttatcctccaaaccatgtggttggccatctaattgggagctttgctttcattgtctttgacaaatccacctccactttgtttgtggcttctgatcaatttggtaaggttcctctctattgggg

SEQ ID NO: 31591 - DNA, 401 bp, Gossypium hirsutum
  unsure (1)..(401): unsure at all n locations; Clone ID: LIB3148-052-Q1-K1-A11
cagatgatgaagagaaaaaaagtaatttagtttaagaaaaaaaaacatttgaacatgtctatggtttaatttgccaatcatgtaatgttccgtgttttacagtttcttgctttttaatcaagcactcaagcttggtgtcttttcccattttcaaattgggttaaatttagggactggattggatatttgcctatatatataaacattcgaatttacatannnnaaaaaaaaaaaaaaaaaaaaaaaaaaaaaaaaaaaaaaaaaaaaaaaaaaaaaaaaaaaaaaaaaaaaaaaaaaaaaaaaaaaaaaaaaaaaaaaaaaaaaaaaaaaaaaaaaaaaaaaaaaaaaaaaaaaaaaaaaaaaaangggggggccccctttttagagaacaaaattttttt

SEQ ID NO: 31592 - DNA, 420 bp, Gossypium hirsutum
  Clone ID: LIB3148-052-Q1-K1-A12
ggcccattcaatcccaacaaaagcttgtcaatcacaatttttcctccttcactttcactctcaagtcccacaactttcttaacccaaaaacacccactttttcacatccatataaattacttcatttccctacccataactcatggattgcttggtattgcctgtttgcttattgggaaagcgcagcatgggatcacggctaggctaccggcgtctaacgcgcgagttggagccacaagtgagggtggtggtagggaaagagaaacgagaattttgggtggaccctttggtgttagaagagagtccgttccgggttttgatggaaacattgaagaaagggaatggcagccatgcaacaagggagaagaaaaagaaagtgatattcgtggacgtggatgctatcttgtttgagcacatgct

SEQ ID NO: 31593 - DNA, 242 bp, Gossypium hirsutum
  Clone ID: LIB3148-052-Q1-K1-A2
aggcaagaggttttgcatgcctaattcgagagtgatgattcatcaaccacttggaactgctggaggcaaagcaacagagatgagcatacggataagggaaatggtgtaccataaggttaagttgaacaagattttatcaagagttacaggaaagcccgaagaacagatcgaagtagatacagaccgggataatttcatgaatccttgggaagccaaggaatatggtctaatcgacggagtta

SEQ ID NO: 31594 - DNA, 304 bp, Gossypium hirsutum
  unsure (1)..(304): unsure at all n locations; Clone ID: LIB3148-052-Q1-K1-A3
cttttcaccaaatgcaaaatttttgttgtatcgcttgtactggtgagtggttttggaactttatatatccgctggttttttctgattggagtttgcacaagtggtgttggtgaatagcagttttggtattggtttttgggttactatgtaggaagaaatggggtgtagttgggggttcagttgggcctttgctagaagactatgcagtggtttttgtgtgaaagagctggatgaaccccgtcactcttttatgttccactttgttatggtgcgtanatgtcttttggatttgatcatttattat

SEQ ID NO: 31595 - DNA, 343 bp, Gossypium hirsutum
  Clone ID: LIB3148-052-Q1-K1-A4
gattgaagggaggggctttcataccaatttatatgctgtacgtggcacttattttggaggaaaagaaggaaaaagtaaaattcagtggcttagatcaatggttggtagtcctgatcttatctccataccaggtgaaacagggaggatgtatgaagcaaatgttgatgatgtggggtacaggttggttgctatttatactccggtcagggaggatggcattgagggacaacctgtttctgcatcaactgagccaattgcagtcgagcatgatgtttataaagaagtaaaacagaagcttgatattggatctgtaaaagttgaggtattatgtgacaaggatcgc

SEQ ID NO: 31596 - DNA, 362 bp, Gossypium hirsutum
  Clone ID: LIB3148-052-Q1-K1-A5
ctactcctagctttggtgatttgaaccatctaatctctgcaaccatgagcggtgtgacatgctgccttaggttccctggccagctcaactctgacctccggaaacttgctgtcaacctcattcctttccctcggctccacttttttatggttggatttgctcctctcacctcacggggatcacagcagtatcgttctttaaccgtcccagaactcactcagcagatgtgggatgctaagaacatgatgtgtgctgcagaccctcgacatggttgttacctcacagcctcagccatgttcaggggtaagatgagcaccaaagaggttgatgagcaaatgattaacgttcaaaacaagaactca

SEQ ID NO: 31597 - DNA, 363 bp, Gossypium hirsutum
  Clone ID: LIB3148-052-Q1-K1-A6
gcaaatcatcggctaaagtctgaaatgagggctgagatggatcgctttgctcgggaaaagaaggaactttctgaacaaatacaggaggttgagagtcaacttgagtggcttcgtttagagagagatgatgaaattgcaaaactagctaatgagaaaaaagcacttcaggatcgtcttcatgatgcagaagctcagctctctcagttaaagtctcggaaacgagatgagttgaagagggtagtaaaggagaagaatgctcttgctgaaagattggagagtgctgaagctgagcggaaaagatttgatgaagaactgaaacggtatgccacagaaaatgtgactcgagaagaaattcgtagtcac

SEQ ID NO: 31598 - DNA, 378 bp, Gossypium hirsutum
  Clone ID: LIB3148-052-Q1-K1-A7
ataccgtggtgtacgaatgcggagttggggcaaatgggtgtccgaagtccgacaaccaaaaaagaaattgagaatatggctcgggacttaccccactgcagaaatggcagctcgagcccacgatgtagccgcactagccatcaaaggctgctcggctcaccttaacttccccgaacttgcaaaaacacttccacgccccgctagtacatctcctaaggaaatccaagccgctgcttcccaagcagctgcttcaacatatctcgacacatcgcggtggagcaacaacattgaacccgaagacaaagtcagtcgtcgaccgaggcaagaacaagttccggtttcacgttcggacaatatgtgtagtacttcaccctttga

SEQ ID NO: 31599 - DNA, 317 bp, Gossypium hirsutum
  Clone ID: LIB3148-052-Q1-K1-A8
caaggatcgtaaaggtggcgcaaaacctgctgttggtagttccgacaaggttgaaacaaatattaatgagaccagcaaattaaagttgaaagaggtgaaagcaatttcacacccgaaagagaggacacgacaagaaaaggcaaagccggaggagggagagacaaatttaaaaaggaaaaggccaaaaaggaataaagatccatcaagccgagacgtggtagacaaactcgacatgctaattgaacaatacagatctaagttctcacagccgaaatccggaacacccgacgcggaaaagcaaggttctaagaagctta

SEQ ID NO: 31600 - DNA, 178 bp, Gossypium hirsutum
  Clone ID: LIB3148-052-Q1-K1-A9
atgacgttcattctttttattatgtatttttatctgcatttagacatttaatcgaaactatgcatgcccctgtttttagaatcatataaaattgcttgtattgttcagagacatttaattgaaactatgtattaccctgtttttagaatcatatggctatttaactgccatttacttg

SEQ ID NO: 31601 - DNA, 120 bp, Gossypium hirsutum
  unsure (1)..(120): unsure at all n locations; Clone ID: LIB3148-052-Q1-K1-B1
gattaaggaggctgatgggacggttgttctcactgcctangttagggtttttgctttttgttctcttatattatcatctaggacttaatttttgaaatgagattttacaataacattctt

SEQ ID NO: 31602 - DNA, 95 bp, Gossypium hirsutum
  Clone ID: LIB3148-052-Q1-K1-B10
gattgtagaaaacattagcttgtcttgaaaagggcattggcactagattttctgtacaggtctatatggattctatataattttttgcctcgttt

SEQ ID NO: 31603 - DNA, 365 bp, Gossypium hirsutum
  Clone ID: LIB3148-052-Q1-K1-B12
cccacgcgtccgtgttggttagcgaatgcattctttgttatttagatttgctactagaatattcatgacttctgcaatttgtttttgctcgatttcctttttaattattaaaattttctcacattgtgtaggttctccccgtaatcctcagactctatctttccaaatttgcttgaaacaattgtcggcatgtgatgggccagtttaggattattccagttcaggaaaacacctcttcaggagttttggagaaatcacatcgaataaccaagttttgaagctttcacgttaataatctgttaaactaatgaatggaaggcttcaaacaaagccaacaattgtttcgggtttacctatttatttta

SEQ ID NO: 31604 - DNA, 104 bp, Gossypium hirsutum
  Clone ID: LIB3148-052-Q1-K1-B2
cccacgcgtccgggcttttgtagtttcaccctacttgatattacagtggaagttacttccaagtaaaaataattgaatatatatatattcagatttttgcttcc

SEQ ID NO: 31605 - DNA, 328 bp, Gossypium hirsutum
  unsure (1)..(328): unsure at all n locations; Clone ID: LIB3148-052-Q1-K1-B3
agttttcactggtgcccctggcaagtatgtggagttgaaggagagcatcaccagcttccagggagtgttggatggaacgtatgatgacctgccagagcagtcattttacatggttggaggtattgaggaagtgattgccaaggcagataagattgccaaggagtctgcagcttaattaatttcaatgttgatgcctttgtttactccccgataatgttgaaaataattaggcggtgttggcgttgccaataacaacaggactgttcattttttgggatatttttcctattcaagttttaatgattntattcaggagtgagaaagaggg

SEQ ID NO: 31606 - DNA, 174 bp, Gossypium hirsutum
  Clone ID: LIB3148-052-Q1-K1-B4
cccaaacaagccttgttagaccactcgcaattaactctcatcatgtaaccgcatttcaacttcaagatatgagcgagatgtttggggatattgaggaaatgtttctttctttattgttttcattctccttgcaaggagttttaatcatttaatattgatacaacatttcctttg

SEQ ID NO: 31607 - DNA, 360 bp, Gossypium hirsutum
  Clone ID: LIB3148-052-Q1-K1-B5
attttgtgtttcccatcttttttgttttttcttgcattaacttggattttcagattgaactgtgttatgcgtgtaatattttctattctctattttaagaaagagggttatgaattaaaaaaaaaaaaaaaaaaaaaaaaaaaaaaaaaaaaaaaaaaaaaaaaaaaaaaaaaaaaaaaaaaaaaaaaaaaaaaaaaaaaaaaaaaaaaaaaaaaaaaaaaacaaccaaaaaaaaaaaaaaaaaaaaaaaaaaaaaaaaaaaaaaaaaaaaaaacccacaaaaaaaaaaaaagggggccccttataaaaaaaaaaaattttttaccccggtgatggaaaaaaatattttttttttgggcc

SEQ ID NO: 31608 - DNA, 350 bp, Gossypium hirsutum
  Clone ID: LIB3148-052-Q1-K1-B6
aaacccctagccagccacttccccgccgccgctccgaaccatgggccgagtccgcaccaagacggtaaagaaatcctctcgccaagtgattgagaggtactactctcgcatgacccttgatttccacaccaacaagaagatcatcgaagaagtggctatcatcccttccaagcgtctccgcaacaagatcgccggcttttccacccatctcatgaagcggatccagaagggtcccgttcgtggcatctctttgaagctccaagaagaagagcgtgagcgtcgcatggatttcgttcccgacgaatccgccatcaaagttgatcaaatcgaagtcgataaaggaaactctc

SEQ ID NO: 31609 - DNA, 169 bp, Gossypium hirsutum
  Clone ID: LIB3148-052-Q1-K1-B7
ggggtttacatgatcaacattatgttaaagattatgttttctggttcaaaagtaacttggttttaacatttattattgtctaataaaatgagttcctctttctttttaaaaaaaaaaaaaaaaaaaaaaaaaaaaaaaaaaaaaaaaaaaaaggaggaaaatataaaaa

SEQ ID NO: 31610 - DNA, 408 bp, Gossypium hirsutum
  Clone ID: LIB3148-052-Q1-K1-B8
aacacattgcactatccttcaccacacattccccatagctacatgctactactgtttcattgaccctactctttgccttgttgtattcaccaaatttcttgtttttgattacacaaaatctcccataccttatcttcagtttcctggattctcgtccaatcacttgcgtctctcttgtatcctgttttgattctaagctttgtttgcttacttgtgtgtctgttcatcacatcatctacatttccctccactgtttctctcttttatatttccccaaaataatttccttttccggtttttccttcctattttttttttctcgggagacttttttttaggtatacccagatcttgtttagttccaagctttaagttgtcatcgttttctcgaggttttaaactatgggc

SEQ ID NO: 31611 - DNA, 425 bp, Gossypium hirsutum
  unsure (1)..(425): unsure at all n locations; Clone ID: LIB3148-052-Q1-K1-B9
ctttttcggccccataaactccgcagtcggtgctcttttggtcagcttcaccgtctacatcatcccagctttagcccatatgctcacctacagaaaagcctctgctcgacagaatgcagcagaaaagcctccgttcttcatgccaagctggactgcaatgtatgccttcaatgccttcatagtggtgtgggttttggtggttggatttgggttcggtggatgggctagcatgaccaatttcatcaggcaaatcgacactttcggcttgttcgctaagtgctatcaatgcaagccacctccaccaaccggagcagcagcagctgctgcaaaccaccactgagtngactcgacccaaaaacttatatagcaagaaacaaaaaccaaagaaagaaacantntgaattccctggtttccttccatatct

SEQ ID NO: 31612 - DNA, 103 bp, Gossypium hirsutum
  Clone ID: LIB3148-052-Q1-K1-C1
cccacgcgtccggattacaaaaagtaggcaggaatttttttgtaaatctcccgaatgtaagctttattttttagggtaggttcataccccataatttttttat

SEQ ID NO: 31613 - DNA, 218 bp, Gossypium hirsutum
  Clone ID: LIB3148-052-Q1-K1-C11
cccacgcgtccggtttgtagcgaataaacctgttagtctacattaagttataaaaccttcctagtcctagcgtttgtgagtaactttaagattctatcagtcatgagtccgaacgagtccctgtttcaaagcatgatctttttagtttgtaaagtgcattgcttgttgaacttttatggtgcgtgtttgaatgatgaaagacctcgacatattatcta

SEQ ID NO: 31614 - DNA, 421 bp, Gossypium hirsutum
  Clone ID: LIB3148-052-Q1-K1-C12
ccgggccggtttagccaatctctaccaggaacgttccatgttgacctttgaaggtcaaaagatccaaggctctcagagcattgtcgctaagctaaccagccttcctttccagcagtgcaagcacaatattaccaccgtcgattgccagccatctggcgctggcggcgtcctcgtattcgtctctggaacactacaacttgccggcgaacaacatgctctcaagtttagccagatgtttcatttgatgccaacaccacaaggaagcttttatgtgttgaatgacatattcaggttaaactacgcgtgaagaaacagaaatcactacaattaatcaagtgatgggaatacaaatctcaaggatttataaatctggttatcttttagacattttaaatgaaaaatggaaatattttttggttta

SEQ ID NO: 31615 - DNA, 300 bp, Gossypium hirsutum
  Clone ID: LIB3148-052-Q1-K1-C2
gaaaactctggtggaagcaaatatgaagctgattaaggtccctaaggccccaaaggattatgacatacttgccatacccttaacaagctcagcaatgaggatgttgaggaagagaaatggcacacctgaagaatggcgtcaatatctcttccccactactgatccttagacattcatttctacctatgttacttagatttggatgtaaatgttggatacagatatgttttcgtcaaaaaacaataatcaagagtaacataggtccatacataccggttgctgtacattctcttatatttc

SEQ ID NO: 31616 - DNA, 375 bp, Gossypium hirsutum
  Clone ID: LIB3148-052-Q1-K1-C3
gggatatgatgcccttgcaagcacaccacgaggtgaaatttgtctcaagggaacaacattgttctcagggtacttcaaacgtgaagacctcaccaaggaggtcatgattgatgggtggtttcacacaggggatattggtgagtggcaaccaaatggaagtatgaaagttattgatcgaaagaagaacatctttaagctttcacaaggtgaatatgttgctgtcgagaacctggagaatgtttatggttgtgtttctgatattgaatcgatatgggtttatgggaacagctttgagtcctaccttgttgcggttgttaacccaaataagcaagcacttgaacgctgggctgctgacaatggtgtaagtggtgactt

SEQ ID NO: 31617 - DNA, 412 bp, Gossypium hirsutum
  unsure (1)..(412): unsure at all n locations; Clone ID: LIB3148-052-Q1-K1-C4
cccaaatcaagtatcgattcgccttcatcttcatctccccaaaacgactgacaaacaatagagggaagggaggtaatctttttttatagtcatcaagcttcatcctctccgacgtttcccttccattgattgcagagctcatggtgacaattttgctgcgaaaagaatgagaaagctgacccaaaggagagctgttgattatactagtactgttgtgcgatatatgcagattcgaatgtcacagcgagattcacgggacaggacaacattgtagattcgaatgttctaaccttttgatgttgtaaaactgtataacatatggattatgacatagaatttcatgaaattcatngaaatcatgtaaccattttgtaatatatgaatattaatgttatgcaaaatataantcctc

SEQ ID NO: 31618 - DNA, 189 bp, Gossypium hirsutum
  Clone ID: LIB3148-052-Q1-K1-C5
tccacgcgtacgcccactcgtacgagcaggacggaggacacggaaggcaagagtcggttgtgtgggccaactagctgacctgtcatataaatggaatgccagttgcggggcttcttgcttctaagactaagctttatgctaagggtttgtggatagggttgatatgtggtctttcatgccaagctgctg

SEQ ID NO: 31619 - DNA, 273 bp, Gossypium hirsutum
  unsure (1)..(273): unsure at all n locations; Clone ID: LIB3148-052-Q1-K1-C6
ccgacatgtaagatattttcgtatgtttatatgaagatttcttggtatatcactcganatatcaaaagaaaaaaaaaaaaaaaaaaaaaaaaaaaaaaaaaaaaaaaaaaaaaaaaaaaaaaaaaaaaaaaaaaaaaaaaaaaaaaaaaaaaaaaaaaaaaaaaaaaaaaaaaaanggggccgccccttttaaaggatccaattttacttccccgtccttccaacgtaatagcttttttttagggccccctaaattaaatccactgccccctt

SEQ ID NO: 31620 - DNA, 301 bp, Gossypium hirsutum
  unsure (1)..(301): unsure at all n locations; Clone ID: LIB3148-052-Q1-K1-C7
gcctaatccaatttgatagtttatctacttttgaactttgtaaacagaagcttgctttataaatacatttgctgggtgtatcgattatctgtacaatttgcttcnnaaaaaaaaaaaaaaaaaaaaaaaaaaaaaaaaaaaaaaaaaaaaaaaaaaaaaaaaaaaaaaaaaaaaaaaaaaaaaaaaaaaaaaaaaaaaaaaaaaaaaaaaaaaaaanngggggggggccttttaaaagaaccaaatttaatttcccgggcattgaaaggaaaaaatttttttaaagggcaccaaaaataaa

SEQ ID NO: 31621 - DNA, 258 bp, Gossypium hirsutum
  Clone ID: LIB3148-052-Q1-K1-C8
cccacgcgtccgaacaactttctttaggtaaactcggtgcttgatttcatttcattcctttttggatcaatcaagaaaatttctttttttttccaaaaaaattaataataaatctggtttctgttggttgcttacctaaaaatgtgaacctttggtggtttttccattattttaataactgaacctaaattttggttggaatggaagggtttcctattattaaccagcccctttttttgaaataaaaaatttacttca

SEQ ID NO: 31622 - DNA, 302 bp, Gossypium hirsutum
  Clone ID: LIB3148-052-Q1-K1-C9
cccacgcgtccgatttattctcttcgtttaaaaaaaaaaaaaaaaaaaaaaaaaagggaagggaaaaaaaaaaaaaaaaaaaaaaaaaaaaaaaaaaaaaaaaaaaaaaaaaaaaaaaaaaaaaaaaaggggaaaaaaaaaaaaaaaaaaaaaaaaaaaaaaaaaaaataaaaaaaaaaaagggggggggcgtttttaggggaccaaattttattcccgggggttgggaaggtaaagttttttttttggggccccaaaattaaatttatgggcgggggttttaaaaaggggggggtgggaaa

SEQ ID NO: 31623 - DNA, 167 bp, Gossypium hirsutum
  Clone ID: LIB3148-052-Q1-K1-D1
ctttttgtgttttttaacataaggaaggtccctaaatagtggatgatacccatgtttgtcacttgtctgtactcttgctttgccgtttttgatgatagatggtgtgattgagacttgaatcaggcaatatatggtgatgggaagactagaattttccattgcagtcc

SEQ ID NO: 31624 - DNA, 414 bp, Gossypium hirsutum
  Clone ID: LIB3148-052-Q1-K1-D11
gcaaaaataaaagagtacattttctttaaaaaaaaaaaaaaaaaaaaaaaaaaaaaaaaaaaaaaaaaaaaaaaaaaaaaaaaaaaaaaaaaaaaaaaaaaaaaaaaaaaaaaaaaaaaaaaaaaaaaaaaaaaaaaaaaaaaaaaaaaaaaaaaaaaaagacaaatatattaaaaaataaaaaaaagtaatttgcttgcggtgtataaaaaagggggggcccctttaaaaaaaatcattttttccctggggggtgggggaaaaaaagtctttttttgggggccccttaaaataaaaaaccggggccccttttagacccttcccccttggaaaaccccgggttttccccacttaaatcgccttggggaaaccccctttttccggcgggggggtttaatataaaggggccccccc

SEQ ID NO: 31625 - DNA, 395 bp, Gossypium hirsutum
  unsure (1)..(395): unsure at all n locations; Clone ID: LIB3148-052-Q1-K1-D12
gcaggcagtaaccaaggaacttacgaacttaagccagagtataaaaaatctgtggacgacacagcagctgaatacctgtaatttacatttcttttgtttctaattatttttctcaattaaagggatagtctaaaggaacccctcaggaagaggatagagagtaatatttagcttaagaaccagtgatttaaggggataataggcaatttgtttggggaaaggaaaacttggctgcagaacctctgaagtccaatggtgcaattcaaacattcttcaatgatctcaaagttggggactaggggggcaagtatatcgagaacaaaaatcctgatcaataaaaaagaatcatattctattcgtggaaaaaaaaannnaaccaaaacnaaancnnaacc

SEQ ID NO: 31626 - DNA, 256 bp, Gossypium hirsutum
  Clone ID: LIB3148-052-Q1-K1-D2
caaacagttgggatggacaccatcccaaggcaggatgtttcaatctggttccagtaaaacggtaacgcctgtcggaatatgcactagctgaaaccctttttttttcacttggttattgtaattttcttccttgtgtgtagctgtaggaagtttaagcaagcttagcagctcttcatatggggctccaattaaaacacaaaaaaaaaacatggaaagcaccgtaggatcttgctactgatttacataggatattact

SEQ ID NO: 31627 - DNA, 427 bp, Gossypium hirsutum
  Clone ID: LIB3148-052-Q1-K1-D4
cccacgcgtccggtgatcctaacacccgcctacctaacggtcgatttcttcccccactgttcaactttaagcctcacgaactgaagggagttcctacggatatgttaccgaagctgatcccggaacatgcaaaaaagcaatgttccttcattggattataatggaataatataattcctttctgcttaaatctttgatgtctgctccttgcagaaatcatgggctattgttgaaaaaaagtagttagtaagcctgtttcagttatatgataaagaagccttgttaatgtttatttgttccctttattaatatttttttctatcaatatttatgttctttttctttctctttttttcttctcccttttgtagaaaaaacaaaacttgagtatctgcccttaaagaccttaatgagtaatgttgaccct

SEQ ID NO: 31628 - DNA, 415 bp, Gossypium hirsutum
  unsure (1)..(415): unsure at all n locations; Clone ID: LIB3148-052-Q1-K1-D5
gtagctttgttgcacaaggtggtgtggctaaaatctcgagaccgggatgctttagtggtgccaatgatgaatgcagcggtgctaatgatttatctcgacttcatcacatgtggctgtacgccgtaacagctttcgttgctgcaggatatgccttcggaatatgatcatatcctatagtatccgaactctttatcattggattgttcattctgaggcctgcttcagtccgttgccttatatatctcagcctctctagtagttttttcgaggggtttatatattggtataattttattgatttgtttcttttttcacattgagcaagtttcacactgtgccattgaattctccagtttcatgtgtcaaccttcaaattgagtgaacctacttggaatgacaattactnttttttttc

SEQ ID NO: 31629 - DNA, 191 bp, Gossypium hirsutum
  Clone ID: LIB3148-052-Q1-K1-D6
gtgtgcagaaacctgagaagcgcctctcatttttctgagataacggaaggcttgtatatggctgccatgtttctcggagttattaactgccaaacagcccaaccagttgtagccattgaaggaagcgttttttatcaaaaaagagcaaccggattgacctttgcattaccttttgcactcgcacaggtaat

SEQ ID NO: 31630 - DNA, 242 bp, Gossypium hirsutum
  Clone ID: LIB3148-052-Q1-K1-D7
gacggatctagcaccaacgcacccgatcaggctgggacttgcgctaaattactcggtgttctactatgagattctgaatcagtccgataaggcttgtagcatggctaaacaggcgtttgaggaagccattgctgagcttgacacgctgggagaagagtcttacaaggacagcactcttattatgcaactcctaagggataaccttactctctggacttcggatgttcaggaccagttacacg

SEQ ID NO: 31631 - DNA, 298 bp, Gossypium hirsutum
  Clone ID: LIB3148-052-Q1-K1-D8
atcgaacgtcgcaagtaagagcaggcgatccattagaggaagttcaaaaaacttaattaatggcgaacagagttcaaacccccactagcaactcagctcttattgcaatgattgccgacgaggacacggtggttggttttctaatggctggtgtgggtaatgttgacttgcgaaggaagacaaattatcttattgtagattcaaaaaccactgttaaacaaattgaagatacgtttaaagagttcactacacgggaggatattgctgtcgttctgattagccaatatgttgcaaatat

SEQ ID NO: 31632 - DNA, 151 bp, Gossypium hirsutum
  Clone ID: LIB3148-052-Q1-K1-D9
aaaaaaaaaaaaaaaaaaaaaaaaaaaaaaaaaaaaaaaaaaaaaaaaaaaaaaataaaaaaaagcaaaattaaaataaaaatgaatgctaagaaaggttcgtgtgattggggggatcgtacttttagttcgggggggccggattttaaaa

SEQ ID NO: 31633 - DNA, 417 bp, Gossypium hirsutum
  Clone ID: LIB3148-052-Q1-K1-E10
gcagaagcggcttgccgctagcgtcctcaagtgcggtcgcggcaaggtctggctcgatcctaatgaaatcaacgaaatctccatggccaactccaggcagaacgttaggaaacttgtgaaggatgggttcatcatcaggaagcctactaagattcactcccgctctcgcgcacgtaggatgaaggaggccaagagaaagggaagacactctggatatggtaagaggaagggtaccagggaggcaaggttgccaacaaagattctttggatgaagagaatgcgggtactgaggcgattgcttcgtaagtacaaggagtccaagaagattgacaagcacatttaccatgacatgtatatgaaggtccagggtaatgtgtttaagaacaagcgtgtcttgatggagagtatccacaaatc

SEQ ID NO: 31634 - DNA, 426 bp, Gossypium hirsutum
  Clone ID: LIB3148-052-Q1-K1-E11
cccacgcgtccgcccacgcgtccgagtagacgcttagaaggtttcttgttgcctaaaacaccttcgcttcctcttataaattatattaaacctataaatttctttgcttgaaatcgacccttttctcttgatctatcaatcaattaaggtttttgtttttagttgaaaccctaatttgtcaaagcctcctccttgtttcttgtcggcggataatcagggatcgagtcttgcaatggcgaaaagttcctttaagcttgagcatccattggaaaggaggcaagatgaagctgctcgcatcagggctaaatatccagacagagttcctgttattgttgagaaagctgaaaggagtgacattccggatatcgataaaaagaagtatcttgttcctgctgatttgactgtgggtcaatttgtttatgttgt

SEQ ID NO: 31635 - DNA, 312 bp, Gossypium hirsutum
  Clone ID: LIB3148-052-Q1-K1-E12
ggcttatagagcttataatcctcatatgactacttactattatgttcaaagcatggaagagaaccctaatgcttgtgttatttgttgatggaaattggtgatggggaattgagaatgtcatcaatggagaatatataggaggttctaaaaaaaaggaaaaagaaacacaaagaagattataaaaatcctttgtatatatagatggtgaaatgcctctttttactcctttttggttttttgattatgtataagtaatgttgtttgtgtaggggagtagattgaataaaaatcaaattttgggaatttgttttg

SEQ ID NO: 31636 - DNA, 327 bp, Gossypium hirsutum
  Clone ID: LIB3148-052-Q1-K1-E2
gagaagtttgatgtcttcaaagattggctgctttaaaacgtcctgtgttaatatttctccctcctaagtagcctgcagtaattaacattaaaagttctgagaagatataagctgaaaaccattggaatcccggaacataattttgtctgttgtggacaatgatgagggagagcaaccattgaacaggggagggattcaccgaaagggggcttgagatctttgttgaagagagggagaaacattgcttagaagaagttgagaattatttgagtaatttttgagattatctttttttttttgataaaaaaccaccctaagatcaacctc

SEQ ID NO: 31637 - DNA, 294 bp, Gossypium hirsutum
  Clone ID: LIB3148-052-Q1-K1-E3
gatcagtatttttaacgaatggaaggcaacattcttgcctatgttgacagccggatggaaactttggccatttgctcatcttatcacttacggttttattccggtagaacaaaggcttctttgggtggactgcgtagaacttatttgggtgacgattctctcaacttattcgaatgaaaaatcggaagcaagaatcttcgaggcagcaccagcagaagcaagttcaattttgccacccgttggtccacccgaggagtaaataatgagatttaggatatctgggatttgagacat

SEQ ID NO: 31638 - DNA, 422 bp, Gossypium hirsutum
  unsure (1)..(422): unsure at all n locations; Clone ID: LIB3148-052-Q1-K1-E4
ggccaggtaagtggatgctgaatcaaaagccttgggtctattcactcgttttgctgcaatgtgttcgatataacttctcagagcactctgcgcggtttttattgaaatgtagataagggagatagactggaaatatgtagttgcagtgtttgatggcaaaagcttggcatttttttataatatattttctgtcgtgcatggcgtaatgtccaaagcaagttcagtgtgtgacacttatttatcccctttgttacctttatcagcctggtcttcgctcaatttgggagaaatactatgaagaggcacatgctgtggtattcgtaattgatgctgcttgcccttcacgttntgaagattcaaaatctgcacttgagaaagttcttagacatgaggatctttanggggcccctctcttgatatta

SEQ ID NO: 31639 - DNA, 402 bp, Gossypium hirsutum
  Clone ID: LIB3148-052-Q1-K1-E5
aaaacttcgaaaaaaatgagtatacctatactcatatccaatgctcacttatcttagtattatagatgttgtcttttgattttcatttttgtgactgttatgcagattccttgttgatttgagatatctggcttaagttaatataagattaaattttggtttgccatgtgaacattctatatgaactccattgcttattattagtttatcatggttgaatttggatgataatcatctcttctagatatgagcttaatcattgtaacttataaaaggaagcaaactgttaatggtgagaaacaaaggaagaaagatagatggaaccaccttagagtgaaaagggagaaaaaaggtgagtgaaagaagggaaacaaagaaaaagaataatagagaaaaataatt

SEQ ID NO: 31640 - DNA, 354 bp, Gossypium hirsutum
  unsure (1)..(354): unsure at all n locations; Clone ID: LIB3148-052-Q1-K1-E6
gcagaagcggcttgccgctagcgtcctcaagtgcggtcgcggcaaggtctggctcgatcctaatgaaatcaacgaaatctccatggccaactccaggcagaacgttaggaaacttgtgaaggatgggttcatcatcaggaagcctactaagattcactcccgctctcgcgcacgtaggatgaaggaggccaagagaaagggaagacactctggatatggtaagaggaagggtaccagggaggcaaggttgccaacaaagattctttggatgaggagaatgcgggtactgaggcgattgcttcgtangtacagggagtccaagaagatngacangcacatttaccatgacatgta

SEQ ID NO: 31641 - DNA, 378 bp, Gossypium hirsutum
  Clone ID: LIB3148-052-Q1-K1-E7
gagccacgcaacgaatacattcaaagctgtgacattgttgcattcaacatgatttagaggactcaatttttttctacagcacttgagagtgccattggccatgttatcaccttttgccccttgctttcccctcaaatatatatatttttgcttgaaccgtgctttgctagcgcttctgctctataatgagcatagatgaaaaggatcttcaagtatttaaggatgatctatgctttttattcacttaaagcttgcccaaagttgttctagtgacattgcagattgcataagcggaaatggaagtcatgactgttttgaatattatattcaatgatttgatgcatgtcttagttgtgaaagtcaaaggtaatgtgttta

SEQ ID NO: 31642 - DNA, 247 bp, Gossypium hirsutum
  Clone ID: LIB3148-052-Q1-K1-E8
attataatcactatgcaaatggtagtgggtggtgggactgtgtcatggaaggcgtggacagcgaggaagttggctatggcgaagtatgggaaggggtgggctccacaacctttggtggaatagtagactggcattgatactagtccctgttgcagtaagtctaactaactatgctactgcttgaatatgtcatcaaaggttctaattttggttattatgaatagaatctaaatccttgttttctgtc

SEQ ID NO: 31643 - DNA, 421 bp, Gossypium hirsutum
  Clone ID: LIB3148-052-Q1-K1-E9
ctcaaccatacgccaaaatatggcagccacttttgtaagcccatcaaccgtcgttggtctcggtggcaccgccacctgtatgtcatccccgccgatgaaaacccgcctctcttcagggtttctgaaatctggggtgacggctaggaaccctttgaggctggctggtgcttgtgggggcaagtttacttgcttcgagagagactggctacgaagggactttaacgtgataggatttggactgattgggtggatagcaccatctagcataccggccatcgatgggaagagcttgactggccttttctttgaaagcattggaactgagctcgctcacttccctacacctccgccacttacctctcaattctggttgtggttggtattatggcacctaggactgttcatcactcttacttttgga

SEQ ID NO: 31644 - DNA, 157 bp, Gossypium hirsutum
  Clone ID: LIB3148-052-Q1-K1-F1
aatgctactgcatattaacccttgtcgacaaataattccatgagattctccatattgtaaccttaattttgcttggtagattaaggagccatagttttttgtaaaagttcatatagcctgtttgtaaagtgtaagctctaggaatttcctccaaagc

SEQ ID NO: 31645 - DNA, 413 bp, Gossypium hirsutum
  Clone ID: LIB3148-052-Q1-K1-F10
tcggaactaggaaagaccgaggattcacatttacggggccggtgaacctacatgctggagcaaatcatatcgcacttgtcagcgtagctgttggattaccgaatgttggactgcatttcgagacatggaaaacgggaatcgtaggtgtttactcgaatggccttgacaaaggaaagaaagatttgtcgtcacataaatggtcgtaccaggttggtttaaaaggagaagcaatgtatttggcctcaccagaaggagtctcatccgttgaatggatccaaggttcactggccacacagagtcgccagtcaatgacctggtacaaggcatatttcgatgcaccaacaagtaacgaaccggtggctttggatatgcggagtatgggaaaaggccaagtttggatcaacgggcaaagc

SEQ ID NO: 31646 - DNA, 220 bp, Gossypium hirsutum
  Clone ID: LIB3148-052-Q1-K1-F11
cccacgcgtccgcccacgcgtccggcaatatatagtttgtaatgcttgttgatctttaaagaaaatagtggggaatgccccaaaaagcttctccaattactttcccttggtttcatcttcattatccttttcttatcaaactctgtttaaggaatgctgtttaattaatgggactttatccgtatgtcgaatataaaaaaacccgtttgattattgtttt

SEQ ID NO: 31647 - DNA, 414 bp, Gossypium hirsutum
  Clone ID: LIB3148-052-Q1-K1-F12
cccacgcgtccgctttactttagatggtagatttagactccagagttgtttataaaattttttatagatggtttgtaaagcataagctctaggattttcaaccattctctgtaatagtttataagcacttcggactgtgaaatcacccgacggctcgcctccccaaataagaaaatcttcatgaggtgtccgtgctagaggaattcagagaattcgtgctgcatcaacttctgcgaagagcaaatcagagatgttttaccttttggttctaccatcgagcttttgaccgataactgaatgagttcctctgctaacaaggagatctcatctcccccaaacccatcgttgccaccactttccttcatcccaagccgcagcagccactgttttcgctaggataccagggatagcact

SEQ ID NO: 31648 - DNA, 112 bp, Gossypium hirsutum
  Clone ID: LIB3148-052-Q1-K1-F2
gatagatgcatgtgtgagagtcacgtgcctagaatcatgatgtgcttttacatgtttgggcccattgtcatgatgtacttcatgcgggagaaaagcgcgtatgaacgttgtt

SEQ ID NO: 31649 - DNA, 355 bp, Gossypium hirsutum
  Clone ID: LIB3148-052-Q1-K1-F3
gccaattggtggttggttggttcatggtggtgatgatgcaaatatggtaacggtgctgcaattttggaggtggatgagaatctcaacaagcaatttcgggtgtttaaagcagcacaacatgaggaaatgtgttacaatatgaagtttggtctacgttttagtggtatcacatatggttcaagatgtgtgaaaattcaccacgtaaatgcacgtgctgaatcaagtaataaagtgataagaagatgtcgttcccaagtagaccaaattataagttgctaagtaccaaattataaaaattactaagtttctcaatcaattttatggtcttggaaatctaacttcacctattttcgtt

SEQ ID NO: 31650 - DNA, 430 bp, Gossypium hirsutum
  Clone ID: LIB3148-052-Q1-K1-F4
ccatttgcacaatttcttatgcagcctcagtacacctggtctcagatccctaacaaatatacatcaaaaactaaggcatcaatagccgatattgaggtgacattgattgaaactcatgctaatcttcgaattcttttgcgaaaaggtcccactcagctttccaagcttgttgctggttttcaatcacttttcctttccatcctccacctcaatgtcacaaccctggatccatttgttctctactctatcagtgccaaggttgacgaaggatgccagctcagttccgtagatgacatagcaagggcagttcaccacatgatcagaataattgagcaagatgccactgccttatgttgatctattcatatcaccaatatgccacccacttttttttctttttttttggggttctggatttcttcctttttac

SEQ ID NO: 31651 - DNA, 165 bp, Gossypium hirsutum
  unsure (1)..(165): unsure at all n locations; Clone ID: LIB3148-052-Q1-K1-F6
cccacgcgtncgcccacgcgtncgcccacgcgtncgcccacgcgtncggtctaatgtgtcttcgtttcaaatttttcatagaatttggattgtaattctttcattatgcttgcaatttggatcataaaaaagaacaataatattatgtgttgtcggttttctagt

SEQ ID NO: 31652 - DNA, 232 bp, Gossypium hirsutum
  unsure (1)..(232): unsure at all n locations; Clone ID: LIB3148-052-Q1-K1-F7
ggtaaatgatttttactatgtcaagtttatgcttattgaatatttgaaacgtgtgcgcactactgtggagtgttaatgattaatttatgtatccgtatttggttccataattagttaataaacaatgttgtattgctagaatttcattgnacacaggtngctntttaagactaactgtttagcatctatcaaataaaaaggctaatcattatttaggcttcaaaaataaatt

SEQ ID NO: 31653 - DNA, 422 bp, Gossypium hirsutum
  Clone ID: LIB3148-052-Q1-K1-F8
caatttaaaaaaaaaaattcacagatccaaaatcaattctctagggttcattccagcagcctccatttgctaaggcctgttcatcaccagtgcaccattaaaattggtgagtgatgtagaagcagcctttacctccaccgaaatcaacactcaagaccattttcacttgataatctgcattgcaaaccccgatttagacggagaagccaagggatctcatcgatgcatttaacgaagtattggatttgcctagtgtgcgtagagtgtgcgtaatgtctccgtccctttgcaggatcatccgtacggaggagcagggagaggcacgcatgaaagaaaccgtgcgaggaaaccgctcgtgagatccaaccccctgacactgttcttgcatgttccagaagcttctggtgcttggctgctgggat

SEQ ID NO: 31654 - DNA, 404 bp, Gossypium hirsutum
  unsure (1)..(404): unsure at all n locations; Clone ID: LIB3148-052-Q1-K1-F9
gtttccggattggagatgttcatcgggcaggcctacgaacagtttgagcgattcactggtttgccagcaccgaaggagcagttccggagaactatgtcaaagtactaacaacgttgacacaacgactcgtttgtctgcagcaaattgctggtttgtttttactattcatttgatgagaagggcaatgaaacaacaatttgtttaggaagtacttgaagtgtttttgaataattccaggttttgtttcatatgaactntattttctttatttcctatgatctgtgagtatgtacgatagaccggaaaattcatatattcctattcgtgtaaattgctttgtagtaatcgtgtttatgacataaatttttacatattaataatattcgtgttatattaattttgag

SEQ ID NO: 31655 - DNA, 365 bp, Gossypium hirsutum
  unsure (1)..(365): unsure at all n locations; Clone ID: LIB3148-052-Q1-K1-G1
cccacgcgtccgctaaaatcaatttgttagggctcattctagcaatcgtcgaaccaccattccatttggtggccgacaatgcacaagcagcgaccagattccactgacgaaggctctgctcaaggaaatttggaacggctgtacggaggagaggggaaatggctcgtgggaacccaaccccctagcactgttctggcgtattccagaagtttctggtgttctcggttgttgattttctttgagtccaattgngtctcgcgtttgggttatagaatncgggttaggtttgggtttattcaattgggtttaaaaaaatgtatttggactgcttttaatttaatttactatttggcctgatggtttgt

SEQ ID NO: 31656 - DNA, 424 bp, Gossypium hirsutum
  Clone ID: LIB3148-052-Q1-K1-G10
acggccacgcgttcggatggatcctcgtggttatcatctgtctattcgcctaaacttatggaaggtcttgaggtcctctgaggtggctagttcctagtgagctgttcccgttcgacactaggtcagctggccaaagcatggaggtctgtgtcaaccttctcttcacagctttgatagcacaatgcttcttggtctcactttgtcatctcaagtatggaattttcttgctttttgctggctcgatattcataatgagcagctttattttcttcctcttgccggaaacaaagagagttccgatcgaggaagtctatcttctctggaaggatcattggttctggaagaaatatgttgaagatgatgacgagaaggatatcaaaaagccaaccacgtcatattatctaaaatacgaaaaacctttggt

SEQ ID NO: 31657 - DNA, 289 bp, Gossypium hirsutum
  Clone ID: LIB3148-052-Q1-K1-G11
aaaaaacatacaaaaaaatatacttgtggatttaataaaaaaataaaaaaaaaaataaaaaaaggaataaaaaaaactaaaaaaaaagaaaaataataaaaaaacaaaaaaaaaaaaagggtcggccgttttgagaatccatggtggtgtcgcttacatgtctctttaagctttttttttagggacgcttatttttattactttggcctcccaattataacattttgtcggggaaacccgggtcgatacccattttaagcaccttgattttcttcctcttgtcgccagc

SEQ ID NO: 31658 - DNA, 442 bp, Gossypium hirsutum
  Clone ID: LIB3148-052-Q1-K1-G12
gcgtccaccccgtcacgagacttattcttattatggtcctcttaatcttttgacatggagtgttggctatcacaatgaacatcatgatttccctaggatccctgggtataagttacataaggtgaaagaaatcgcacccgagtattacaaaggcttggaatcgtataaatcatggagccaagttatttacatgtatatcatggatcaaaccgtcggaccatttagccgaatgaagaggaagatctcgaaaaaatccgaataggtgatgagttttttccccctacccatttgggatctttctgttttctggtttgcctttctgtgtttcagtatggggtttacttgcattttaaggctcaaatatgttattcgtttcccaacattgttgaagtattaagattctattatgtagtttttaaaaaaaaaaaaaaaaaaggcggtc

SEQ ID NO: 31659 - DNA, 228 bp, Gossypium hirsutum
  Clone ID: LIB3148-052-Q1-K1-G3
gatgctagctcgagttggaggttgttggagattctatcacactaacaagtttttgattggtattgtatcaacgatcttcaagtatttttaagtctatggcatgtatagggatttgattatgtgtgtatatgttattatgagttggcataaaattttggcgtataatatttgatggttcattttgtataaggctattgaggttggctaatattagttaagttatatgtt

SEQ ID NO: 31660 - DNA, 260 bp, Gossypium hirsutum
  Clone ID: LIB3148-052-Q1-K1-G4
cccacgcgtccggttggttccttgtggttatcatctgtttattcgtcttcgcttatggaaggtcttggggtcctctggggtggctagttcctagtgagctgctcccgttggagactaggtcagctggccaaagcatggtggtctgtgtcaaccttctcttacagctctgatagcacaatgcttcttgggctcactttgtcatctcaagtatggacttttctcgctttttgctggctcgatattcataatgagcagcttta

SEQ ID NO: 31661 - DNA, 400 bp, Gossypium hirsutum
  Clone ID: LIB3148-052-Q1-K1-G5
gccacgcgtacgtccacgcgatcgaccacgtgtacgttcatgctcaaaacaagaaacttactgcacagctattgtctttgaaagccaaagattcaaatgaaaccaggatcaagaacgaaaacgagggttcatggtgcagcaatggaagcgaaaacaattatgatatgaacttagccataaggcctgcagcaacaatgactcaacttcttcatggttcatcgaaaccaagcctccaatgcctaaaacttgaccaagtggttcaacaagatcagagcttggcttgccatatgtttaaccaagatggtgatgaacagcaaggtttctggccttgggctgaccaatcaatcaaattttcattgaattaagaaccagtgccacattgttcttaattatgtacttc

SEQ ID NO: 31662 - DNA, 427 bp, Gossypium hirsutum
  Clone ID: LIB3148-052-Q1-K1-G6
ctcgaacaaagtcacaatatcctcacaagttaatcatgattcgccgaccttgctatatatctttgggtcccttggtaggctgcaaaacaagcataggtgaagtgactggcctgttatctttggtgtgactggatgatatttaacctaccaaaataggttggtttcttgtctagctgtttaccatctttgaataggaagactaatcatcatttggcgtcatgaattttttttgctgtatacgagatgctaatgttgctcaaatgtcccaatcatgtgtttggccctctggttaactctgaaacaagacttaaggacaaagttttcatgtcagatatttaaagagtgaggtcatgtttagattgggtgatgcgtttgttttaataaacagttggaattgattaaaaagtccaaacataattcattggtc

SEQ ID NO: 31663 - DNA, 417 bp, Gossypium hirsutum
  Clone ID: LIB3148-052-Q1-K1-G7
cgagacagtgctggcatcttctggtgatgataggagattgatgatttgggaccttaacaggattggagaagagcaattagaaattgaattagatgccgatgatggccctcccgaacttctcttttctcatggaggccataaagctaagatttcagatttctcgtggaacaaaaatgagccatgggttatttctagtgtagctgaagacaacacacttcaggtgtggcaattggcagagagtatatatcgagacgaggatgacactcaaactgccgaagaccatccataggccatagaagttggatttagagttttaaagatatgacctttttaaagtagatcattgtgagtttataataatgttttgtatgtgaacagctttaagagtcttttaacatgtaacttaatatttaaacc

SEQ ID NO: 31664 - DNA, 335 bp, Gossypium hirsutum
  Clone ID: LIB3148-052-Q1-K1-G8
caaattgcttgcagttccactgcgccaggttcatgaaaaccacaagacatatggaccgataatatcgggagtgccacagttgctatccaagttcaccatcaacattgttgacatttagaacatgcttgtttacaataatcgttgctttccaggttaagtaataggaacggtgagaagatgtgtgctgcagctgtacggggttttaaatcttaggtttgtaatttttcatggaattcccaaatacatttgtatatagtatgttatataccatagttttcttacaatatgtgatatactaacattgagctcgacaatatcaaatttatcttcttggt

SEQ ID NO: 31665 - DNA, 162 bp, Gossypium hirsutum
  Clone ID: LIB3148-052-Q1-K1-G9
ggttgtcgttgttgcctataaatggtatatttctcgttttcttaaattatatcgtcaatgttggttttccattgagtcgtctgtttgtggtgttacaagggattaatcctttaattccacaaatttagaaagaaaataaggaaattaattctatgtcgcgat

SEQ ID NO: 31666 - DNA, 323 bp, Gossypium hirsutum
  Clone ID: LIB3148-052-Q1-K1-H1
gagttttccgagctgatgagactcccttggaagttccaccaagagaagtaatcaaattgggtgctcaggctgttgttgagttcatggctgatctcgttgccaagaaggataccaaggcagcaccaccaaagaaggagaaaggtttttggttcaagatttgctcgatttgttggccgttccggaccgcaaatacggacgacaacatgtaaccaatgaattactactacagttttttctttttagccccttgtaaatatcttaaaaatgttttggtttcttgtcaagatgtgtgtgtggtttttttttatgccatttccattact

SEQ ID NO: 31667 - DNA, 251 bp, Gossypium hirsutum
  Clone ID: LIB3148-052-Q1-K1-H10
aaaaaacatacaaacacacaatactaacaatcttacaaaaaaaagaataaaaaaagtgaagagaatatttttatattaaaaggggggcggcctttttagatgttccatttctttcgtccccattcttgcgactgtgatactttttttatggggcctccttggttaaatttagtggacggtttgtctcattcgcggtgcttggcaaacttttggggttcccccatttaatcgttttgaagaattgccctttt

SEQ ID NO: 31668 - DNA, 281 bp, Gossypium hirsutum
  Clone ID: LIB3148-052-Q1-K1-H11
cccacgcgtccgggactgcaatagatttgacgagtagttcggctaaaaaaaaaaaaaaaaaaaaaaaaaaaaaaaaaaaaaaaaaaaaaaaaaaaaaaaaaaaaaaaaaaaaaaaaaaaaaaaaagaacagccaaaaaaaaaaaaaaagggataaaaaaaggaaaattacatggtattgccccgctcttttttaacgactgagattaaataaaaaaccccttaatttaaaaaaattgggcggctaaaaatattttcttttttaacaaaatccatttaaaac

SEQ ID NO: 31669 - DNA, 262 bp, Gossypium hirsutum
  Clone ID: LIB3148-052-Q1-K1-H2
gaaacttctggcactgttggcacttcccgggattacctagcgaagctgcttttctggtgtatgctattaggtcatcatttgagaggcttggagaacagattgcaactaagttgtgtcgtcggattattgtagagtaaggtttgtgaaattgtatagcctatctttttcttgtctttcttgtgttatttttggtttatcaggtaatgtacattcttcttcatgaagctattagtgaacttatattgttccaactctatttttt

SEQ ID NO: 31670 - DNA, 313 bp, Gossypium hirsutum
  Clone ID: LIB3148-052-Q1-K1-H3
cccacgcgtccgcaatatcggctaccagccgattgtcggtctatggcaaacaccaaacctatgttggataacattgagcctcttttggagaagaggccagttggatttgagaaaactattgcttatttgcctgaatttgttaaacatttctcataagcaacgtttggtgtatattgatgttggggcaagtgagcatttgaactctaacgttacagattggttcttgccatcttatcccgtggatcgaaaagcattccatgtttatttcatcgatcacaatacttcagtgatgctatcctatgtcaacaagcct

SEQ ID NO: 31671 - DNA, 276 bp, Gossypium hirsutum
  Clone ID: LIB3148-052-Q1-K1-H4
gacccaccagctcattctaacggatcagttatcaaagcagtggtagacgccgtggatgagctgaacctaacgtataagtatatgatcagcagagcttaccatgactcactgtttatggcaaggatagctccaatgggcatgatatttattccatgttacaaaggatatagtcataagccagaagaatatgcgtcacctcaggatttagaaaatggggtgaaggtattagcgctaaccttggccaagttgtctttgcgttgatgtgttggtggatat

SEQ ID NO: 31672 - DNA, 73 bp, Gossypium hirsutum
  Clone ID: LIB3148-052-Q1-K1-H5
tcacccacgcgtccgcacgcttggtatgtagccaagcccaagaaaaaaggaacgaggggaagaatcgacacgg

SEQ ID NO: 31673 - DNA, 260 bp, Gossypium hirsutum
  Clone ID: LIB3148-052-Q1-K1-H6
gccacgcgtacgcgcagtgtaaaaccgaaacttttgtctctgcactattcataacacctactgccagctaaatcctgaagagttttccaaacttgtttctctcatgagtctttggaattagttcttacagcagatcactaggttccaggaagccatttaatccgggggccattcagctcggatttaagattttgaattagaagctagaaagatttactgagggactgatttatctgtgcattccgggtgattgatctgtc

SEQ ID NO: 31674 - DNA, 171 bp, Gossypium hirsutum
  unsure (1)..(171): unsure at all n locations; Clone ID: LIB3148-052-Q1-K1-H7
cccacgcgtccgctttgaatgaagtgacactgatgaatgcttcctttttgaattatatgtttgaattttcttatttatacaagtatatttgaccttttttttttgttccacannaaaaaaaaaaaaaagaaaaaagaaaaaaaaaaaagagttgctcaattaagaaggggg

SEQ ID NO: 31675 - DNA, 310 bp, Gossypium hirsutum
  Clone ID: LIB3148-052-Q1-K1-H8
aaaaaaaacagcagttaaaagcaaaaaaccatggtggcgctccaattggggttccaacttcaggcactgaagtatctttatcaccaggattagctccaggcccttcaaaaggaagcaacactggtgcttcaaacatggaaatatttggtctggcttccttcattgccttaccaattgcctttcttcccatgctttttgggatttaaagctcttattttcccattattaaaacttattttcctccattaatattcatttactatatttatatttatatttatatatggtttgcaagttttttctttttttt

SEQ ID NO: 31676 - DNA, 75 bp, Gossypium hirsutum
  unsure (1)..(75): unsure at all n locations; Clone ID: LIB3148-052-Q1-K1-H9
cccacgcgtccgcccacgcgtccgcccacgcgtccgtgttgaggtatttatgcattaatagaatatttttatntt

SEQ ID NO: 31677 - DNA, 394 bp, Gossypium hirsutum
  Clone ID: LIB3148-053-Q1-K1-A1
cgatttgcatctaattgtatcagtaattatattatagatcttcattgttgatgtgcgggttttactatgcagtgaacaaaattggattcaatttaaaaaataataataataaaaattgatcttcgagttaattgaatcaagttattcgatttttcaagacaacttgcattctcgaataagtaattcgagtttcgagtttcgtgtttaagtcgagttaaattttacaatataaataacttaaataattcgaataacatattggtgtaaataaccttttagtccttgtcaattttgaaaatgagcaaattggtctctttcaacaaaaattaaaaaaaatcaaaataatttttaaaatttcaaaatatttataaaaattccaaaatttatatttttc

SEQ ID NO: 31678 - DNA, 415 bp, Gossypium hirsutum
  unsure (1)..(415): unsure at all n locations; Clone ID: LIB3148-053-Q1-K1-A11
aacatcacactgtagttgctacggaggtcggggaagtgttcacttggggatctaatagaggatggagcaatttaacaaattggaagaaacacgatttaagttggaatcaaattgaaagctttcaatcctttaaagctctaatgcatggcgataacttacatgagaaatggcatactggatcaatcagccatactgctttctagccatggttgtctaacttacatgaactgcaaaatattgaaggtgttgtagaggattcaatctcttcaagctgaaaaagccaaggcttagcacttcttcaagtggagtgttatttaatgttgcattccatggtcatttatcttagtccgaacttgaatttggtaccttatgtactagcttctttaaccatgattgntaattattacgtgttttg

SEQ ID NO: 31679 - DNA, 169 bp, Gossypium hirsutum
  Clone ID: LIB3148-053-Q1-K1-A12
ttcccaagtaatgttgtataattgtggagaaaactctgaccaaacagcttgttgtaagctatgagaagtctagtctaattgtgtgattaccttttgttatgctttcggatagcatttttgcttcaccagtaggtcagttggccctatgctttatccttgttatttcatt

SEQ ID NO: 31680 - DNA, 434 bp, Gossypium hirsutum
  Clone ID: LIB3148-053-Q1-K1-A2
aacaatcgcaccattggcaattggtttcatcgtgggggccaacattttggcaggaggtgccttcgatggagcctcaatgaacccagctgtttcattcggaccagccttggttagctggacatgggacaaccactggatctactgggtcggaccccttatcggtggtgggctcgctggtctcatctacgagttcatcttcatcagcaacacccacgagcagctcccaaccaccgattattaagcctaatcagggtttaattgatttgtctgtcactttgaaaccggattttctccgatcacatttgagtctcctatctctttccttgtattttgtgtttaatttgtggccgtcgatcttgtttacttttttgttttttttcattcccatcctctatcatgatcatcatgaatggcagatgtttacaattgcatgc

SEQ ID NO: 31681 - DNA, 424 bp, Gossypium hirsutum
  Clone ID: LIB3148-053-Q1-K1-A3
cggctacctaagaaccggacacgtctttggttaggcactttcgatacagccgaggaagcagccttggcttatgataaagcagcctataaacttaggggtgattttgcgagactcaacttccctaaccttcgtcaccaaggttcccatatcggtggcgacttcggtgaatacaagcctttgcattcctctgttgatgctaagcttcaagctatctgtgaaagtttggaactcaaccaaaagcaagggaataacaacaagaagaagaaatcatcgaaggagaacaaagtccaattggctgagcctgaggaaaagacagtgaaggtggagaactccccctcatctttatctccggttctgtcggagaatgaggggtcgacagaatcttcacctttgtcggatcttaccttctcggacttcaacgagc

SEQ ID NO: 31682 - DNA, 412 bp, Gossypium hirsutum
  Clone ID: LIB3148-053-Q1-K1-A4
accaagcaattccacaactccaaaatcaagttcccattggtgttcaagaaggtaaggccgcctaccaggaagctgaagaccacttacaaggcatcaaagcctaacttgtttatgtaagttctctcattgcaatgaaaagagagttgatgtggtttatagttctaaaatttttggtagtgaacatctggcagtttgttgattgggtattgcttttcatttgagaagccgaggccacatctgactggttgaagttgaattttctttaatttactatcacattttgtttacttcgaaaaaaaaaaataaaaaaaaaaaaataaaagaagagaaattcaactaaaatttatattcggaacttccataaaaatgaagagaattcagaaactttaccctttgaaggaaaatacctttt

SEQ ID NO: 31683 - DNA, 376 bp, Gossypium hirsutum
  Clone ID: LIB3148-053-Q1-K1-A5
aaaaaaaaaaaaaggaagaagaagaatgaaaaacacacacatacacacaccatagctgatcctggaaaacaagaaatttgtctttgactgagaagtaacaaaattttgttggtctgaagaggggaaaagcgagtcagattctgataaattcagcaacaagttgtggggatgacatggattaacagccatgcacatggggtgtaattttattgtggggttaaatgtttttttctgttataatttattatttgattgcaaaataaatatgttaaaaagtgtggaaaagggtatagagtggggagtttgcacagaattagttctttgtatgatacgattcttctttctgttcatagtggaatagaattttattttcttt

SEQ ID NO: 31684 - DNA, 415 bp, Gossypium hirsutum
  Clone ID: LIB3148-053-Q1-K1-A7
aaatgggagtggagaagaagatcatggtgttgtggatttgttcattggtaataagctcaatggtgatggaagagggtgcaaacgccacaccaattagctacccgggactgggaaaaaatcttcaagttccatgcaaactaggaggcggtaattgcctcccaccaccatcaaacggttatgacagaggatgttcacaccaaaaacgatgtcgaagtcactatacaacgcccatctttcattgaccactactagaaactgcacatcattaacttctcccttttttctataaaattatgtgaaaaaaaggaattaatcatttcatatgataattcattcctgattgttgtaagccatgaattccggaaatatatacttcaactatttttttgaaggaaaaaacctattctaccttaat

SEQ ID NO: 31685 - DNA, 421 bp, Gossypium hirsutum
  Clone ID: LIB3148-053-Q1-K1-A8
aaattgcattacaacaaaataacattttgttttgcatttattcattcaacataagcggcatggagatttaagaaggcgcgcaactccacaacaaaaaaacacctttgtctgtgaaaaattcttgaaattccatgcaaacttggatagctgtaatttcctctcatcaggaatacacagttataacagatgttcgttactgtaaaaattatatctttggaaaaacccttctcacatcttatatttaacactactataaacttcacattatttatcatctttcttttacttataagactatgccaaacactagtaattaattatttcatatgttgattgactactgatacttgctctctatgaattcataaaattttttctttaattatttttctactattttgaatctttttatttcaaattt

SEQ ID NO: 31686 - DNA, 406 bp, Gossypium hirsutum
  Clone ID: LIB3148-053-Q1-K1-A9
aaatccccctctatattctctctctctctccttctctgcctaaacccaaattattaaaacagtggtcgtctgcaaccgacagggatgtccaccgcagttccacccgttatccctgtctcctccgtgcaatccgtcgaatcccaaccgcccgctgccagccccgcctttctctctttcgtttcccgtctcaatgaatcccttcgcaacggcctctcccagcgccgtccttgggctgagctcgttgaccgttccgccttctccaagcccgagtcattctctgatgctctcgttcgcgttcgcaagaactactcgtatttccgagtcaattacctgtctgtgatcggtctcatccttgccttttcccttctttcccatacgttttcccttctccttctgctcggactcc

SEQ ID NO: 31687 - DNA, 217 bp, Gossypium hirsutum
  Clone ID: LIB3148-053-Q1-K1-B10
gtccgatcaaccatcggtgaaggtggcggtcacagttgatgcacctgctgttctcaaattggtgctggagaggttgatgggagtgatgatgaggatggttgtattgtgtaatcagtgtgaatgtttttttaagaccgtatcagctttgtcagtggactaatttgttctgttacggtagctgttattgtttcaataaaaggtaataattttatgcttt

SEQ ID NO: 31688 - DNA, 98 bp, Gossypium hirsutum
  Clone ID: LIB3148-053-Q1-K1-B11
ccatttattataatttgattctttacttttggaaatgtatactttcaatctcaagatttttttgggttgaatgctattaaattatgatttaacttttt

SEQ ID NO: 31689 - DNA, 384 bp, Gossypium hirsutum
  unsure (1)..(384): unsure at all n locations; Clone ID: LIB3148-053-Q1-K1-B12
ttttatttttctaggttatataataaggtaagtaaggttgaagaaaaagtaaatagtttaggagagattaaaaatttagacttaaaccatgagtctaaagaaatattaactaatgttaataataaattagatcaagttataaataataatattgagcctaatgtagattttggtccattatattacggtcatagtaatgtaattttaactttatctgaagaagaaaaacacttcttctgatgaatcgtcatctacgttnaaaaaaaaaaaataaatattacctatagtataatataattttaacaaaaaaaagggcggcctcgcttttagggacctaatttaaataacggttgattaatacctaataaaaggggggtgctttta

SEQ ID NO: 31690 - DNA, 88 bp, Gossypium hirsutum
  Clone ID: LIB3148-053-Q1-K1-B2
atgccttttggctgtacagttattatatgaagctaatgtactcaaaagttggaatgaatgtgcaatgccgtattttgattttgagatt

SEQ ID NO: 31691 - DNA, 88 bp, Gossypium hirsutum
  Clone ID: LIB3148-053-Q1-K1-B3
atgcctgttggctgtacagctattatatgcagctaatgtactcaaaagttgcaatgaatgtgcaatggcgtattttgattttgagatt

SEQ ID NO: 31692 - DNA, 419 bp, Gossypium hirsutum
  Clone ID: LIB3148-053-Q1-K1-B4
cccacgcgtccgcccacgcgtccgattttccttcactcttggattatatggcttattttatatacgatgtgtctcatcacataaattattatattatatttgaccaatattataagtatttcaaacctaaaaaaaaaaaaaaaaaaaaaaaaaaaaaaaaaaaaaaaaaaaaaaaaaaaaaaaaaaaaaaaaaaaaaaaaaaaaaaaaaaaaaaaaaaaaaaaaaaaaaaaaaaaaaaaaaaaaaaaaaaaaaagggggggggcccttttaaaggaccaaagtttacttccccgggctggcaaggaaaaagtttttttatggggcccccaaaataaaataaaggggccggggtttaaaaacgtggggaggggaaaaacccggggttacccaaattaaatggcttggaagaaaatcccct

SEQ ID NO: 31693 - DNA, 389 bp, Gossypium hirsutum
  Clone ID: LIB3148-053-Q1-K1-B5
gttttcgtttgaattattgcggaaccttagtgtcaaaaaaaaaaaaaaaaaaaaaaaaaatagaaaaaaaaaaaaaaaaaaaaaaaaaaaaaaaaaaaaaaaaaaaaaaaaaaaaaaaaaaaaaaaaaaaaaaaaaaaaaaaaaaaaaaaaaaaaaaaataaaaaaaaaaataaaaaaaaaaaaaaaaaaaaaaaaaaaaaaaaaaaaaaaggggggggcggtttaaaaaaatccaaatttttcctccccttcatgcatgtgttttttttttttttttgggcccccaatttaaaatcaggggggccgattttaaaacgcccttatgggaaaaacccctggtttacccaataatatttctttaacaaaaaatccttttttcccagggggg

SEQ ID NO: 31694 - DNA, 409 bp, Gossypium hirsutum
  Clone ID: LIB3148-053-Q1-K1-B6
cccacgcgtccgcccacgcgtccggttttctgatgtagttctgaggatgggttttctcggaaaataactttccggtgagtttttgtaaattaccggcactggaattctctctcttattttttgctttacagtattgaaactgttaaaaggaggagaaaaatgaatgttggtcggtaatctttaaaatcatctctttttttttttttactactttgtgtctagtattgaatgtatgaaatgaataaatcaaaattattggaacatttcccaattcaaaaaaaaaataagcattgctaattttctgaacagataatgcatgcatgcatgtatgtacacatacatatgaatgtacgttgaatgaagtcttctcaaaaaaaaaaaaaaaaaagggggcggcccttttaaagga

SEQ ID NO: 31695 - DNA, 371 bp, Gossypium hirsutum
  Clone ID: LIB3148-053-Q1-K1-B7
cccacgcgtccgcaaacatgttgaaattcgcagaagcatgcgaaatacctgccgctcgcatgacaaagaaggaagatctgagagaagcgatttgtaaaatgctggaaacacctggaccttatttcttagatgtaatcatcccgcatcaagaacatgtcttgcctataatccccagagaaggggctttcaaagatgtgattactgagggtgatggaagaacaaaatattaattttaatgaacatcaaacatgtgttagtcataatgtatttatgagcagtagtcaataagcattgctaattttctgaacagataatgcatgcatgcatgtatgtacacatacatatgaatgtacgttgaatgaagtcttctc

SEQ ID NO: 31696 - DNA, 432 bp, Gossypium hirsutum
  Clone ID: LIB3148-053-Q1-K1-B8
cccacgcgtccgattcctcaagaattaggcctattagcacggttgtcagcttttgatgtttcaagcaacaagctgtcaggtccaataccagcatcattaggtaataggagtgggaatttaccaaggtttaatgccacatcttttggtggaaataaggatctttatggataccctttaccacctatgaaaagtaaagggctatcagttttggccattgttgggattggattaggaagtggactcgcgagtttggttattagtttcactggggtttgtatttggttgaaaattacagaagaaaaaatggctgctgctgaagaaggaaagattggtcagttcatgcctgattattaaaaaaaaaaagaagaagaacaaatatcattgaagatcattgagcttaaattcaaaaaagaaagaaaatcccaggtatgt

SEQ ID NO: 31697 - DNA, 384 bp, Gossypium hirsutum
  Clone ID: LIB3148-053-Q1-K1-B9
cccacgcgtccgttcttttttccttttttagattatttaaatcctatgaatttgtgtgtttatgggtaaagactagaacactgtgatggtgtgggcgggaagcttaacgcctattcaattcatgtaccaacttatattaaatttatggcaataataagttcctttgcaaactattctaccaaaaaaaaaaaaaaaaaaaaaaaaaaaaaaaaaaaaaaaaaaataaaaaaaaaaaaaaaaaaaaaaaagggttataaataataataaaaataaatatgggtgtgggtttttaaaagtatttaattttatttatgtggggtaccaaaatttaatattttttttattaaaaaaaaaggggtattgcctgtgaaaaacccttttttt

SEQ ID NO: 31698 - DNA, 141 bp, Gossypium hirsutum
  Clone ID: LIB3148-053-Q1-K1-C1
cccacgcgtccgaattttcaacaggggacctgcaaatttactattatttcccccttctatctctatggatttgacccctccttaatttgcaaccgcatatgttaaattattaatgaaaaccgtgcttcacgctttttggct

SEQ ID NO: 31699 - DNA, 223 bp, Gossypium hirsutum
  Clone ID: LIB3148-053-Q1-K1-C10
gtccaatttaaacagttcattgtgccgtaagtggattacaagattgttttcttggtgctagccagtcttgtatgtgtttatggttatggccactttgccatcaatggtcgaggttgttttgttctttgtcggttacttacatggaccaatcctataaatagccattaaaatgctaatttgactcgaacgatttgcaaatacaatgagttctcttcatttattt

SEQ ID NO: 31700 - DNA, 240 bp, Gossypium hirsutum
  Clone ID: LIB3148-053-Q1-K1-C11
gtataaacgaaaaaaaaaaaatcttcctcccaccatcatttgatcattttgtcagtttgtttttgtgttgtttttttattctaaattttctcgcctgccaaacaagcaaaatataggtccattttcaatagagtactgtacagaggacaaagctgtagccatctttctttgttaatggagaatttctttgttatgacagatttaaggacaatgagatgcaaaaatgaagcttttttggtg

SEQ ID NO: 31701 - DNA, 420 bp, Gossypium hirsutum
  Clone ID: LIB3148-053-Q1-K1-C12
aaaatatttttatttatttttaatatttttattatgacattatcatgatgtaatttattccacgtgtcacgatcttattccgtcacttgtcctgaatttaacgccgttagtctcaagtaccagacccgggttcactgaaggcaagcgactcgacgatgttggacgttgcagtgaaggtaccgcatagcgtattggtaagcttgataaaggacatcggtgcagactgggatattgactatgaattggaagtgggactcaccgtggatcttcctctctttggagacctgaccatccctctctctcagaaaggagagatcaagctgcctactttcaaagacctcttcttttgacttctattcatccctcatgtattctttcttttctgaaacttgaattgtatgttaaaaatacgatatgtgc

SEQ ID NO: 31702 - DNA, 304 bp, Gossypium hirsutum
  Clone ID: LIB3148-053-Q1-K1-C2
tttttttttttttttttttttttttttttttttcttggttttttttttttttaccggaagaggcttcgaagtactcggtttacatggacgaacaaagcgaggaaagcaaaagaatagaagaggtgttgatgaaaataccgaaagaagaggtggacacaatgcgtgctacggggattgatatgatcccaaggctcacttacgcacaccctaatgcgagccatagcgatgttggcttcaaaaatgccgtcgacgttgcgcttcaagcattggcacagcatgttagggacaaaatttaataaggaat

SEQ ID NO: 31703 - DNA, 158 bp, Gossypium hirsutum
  Clone ID: LIB3148-053-Q1-K1-C3
agaaaagtggggtatcgtgagagagaaatcaattttcctctcaactctcttgaattcccatcgcttggattgtcctgtctgtttgtaaatatgcagaatgttatctgcataaaagagctttctcttggactttaatgaaagtgtaattttcctccgcc

SEQ ID NO: 31704 - DNA, 376 bp, Gossypium hirsutum
  Clone ID: LIB3148-053-Q1-K1-C4
cccacgcgtccgccagctccaccaaccgacactcccgccggatctccagctgattcgccggctggttcgtcggagaacagcacctccgataatgctgccggtcacgtgagtcccactgttatattcactgtgttggccattgtcggttattcactatgttaatttgttcttttttgggtttgctattttgcttattttcattacagtttgcttcttcttcttttttaaatgtatttgggtttcaatttatgggataaacggtgatagctcgacggcgccgcctccggcgaccatatgggtctgaagaagaatactggaaccttgttatttttttctcttttatttttgtttaattacattttcttagtgttcgttt

SEQ ID NO: 31705 - DNA, 421 bp, Gossypium hirsutum
  Clone ID: LIB3148-053-Q1-K1-C5
ggtttcagggggtttggattttgtcctaaggaaggatggggctaacgtcaaggtggccgaggtggtggggaagaccatgctcttgtacttctcagcccattggtgcccaccatgccgtgctttcacaccgagccttgttgaagtatataagaagatcaaagaaaaggatgatgcatttgaagtgatttttatttcgagcgacagggaccaatcctcctttgatgactattattcaggaatgccttggttggctcttacattcaatgatgctcggaaatcatcattgagtcgcaaattcaatgtccaaggcatccctatgcttatagcactcggaccaactggaaaaactattacaaaagaggcaaggagtctggtcatggctcatggggcggatgcttattctttcactgaggagaggttg

SEQ ID NO: 31706 - DNA, 433 bp, Gossypium hirsutum
  Clone ID: LIB3148-053-Q1-K1-C6
taccaacttcatcaatttctccatccagaacaaattggatctggagaagggaatgatggactgcttatatgcaaaatgcactccttgcatcacagattgtgtgatggctgagcttgaaaaattgggccaaaagtaccgtgtagctttgaggattgctaaggatcctcgttttgaaagattgccatgtgtccatcaaggaacctatgctgatgactgtattgttgagagagttacacagcacaaatgcttcattgttgctacatgtgatcgggacttgaagagaaggattcgtaaagttcctggtgtgccaattatgtatatcactcagcacaagtactcaattgaacgacttcctgaagcaaccattggtggagctccaagattttgacatgcaagtattgatatttcagtagcagtgatctctgggttcaat

SEQ ID NO: 31707 - DNA, 125 bp, Gossypium hirsutum
  Clone ID: LIB3148-053-Q1-K1-C7
ctttgttgttaaaggcttctctataaatagggttgataagatcaaaaaaaaaaaaaaaaaaagaaaaaaaaaaaaaaaggaaaacaaaaaaaaaaaaaaaaaaaaaaaaaacaaaaatatacaag

SEQ ID NO: 31708 - DNA, 283 bp, Gossypium hirsutum
  Clone ID: LIB3148-053-Q1-K1-C8
atgactatgacgactagtcagactggccattccctctacaaatggaaatctgcagtaatagctattaaataaatgatcgaggcatgccacctttgatcgtttcttctaccatttccgtgtgctttttgtgtgtgtgtcagtgtttgatcgtcaataaaatgcccgaacattagggttagcgcaattgcgcttgttgattatcaatctgatgatgataatatactgccatgatctacttgcatgttaactacttaatgcttatgatataataaaatgcttacgc

SEQ ID NO: 31709 - DNA, 260 bp, Gossypium hirsutum
  Clone ID: LIB3148-053-Q1-K1-C9
aaaaaaaaaaaaaaaaaaaaaaaaaaaaaaaaaaaaaaaaaaaaaaaaaaaaaaaaaaaaaaaaaggaaaaataaataaaaaaaaaaaaaatataatataaaataaaaataaattgaattgactgtctcgttgttttaaaatttaattgactgtaaatacaaatgaaataacgggggtttattttttttagaatttaatttttttttcgctggttttgcaaataattttttttgtttaagccgatttaaattaaattcat

SEQ ID NO: 31710 - DNA, 207 bp, Gossypium hirsutum
  Clone ID: LIB3148-053-Q1-K1-D1
gcagatcagggttctcaaaagtctaatgggtactgctgaaacacaatggcatccttgtgagtggaagacagttaccattatcatcatatcatatcatatatataataaatatatcatatgtttaaacactaaatgtgtgctggttttcacattttatcccttagatgtaattcctttctgctgtagtgattgcatttatatatgttt

SEQ ID NO: 31711 - DNA, 418 bp, Gossypium hirsutum
  Clone ID: LIB3148-053-Q1-K1-D10
cccacgcgtccgggccgcccttttttttttttttttttttaaatacaatagaatcatagggtggtgtttcataaatatcttgagagtaccaagaacaatttgtcacaaaattataaaacatgataaaaaaaaaaatagaacaggtagcagacaagctatttgttactttttgttttgcttccaaaccttgccatgaaattgcctagcttgtgcaagcttcctcatcctgcaaattgttagttcctggctctccatatttgatctcaaatgtgagggaaaatcatgcttattataagcctctacttcacattattgtactgagcttcgggttttctttttcccttatttctttttatgtgttgcgtttcgattggtatcttaatagcctgtaatatcacaaacgtgtgaattctcacca

SEQ ID NO: 31712 - DNA, 418 bp, Gossypium hirsutum
  Clone ID: LIB3148-053-Q1-K1-D11
cccacgcgtccgcctgagtttatccattaccagtttgattttgacatgagttcttgacatgagtgccttaaacatcttttgcctttttcttccaaaagtttaatgtctttccattagagtttcatcgtcaagtttatctcctcttccttttgatcgacattttcaataatttgggttcaagatcccctatatgctagaggtatagagttcgaactttggcatgagcttgtttttcagcaatggcattttgcgctcatcttcaacgattagacatttcaaagtgactaaagataataccaaatttgtttgaatgaaaaataataactttatcaatgctattggacatagaaattaagattataataactgaaacctgtgatatttgtaagcttaataaaaaaaaaagtgaaacatgtta

SEQ ID NO: 31713 - DNA, 375 bp, Gossypium hirsutum
  Clone ID: LIB3148-053-Q1-K1-D12
aaccattgtagctcagtcaaaggagaaacagcgcaaatttactgagaccattgaactccagatgggtctgaaaaactatgatccccaaaaagacaagcgtttcagtgggtctgtgaagcttccacatattcctcgccccaaaatgaagatttgcatgcttggagatgctcaacacgttgaagaggcagagaagataggtttggattatatggatgtggaagcattgaagaaactaaacaagaataagaagttagttaagaagcttgccaagaagtatcatgcctttctggcttctgaatctgtcatcaagcaaatccctcgtcttttgggtcctggtctcaacaaagcagggtaattcccaacccttgtcactca

SEQ ID NO: 31714 - DNA, 430 bp, Gossypium hirsutum
  Clone ID: LIB3148-053-Q1-K1-D2
cacccccattggatatcacataaaaatcccaacctctcagtttcttggaactgatggggtatatggtattattttggcaaatggggtcttcataaaagcacactggggaggggggaatttgggtgggattcctccattctcaccctcagcccacaattaaaactgtttggcagtgcttattacccaataagctttgcatggaagaggatccatcctacagagcacctacctatctgcggaggcttttttggctaatgcactggcaaatcggcaagtcacgaaaagggcaatcaactcatagtaattagtatgagtctgttatctggctatacatacatatatatatgtatatatcatgttttcttgtatggtattaattgtttttgaattatggttgttggaatgtaatggaaaggcgtgtgtttagagc

SEQ ID NO: 31715 - DNA, 354 bp, Gossypium hirsutum
  Clone ID: LIB3148-053-Q1-K1-D3
cccacgcgtccgctaaaaattagttgttgggcctgttactggtttgggcccgtttattggtttgtgcctgggcattattgggtttgtacagcatgttagatcaaagaacaaattgattcttctgtcaaaaaatctcatccatttctactgttaaaaactgatcattgtacgtgaaaatgaggtacatgtggcacaccacatgtaactatctggttattctataaaccatgttagtttttaaaaatagaaatgaatgaagtttttaatagaaaaaaaaaaaaaaaaaaaaaaaaaaaaaaaaaaaaaaaaaaaaaaaaaaaaaaaaaaaaaaaaaaaaaaaaaaaaaaaaaaaaa

SEQ ID NO: 31716 - DNA, 440 bp, Gossypium hirsutum
  Clone ID: LIB3148-053-Q1-K1-D4
ttcttaatggatttggccttgttacctcccaatccggtgggggtctatcctatcctacatggttaggtagcaattacaagaaaaaaaaaaaaaaaaaaaaaaaaaaaaaaaaaaaaaaaaaaaaaaaaaaaaaaaaaaaaaaaaaaaaaaaaaaaaaaaaaaaaaaaaaaaaaaaaaaaaaaaaaaaaaaaaaaaaaaaaaaaaaaaaaaaaaaaaaaaaaaagggggggcccttttaaaaaattcaaatttttttacccctggttggcaagataaaatttttttttttgggcaacaaaaaaaaaaaaaagggcccgggttttaaaaacgttggatttgaaaaaaccttggtttacccaaattaaatgctttgaaaaaaattccctttttgccgggttgggtaaaaaaaaaaaagccccccacaaatcccttttcaaaaa

SEQ ID NO: 31717 - DNA, 426 bp, Gossypium hirsutum
  Clone ID: LIB3148-053-Q1-K1-D5
gcaaaccctagcccccttttaaccccatcattgatccaccaccaagaacggctaccgctggttttggggctccgacgaatcgattttcagcctgaaaatcccttcttgacttcaatttgaacaaagcaaaagaggatcagcggcctattcacaaggtacggaggcccgttggcgcggtggtacgtggcgcttgacgtggggcgtgactggtggagcgctggagggtacggagccaggctttgggcgcatggaggccgtacatagggcgttggctgcggcgcacctaagaaacctagggtttctgaaattgttttaacctttgggcctctgtgccgtgtaatcttaggctaggatattaatttgggtattgggttagtgattgggtcaaagtctgtaaatggacatttaatggactattaagattta

SEQ ID NO: 31718 - DNA, 398 bp, Gossypium hirsutum
  Clone ID: LIB3148-053-Q1-K1-D6
gttcaccattgctccgcccactccccattggtttggaggccttaattttctcttcaggcggggatgggaattaaagcggggggacggattacaagaaacagccttctttggaatttattccaattagcaagctttttcttccctccccaaaaagatattaattttccatattaaaaaatcgtctccatacagataaaacaacctaagcgctttatccagaacctatgaccagtaaccctgtctaggttataacagcattcgagaggagcgggcaccaacaagctattcaatacttgcacttgtcggcgcactgattctctgctggcacttcatagcattttccaactattggttgtggttataagaagaatgcacactattctatttgtaagatttcc

SEQ ID NO: 31719 - DNA, 335 bp, Gossypium hirsutum
  Clone ID: LIB3148-053-Q1-K1-D7
acgctttctatatttttctcatggaaatcaacattatcgcgattcgtttatgcatgaaaggagtgtgttatcaatagggacagcaaattcttttcacacattttgaatcctagattccttacctgattggctaatggaattataatatgcgaaaattgtttgtgaggtagtttattcatatgtaaattcagctcttatcaatagatatgatgattcggatccatatattcattgctcttttcactattgagcagacaattttcttccctttaagccatgacttattttgttaatgtacttgtgtctatttttaaaaatatcattctgctattagt

SEQ ID NO: 31720 - DNA, 345 bp, Gossypium hirsutum
  Clone ID: LIB3148-053-Q1-K1-D8
gggaaacttagtgggtacatcaggataaggagcaagacccagggtattgctcttagtctcggggataagattactctaaaacaaaagggaggcggttgatctgtgggatgttgacatcatttgtttaaccaatactggtagtcattctggttttcgcttttgtcagctgctgcctgtctcaatctcctttgaaatgcaaaaaattattactgatctaaaaatgcaggtacttttcctgcattttaaagatggctgccttcatttttgtagtgttctctgtatctagggatggaaccgatttcaagagaagacattgttgtatttggagttacatatttctacagt

SEQ ID NO: 31721 - DNA, 301 bp, Gossypium hirsutum
  Clone ID: LIB3148-053-Q1-K1-E1
cccacgcgtccgataatttgctcattagatacttcattttctcttgtcttttttgtgtaaatgattgttctttgtttagtgacaacgaatctttgaacataaaaaaaaaaaaaaaaaaaaaaaaaaaaaaaaaaaaaaaaaaaaaaaaaaaaaaaaaaaaaaaaaaaaaaaaaaaaaaaaaaaaaaaaaaaaaaaaaaaaaaaatggactgaaagtgatttgggggtttttggttgaaaaaaaaaaaatgataagtgggggaaattaaaaaaatttaaaaaaaatgaattggaaatggaaa

SEQ ID NO: 31722 - DNA, 419 bp, Gossypium hirsutum
  Clone ID: LIB3148-053-Q1-K1-E10
gtcgattataatggaaatgactattaaatgtttaaaattcattttatttaattgatggatgctgttgtttaaatgctgcgggttgaagtgtttaaatgctgtaaattgaagtgtttaaatgttgtaaattgcagtgtttaaatgttgtaaattgaagtgtttaagtactgcaaattgaagtgtttagttgctggaaattgagatgttttattgctgtaattgagttgtataaatgttgttaattgagatgttaaagtgctgcaaattgaagtgtttaaatgctataaattgaagtgcttaaatgttgtaaattggcatttgtttgtaggttcattggcatcttctcctgatgagagtgtagtttatcaagctttaaactttgcgttatcctccgaggtattagaattcctagttcaaaa

SEQ ID NO: 31723 - DNA, 387 bp, Gossypium hirsutum
  Clone ID: LIB3148-053-Q1-K1-E11
gctgtggttctttccctcttttgcaagtgcttgcagaaaatctggtgatggaaagatcgacgggggtgatagaggcctgaaatctggcggtggtgtcagtgaggcgctgattacagaggcagagccttgagtgatggcctcgattggggagctggacagacgctccccgaactttccagaagcagttgcggcgcgagggaaaagagctagggttagaaaccttagctggaaatttttggttctgggcctagttcattttgggccgttgtattaggtcaaaggtaggcttagaaatgggattgtaatgtagtgggttgagtctgccgggtaatgttataattgggcctcgggtgtaatgggtttatggggcataatttgggctgtaaa

SEQ ID NO: 31724 - DNA, 227 bp, Gossypium hirsutum
  Clone ID: LIB3148-053-Q1-K1-E12
gaagattaagatgggttcaaaaatatttcatgatttataactattgtactgatttgaaacgttgccctcaaggtgttccaccagagtgtaaacgcccaaggttctaaaatcaaacctctcctcctttccatgtaatatattctttttttcactactttcttactatgtattcaagttgcactcaacttgatgcttggggatggatggaataagttgctattattatt

SEQ ID NO: 31725 - DNA, 391 bp, Gossypium hirsutum
  Clone ID: LIB3148-053-Q1-K1-E2
aaaaaaaaaaaaataaaaaaaaaaaaaaaaaaataaaaaaaaaaaaaaaaaaaaaaaaaaaaaaggaaagaaaaaaaaaaaaaaaaaaaaaaaaaaaaaaaaaaaaaaaaaaaaaaaaaaaaaaaaaaaaaaaaaaataaatataaaaaaaaaaaagggtaattttttttttattaaaattttttttttttttttttttggggttttttttttttttttattgttttgtaaaatgttgttttttctttatttttttttttttttggggtttttaatattttttgtttttttttttttaaaaaagggttgtattatttccttttttttaaaagtttttattttttttttggcaattggctcttttccttttatattgtattttaccgttggg

SEQ ID NO: 31726 - DNA, 440 bp, Gossypium hirsutum
  Clone ID: LIB3148-053-Q1-K1-E4
aatactctaatactaatagaatagaaaaaatagaatagaaaatactaatataatagaaagaactgtcttttctgtatactttccccggttccgttgctaccgcaggctttacgcaatcgatcggatcatatagatatcccttcaacacaacataggtcgtcgaaaggatctcggagactcaccaaagcacgaaagccaggatctttcagaaaatggattcctattcgaagagtgcataaccgcatggataagctcacactaacccgtcaattttggatccaattcgggattttccttggggggtatcagtaaggaattggaatgtaataatattgattcatataggaggaaaaggttctctattgattcaaatgctgtacctatgggatagggatagagaaagaagaaaaaccgaagatttcacatagtgcttttgatcg

SEQ ID NO: 31727 - DNA, 461 bp, Gossypium hirsutum
  unsure (1)..(461): unsure at all n locations; Clone ID: LIB3148-053-Q1-K1-E5
cgnntccgcccacgtcgttctcgcgtgaccgcgttgggaggacaaatttttgtcattttatttcgantattttgttatgagttttgtgagcnnncaggccagaagattggtgctattctacattacgtagaatacgcgaaaagcttatattcttcagaagattcgagggcnngagccatattcttcgtaagaattacgatattgtgagaatagattattgtnnaatcttgtgaacatcccttgactttgntagggatagagctacatctcattcgtcgatataacttcgatctagatcactggttttgggggagctcaactataaatagagtctccccctcacttgtaaatcattcattagaatccatgcatccattgtattttgtattctttgaaagaaagtaatacaattgagatcatttacttnaaaaaaaaaaaaaacaattagtattaaggaaagg

SEQ ID NO: 31728 - DNA, 431 bp, Gossypium hirsutum
  Clone ID: LIB3148-053-Q1-K1-E6
gtaactgttcttattataatttttgtcgctctcaatgaaatcttcataattctttggtgggggttgcagacattgacagcaggatttgcaatgataggtcggatgggaaggggaaattcctacaccccatcaaaattgcctcccaagccactcgagatatggtcatacgagggttctccattctgtaagattgtacgagaagtgctggtagaattagagttaccgcacactcagcgcagttgtgctcgaggcagcccaaaacggcagatcctctatgagaaagccggacattttcaggtaccttatttggaagatccaaatactggagttcaaatgtttgaaagtgcagaaatagtgtagtatttaagagcaacctatgctcaataatcatcgggtcttttgaatatgttctttcaaagtcggttcattta

SEQ ID NO: 31729 - DNA, 393 bp, Gossypium hirsutum
  Clone ID: LIB3148-053-Q1-K1-E7
acgcctacgcttacataccaaaaaacaatttctttctttcctttttctttttttttaatgtcaagggttctggggatgtttgaatctagctatttctgggaatggggaaaaaccaagcctactaggctttccaaagagccaggcttggctctttctttgctggccctgaaaaaatcaaagattgcatgactggcatactgctcgttttggcaaaattaaaactttttatacagttacatgggaagagttcaaaatgaaacaaaaagaagatgcattgagaaaaggggaactataagcaaataccgatcaaatgatgcgagaatataaagcttaatttgatgctgcatgggcaagcaagctttcacatggtagaaaccacttcaattgttaatc

SEQ ID NO: 31730 - DNA, 383 bp, Gossypium hirsutum
  unsure (1)..(383): unsure at all n locations; Clone ID: LIB3148-053-Q1-K1-E8
gctgactgccaccaggttttaggctggaaatacgagcgagcttacgaggtgtctcagaagtgcaaggaagggaaatttatactctanaaggcgaaaattgttaaggaggattggtaacaagcaagcctcatcgttttttaaggttttctcattccatttattccccatgtttgatgtaattgttatcggtgcccgatgttcgtcttgtacagaaaaagacgtcgcccccatttcggaaaaaaattgtcattgtttggaaccttgcattcttaacgatgatgcgcgacggtttggcaattctctgtgttaataaattatggtattcttaaccatcgttcntgagaaaaaaaaaaatatatataaaaaaggtggtccttttttaa

SEQ ID NO: 31731 - DNA, 418 bp, Gossypium hirsutum
  Clone ID: LIB3148-053-Q1-K1-E9
gttgaagatgagcttgcaaagatctgtgatgatatactatccgtcattgataagcatctcattgcatcttcctcgacaggggaatcaactgttttctattacaagatgaaaggagattattttcgttatttggcagaatttaaagccggagaggatcgtaaagaagctgctgatcagtcacttaaggcttacgaggctgccaccactactgcaaattcagatttgccgccaactcacccaattagacttggcctggctttgaacttctctgttttctactatgagatattaaattctgctgagagggcttgccatctggctaaacaagcttttgatgaggctattgctgagcttgatagccttaatgaagaatcttacaaggatagcaccctaattacgcagcttctcagggataatc

SEQ ID NO: 31732 - DNA, 435 bp, Gossypium hirsutum
  Clone ID: LIB3148-053-Q1-K1-F1
cccacgcgtccgcttaaataccagaaaacaatttctctctttcctttttctttttttttaatttcgatttttctggggatttttgaatctgggtatttctgaaaatggggaaaaaccaagcctacaaggctatgcaaagagccaggcttggctcttcctctgctggccctgaagagatcgaggatggcatgagtggcatgctgctcgtttggccagtcttaaaacttctcatacagttacatgggaagagttcagaaagaaacaaaaagaagatgcattgagaaaaggggaactagaagcagatacggatcgaatgatgcgagaatatagagctcagttagatgctgaaagggcaagcaagcttgcacatggtagaaaccactccagtagtaaatctagccataaaaaggatcgaaaagacaaagattcaaagaa

SEQ ID NO: 31733 - DNA, 409 bp, Gossypium hirsutum
  Clone ID: LIB3148-053-Q1-K1-F10
ggcggctctcgtcctactgctcctcccacgcgtggcttcgcttcctcttctcatcacgatgatgcttatgaaaccgcaaaatgggaaaagataacatatttaggtgttgctacctgcactgttttagcgatttataacctatcaaaaggtcatccccaccatgaagagcctcctgcatacccatatttgcacattcgcaacaaggagttcccatggggtccggatggtctgtttgagaaaaaggagcatcactagggatggccggatggatgcatatctttccgagttcggcgcatttttatcatttctctgagaaatcaatcagataattctgtggatcttttgtaattttagcactcgatttccagtttatggacttttaattgcaagttcatcaggttttctatat

SEQ ID NO: 31734 - DNA, 411 bp, Gossypium hirsutum
  Clone ID: LIB3148-053-Q1-K1-F11
gagaaatttatatgaagaaactcgcaaactttgttgagaagcgactgaaatctgaaaggactggttctatatggaccagcacccttcagagaacgattctgacagcaagtccaattgttggatttccaaagaggtataattcttcacacttttgatagatacaatggcgtgcactagatgagataaatgctggagtatgtgatggaatgacttatgaataaataaagaagaatatgccagaggaatatgaatctcgcaagaaagacaagcttagatatcggtatcctcgtggagaatcttacctggatgttattcaaaggcttgaacctgtaattattgagcttgaacgacaaagagcacccgttgtagtgatatcttaccaagccgtgttgagagcattatatgcttatt

SEQ ID NO: 31735 - DNA, 151 bp, Gossypium hirsutum
  Clone ID: LIB3148-053-Q1-K1-F12
cccacgctttctgtttaattgtacggtgcgcatattatgtatacttaattttctaaaaaaaatgctttttgtactccaatcattataaaaaaacattccatacatttttataaaaagcacttatttataaaaatttaaaaactattaaaaa

SEQ ID NO: 31736 - DNA, 374 bp, Gossypium hirsutum
  Clone ID: LIB3148-053-Q1-K1-F2
cgtaaaaggatcggtgacctcccacaaagtaggggttgcaccggagaatcgtttgtctctgaaaacggaactttcaagacaatcgaggagttttgggatggggaaatttgattacattttcattctaaaaaatagccttgagtcattatgttaacttggaatttattcttcatattttttaaaataataaggatgtttgcttgaattaagattcaaaaatcttttaagatatttaaatatatttattatgtattaattagtatatatttttattaagtgaaactacattcaagatcactttaatattgatcaaaagaaacaaaaataaaaaacttaattatatgcataaaaggaaaagcaaatcttaaaaatgg

SEQ ID NO: 31737 - DNA, 136 bp, Gossypium hirsutum
  Clone ID: LIB3148-053-Q1-K1-F3
gaaaccctttgtttcgttcaatgtaacaaaaaagtctttagttctacactgcataacttaatgcttggtattgacctttgtggaaggtaagttggggttctttttataagaaatgtgcctttgatgccatttcatg

SEQ ID NO: 31738 - DNA, 426 bp, Gossypium hirsutum
  Clone ID: LIB3148-053-Q1-K1-F5
cccacgcgtccgattctctttggcttatctatcgctttgatttcgcgtccttactgtgcactggatggcaaatcgatggttgaggcctgaggtgtatccgctgttcgcggccgtaggtgttgctgtcggaatctgcgggtttcagttggtgcgaaatatctgcatcaaccctgaagtcagggtaaccaaggagaacagggctgctggggttttggacaactttgctgagggagaaaaatattctgaacatttcttgagaaaatatgtccgcaacaagacgccagaaatcatgcccagtatcaacagcttcttcactgacccaaagtgaggcttcactcttgctttatgctgaaactaaaataaaaaaatagaagaactaagtcttattcaatcaataccaagttttgccctttctttctgctgact

SEQ ID NO: 31739 - DNA, 291 bp, Gossypium hirsutum
  Clone ID: LIB3148-053-Q1-K1-F6
gaacttatgaaccattcatttctatgcctgctagaatcacccaaaagttagttgaatgagagaacttgaccaagttttatgaattctactgctagtttttacatgttatctgtagccaattttagattcttcaattgttgactgcgataacatggttgaaacatgttctttctggttcccatagattataaatgacggatttctttgcatttgtaataatatttttgtgattcattggtgttaaaaacaattatacataaaagataatcagaataatacacaaaaaatgat

SEQ ID NO: 31740 - DNA, 404 bp, Gossypium hirsutum
  Clone ID: LIB3148-053-Q1-K1-F7
gagtgaagttcacatcggatggtcggttcctggccatagctgaggtatattttgccatgatgtttgttggtttcgtcatcttgtttctctctatgtattgaagaaggcagctttgcttggaaagaggaggtcgaagatcacctgttgaatctgtaagttattcatttttttttgagtggaattaatttattattcactggatcattacgtttcaaaaaagaagggtgggggaagaaagggatgagttgtattttacatgtatgtgaatttgttaatcctcagtttttgttcgagatgtttcttttattgtactgaaattaaacctactagtgataggcaaaggcaaaaaagaaaaatgaaaaaagggtacgcaatatatctggagtttgaatttccgtttctcg

SEQ ID NO: 31741 - DNA, 295 bp, Gossypium hirsutum
  Clone ID: LIB3148-053-Q1-K1-F9
atggcagtggcttgggctggactttgtagggtttcataaaccagagacacagcaacagagttcgaatgaaatggagctttctgaaccactttctgaacctcttctctgattatacttctctctttttctgtgtaaaatcagttcatagtaatttcattcttcaaagctccttcatttgcaatgattttgtcacttctataattctgacatggcaatgatttccgagagttgaatcttccttgttcatacttccatggcaacgaatctttataatcaaactcatctattttccatt

SEQ ID NO: 31742 - DNA, 203 bp, Gossypium hirsutum
  unsure (1)..(203): unsure at all n locations; Clone ID: LIB3148-053-Q1-K1-G1
ncnggacccacgcgnntccgattttgtatatttcaatattnnnttcgccaagggggaaaaccaagaccgaanntagctccctttaggttgtgtatttcaattgtgagcaaannnacctgaaatnnaacttgagagctannacttgtaactaaatgttntgttcaaagttattagctgcaatnagatannaatcatttttgttc

SEQ ID NO: 31743 - DNA, 355 bp, Gossypium hirsutum
  Clone ID: LIB3148-053-Q1-K1-G10
aacgacggaaactaaaggggcgtgacgtttggttggcttctggaactttctgtttacgacgcctagggttccaaaaaccctaggtcttccttcatctgttaacacattgggccatttgggtcgttcctgcttgtgggttgggtgtaaatgggttaatgggtagttttaggtattctgggttaaaggcaaccgaattttgggcttatacatagactgttaaaaaacaaataaacatttatttatttattttaaaaaaaaaaaaaaaaaaaaaaaaaaaaaaaaaaaaaaaaaaaaaaaaaaaaaaaaaaaaaaaaaaaaaaaaaaaaaaaaaaaaaaaaagggtgaaaaattaaaa

SEQ ID NO: 31744 - DNA, 344 bp, Gossypium hirsutum
  Clone ID: LIB3148-053-Q1-K1-G11
aaaaaaaaaaaataaaaaaaaaaaaaaaaaaaattaaaaaaaaaaaaaaaaaaaaaaaaaaaaagtgaaaaaaaaaaaaaaaaaaggaaaaaaaaaaaaaaaaaaaaaaaaaaaaaaaaaataggggcgccctttttaaagaatcaaactttacttccccttccatgcaacgtaaaattttttttattgtgtccccaaaattaaattaactgcccctcttttaaaaactccggaattgaaaaaaccctggctttcccaaattaaatccctttacaaaaaatccctttttccccagttggctaaataacaaaaagccccccaccaatcccctttccaaaaatttc

SEQ ID NO: 31745 - DNA, 167 bp, Gossypium hirsutum
  Clone ID: LIB3148-053-Q1-K1-G12
cccacgcgtccgcccacgcgtccgcccacgcgtccgcccacgcgtccgcccacgcgtccgatgggatcttgttcggtgtggtaagctttgggttgcaataagttattgtaatgtatggaaatagattagtgatgaataatcaataaattatcgggtgtcttatttcc

SEQ ID NO: 31746 - DNA, 334 bp, Gossypium hirsutum
  Clone ID: LIB3148-053-Q1-K1-G2
attttgtatatcaatattttcgccaagggaaaacagaccgaatagctccctaggttgtgtatgcatgggagcaaaacctgaaataacttgagagctaacttgtaactaaatgtttgttcaagttatagctgcaatagataaatcatttttgttcaaaatccaaaaaaaaaaaaaaaaataaaaatacaaatataaaactaaacaaaaaactctctaagatggtttttgtggaatgaactaaatggcttgcacccaattttgggctttaaataaaattgtggttattcacataatgattccccgttaaaacaattcacagaattgcctttccccc

SEQ ID NO: 31747 - DNA, 426 bp, Gossypium hirsutum
  unsure (1)..(426): unsure at all n locations; Clone ID: LIB3148-053-Q1-K1-G3
gtgagtttgaaatatttaagtgtatggtcaaacttttataagtttttcatatacatgaagggtcgtacactgctggacagagaaaaagaagaatccgggtagcataggttaatgttagtattcattttttctcgatgaataaatgaaaaagaaaatatagaaatttttaatacaaattgtcaagaaattatgttgagtgatcactaaattgtagaatatttttatgaaatgtattctttataggactttgaataattgaaattgcagatgtggttcaaaaaaaaaaaaaaaaaaaaaaaaaaaaaaaaaaaaaaaaaaaaaaaaaaaaaaaaaaaaataaaaaaaaaaaaaataataaaaaaaaaaataaaaaataaaaattttattaataaataaatataaaaatatattttatnatcccccctt

SEQ ID NO: 31748 - DNA, 390 bp, Gossypium hirsutum
  Clone ID: LIB3148-053-Q1-K1-G4
cttttgaaactcaatccaatttatcagaagtttcttgatctccgatgaccaaaaactgtgggggtgaaacaagttcttctagaggcgttggttgtggtaaggtagggaatcctactcaaacgatgtgggaagttgtgcctagcagatgtttccgatgtaccaccacctccaacaaacctaaggcaatgttgttggctagagggctacgccacaagatggtcatctatgggatatcttgagtggaggagagaaataatcttaataaaacctacaaaaatctttcgtgtttcttgttccctttgtatgccttagaagggggtcttacccttccattgcaccctttcgtgagagaggtgttgaatttttataaaataattcctaagtagctaa

SEQ ID NO: 31749 - DNA, 286 bp, Gossypium hirsutum
  Clone ID: LIB3148-053-Q1-K1-G5
cccacgcgtccgaaaaaaaaaaaaaaaaaaaaaaaaagaaaaaaaaaaaaaaaagaaaaagaaagggaaaaaaaaataaataaaaaaaggagggctattatatagggtgacggtatgttttattgattgatgctgttatattgattgttttgtagtgtgaaaactatttaatttggggggcttattttttttaactgctgttttgtttaagcctgcttgcctggtaaatcatttgcgttggctgatttaagttttttacaggtggtctttttttatagtggttggg

SEQ ID NO: 31750 - DNA, 437 bp, Gossypium hirsutum
  Clone ID: LIB3148-053-Q1-K1-G6
cggacgcgtgggttcagtttctttttcagttatattttctacagagatagcaaatgtaggtgttgatggatcaggaatgttagggtctgaaccaagggtgccgatggcaagaaagccatggaatagctcagacattgccaacgatgaatcctcttcatagtcttcttcatctactcgtgctgcttctacaccagcaaatgactttcgaagatggtctctctgggatggactgaatggcttggtaccatagtttggctttgaatagatttgttggtcatccagtaatgactgcccggtaagacaattacaagaatgccctgacacgaaaaagttaaaagaaaaacttggatgacagtgagatagatgaaagaataagttcttgcgtagcattttagcagagacagtgattacttttccctaaccatgacaacatttaa

SEQ ID NO: 31751 - DNA, 286 bp, Gossypium hirsutum
  Clone ID: LIB3148-053-Q1-K1-G7
gctttatgtatacaaatttcacatggccgaagacgataatcaaactccaggcttaaagaatctgtgaacattttaattcccgttccattctcgatttctaaggtacaaactaagtccgtgttttcctctctgggatctgggttgattcatttagtagtgtaatttcagtggtatggttgagtgtaggattgtcctatttttaagtttggatcatggtttggttgtgtagcaattgtttttggctccctctatttgtcatttttcaaattgggtcggtccatttacc

SEQ ID NO: 31752 - DNA, 399 bp, Gossypium hirsutum
  Clone ID: LIB3148-053-Q1-K1-G8
caattatgcaattgatagcgttattggtcctgatggcaaaacaaaacaactgcctggcttctgcggtacatctgaatgtcggaagcgattatattaggttttaagcaacttaaaagctttggaattctggtgagcggaagcccattcctatctcctctctctcttgtactggagaaaagtgtgtttgattgaacgattatataaaatatgggggttttcaagaaagttgatttacttgttggacagtttttaatctcaccattatcgatgggcatatgtatagatgaaacaagaaatactgtcatgtttctgctcctggactgatttgaaacgatgtattataattctatgcttttaaaaaaaaaaaaagaataacggcttgcgaattataataaaata

SEQ ID NO: 31753 - DNA, 279 bp, Gossypium hirsutum
  unsure (1)..(279): unsure at all n locations; Clone ID: LIB3148-053-Q1-K1-G9
cccacgcgtccggtggttctggtcttaagaagagtggcaagaaatgaggttcttaaaaacctnagctaaaccgaacttattgagtcatgtcttgggattaaaacatctattatgctgatgtctcttgtttcaattgtgatagttgggatgatttgatggtctagtttcattctgagtttgctataaaaaacatttgtgtgtaatttcgtgacgtataacttaataaattcaagttctacgtttgtgttaaaaaaaaaaaaaaataatatatttattaaa

SEQ ID NO: 31754 - DNA, 325 bp, Gossypium hirsutum
  Clone ID: LIB3148-053-Q1-K1-H10
aaaaaaaaaaaaaaaaaaaaaaaaaaaaaaaatttaaaaaaaaaaaaaaaaaaaaaaaaaaaaaagggaaaaaaaaaaaaaaaaagaaaaaaaaaaaaaaaaaaaaaaaaaaaaaaaataaaaaaaaaaaaaaaatgggggggggccttttaaaaaaacaaaattttttttccctgtttttgaaaaataaaattttttttttagggcaataaaattaaattaattgggcgggtttttaaaaaattggaaatggaaaaaacctgggtttaccaaatataaattctttataaaaaattcccttttttccaatttggtataataaaaa

SEQ ID NO: 31755 - DNA, 386 bp, Gossypium hirsutum
  unsure (1)..(386): unsure at all n locations; Clone ID: LIB3148-053-Q1-K1-H11
agcccctcttgttccaccaggcacaccggtggtgaacgcactgtccaagcagcgtgcaatgctggagaacatactaagggccagcattggcttggctcctgaaaacaacatgattttggaatacaagtgaagaagttgaggagagaaaagtggaacaaagctttggttcttagaactttaggaccattttccctttctctgtcgtattcataaaagctgtggttactgtagtcacagattgtaacggttgtatgatggtttatgctttggtatattatgcttctttttttctcatttattttccgatggcgctcatgtttgtagctcactcttgaaccaagcaccccttttgtggaaatagatatgataatatgaattttggtnna

SEQ ID NO: 31756 - DNA, 367 bp, Gossypium hirsutum
  unsure (1)..(367): unsure at all n locations; Clone ID: LIB3148-053-Q1-K1-H12
atgatgtatctgatattctggtttggatatttggcattgtaaatagacgagaaggaaagagagatcagagaagtctctattttgtggtgctactgcctcttttcttcgatattgttcatggcaaaaggaaaaaaaaaggaactacgacttttgtatagacaagaaggatttattagggctctgccgaaaaaggggtagcggtttgcttctttttcattttctttttccattatgaatcacgtaatttcctatccagattttccctgtaatttctcctatcatggataatcaatgtaatatatttcttatttttgtccttnaaaaaaaaaaaaaaaacaaaaaaaaaaaaataaaaaaaaaaaatata

SEQ ID NO: 31757 - DNA, 438 bp, Gossypium hirsutum
  unsure (1)..(438): unsure at all n locations; Clone ID: LIB3148-053-Q1-K1-H2
cccacgcgtccgggaaaagaaggtggtgaaccggtgttctggatgtagaaaacgtgtcggtgtgaccgggtttaggtgtcgatgcggtgaactgttttgtgccgatcatcggtactcggatcgtcacgattgtagttatgattacaagacggtcggtcgtgaggccatcgctagggaaaatccggttgttaaagcggccaagataattaaagtctgatatatatattttttatgaaaccctattaaaatcatattattcggaaacatttttcgacccggaattcggaacagctatggaaattcaacttcgatctcatcagcaatccatggaggaagatgacgacatatctcacangatcgtttcaagttgaagaagattatagtatttttaattttacttaattntctttttttccaaaaaaagaaaaatgaaaatta

SEQ ID NO: 31758 - DNA, 436 bp, Gossypium hirsutum
  Clone ID: LIB3148-053-Q1-K1-H3
gcaaagttctgcaatcgtttccccaacatcgatttatcatacgaggtgattgatagtgacaatgtaagggctggggaatatgtcaccttgcaggttaccctcgagagggatctagaggggaagacagaggttggaccggttgatgctcccaggtacccgaaagcaaaagatgaagggtggtggctggttgtcggtgacaccattagtaaccagctgcttgctatcaaaagggtgtctcttcagaggaaagcgaaggtgaaacttgaatttgctgctcccactgaagctacagagaaggcatacactttgtatttcatgtgtgattcttacctaggttgtgatcaggagtatagcttcactgttgatgtcaaagaagctgctcgccctggtgaagacagtggctcagagtaggcttatgttctgcgttttcttaaat

SEQ ID NO: 31759 - DNA, 432 bp, Gossypium hirsutum
  unsure (1)..(432): unsure at all n locations; Clone ID: LIB3148-053-Q1-K1-H4
gacaaaatcgtatcagatacattaacagttgtgcattaagtggtgagatcccctcaaaatttgctaaacttaaagaactgcgaactgtgtaagaaagactccctaatgtttatatacgagttgagttttcatggtttgctgttgcattgtttcttctgttctttgttttgttattggaactatttccaattttctggtttacttgaaatccgatatttgattaaagagaccaaatagagagcacaagtgagagcgaatgcagtgcaagtgatgaagtgcttgttgttccttatgataacttagcacctatgtcttgtgcagatattactgaatctaagcagcttttggataagcttgttgtggtgaagtataatggagcttntggaaagaatatgggtttcggtggtcccgaaatggggtnggagaatgatc

SEQ ID NO: 31760 - DNA, 363 bp, Gossypium hirsutum
  Clone ID: LIB3148-053-Q1-K1-H5
gaattctcgaggaagaagttggacttgaccggacaggagctgaccgaggagaaggaattggcttactcatgcctctcatgaatgcattcatcatttccataatctgtttggaagaggagtggtttgccttaataggattagctgcagttttgaataaaaaaccgttctagatgaactgctagtgattggtaagcgacgtcctctgatcgagatcttcattatacttgtcacttgttcatggatattttggatattttaccggtaatcccggattttaagctccaattttaaatgggataatcgacactgttggtgaaacaaatataactgaatctaagcagcttttgtataaacttagttgtg

SEQ ID NO: 31761 - DNA, 346 bp, Gossypium hirsutum
  Clone ID: LIB3148-053-Q1-K1-H6
ctgatttggaaggcgaagagacgggcgaagattttagtaaatatattaacgaaatccatctaaattatcttaatcaggggatcctaacatcgtatcctttgcctaatcatgattaccattctaatacgaatcaaagcagagaaatcagtggctcaggctggaaaacacctccacctccggctccgaggagtgcggcttgggattacttgaacttttttgatgaaatttatgagagatacgagttgccttatttttcgagcaaagaagtgaaagacaaaggaggagttcatgaacatcttgaagcacaagcagtaaagcaagttcatggagatgagaaatctagtgc

SEQ ID NO: 31762 - DNA, 410 bp, Gossypium hirsutum
  Clone ID: LIB3148-053-Q1-K1-H7
ataaaaaaaaaaaaaaaaaaaaaaaacaaaaatttaaaaaaaaatataaaaaaaaaaaaatatgagaaatataaaaaaaaaaaaaaataaaataaaaaaactataaataataaaaaaaaaacgggggggcccttttaaaggttccaagtttccttccctttgcttgcaaaataattgttttttttttgtgccacctaatttaatttcaatggcctgagttttacaccttaaagttttgaaaaaccctggttttcccaattttattgcctttgaagcaaataccctttttgcctttttgattattaccaaaaaggccccgcccgttcgcttttcccaaattttacccctcctgattgtctattggaaccccccttttaccggcgctttacgctctagaggtttggtggtta

SEQ ID NO: 31763 - DNA, 438 bp, Gossypium hirsutum
  Clone ID: LIB3148-053-Q1-K1-H8
cgaaaacatcagtcaaccgtgttttgaggagtttaaacattgaattccatcccctgcttacagtatctgttttattcaatgctacatctatttgttttgcacaataaccacacgtacttacaccactgggcagggtcttgctatgccattgcgttgcgagataatcatttgtgcgtggagaactcgatgcggcatcattgccccatatgttatgagtacctattcgattcgttgaaagatacgactgtgatgaaatgcggtcacacgatgcactgcgaatgttacgatgagatgataaagcgaaacaaatattgttgtcctatatgctcgaagtcagtgatcgatatgtctagaacctggaagaggatagacgaagagatcgaagcaactgtaatgccagaggactaccggcacatgaaggtgcgtgcatactatgat

SEQ ID NO: 31764 - DNA, 349 bp, Gossypium hirsutum
  unsure (1)..(349): unsure at all n locations; Clone ID: LIB3148-053-Q1-K1-H9
cccacgcgtccgcctgaatctggattactgactactgagtcatggatgaagctggtattctttgtaaaatttgactttgcatgctgttgggatttatatatagtgtttatatatattatatattatattgtgtgatttacttttttttatagctgatttactgtcagcttgtttattctcaataattttcttttacttcatgtttctacactattgagttttgatgtttatttataaactttatcttcaattttggtatataaaccaatatttgttaaagcttgnnnaaaaaaaanaaaaaaaaataataaaatatatttttatttattttttattaaaaataataata

SEQ ID NO: 31765 - DNA, 408 bp, Gossypium hirsutum
  unsure (1)..(408): unsure at all n locations; Clone ID: LIB3148-054-Q1-K1-A1
ctccagctcctttctgccattgtaacaatttctgtatttgaaaagggcaagaaaaagggaaagtgaaatgatgagcaatgaggatatgagataagcgttagtcatttgcgggtagagccatctttgtatgattcctttagtaggtattgcttgatccttaaatctttgttctgaaaggagcggctcatgtactaaacttttcactttttggcatttgttggatctacaatggcactggaatgcctgaggatacggttaaaaaccgcaaacatcatccttatcttttcattttgaattgggattattcattagatacaatcagatatgatccacttttaatgtggatgaaaggggctttttattttcnaaaaaattaaanccaggnaatggaaaagtataatttttttt

SEQ ID NO: 31766 - DNA, 403 bp, Gossypium hirsutum
  Clone ID: LIB3148-054-Q1-K1-A10
cccgggtccattgttgtagacatcgatggtgacggaagtttcatgatgaacgtccaagaatgagcaacgatccgtgtagagaatcttcccatcaagatactattgttaaataatcaacatttaggcatggttgttcaatgggaggatcgattttacaaggcaaaccgagctcatacgtttttaggcaacccatcggacgagtctgatatattcccaaacatgttgaaattcgccgaagcatgcggaatacccgctgctcgtgtgacgaagaaggaagatctccgacaagcgattcagaaaatgttggaaactcctggaccgtacttgttagacgtaatcgtaccgcatcaaagacacgtcttgcctatgatccctgggtgaggggcattcaaagatgtgatca

SEQ ID NO: 31767 - DNA, 363 bp, Gossypium hirsutum
  unsure (1)..(363): unsure at all n locations; Clone ID: LIB3148-054-Q1-K1-A12
tctgaacatagggttgtttctttcgaagggctatagtgtttcttttcttttttgtgtagactttgatttgttgcagctttgcctcggaaatggtcaatggtgtacatggttcatatgttattcaggggaatatagttgctgtttgctacagtcgtcactagggcttcttctgctcagtttggacattggagtctacaagatgccagtccccatctgatgtccgtcaaatttacattgcaatggcatgaatcatgatcaattttgtttcccttgttgatttttttgtgtgattccaatgttgatgagcgcttgtcatcaatgattcaataatttccttattctganatatatacattatggttc

SEQ ID NO: 31768 - DNA, 387 bp, Gossypium hirsutum
  Clone ID: LIB3148-054-Q1-K1-A2
aaaaaaaaaaaaaaaaaaaaaaaaaaaaaaataaaaaaaaaaaaaaaaaaaaaaaaaaaaaagggagaggaaaaaaaaaaaaaagagaagaaaaaaaaaaaaaaaaaaaaaaaaaaaaaaaaaaaaaaaaaaaaaaaaaaaaaaaaaaaaaaaaaaaaaaaaaaaaaaaagggggggggggtttaaaaaaaaaaaaagtttaatgcggggggagggcaacttaaaggcttttgaagggggcgacaaaaaaaaaataacggggggggataaaaaaaaagaggggaggggaaaaaccggggggaaaaaaaaaaaaatgggatgaaaaaaaaaccccttttaaaaaagggggtaaaaagaaaaagggcccgaaaaatcaccccttcaaaa

SEQ ID NO: 31769 - DNA, 271 bp, Gossypium hirsutum
  Clone ID: LIB3148-054-Q1-K1-A3
catttttgagctcatccaaagagcttctactcctgatccgatctgtcaaggaatgcttcacgtcggggatctaaaccggtctgttaagttctataaaaaggcgtgcgggaatgaaactagtaaagaaggtcgataggcctgaatataagtactccatagccatgatggcgtatgcagaagaacatgagactactgttcttgagttgacttacaattatggagtgactgaatataccaagggaaatgcatatgcacaggttgctattagcac

SEQ ID NO: 31770 - DNA, 399 bp, Gossypium hirsutum
  Clone ID: LIB3148-054-Q1-K1-A4
ctgcaccatctacaatttatgttttttggattcattcgattgtaggtgttgagtagtatatgtatgatgtatctagtgtaggtgtattcattatttttgagatttttatatacaaaattcttaaaaaaaaaaaaaaaaaaaaaaaaaaaaaaaaaaaaaaaaaaaaaaaaaaaaaaaaaaaaaaaaaaaaaaaaaagaaacagaaaatataaaaaaaaaaaaatataaaaaaaataaactgaaaaaacttccaattaaaaaaaaaaaaaaaaaaaaaaagggggggccccttaaaaaaaaaaaattttaatacccggtgacgggggcgttattttttttttttggggcccacaaaaaaaatcctggggcccggtttttaaaacctggggagggggaaaa

SEQ ID NO: 31771 - DNA, 378 bp, Gossypium hirsutum
  Clone ID: LIB3148-054-Q1-K1-A5
tcggcactaacaacagagaaatgcaggtgtgaatattggcatgtggcgttgagggtttgacaccaatgtaaagaaaccagcttggtcttcggacattgatgtttgcttttcctacacattagttacttgcaatgggttgtgagtgttttagaagtatcttattgaatgcagatatttggctataaaaccaactagttctagattataatgaatagaaaagaggttctggtataccaagggaaatgcatatgcacaggttgctattagcactgatgatgtatacaaaagcggcgaggttgtggaacatgttatacaagagcttgggggaaaggttactcgtaaaccggggccaatggctgggatcaacactaaaaatac

SEQ ID NO: 31772 - DNA, 325 bp, Gossypium hirsutum
  Clone ID: LIB3148-054-Q1-K1-A7
tgctatttgttatgtgaattgctccgttatttctacgtgtagaggacttctataacttagggatcttacaaattctattaccaattatataaacctaagctatggcttctatctcggaagtatttttttgggtgaaaataaatactccataaccatgatggggtatgcagaagaacatgagactactgttcttgaagtagacttacaaatatggagtgaactgaatatgggggggggatttcatgggcccaagttgctatcagcactgatgaagtatacaaaagctgtgagggtgacgaacatgtaatacacgggccgggggtaa

SEQ ID NO: 31773 - DNA, 246 bp, Gossypium hirsutum
  Clone ID: LIB3148-054-Q1-K1-A8
cccacgcgtccggctgcaactttatagggcagggatcaacagcaggttctttcatggtcaatgaatttatgaacactgccggcgtctactgccattatcattcagcagccttagtgagtaaaataaattatttaatttcatttaattatgctttcttttgccgccattttatggttataatgtaattttaggacctgcatatatattctgtgaatatataaataaataactgaaatcactcccaat

SEQ ID NO: 31774 - DNA, 105 bp, Gossypium hirsutum
  Clone ID: LIB3148-054-Q1-K1-B1
ctctatttgttacggccgttgttgtggtttttatattacgtacgcacgcatgtgacgtaggtgtttttctatagtgggacctaaatatataaaactgacctatgg

SEQ ID NO: 31775 - DNA, 158 bp, Gossypium hirsutum
  Clone ID: LIB3148-054-Q1-K1-B10
agttgcatatctcatccaaactattatgaataatgatagtacttttgaaaagtttagtttaaaaaaaaaaaaaaaaaaaaaaaaaaaaaaaaaaaaaaaaaaaaaaaaaaaaaaaaaaaaaaaacaaaacaaaaataataaactgttaaacccacaac

SEQ ID NO: 31776 - DNA, 385 bp, Gossypium hirsutum
  Clone ID: LIB3148-054-Q1-K1-B11
gtttagatcacgagcggcaccctttacaaatttatatataaattgatagaagcttcctgaggcgagaggctatatggacatgaatgccggtctaaaaagatttgcaacatctctcaaatcacccaacccttgggtgattaatgttgtgcccacaattggcaaggacaccttacgtgtgatctatgatagaggtctaattggaatatatcatgactggtgccaaggtttctctacctatccaagaacatatgaccttattcatgctaatggtgtctttaacttgcatcaagattagtgtagctttgaagacatccttcttgaaatggatcccattttactgcctgaaagggcttagatattcccgcatgatggcgatgtcctaaac

SEQ ID NO: 31777 - DNA, 415 bp, Gossypium hirsutum
  unsure (1)..(415): unsure at all n locations; Clone ID: LIB3148-054-Q1-K1-B12
cccacgcgtccggagaatctgattttttgaaagaaaccttttagactttgaatatcactgatgattgctcctatttctgatctgtcacgattttcgctttggcatttagatgtaactgtttttgagtctcctaatatgtccacattaaggtaacccggttgaatccctaacattgttgcttgatatcttgcgcatgcttccgccgcgaaaggagatgccacattttcatgaagaattaactttgctgccacgattttaccctcctccttgacaacaaggcctgacgccgatctgttatgttgtgagtcgaaagccgcatcgaagaagatagccatattttctctttgttgtctctgactagactntgtattcgttactgagagtatccatagcccatagctgaatcctcgacact

SEQ ID NO: 31778 - DNA, 384 bp, Gossypium hirsutum
  unsure (1)..(384): unsure at all n locations; Clone ID: LIB3148-054-Q1-K1-B3
cgccacattacttggacccgaacttgggtatgttccaacaagagatcattgttgaaaattccaataaccaggtgaaatacggtcagaaatttacagtgcaaatccgtggaaatgtcgaaattgaccaacaaaagcttcaagtgacgatttactcaccgccatttgtgacgcacggggttgctatgaatcaaagattgattcaattgggaattgtggaatttaacaaaaatgttgccataaatacaaacaacattgttcttcaagctcccgttaatagcaacattgcaccacctggttattacatgctctttgtgaactacaatggagtaccttgccgtcgatcaatgtgggttcgaattntaccttagatctttcacaacaagc

SEQ ID NO: 31779 - DNA, 104 bp, Gossypium hirsutum
  Clone ID: LIB3148-054-Q1-K1-B4
cccacgcgtccgctgtgttgtaaagagatttttgccaatttgttaagtgatcatctgccagaatatagcttgcttttcacctatgattcagaagttttcatttt

SEQ ID NO: 31780 - DNA, 409 bp, Gossypium hirsutum
  Clone ID: LIB3148-054-Q1-K1-B6
ggccgactatgacaatctcgtcaaggagactgacaaactaaaagaagagctcacggacaagttacttttggaagggaaagagaagggaaagtcggagcttcctgatgcgaaaacatcctcgcaagagctaccatcagaggctgccgagggggaagagtctaaggttgtgccagtgatgaaaagcgattacactgaaggggttcattcttcagtactcttggagggtgctggttcatcttatccatttgaaccagaccagtctgatttatcacaagatgaggaagacaacttgagtaagggcctcttacatcttccttcatgcgtcttccctaaactccaagacatcgattactccgacccgcctgcaggttcctgtaattttggattccctcttgatgatcatgccttt

SEQ ID NO: 31781 - DNA, 414 bp, Gossypium hirsutum
  Clone ID: LIB3148-054-Q1-K1-B7
attccatacttttctgtaaaaatctttagtctcagcctatatatattattactaggatccgaattaaaaaaaaaaaaaaaaaaaaaaaaaaaaaaaaaaaaaaaaaaaaaaaaaaaaaaaaaaaaaaaaaaaaaaaaaaaaaaaaaaaataaaaagaaaaaaaaaaaaaaaagcaaaagctataaatcaaaaaaaagatacaaatgggaatttgtagaaaataacaaaaagagaaaacttaaatacaaacaaaaatagttatataagcttccgttaatagcaaaattggaccaacctgtttattaaatgctctttgtgaaataaaaaagaataccttgccgaagatcaataagggtaagaattttaccttagatctttcaaaaaaacattggatggtagagccactatatgtat

SEQ ID NO: 31782 - DNA, 358 bp, Gossypium hirsutum
  Clone ID: LIB3148-054-Q1-K1-B8
cccacgcgtccggcttgaggcaggattattatttcataagagaaataaatattaatacctattggattatgcacaagcactgtgctgtgtgccccaaaatccagtgtgaaagtacatcattgtgtcatagctcagcagggggtaggatttaatgactgtttacaaggattagattttgtcggttcgagtgttattttgtccccgttgattgagactgaatcaagtgtaatgtttttccttaaaaaaaaaaaaaaaaaaaaaaaaaaaaaaaaaaaaaaaaaaaaaaaaaaaaaaaaaaaaaaaaaaaaaaaaaaaaaaaaaaaaaaaaaaaaaaaaaaaaaaaagggggggccgcttt

SEQ ID NO: 31783 - DNA, 417 bp, Gossypium hirsutum
  Clone ID: LIB3148-054-Q1-K1-B9
ctttggaagaagcatgtaaatgcttacaaaaggataaatagattgattggtactgcaagatacagaaacgtgatggacatgaatgccggtcttggaggatttgcagcagctctcgaatcacccaagtcttgggtgatgaatgttgtgcccacaattggcaaggacaccttaggtgtgatctatgagagaggtctaattggaatatatcatgactggtgcgaaggtttctctacgtatccaagaacatatgaccttattcatgctaatggtgtctttagcttgtatcaagataagtgtagctttgaagacatccttctggaaatggatcgcattttacggcctgaaggggctgtgatattccgggatgatgtcgatgtcctaaacaaggttaggaaaattgctggaggcatgagatgg

SEQ ID NO: 31784 - DNA, 137 bp, Gossypium hirsutum
  Clone ID: LIB3148-054-Q1-K1-C1
cccacgcgtccgcccactcgtccgaaaaattaaatttaaaaaaatatatataaaaaaaaaagaaaggggttaaattaaaaaaaggaaaaaaaaaaaaaaaaaaaaaaaaaaaaaaaaaaaaaaaaaaaaaattgatg

SEQ ID NO: 31785 - DNA, 421 bp, Gossypium hirsutum
  unsure (1)..(421): unsure at all n locations; Clone ID: LIB3148-054-Q1-K1-C10
ggcggatccccattctctagtaattaaacgcaggtctcattcatttccggtgcgtttaataatcccattttttataacaccatggacatgaagaagatctccaccgccatcattgttgccgctgcctcaatgagcgccgtcatggccgctggtgcaccatctcctgccccttccgccggtggttctagtcctagcttctctcctggttccaccccagcatcaggaccggattccagcgtagctgccgcaaccttgcctgttcttggatcattggttggggcttccattgtttctttgttttcttacatgctgcagtaagctacatgtatcanaactgagcatgtcaacagaaatatattatttattttttttgaaagaaacatgtgatgaatattgaataaaaatgaataaaatggagctt

SEQ ID NO: 31786 - DNA, 416 bp, Gossypium hirsutum
  Clone ID: LIB3148-054-Q1-K1-C11
cccacgcgtccgtggtttaacatttgtttgtgaactgcagtcttatcctgaatgtaaattttgcagtaaatatttttgcagtacacttgtcagccttctgctttctagtcttttgagcatgctgtactaaatttgcattaaaaattgccctgaatctgaaatgccgactatattgttgttgagaatgtgaattgacaagcatagaaggcagaaactggaatattgcagtaaccttctttgtacggtttggttttttatgcatgttttaagtgtcccaagcctagaagctttaaaccttgctatggtcagtgcttaaaattagtgtagcgttaattattgcagttgagacaagccaagactgagatagtatcagctagcaaagtggcatatcgttttcttgtgggtgttacgtctag

SEQ ID NO: 31787 - DNA, 407 bp, Gossypium hirsutum
  Clone ID: LIB3148-054-Q1-K1-C12
gaaaaatctcattctttttcgctattttatcttcttccttttttgctgctttgggcttgttgtttgctgcaggtatgggtacggagacgcgtgacgtggctcggcgcgtacgaaggcagaggctagcgtggagcggctcggaggcgtggctcgtggggccgagggaaaaccctggtggctgcggcgctggaggcattctggaaaccctcggggtttctgaaaattattcaaatcgggccatagtgtattgggcctagggttttgggtatgggtgtatttgggtttgattttgggctagtaatttaggtttaggttttgggccgtgttgatttggtctgtacgatttttggcttgtaactatggactgatattatttgtaaatggacttttaatatttttacttttat

SEQ ID NO: 31788 - DNA, 385 bp, Gossypium hirsutum
  unsure (1)..(385): unsure at all n locations; Clone ID: LIB3148-054-Q1-K1-C2
cggacgcgtgggcggacgcgtgggtccaaccaaaaaaaaaaaaaagaacagagtagataagtttgcaaagatttcaatctcgtaattggttcttgggtcgttcgtttatcgtttgcattatttcgtcgaccggcttgtttgctctgttttttcctttttagtagtctgggtttttatttttcttatatttggtttttgttttttttgctttctattcttggctcctttgaaacctttagaacaatttgcaaccaatgtttttttttttttttttttgcatatgggtgactaattttactattttaaaattttaaaagtgctttattttccnnaaaaaaaaaaaaaaanaaaggggaagaaaaaaaaaaaaaaaaaaaannngggg

SEQ ID NO: 31789 - DNA, 416 bp, Gossypium hirsutum
  Clone ID: LIB3148-054-Q1-K1-C3
tctttctctctctatctttcaattttcccgagaaaatctcgcattttctcacccgagagaaagagccggaaaatcgcatgatgaggtagtttttttaagttttccggagtgaaaagcaactggaaagtaagtttatcctccgtagattactcgttgatcggcttagacaaagtttaaaacagtatctttcttgaatgctacgatactgaaattcgctattagtttgtggaaattttgagatcagctagattagttgggttttgaaaaatgagttggaatccgaacatggaagttcagtacatcaacagtagctacctttataacagtgctggcagctttatggaatattttgaaggtcttacatatcaacatgtcaatttcatttttgacggtgcttcccatcttcaggagagtgc

SEQ ID NO: 31790 - DNA, 296 bp, Gossypium hirsutum
  Clone ID: LIB3148-054-Q1-K1-C4
tgagaattctctagacggttcacctttccaaacgagcaaatcttcactaaaaaaaaaaaaaagaagaaaaaaaaaaaaaaaaaaaaaaaaaaaaaaaaaaaaaaaaaaaaaaaaaaaaaaaaaaaaaaaaaaaaaaaaaaaaaaaaaaaaaaaaaaaaaaggaaacgacaaaaaaaaaagaaaaaaaaaaaaactcaaaggggggcaaatggttaaaaacaacaaaaaggagagggggggggggtttaaaaggcctccccacaccagcggagagggggaaaaatcaaaggtgttat

SEQ ID NO: 31791 - DNA, 404 bp, Gossypium hirsutum
  Clone ID: LIB3148-054-Q1-K1-C5
gtagaaaccaaatcaagaagagcaataacactgtttgaatatcttagcctttttcttttcagttttaaattttaattggccttttggagtttgatttttctttggtccttcctaaatctttagttgttcaacattctctacagtcaagaatggaatgattttcattcttcaaatgttctgttgtactttgcgtcattattgtagaatggaatattatttggcttaaaaaaaaaaaaaaaaaaaaaaaaaaaaaaaaaaaaaaaaaaaaaaaaaaaaaaaaaaatgaaaattaaatacaacaacaataattacctttattacaatgctttctactttataaaatatttttaaatttttacatattaaccatttcctttttaaatttttacgggggggcccctttt

SEQ ID NO: 31792 - DNA, 402 bp, Gossypium hirsutum
  unsure (1)..(402): unsure at all n locations; Clone ID: LIB3148-054-Q1-K1-C6
attttggattcataactgaatgcgttttggagtgtagcatctgaaaattgtccaaagtttacatcaaggattgttagccatgaatctgtctgataaccttctcttttttttttttgcaattttgaaccccaaaattgccggacaatttagttgaattgttaaaagagctgcattataattatcttcttttgcacttttcttttaaaaaaaaaaaaaaaaaaaaaaaaaaaaaaaaaaaaaaaaaaaaaaaaaaaaaaaaaaaaaaaaaaaaaaaaaaaaaaaaaaaaaaaaaaaaaaaaaaaaaaaaaacaaaaaaaaaaaaaaaaaaaaangggggggggcccttttaaggaaccaaatttttttccccgggccggggaaggaaaatttttttttttaggg

SEQ ID NO: 31793 - DNA, 120 bp, Gossypium hirsutum
  Clone ID: LIB3148-054-Q1-K1-C7
atcaccttcttagttttttcgattgctttctattatctctgtattcatacaatatgcgttgatattttgtttttttgttgcgtaaccctttacaaagactgaaattctggctttatagcc

SEQ ID NO: 31794 - DNA, 323 bp, Gossypium hirsutum
  Clone ID: LIB3148-054-Q1-K1-C8
gcttaagtgcgcttacacctttgcttgatgcttcttcaaacagtaagcaatcatcagcaagcaatagatgagacaccctagggccacttctgctggttttgacaccttttataaccccttccccagtagccattcgcattagacccgataggccctccccacatatcaagaataaaaaagggcttaatgggtcttcttgcctaagtccccttgttggatagaaattgtctcctttaatgccattaaacactattgaataggagacactagagatgcatttcataattgaatcaatccatttttgagcgaaacccattttattc

SEQ ID NO: 31795 - DNA, 141 bp, Gossypium hirsutum
  Clone ID: LIB3148-054-Q1-K1-C9
attttaagtttaggagtagcaaagggccttaagtggtctgatttcctaagaaaaaaatggttggcacataggccttaagttgttaatagctgaaacatctctgttcaggttcattgattacttatgttaaaattgcgttct

SEQ ID NO: 31796 - DNA, 363 bp, Gossypium hirsutum
  unsure (1)..(363): unsure at all n locations; Clone ID: LIB3148-054-Q1-K1-D1
ctcaaaattaaggatggagttctggaagaaatttactttcgtcttggctatgatggcggtagtcctggcagccaccatgcctgcaacggtaagcgccgctcgcaaagaggaggtgactctccctgccgatttgagctcaacaaccactttggccaaaattttagatgttgaagacaaacctgataagaaatgcctcaaaaattttgaattttgcatgtttacgaccagagtttgctgtgaaaattgtgcatgtttaggattatgcctgtgtttgtaaactcttccccttttcccttataatataattgcttgtattgtactaaaaaaaataaaggtttgtctttaaacatggttatccaanng

SEQ ID NO: 31797 - DNA, 289 bp, Gossypium hirsutum
  Clone ID: LIB3148-054-Q1-K1-D10
ggatgttaaaagcaatgatttgcagaatggaaataagagtgggtgagaaagccaccatggttgagttaatattcaaacattaacctcgggcctcagctctgatatagttagcaagtaagtacgtacatacacggaatacgcaaaaaaaggtatgtcatctcacagggttaggaaaaggtgggaggggcgatatcattgttccttagctcttatgaatgtgctatggactatatacgaatgtacaaactgtgattggcatgatatgaaataatatatgtatatattatgt

SEQ ID NO: 31798 - DNA, 90 bp, Gossypium hirsutum
  Clone ID: LIB3148-054-Q1-K1-D11
aaaaaaaaaaaaaaaaaaaaaaaaaaaaaaataaatttaaaaaaaaaaaaaaaaaaaaaaaaggaaaaggaaaaaaaaaaaaaaaaaaaa

SEQ ID NO: 31799 - DNA, 105 bp, Gossypium hirsutum
  Clone ID: LIB3148-054-Q1-K1-D12
gggatctacaatattttttgagcaacctcgtcatgaaaggtattgcatatcaactttgttttccatttcatactcgaatgatcaataaaatttgagactaactcc

SEQ ID NO: 31800 - DNA, 416 bp, Gossypium hirsutum
  Clone ID: LIB3148-054-Q1-K1-D2
cggacgcgtgggggcgaccatctatgttgtttacattttcaaatattatgaaaaaccaggcaaagtggcagttcaattcactcacaaataatgcataaaatcgagtgtaaaaccaggcaacgagaatactttgacaaaggaacagttcacaactctctacccaacaaaaaacgagcactttaactctgcagtctactgcctatttataggcctcctaggcaacagcgataagcactcattaatcagaaaaatatcaccttgaaaatagccacctatcacgtattgggaaggagaaaaattaccaccttcaacttatgtgtaatatcacatttttatgtaatattaaatttattaacgtaaaagataaaaacacttaaataataattatataataatattaaatatttatttactta

SEQ ID NO: 31801 - DNA, 345 bp, Gossypium hirsutum
  Clone ID: LIB3148-054-Q1-K1-D3
gaacaaagatatatatatattccagtgttgaagttttttaataaacccttttctttggctgagaaaaaaaaaaaaaaaaaaaaaaaaaaaaaaaaaaaaaaaaaaaaaaaaaaaaagaaaaaaaaaaaaaaaaaaaaaaaaaaaaaaaaaaaaaaaaaaaaaaaaaaaaaaaacaacaaaagaaaaacaaaaaaataaaaaaaatgaaaaaaagaaaaaaaagggggggcccgggtaaaagattggaattataaaacgtggacagtggaaagaataatgctcttgatggtggaacgcgaaaaaaacaaaaaggccgggatgaatacatcttttaataaggaaaac

SEQ ID NO: 31802 - DNA, 413 bp, Gossypium hirsutum
  Clone ID: LIB3148-054-Q1-K1-D4
cccacgcgtccggctggacacacagtttacaccctctcagaagtgtctcgatacaaatccaagaacgactgttggcttgtcatcgatggccgagttctgaacgtaacaaagttcctggaagaacatccaggaggagaagaggtgttgttggaatcagcagggaaggatgcgacgaaagaattcaacgatatcggacatagcaagtcggctcagaatttgctcctcaagtatcagattggtgttctccagggtcacactttaaagaataatgaacaggttggttcaaccgaggagcccaaaaagaaagagatgagtgcattcgttatcaaggatgacctgacgcctaaatatgctgcagtcgtcgagttcgccgccccactcctggttgctggttcctatttctgttacagata

SEQ ID NO: 31803 - DNA, 413 bp, Gossypium hirsutum
  Clone ID: LIB3148-054-Q1-K1-D5
cccacgcgtccgcggacgcgtggggggtgatgcaagcaataagggtgcattgaaaagctccaatgtaacgcatatcttaaccgtggctaacctatctcttcctttgtatccaaatgagtttgctcataaaattatcgaagcttcatcgatgaagctaaaagactaggtggtggtgtgttggttcactgctttatgggaatatctagaagtgtgacagtggttattgcttatctaatgaaaaagcatggtatgaggctttctcaagctttggaacatgtaaagcgtagacgacctcaagcttctccgaattctggtttcattttacagctgcaacaatttgaaaaaacccttcgaggttgatcattgttcggtcacttccctaggcccttgaagttccatctgtaaggaatatg

SEQ ID NO: 31804 - DNA, 253 bp, Gossypium hirsutum
  unsure (1)..(253): unsure at all n locations; Clone ID: LIB3148-054-Q1-K1-D6
gcttgagcgtctggtaaatctttggcctttccataagaatgctgctcataccaatggaaaagtaacaaattcgttcttcattttcccttttctttttgttgtgctaatgatgcatctcacttttttgtttctacttctgctcaatataacaaccaagaaatgtttgactaaaacagttttctcctgacgactttcaacaactgagttttgttggaagatttaaaattgtataaaatttccctctcgttnaagc

SEQ ID NO: 31805 - DNA, 319 bp, Gossypium hirsutum
  Clone ID: LIB3148-054-Q1-K1-D7
cccacgcgtccgcttttagatgcgcatgccatctaagggagaaatgtacctctgaatcctgttggttccttttgaccttcagaaattaatagttgtagatgggataatctgcttctatatgtacttttgatttaaagttgaatggcttacataaatcctttttgtaaaaaaaaaaaaaaaaaaaaaaaaaaaaaaaaaaaaaaaaaaaaaaaaaaaaaaaggaagaaaaataaaaaaggacaaaaataaaaaacaaaaaaaataaaaaataaaggggtggcctatttggaaaccaaaatttttttcccgggccctggtt

SEQ ID NO: 31806 - DNA, 398 bp, Gossypium hirsutum
  Clone ID: LIB3148-054-Q1-K1-D8
gataaataagcgttcgtctcagatttttgaagatggcccgcaccaatcagacagcccgtaagtcgactggtgggaaggctccaaggaagcaacttgctaccaaggctgcccgtaaatctgccccaaccaccggtggtgtgaagaagcctcatcgttaccgccctggaactgttgctcttcgtgaaattccaaagtaccaaaagagtactgagcttcttatcaggaaattgcctttccagaggcttgttcgtgaaattgcccactacttcaagactgatttgcgtttccagagccatgctgctctagctctccacgaagctgcagaggcataccttgtgggtctttttgaagacaccaacctttgtgcgatccacgccaagcgtgtcacaattatgccc

SEQ ID NO: 31807 - DNA, 59 bp, Gossypium hirsutum
  Clone ID: LIB3148-054-Q1-K1-D9
aacttgatatttggctcgagcttgatcgaatatttatttttaagtttgaattcggcttg

SEQ ID NO: 31808 - DNA, 413 bp, Gossypium hirsutum
  Clone ID: LIB3148-054-Q1-K1-E1
gtctcatcttcatacccgcttagaagctgtacttgagaaactgaaggaacagctaaaggatgtggatgccgtccaatccaaggaaatacccttattctggtgtggcatggctgagagcgtacaagttatggggtcattcgacggatggagtcaaggggaacacttatcaccagagtacaccggttcattcgccacgttctccaccacattattgcttagacccggaaggtatgaaattaagttcttggtggatggagagtggcatctatcaccagaataccctaccattggtgagggattaatgcaaaataacttgctcgttgtagactagagtcgagtatttgatacagctttatgttagacagatatgcgtaagtcttttttgtagtcacattcaaatatgtgttgaatac

SEQ ID NO: 31809 - DNA, 276 bp, Gossypium hirsutum
  unsure (1)..(276): unsure at all n locations; Clone ID: LIB3148-054-Q1-K1-E10
cttcagttggtcaaattcgcatccaactgttcaggatcggtttaaatctaagcgaccggcaagtgattaatccaccttcgaacacttgggaacatttctggtgtttagggtttggttacagggagagatgggaggaggccatggagggagtacaacttacaaaggtctaactttgcatcatccaaagcgatggcatgttgtcaccggaaaaggcttgtgtgctgttatgtggttntgggtcttgtacagggctaagcaagatggtccctgtgtatt

SEQ ID NO: 31810 - DNA, 340 bp, Gossypium hirsutum
  Clone ID: LIB3148-054-Q1-K1-E11
atttattcttgccaaagatgcgtgaatggcataaaagatagttggaataaatcaggagaggggatcaaagcctgatgtgtttttaactgcgtgagattaaaaaatttgcggaaaagatatgtgttgttgtgttaggtggagaaacaatgttagctctttgacatgaattaggatggatggtgtacctgtacctttaaatttgtttgatggtgatcatttagaaatgagataatatgggatttcatccttgttgcaaaaaaaaaaaaatgaaataataaaaaaaaaaaaaaaattaaaaagaacatgaaagaaattatatatgtattggagataaacatta

SEQ ID NO: 31811 - DNA, 173 bp, Gossypium hirsutum
  Clone ID: LIB3148-054-Q1-K1-E12
cccacgcgtccgaagctctaaaagcttgccttactaaaaaaactttttatgtaattcttttgcaagggcctgtaattattgcaaatgatgggaaagaaagatttcccaaagttagatggaagaaatcagcaactttgcgagagaatgcaatgcttcttcagtaattagcgtat

SEQ ID NO: 31812 - DNA, 408 bp, Gossypium hirsutum
  Clone ID: LIB3148-054-Q1-K1-E2
ggatttcccataggttgcaaagtggttcaaccatactccgagtatgacatgtatcattgctgactgcagacggcaaccagctttgatggggtgaagaaaccaatggtgaacatccttctgtttggctggttgcagaaatgagttaatgatgtcgactttctcagcggtaatagacatttataactgcaaatggagttaatagttgcccaaaaccatgaagaactgagatggccagttatggacttgtgagaatcagatactgcttaccagaaggcttatttgtctggctgacaattatggggagtttagtttagccggtgaagtggatcttgtttagctgaattgaaacattcatgttctggtcccacaatggtgtctgttacattggttgctcatccatgttgatca

SEQ ID NO: 31813 - DNA, 418 bp, Gossypium hirsutum
  Clone ID: LIB3148-054-Q1-K1-E3
cccacgcgtccgcccacgcgtccgtgctgtgagacagtcactgttccaagaagcagacaagtattgtaagcacatatcgggaaagctatcacgtggccatggatgcttaaaagctttggccttcttggtcgttgcatttgctgtaggtgctgctgttgtaactcccaacatcgacccctcggactggagcaaactatccgaagctattggcaccgccgactgggacaaactatccgaagctctcagcaccgctgactggaacaaactgtccaaagttttcagctcttaacgatcttccccatctcataaacttcaaatctaggtactttcttttttcgatctagaattttaactggcaacggagaaaaaggtcgtttgatatggcattttatgagaatactattagaatagcggctta

SEQ ID NO: 31814 - DNA, 106 bp, Gossypium hirsutum
  Clone ID: LIB3148-054-Q1-K1-E5
aattttggcttatgtttcagttaaaacaagtctttgtaataatttctcctatgcttaaacaaattcttgggtctatgtatttatgttacttggactcgggtttcgg

SEQ ID NO: 31815 - DNA, 349 bp, Gossypium hirsutum
  Clone ID: LIB3148-054-Q1-K1-E6
cccacgcgtccgcggctttcgtccccgcccgcttcagatgcttgacttctattgtttccatagacttgtcggttttacctgaatgcctgtatgcctgtatattattgcagaatcactagacggcccctattattattattgttgttattattattattcattgcagtacgccatttttaatgcagcataactatattgctggccatcattgcagccattttagcaagcctactctgtaacttatgatccatatgtagcatgggattgttttgtactgatattgcacttatctttattattgtattctagcatacagcacaacattatctgtaataaaatgattttatgc

SEQ ID NO: 31816 - DNA, 415 bp, Gossypium hirsutum
  Clone ID: LIB3148-054-Q1-K1-E7
cccagcacaaggacatgctccggccaccgtctaccacgcgcctccacaagttccagctccagcttctgcaccagcaacgcaacaaatggttcgaccggtaaccggacaagccggtcaaggctactacaccaacgtacagagaattccatccgaagtctaccgggagcaacccgtttacaacatggtggcacaaccttcaccatcgactgtgcgaagccggttgaggataagatcatggacatcgcttctttggagaagtttcttcaggaaaggatcaaggttggtggcaaagccggtgctctaggtgactccgtcactgtcacccgcgacaagacccgtatcaccgttacctctgactccaacttctctaagcggtaccttaaatacttgactaagaagtacttgaagaagcaca

SEQ ID NO: 31817 - DNA, 257 bp, Gossypium hirsutum
  Clone ID: LIB3148-054-Q1-K1-E8
cccacgcgtccgctctcgcgtacgatttggttcttaattagggcccggacaaaaatggcccagtacaacaagattggtgggggtagacagctaaatggtacaatcagttgagtcgaaatggaatttagcaattgattaattaaccgaattagatcgattcggccgattaattcagttttaatcgaactaaaaaaaaaaaaagaaaaaaccaagaaaaaacaaaaaaaaaatagggattaaaaaaaaaaagcctttag

SEQ ID NO: 31818 - DNA, 398 bp, Gossypium hirsutum
  Clone ID: LIB3148-054-Q1-K1-E9
acaacaacaatttctggacacacagtttacaccctctcagaagtgtctggacacaaatccaagaacgactgttggcttgtcatcgatggccgagtaacccggctctctttactcacccaattatctttacttatttatgttgacaaataatcagagacttgactgattctttcaggttctgaacgtgacaaagttcatggaagaacatccaggaggagaagaggtgttgttggaatcagcagggaaggatgcgacgaaagaattcaacgatatcggacatagcaagtcagctcagaatttgctcctcaagtatcagattggtgttctccagggtcacacttcaaagaataatgaacaggttggttcaaccgaggagcccaaaaagaaagagatgagtg

SEQ ID NO: 31819 - DNA, 351 bp, Gossypium hirsutum
  Clone ID: LIB3148-054-Q1-K1-F1
cgcaagcgttacttggggctcgactaatgattgagtgaatgactagcatttacttgcgctgttgtggcagagtgatcatcagttggttgttaggagatattgagactattacatacatgactggaggaggaccatgcatatagtaattatataaaataagctgctatatcgaatggcaaagatattgtgttttgcattgatgattttggtgaagaaaattttgccttttacctcatttccctgtcagatagtgtatgggtgcccgggaataggattcatgtttgggatcaagagctgcgacgtgatatttgccctttagagggcctacatatggatgccaatgggcgagaa

SEQ ID NO: 31820 - DNA, 421 bp, Gossypium hirsutum
  Clone ID: LIB3148-054-Q1-K1-F10
cccacgcgtccgaccgagctctaacagtacctgagctcacccagcaaatgtgggacgcaaagaacatgatgtgtgctgctgatcctcgtcacggtcgatacttgactgcatctgctatgttccgtggtaaaatgagcaccaaggaagtggatgagcagatgttgaatgtccagaacaagaactcctcatactttgttgagtggatcccgaacaatgtgaaatcgaccgtttgtgacatcccacccactgggctgaagatggcatcaacatttattggcaattcaacatccatacaggagatgttcaggcgtgtgagtgagcagttcacagctatgtttaggaggaaggccttcttgcattggtacacaggggaaagcatggatgagatggagttcacttgaactgagagcaacatgaatga

SEQ ID NO: 31821 - DNA, 298 bp, Gossypium hirsutum
  Clone ID: LIB3148-054-Q1-K1-F11
tcaagaagtggaagtgatgttactgcccgcttaagcatggagaattgggagtcaaaactgagagcgtcgaatgaatgaatgtaataataatttgacttcaactgctttgtattgaataatcacagacttgtttttctttctttttaattgttgacatataacaataacaacatttgattcaacgatctgatatatgcattacgacttacgagacataactcggaacatgtcattgtaaaccctgtttatttcaactttgaagcattgagtatttggtcaataaacctgataagttgct

SEQ ID NO: 31822 - DNA, 365 bp, Gossypium hirsutum
  Clone ID: LIB3148-054-Q1-K1-F12
atcgctctcagctctacagtccttctcgattgcagtggcgtacatccatacccgaagccccactctccgaccgaaaaatgttcagcggtccaagtaacaggatctagaatcgaaattcatgtagttgtaaccgaccccttactgtcttataatggtgtgtagatcgaaatttaggtattttatacaggaatttgagattgttaatttttcatgctttgttttcagattgttatgaatgtaatgtaggttttgattttatcattgattggaaatcttatcattgatttctcataaacaaaagatattgtattttgctcattttgattgaatctaaagtcttagataaaaaaaaataaacaaaaaca

SEQ ID NO: 31823 - DNA, 333 bp, Gossypium hirsutum
  Clone ID: LIB3148-054-Q1-K1-F3
cccacgcgtccgcccacgcgtccgcccacgcgtccggatataacacccttcccttctttctttggaattatatatacagccttcaagctatatgcaaaggaagtgatggatatacatgcctttcaccatgctattgacaagatcaccagcatcgagatcggattcattatttgaatatgtcacaacactctttattttatgtattctgtaatccatactattactatgtaagagattggttgagtacttcaattgggattcagctcgtttctaaatttgtctaaaaaaaaaaaaaaaaaaaaaaaaaagcaaacaatataaaaaaaaacaaaa

SEQ ID NO: 31824 - DNA, 376 bp, Gossypium hirsutum
  Clone ID: LIB3148-054-Q1-K1-F4
cccacgcgtccgcccacgcgtccgcccacgcgtccggccctattcttttttgtttttgctgaagggttcgatttcaaattgcattgcctattaccatggtattttcctgggaaggatttagtaccattagttacatacacaagtactattcctaattagttttttgttttttttttttaaacatttcaagagattggacgtcaactgtgatcgctctattttgcttgctgaattgactttgtggacttattatgttgcttgcaaagttacaaaatttgtctaaaaaaaaagaaaactcaaatagtacgtaagaatttctaacatccgtttcttagttaaaaattaatggtaagcattttatttattataagaaaaa

SEQ ID NO: 31825 - DNA, 420 bp, Gossypium hirsutum
  unsure (1)..(420): unsure at all n locations; Clone ID: LIB3148-054-Q1-K1-F5
gccttcttgatgtagttgtagtattgtggtcagtgacctttttcgttgttatgtttgttaggtattatctgtaaggaattgcctgcgcaataataaatggcaacgagctcttttgttgcccagggtagtgtcgaaggcttagtctaatgcagtgaaagacttgtgacatatatttatttgataattaaaaaaagaagattagagttaacgtcttaaaaaaaaaaaaaaaaaaaaaaaaaaaaaaaaaaaaaaaaaaaaaaaaaaaaaaaaataaaaaaaaaaaaaaaaaaaaaaaaatcccccaattaaaaaaaaaaaattaaaaaaaaaaanggggggggcccttttaaaagaccaaaatttttatcccggtgtgtggaaagataaaattttttttttggggccccaaaaataaattcc

SEQ ID NO: 31826 - DNA, 355 bp, Gossypium hirsutum
  Clone ID: LIB3148-054-Q1-K1-F6
ggggggaaatgatcaacgatgggaattattcgccgaggattgctggacgtccgatcccaaggaggggtcaagtgaaaattgctatcttaatggggattgcccattcttttgcttctattttctctgcaagtagtcgcaggcaatctgcatctcacttgtcctaggttgtttaatttctcccaaaaagtaagagaactgggagggtaaacgttgcccagagaactgggagggtaaacgtttcccgtcctaggaaagatgtgagctgtttttttttttttgtcgatgttcatatcagttttgtacagagcttgtatttatagcttttcagatgaatgaattttcaatttattttttt

SEQ ID NO: 31827 - DNA, 115 bp, Gossypium hirsutum
  Clone ID: LIB3148-054-Q1-K1-F7
atcagtagatttatcgtacttttgaagcatctgttagcttgttttacattttgtttggtgcttttgttagttattttcgagtacttttaaatgataagtgctgtttttttctggg

SEQ ID NO: 31828 - DNA, 381 bp, Gossypium hirsutum
  Clone ID: LIB3148-054-Q1-K1-F8
caaatctgataaaaatcgtttgtgcttgccatggaacccacatgtcccccgaagagtttgttcgtcatgccagtgaagagtgcaccaatcctgataataacaacggtttggcaacatttccaggtaccaatcctgctgcctctagtcagagctgaaatgacatacatttacttccaatcaagtatgacattggtatggccttgagaatacactgatgaggggccttgcttttctcgcggagtttagctctctgtacccttttccggttgtattagctccctgagttgaatacttcatttgtatgtaagaatttctagcatccgtttcttgtcaaatagtaatgttaagcattttatttctgtagtaacagttccttaagag

SEQ ID NO: 31829 - DNA, 414 bp, Gossypium hirsutum
  unsure (1)..(414): unsure at all n locations; Clone ID: LIB3148-054-Q1-K1-F9
cccacgcgtccgcccacgcgtccgcgagcatgtgaagaagcatgcaggagtggtgctctgatagctgtcaccgcatcagatgtctcctgcattgagaggcactatgatgattactgggaaattgtagggaattatgcggatatcttgtttgcaaacagtgacgaagcgagagctctatgccatttttcttcaaaggaaagcccaatttcggcaacaaggtatcttagccactttgttcccttagtgtcggttacggatggacctaaaggatcttacataggtgtaaaaggagaagctgtatatattcctccttctccatgtgtaccagtggacacatgtggtgctggtgatgcatatgcatctggtattttgtacggcatactacgaggtgtgtcggatntgaaaggtatgggt

SEQ ID NO: 31830 - DNA, 413 bp, Gossypium hirsutum
  Clone ID: LIB3148-054-Q1-K1-G1
gtgaagtctggttttgatctaatggcagacccactagattgtgtttttggttatacggctgcatcggaggaaattcatcactctactccttcaagtatgtcaagcagagcacagagtcgtgcgcacaggagagctaatcgaaggcgtcgattgcatcatcaggaagcttcatcgagctcgcatgataataagtattctaagttttatgtaatgtgacatttaagttaatttttagtacacacacaacaaaaagaaaaaaggagttaagaagttaacctaaagggtggatttggtgctaaacatttgaggcaccgagtgaattaggatcaaatctttcaaattggtcggttgaagattaaatagtttctgagactactcaaataaggactttgatgggcaattgcaccaaacgt

SEQ ID NO: 31831 - DNA, 220 bp, Gossypium hirsutum
  unsure (1)..(220): unsure at all n locations; Clone ID: LIB3148-054-Q1-K1-G10
agttagaggaaaaccggggacaggggtattttaggcgctatggtatagacgcaaaatgaaggtattcacgtgtgtgtaactgtgaatggcttctgattttgaaacaaaatgtatagaaagtcagaaggttttctctaaatatgtagatataatagtgttttctttgcgcaaaaacaaaaatgatggaaaaaaggataaaaaattnggggggggccccttt

SEQ ID NO: 31832 - DNA, 345 bp, Gossypium hirsutum
  Clone ID: LIB3148-054-Q1-K1-G12
gtgacatgcataatctgcggacagagactttgcactagcaatatgaacttgtgaaaaagaggactatcaatggtaattctgcgtatggctctcatgtcatgcaatatggtgatgtagggcttagcaaggacagtctctttgcatacttgggtacaaaccctgcaaatgataacttcacctttgttgacgagaactccttggtgccacctacaaaagctgttaaccagcgtgatgctgatcttgtccatttttggtataagtatcgcaaggcacccgaatgctctgttaggaagactgaatcccaaaagcagtttgttgaagccatgtctcatagaatgcatatat

SEQ ID NO: 31833 - DNA, 337 bp, Gossypium hirsutum
  Clone ID: LIB3148-054-Q1-K1-G2
cccacgcgtccggtcagcactttacagaatggttgaaggtcttgctataatgagcaaattgggaaggagcaggcttcatcaatctgattatggtttcgaagacagatcaatcgactgggatcaaactgaaatgtagagttcaatctctcccgtctggattttggattcataactgaatgcgttttggagtgtagcatctgaaaattgtccaaagtttacatcaaggattgttagccatgaatctgtctgataaccttctcttttttttttttgcaattttgaaccccaaaattgccggacaatttagttgaattgttaaaagagctgcattattatt

SEQ ID NO: 31834 - DNA, 176 bp, Gossypium hirsutum
  Clone ID: LIB3148-054-Q1-K1-G3
agagcccttaaaagagcaaattgatgggctctatcaaatctgttgtgatctcattctaaatggggccaacagtagctactttctaaaaattgtggaattttatggatccacgcttggtatgtagccaagcccaagaaaaaaggaacgaggggaagaatcgacaaggaatccataac

SEQ ID NO: 31835 - DNA, 375 bp, Gossypium hirsutum
  unsure (1)..(375): unsure at all n locations; Clone ID: LIB3148-054-Q1-K1-G4
ggtgaggacttggatgaaaagaatgggaaaattggggatcaaattggaaatgggaaattggcaaggctaataagctgcaaaggaaatgggtgtgggcacaaagggttgcttgattgggagccatacttggtggctacttaaaaatatttctcaaccctaacaaagagaattactagcattgaatgtcactaattttttttctttccatttttctaatttttagctataaaaagtttgagattaccaatnnaaaaaaaaaaaaaaaaaaaaaaaaaaaaaaaaagacaaaaaatataaaagaaaaaaaaaaaaaaataaanaaaaattaaantaaataaaaattaaataaaaaaaaaggggcggcccttttaaagg

SEQ ID NO: 31836 - DNA, 393 bp, Gossypium hirsutum
  unsure (1)..(393): unsure at all n locations; Clone ID: LIB3148-054-Q1-K1-G5
attgaaattgtcagcttcggacttgctcttagacttaccattgtttttctttggttgattgacgaagctgaactcttgcataaatctctatgaataaaaaacactctttgagtgatacttttttttaattgttgaacctttgatatcgctaatcaaatctcagtntcnaaaaaaaaaaaaaaaaaaaaaggagacaatataaaaaaaaacaacataaaaaaaaaaaaaataaaaaaaaaaaaaaaaaaaaaaaaaaaacaaaaaatataattaaatgactcgtagttaaaaaacaatattaccttgtaaaaaaccatgacattaaaaagggggggcccctttttaagagatacatttttttcccgctgggtttaaaatcttaaattctttttt

SEQ ID NO: 31837 - DNA, 204 bp, Gossypium hirsutum
  Clone ID: LIB3148-054-Q1-K1-G6
gcaattacatgaagtcgatattcactcgtgaatcgttcgtgaaaacgcgggctgctaagggatacgtgatcgccgggtgggcacctaaggtgaatgcatgaacaaactggaaacaatgaggtgtttgaagcgtatgagttatgtaataaaatgtgagggatggtgatgtaataaaatgtttgaatgtatgagtgtcaatgctta

SEQ ID NO: 31838 - DNA, 414 bp, Gossypium hirsutum
  Clone ID: LIB3148-054-Q1-K1-G7
aaagaattgtatatttcttggaagaaaatgggagtggagaagaggatcatggtgttgtggatttgtgcaatggtgataagctcaatggtgatggaagagggtgcaaatgcgacaccaattagctaccctggactgggaaaaaatcgtcaagttccatgcaaaattggaggaggtaattgcctcccaccaccatccaacgattatgacagaggatgttcacccctaaaaagatgtcgaattcatcatacaatgcccatccttcattaaccacaactagaaaatgcacttgattaacttctcctttttttctatcaaattatacgaaaaaaagagcaattaataatttcatatgtttattcattcctttttattgtaacccatgaattccagaaatatatacttcaacaatttttt

SEQ ID NO: 31839 - DNA, 384 bp, Gossypium hirsutum
  Clone ID: LIB3148-054-Q1-K1-G8
aaaacccgggccgaccgacgcgtacgaaagaatcataaatttcttgtaaattattttatattggagaaaaaaatcataaattgtgaggggttttttatttggggagggggtgaataacgacaaaacatgatacaactgctataactaatactttccgggtacttgaaaaatatattaaagttttatgcatattattataacaaaattttctaataaataaatttaaatatcttgtaaaaaagattttaacttttaaaaatattagaaactcaacatacaatgataataatggattgaccattaatagaaaaagcatttttttaacttgttttcgattcctatcttattatactatgtaaacaatatttaataaactgataggtt

SEQ ID NO: 31840 - DNA, 419 bp, Gossypium hirsutum
  Clone ID: LIB3148-054-Q1-K1-G9
cccacgcgtccgggcttctctttctttggcagctgctagaagaattgttgaagcagatgagttcatgagggctggcttatatgatggatggctccctcatctgtttgtgggaaacttgcttaaaggacaaacagttggtgtaattggagctggtcgtattggatctgcatacgccagaatgatggttgaagggttcaaaatgaacttaatttactatgatctttaccaatcaacacggctagagaagtttgtcacagcttatggtgagttcttgaaaagcaatggagagcaacctgttcactggaaaagagcatcaagtatggatgaggtgctccgggaggcagatgtgataagtcttcacccggtcttggataaaaccacctatcatctgatcaacaaagaaagccttgcaacaatga

SEQ ID NO: 31841 - DNA, 417 bp, Gossypium hirsutum
  Clone ID: LIB3148-054-Q1-K1-H1
cgaatccttcagatccactcaaggaagatgaacgttcatccggatgtcaatttcgaagaacttgctcgttcgaccgatgattttaatggagcacaactgaaagctgtttgcgtagaggcaggcatgctagcacttcgccgagatgcaactgaggtgaaccatgaagatttcaatgaaggtataattcaggttcaagctaagaagaaggcaagcttaaattactacgcatgatctggagagcatttcgccattagagaaggcatgacaaagaagataggggtagcaaaatgacatttttcgaatagattgatttaattcggtttattcggtttcggttttaatgtgttgcttcggttaatttgtggttttcttatttttatttttgaacccaattgataaaaaaaaaatctacactta

SEQ ID NO: 31842 - DNA, 419 bp, Gossypium hirsutum
  Clone ID: LIB3148-054-Q1-K1-H10
tttgttgttggccttggtgacaaagtctcaccaactgatatagaagaaggcatgcgggtgggggttgatcgcaacaaatatcagatacagattcctttgcctccaaaaattgacccaagtgtcaccatgatgaccgtggaggagaaaccagacgtgacatataatgatgttggtggatgcaaggagcagattgaaaagatgcgtgaagttgttgagctaccgatgcttcatcctgagaaatttgtcaagctcgggattgatcctcctaagggtgttctttgctatggtcctcctggaactggtaagacacttcttgcgagggctgttgcaaacagaactgatgcttgcttcattcgtgttattggaagtgagcttgttcaaaaatacgtgggcgaaggagctagaatggttcgagaact

SEQ ID NO: 31843 - DNA, 298 bp, Gossypium hirsutum
  Clone ID: LIB3148-054-Q1-K1-H11
cccacgcgtccgcccacgcgtccgcaatggccataaactatatatgtgtatgatttaaattgataaagatccaacgaaagcccaaaaccttgaaaagaaatgatgctgtgttgcctgtaaatatttgcgttcctgcactgtaggattttgttttagaagaagtgaaaaatattgtgtttgcatttaaaaaaaaaaaagatgcgtgaaaaatgtatgagataacgatgcttcatactgagaaaattgacaaagctcgggattgatcctcctaagggagaactttgctatggtccttctg

SEQ ID NO: 31844 - DNA, 425 bp, Gossypium hirsutum
  Clone ID: LIB3148-054-Q1-K1-H12
caagaagcagctttaaaacattccatcgaagagctcgaagccaaaaacaaagaagcattacacctcaagaaacaagtcaaagagttggaagataaattgcaagaagctgaagctaaaatgaaggttgcgagcagtgcagccgaagcaaaggatactgtagaggtgaattccagagatactgatggattaacattttcaacaccaacaaaacgaaagagtaagaaaaagtcggaagccgcttctgtacaagttgcttcctcttcttcatcagctacccatactgaggcttctcctttgactaacttaaagttcgttttcggagtagccctcgtgtcagcgatcattggtgttattcttggaaagcgttattaatttagggtttttttccccttcctttttgtgtttgattttactacgttgctgat

SEQ ID NO: 31845 - DNA, 419 bp, Gossypium hirsutum
  Clone ID: LIB3148-054-Q1-K1-H2
gaaggagggccattggatcggaagcgcattattgatgtgctggataagcatctagagaagtcgcgctcgtcgacttcgaggggattgaatagcaaagacaaagaaaggtcctccctcccttcaacttccactggtaaatcccagcttgatcatcgctctgcatcgctctccaaagccaaatattctgatgaggaatctgaaacagacagtgaagaatctgatgttagtggttctgatggagacgacacgtcttggatctcgtggttttgcaatttacgaggcaatgagtttttctgtgaagttgatgatgcatacattcaagatgatttcaatctttgtggcttgaccagtcaagttccttattacgactatgcgctggatttaatattggacgttgaatcttctcatggtgatatgtt

SEQ ID NO: 31846 - DNA, 149 bp, Gossypium hirsutum
  Clone ID: LIB3148-054-Q1-K1-H3
cccacgcgtccgcccacgcgtccgcccacgcgtccggcgttgtcagcatccctgcttacctgtcaattttctttctgtttttaccttttttggctttgtcttggtatctgtatgtcgttgaaaattttatagaatctatcttttacatt

SEQ ID NO: 31847 - DNA, 372 bp, Gossypium hirsutum
  Clone ID: LIB3148-054-Q1-K1-H4
gttctacttggcttcagaggactggtcatcctattatcaatttcaatcaaacaggtccattacctgaaccatttattaagggcctaaccacagcaagtttgcaagggcgggctcagattgtccctgacattgaaagccctggaaatctggttttttatttggatggagcccacagtcctgaaagcatggaagcgtgtgcaaggtggttttctctttgcactagggatgataatcacctatctaacctgaattatcagccgcagcagcatatggatgaaggatctaagaaggatactgcccagattctgctattcaattgtatgtcagtgcgagatcctcagttgcttctgcctcgcttgatgaggacatgtg

SEQ ID NO: 31848 - DNA, 403 bp, Gossypium hirsutum
  Clone ID: LIB3148-054-Q1-K1-H5
cttactacttggctgtgccctttcccatcgagaaagctccaacgaagaagataaccactttgaatgatgaagtgataatctcagagcttttgaactatccggtcaggggtcttgtctttgagggtggtaacactcttcaggccttgtctgacacagtctctgatgcctgcatttgccttcaagagaacaacataccatataatgtcctcatctccgattgtggaaagcggatctttctccttccacagtgttatgctgagaaacaagctctcggggaagtgagtccggagcttctggacacccaggtgaacccagctgtgtgggaaattagtgggcatatggtgttaaaaaggaggaaggactatgatgaggcgtctgatgaaaatgcttggaggctcctggc

SEQ ID NO: 31849 - DNA, 407 bp, Gossypium hirsutum
  Clone ID: LIB3148-054-Q1-K1-H6
tttcaagagctgaccggtaatggtatcttcaagggagatgtcccaccaggttctgtggaaagaccacttagccgagctaaactgcgagaaatgagcggcaatgacatcttttctgatgggaaggcagaatctcgcgactctttgggtggtgtacgtaagcctcccggtggtgagagcagcattgccttggtttaacttgatattaagctgcctgtataactatagtgtcatttgctgtacatcccagtttggggtgctatgttttgactatgaagtgttctcagtgttggatgacaatcgaatataggtattcgagtggtgtatgttagttgtggcttgtgattatgctgttttggtggtaccattagatcgagactctaggcaattaatatcggctaattgagtga

SEQ ID NO: 31850 - DNA, 410 bp, Gossypium hirsutum
  Clone ID: LIB3148-054-Q1-K1-H7
gatgatgtttggttttagtactctcttttttgtcgtcagatctcacacatgatgttaaagtggagtttgatgctatcactttggtacaaattttattataattttttggatattggcataatatttttttaatattgtaaagcaagagatagatttagtgttacagtgtacattagattaggcttctttattggaaggacatcaatttggggtcacgagggattttgttttagtttttttatcaatgtgggataaaaatatagttcacacacccttattttttttaaaaaattaatattttagataaaagaaacaattggttaaaatatggcgtaagtctccatactcttcgaaaatttaaaatttagtttttatacttttatttatatgaatttagtcctttacttttt

SEQ ID NO: 31851 - DNA, 421 bp, Gossypium hirsutum
  Clone ID: LIB3148-054-Q1-K1-H8
aaacccgggccgacccacgcgttcggatgatgtttggatttattactctcttttttttcgtcagaactcacacatgatcttgaacgtgacattgattctatgggtggggcacaaaatttattataattttttggatattggcataatatttttttaatattgcaaatcaagagatatatttagtgttacagtgtacattagattaagcttctttattggaaggacattaatttggggtcacaagggattttgttttagattttatatcaatgttggataaaaatatattttacacacacttattttttttaaaaaattaatattttagataaaaaaaacaattggttaaaatatggcgtaagtgttcatactcttctaaaatttaaaatttacattccatacttttatttatatgaaatta

SEQ ID NO: 31852 - DNA, 372 bp, Gossypium hirsutum
  unsure (1)..(372): unsure at all n locations; Clone ID: LIB3148-055-Q1-K1-A1
cccacgcgtccgcccacgcgtccgcccacgcgtccgcccacgcgtccgcccacgcgtccggccacgcgtccgcccacgcgtgcgcccacgcgtccggcattgacgaggatgcaggtgaagctgaagctgatgctgatatgcccccattggaggatgctgatgccgaaggcagcaagatggaggaagttgattaagcctaacatgtttttatatgaactctaatcagtagatttatcgtacttttgaagcatctgttagcttgttttacattttgtttggtgcttttgttagttattttcgagtacttttaaatgataagtgctgtttttttctgggatnnaaaaaaaaaaaaaaaaaaaaaaaanaaaaann

SEQ ID NO: 31853 - DNA, 413 bp, Gossypium hirsutum
  unsure (1)..(413): unsure at all n locations; Clone ID: LIB3148-055-Q1-K1-A10
catcgctgctggcctcaatcccggcgccatccccttcggcgggcccacccatctagaagttcctgcattcacggcagctatcgaggcgcatcagaagagaatcactgatgcgatcttgaaccatgctcttcagatttgcgctgaaaagaaggcaaacgtgaaaactcaagttgtgattggggatccaaaggaaaaaatttgtgaagtaattgaaaatgtgcatgctgatttgcttgtgatgggttcccgagcttttggccctattaaaagaatgtttttgggaagtgtaagcacctattgcgccaaccatgcacaatgcgctgttatgattgtaaagaacaaggaagcttcctccaaatcttaagagacttgtcaccaagacaancttgttaggagctatgttacgctgcgct

SEQ ID NO: 31854 - DNA, 396 bp, Gossypium hirsutum
  Clone ID: LIB3148-055-Q1-K1-A11
gcacaatcatcctggaatgacagtgctgagcaggcttatctatggctcattacacgttaagtcatatgattggcttgacccaacagagcctgaagatccactacaagcaagagctgcaaaacttgtcaaggatactgagatgacagccccttgtgcaacaacagtactttatcccacaagtggaggcaacatccattgtttcagggcacggactccctgtgctatttttgatattttatcaccaccttactcctcagagcatggacgacactgcacttacttccggaggtcccctagaagggatttacctggtgagattgaaatgaatggagaaatgttctcggaagtgacttggttagaagagtttcagccccctgatgactttgtgattcggag

SEQ ID NO: 31855 - DNA, 219 bp, Gossypium hirsutum
  Clone ID: LIB3148-055-Q1-K1-A12
cccacgcgttcgaaaaaaaccaatttttaatataaaggaaaaaaaaggaaaaaaaaaaaaagggaaaaataaaaaattaaagaggggaggaccaaaaaaaggattaaaaaaaaaaataattttttaagttaacctagatgctatatatctaaaaaaaaaaagccaaaactttttttttaaacaaaaaaatttgttatataggaatattctaaaaggttt

SEQ ID NO: 31856 - DNA, 119 bp, Gossypium hirsutum
  Clone ID: LIB3148-055-Q1-K1-A2
aacgtttgaaaaacagaaatatggatgtgctgctgtttgatttcatagaaaataaggaaactagaaaaatgtatgttttgaaaataaggaaatatggatgtgctgctcttgttactacc

SEQ ID NO: 31857 - DNA, 383 bp, Gossypium hirsutum
  Clone ID: LIB3148-055-Q1-K1-A3
gatgggtttgaggtgggagacattccagacaatgctgttatacatataacgggattggatgcacgggtatctacatgctggatatttatttcaaacatagcctgatgacattaaactagatgttgggggcttcatactgagaacaactacctacttattctctatcacttggcttactgatggataacatgaaacaggcaaacaatatgctgacaaattgagtgcaagtgtgctgacttagaagatggctcccatgttcaagactattaaaaacaccatatgacaggaaaaaagctgttacacgggctgcattcttacccacacagctataccaaggaaaatgtgatgacgtggatacacataaatccggagagagattctct

SEQ ID NO: 31858 - DNA, 373 bp, Gossypium hirsutum
  Clone ID: LIB3148-055-Q1-K1-A4
cccacgcgtccgctgggatctttgttgttagaacgcttgtcggtggattatggtaaaaaggcaaagcttggtttcaccatctacccttcaccacaggtctcaacagctgttgtggagccttacaacagtgttctgtctactcattcccttcttgagcacactgatgtggctgtgctcttggataatgaagcaatttatgacatatgccgtcgttcccttgatattgagaggccaacttacactaacttgaaccgtttgatatctcaaatcatatcatccttgacaacttctttaaggtttgatggagctatcaatgtggatgttactgagttccaaacccaattggttccatatccccgtatccatttcatgc

SEQ ID NO: 31859 - DNA, 408 bp, Gossypium hirsutum
  Clone ID: LIB3148-055-Q1-K1-A5
gaagaattcttgtagtgtgctctgcgagacaattgtattatactttcaacggcatcgttgtaacggcatctcgatgttggatcttcggctcattctttgtgttatagaacccacataaattcggtggttagtatacttagaagtagatggcagtttctatagatcatttagcttagtgtggcattacgtcttacatttttacactctgtgaacattgctggaggaagttgctgaagaagaaagtcggcccgaaaatgagtacaatttgcagctaccgatgaaggaaaaaaatttcttacaaggggaaaattctggaaaacacaatagatgtgagaatattggaatttggagaatatatgaaattccaaacattgtttttctaggtcgaattatgttgtctttgtatta

SEQ ID NO: 31860 - DNA, 404 bp, Gossypium hirsutum
  Clone ID: LIB3148-055-Q1-K1-A6
gccggaggaaccgaagcttttcctgatttgggtaaacattgtcaattttcaggttgtcatgaattagattttcttcctttcaaatgccaagcttgtcataaggtgttttgtgtggaacatagatcgtgtaagtctcatgaatgtccggaaccggaacataacagtaggaaggtgattatttgtgaaatctgttctacgtcgatcgaaataacgggcaaagaagatcaagagaagatgatattggagaaacatgagaagtctgggaattgtgatccaaggaagaagaagaaaccaacttgccccgttaaaagatgtaaagaaacgttgacattctctaatagaaccatttgcaagacatgtcgattggaggtttgtttgaaacaccggtttccagctgatcatgc

SEQ ID NO: 31861 - DNA, 408 bp, Gossypium hirsutum
  Clone ID: LIB3148-055-Q1-K1-A7
ctcatatttgcctcgcatcagtgaaatggaagagaattctcttcgtgttgaacttcacagccagaatgacagacctcttactgatccagagttggatttccttgtggcaatactgggtctgcttgtaaacctagtagagaaggatgaacataacagatcacggcttgcagcagcttctgtttctttaccggattcagaagggttaaatgagggaagtcacatggctgtaattccgctgctatgtgccatcttccttgcgaaccaaggagaagacgatggtactggggttctttcttggaacgatgaggctgctatgctacaggaagagaaagaagcagagaagatgattttagaagcctacgcagccctactacttgcttttctttccactgaaagtaagagcacacg

SEQ ID NO: 31862 - DNA, 388 bp, Gossypium hirsutum
  unsure (1)..(388): unsure at all n locations; Clone ID: LIB3148-055-Q1-K1-A8
tgccaaagctaggcaaagaagcagccaccaaggccattaaggagtggggccagcccaagtgcaagatcacccaccttgtctttggcaccactagtggtgtggacatgcctggggctgactaccagctcaccaagcttttgggcctccgcccctccgttaagcgcctcatgatgtaccaacaaggttgcttcgcaggggggacggtgctccgagtggctaaggacttagctgagaacaacaaaggtgctcgtgtacttgttgtgtgctcggagattactgctgttaccttccgtggacctagtgacactcacctagacagtctagtgggccaagcattgtttggtgatggtgccgcagctgttataatcggngcagaccccatgcccga

SEQ ID NO: 31863 - DNA, 177 bp, Gossypium hirsutum
  Clone ID: LIB3148-055-Q1-K1-A9
taatgtaaagcagttgaaatctttctcaagttaaagggcacatatatatataacatattgtaaatagttcaacattttcactggacagcagctctcatattgtgcttataaattcgctttggtctcacttcaaaaaaaaaaaaaaaaaacaaaaaaaaaaaaaagaacataatactc

SEQ ID NO: 31864 - DNA, 304 bp, Gossypium hirsutum
  Clone ID: LIB3148-055-Q1-K1-B1
cccacgcgtccgaaaatattctgtagctttgttgtctttgggtctgtccatcttgtaagaaaaatttatgccgattaggtgccgaaaaaaaaaaaaaaaaaaaaaaaaaaaaaaaaaaaaaaaaaaaaaaaaaaaaaaaaaaaaaaaaaaaaaaaataaaaaaaaaaaaaaaaaaaaaaaataaaaaaaaaaaaaaccataaatgaaaatcaatgaacaaacgaataaaatgggggtgactgtgaaaacacataacattatccaacttggtcacattgcagctctatcctgttttagacagctg

SEQ ID NO: 31865 - DNA, 392 bp, Gossypium hirsutum
  unsure (1)..(392): unsure at all n locations; Clone ID: LIB3148-055-Q1-K1-B10
catcaggtccaaagtttaccgatgcagcctccgccgtgaaagttgctttacaaaaatatttggccgatgagctagctgatggtgacttaaagatcattgcggaacctggtcgcttctttgctaattcgccatttacattaacaacaagcgtaatagggaaacgagaaagggcggaggttaaggagtactggattagcgatgggatttcggggtcgatgaattttttgaagtacgatcacgatgaagtgatttgcactcctctcatcatgacaaagcctacatgcaaagaatgaaaacatggggttcactgttttggaccgcatgcgatganctgtacggttttgaagggtttgaattgccaaatggacgtgatgatggctgtctttacacat

SEQ ID NO: 31866 - DNA, 404 bp, Gossypium hirsutum
  Clone ID: LIB3148-055-Q1-K1-B11
attttgctttcatgcatgacctgattcctgtaaaaccatattaaccataaagcgtagcagaggagtcgacattgagtttcagggcctcttgtaaatacccaggacattgatgaaaaatatgtaggctatcttttgcccaaagcatgacaacggagacatctatcatctgcaatgactctcctgtgcttaagattaacaaggttgggaataaagtcccaggaaattctccagatagtaattgagattttagaggatagttgttaagtccacaatttcttgtaaatttttttagttacggcatgtaataaataattcctaagatccggattaacatcttgtaatagtttataggtactgcgaactgaaaataagccagataaattccttttccaagcttgagtatc

SEQ ID NO: 31867 - DNA, 297 bp, Gossypium hirsutum
  unsure (1)..(297): unsure at all n locations; Clone ID: LIB3148-055-Q1-K1-B12
ctagcatttctatgctttttgctgacacggcgaataaaatccaaccttttaaaacagcgatcgccacctaaaaggtcagtattgacagtatgacctcacttaaaacttgtactcttgcattatgatcgataaattaaatagaatatctttttgcttgattgtgcataanaaaagaggttatagaaaaaaaataatatcatggtaaaacgccagcctaaggactggtttcaaatttatttggcggaaccgagcctgtccttgtatcttttggtggggcttccatcgaatctttggttt

SEQ ID NO: 31868 - DNA, 146 bp, Gossypium hirsutum
  Clone ID: LIB3148-055-Q1-K1-B2
cattaatgttattatgccttatcgagctataaacttcttgatattttttgttcccatttttccaccaaagtggtcctggagctttaggtctgttcctgggctccgttccttcactcaatgttctatctaaacgttttatattatac

SEQ ID NO: 31869 - DNA, 413 bp, Gossypium hirsutum
  Clone ID: LIB3148-055-Q1-K1-B3
cgcgaacgggcactgttacgaaggatcatggcacgaaggtcgtaaacaagggtatggaatgtatactttccggagtggtgacaccagatgcggcgagtgggattccggcacccttaaaacacctttaccccaactaaccgatgcagtccttcgagcagttgaggctgctagaaaaacagctgtgaatgctgttcatcttcgccgggtcgatgatcaagtaaaaaaggccgttttggctgcaaatagagctgcaatggccgctagggttgccgcagtaagagcggttcagaaccagatggatgccaaattttgtgatatagacgtataagacaatagatttgctggaaattgtagatgttttctatgtagtttgaagaggtaaccctggtgagcaaaaaaaaaagctcattgga

SEQ ID NO: 31870 - DNA, 365 bp, Gossypium hirsutum
  Clone ID: LIB3148-055-Q1-K1-B4
attttggtcatggttagtccaaaaataaagtctctgtattcctttttttttttactttggggtataaacccaaagtaaattgtacaatggttgtggttgtggaaaaaaaaaaaaaaaaaaaaaaaaaaaaaaaaaaaaaaaaaaaaaaaaaaaaaaagaaaaagaaaaaaaaaaaaaaaaaaagaaaaaaaaaaaaaaaaaaaaaaacaaagacaagaaaaaaaaaaaaaacaaaaaaaaaaaggggggggggcttttaaagaaaaaaatttttatccctggcctatgggatttatatatttttttatagggtgaccaaataaaaagcaagggcctgaatattaaaaaccctgaaaattggaaaa

SEQ ID NO: 31871 - DNA, 408 bp, Gossypium hirsutum
  Clone ID: LIB3148-055-Q1-K1-B5
ggggaacactaacaatggccctctgcaggctccagtgtcagatgcagcaggagctgcaccgataatttcaagcaatggagctggtccttccatcagtttacatgctagtgggagtatagaggagttagagcctgcggaacttactgcaatgacatcaatccctgttgcacctgtggtccagaagaagccgctaataagattgaacttcacgtccttgggtaaggcttcggagaaaagtgggtaaaaggggggtttttagagaagtggttttcacagtagtttgggaaggtggggttatgcatcataactgaagttaattgatccctttccatcctttcttaaacagttaagacttgtagttaataaaaaagaattctgagtttgcaagaattccagctttcagttgtg

SEQ ID NO: 31872 - DNA, 371 bp, Gossypium hirsutum
  Clone ID: LIB3148-055-Q1-K1-B6
cttttcccttttttttttcttttaatttcataatttgttgttatgaacataaattgtgcattaggggaactggagaaggtggaagacttctatattaagaccctatttgatttggtgtgctggattcatgaacatcattgaacaattgggtgctttgtaaaccattttattcatgttctattgattagtttgtggtgttcctttaaaaaaaaaaaaaaaaaaaataaccaaaaactgtcaagggagagctaaaaaaacattaaaattcataaccaaattggttttagaattgcttaagacatgacaagataaaaaggcaagtggttcgaattttgagtcttcttaaaatattatggctagcattttccttt

SEQ ID NO: 31873 - DNA, 409 bp, Gossypium hirsutum
  Clone ID: LIB3148-055-Q1-K1-B7
cccacgcgtccgcccacgcgtccgaagctcgagttgtctttacatcaatttccatgtcaaaacctcacatattgctggtggatgagcccacaaaccatttggacatgcaaagcatagatgcactagctgatgcgcttgatgagtttactggtggagtagtcctggtaagtcatgactcaaggctcatatcacgtgtctgcgaggatgaagagaagagtcaaatttgggtagtagataatgggactgtgaacactttccctggtagttttgaagactacaaagaagagctgcaaagagagattagagcagaggttgatgattgatgtggtattgagttttcccaacaaaaaatgaaaaattatatgtttaaccatataaatgcattaagacctgcatatggtatgatggg

SEQ ID NO: 31874 - DNA, 264 bp, Gossypium hirsutum
  Clone ID: LIB3148-055-Q1-K1-B8
gcgcaatatctgcattaaccctgaattcatgggaaccaaggacaacagcgctgctggggtgttggacaactgtgctgagggagaaaaatattctgaacatttcttgagaaaatatgtccgcgacatgacgccagaaatcatgcccagtatcgacacctttttcactgacccaaggtgaggcttgactcttgctttatgctgaggctaggagctaacaagaaccgtggacctaagacttcttcgatcgctaccaaaacatgccca

SEQ ID NO: 31875 - DNA, 380 bp, Gossypium hirsutum
  Clone ID: LIB3148-055-Q1-K1-B9
caatggctcaccacgggcatcctccacctacaccagacccttttgcacccccaccgccagggcatccggcaccacctccgccagacccctttgctccaccaccgccagggcatccggcaccacctgcacctgacccttttgctccaccaccgccagggcatccggcaccacctacaccagaccccttcgcaccacctatgtttgggcagactgcaccgccagcaccacccccatattagcctatagcataaaaatttgattagattcttatagaatcgtaacaataaataagagagtagatattgttatgttgaatgttggaagtggatggtaataatctttatgctacaataaatgagctagagggtggtgctcacaaa

SEQ ID NO: 31876 - DNA, 292 bp, Gossypium hirsutum
  Clone ID: LIB3148-055-Q1-K1-C1
gatccacgtgtgactcatgaaattcgcagcatatggatctcatactggtctcaggctgataaatcactgggtcagaagttagcatctcgcctcaatgtgagacccagcatttagacatggagttgcggaggatgagtaaaggagtgaaatgtagaaaggccatcatctagttgtttcggaagcataaacttattgttgatccttttgatctgtgtgccataactgaaataaagtctcatatactataagttttacgcttatggtcctaattaataaatgccgttttatgtgt

SEQ ID NO: 31877 - DNA, 361 bp, Gossypium hirsutum
  Clone ID: LIB3148-055-Q1-K1-C10
cgccggtgaatcagacccagttcgccatggcttattacggcattaactattccaagctccggctttgggagttcgtcgagtacagtaaaatgctatacctggacggcgacatacaattatatgacaacatcgatcacttatttaatttgccaaacgggcatttctacgcagtaatggactgtttttgtgagaacaaacaaggagccacaccccacaatacaacctcgattactgtcaacaatgtcccgacaatatcaaatgacctgacgagatgggtcaacaactccccttcctatacttcaacgccggcatgttcatcttcgaacccacctcacacctataaaaaccagtatagtgaagg

SEQ ID NO: 31878 - DNA, 388 bp, Gossypium hirsutum
  unsure (1)..(388): unsure at all n locations; Clone ID: LIB3148-055-Q1-K1-C11
accaagcgtacgacctaaaccagactatcagtttgaagatcaattgtgttgtgaaatgtgggtttgataaaaaaaaaaaaaagagaaaaaaaaaaaaaaaaaaaaaaaaaaaaacaaagctgtactaaattagcattaaaaattgccctgaatctgaaaatgccgactatattgttgatgagaatgtgaattgacaagcatagaaagcagaaactggaatattgcggtgaccttctttgtacggggtggttttttatgcatgttttaagtgtcccaagcctaaaagctntaaaccttgctatggacagtgcttaaaattagtggagcggtaattattgcagctgagacaagccaagactgagatagtatcagctagcaaagcggcata

SEQ ID NO: 31879 - DNA, 308 bp, Gossypium hirsutum
  Clone ID: LIB3148-055-Q1-K1-C12
ggcaacagggcacacgacttagggttcaggatgctgttgatctggcggagtcatttgcattcaacctcgagggttcaagttctagtgtgagttcggatgtaggctcggatcatatatccagcttgtgacatggtgccatgcactatatattgattcctccattcattcagagctcattgtttattatagcttgtaaccttgtatattaccctaaaaaacacatctggcgacatatatgccttgccattgattcactcattccaatgtcatgcgggatcaatgggataaaattattcatcaaactcacc

SEQ ID NO: 31880 - DNA, 405 bp, Gossypium hirsutum
  Clone ID: LIB3148-055-Q1-K1-C2
actttttctggggttttcttatcttcttctttcctgtgctgctggtcccagtactagaaggctcaggtcaaacaaggaactgccttgttttgtccaagatttacttgctcaggatgtaatggaattgagttatggagaggaagtgatagcggaaggtgacggattcaatggggaaaggatgttaatggaaagcactgattattcagggacaggtgccaacaagaaccatgattccaaaacttcagggagagcttagaaaacattaagatccataacctatttgttttatgtatagcttaagacatgacaggataaaaggcaaggctttgaatctgggtttcctcaaatattttgctagaatttcctttcttttaaaggttgttggttggatagtggggaaaacta

SEQ ID NO: 31881 - DNA, 317 bp, Gossypium hirsutum
  Clone ID: LIB3148-055-Q1-K1-C3
aagcaaactaatttcatatcaagagatattttgattgccaccaaaaaaaaaaaaaaaaaaggaagagaaaaaaaaaaaaaaaaggaaagaaaaaaaaaaaaaaaaaaaaaaaaaaaaaaaaaaaaaaaaaaaaaaaaaaaaaaaaaaaaaaaaaaaaaaaaaaaaaaaaaaaaaaaaaaaaaaaaaaaaaaaaaaaaaaaaaaaaaaaaaaaaaaaaaaaaaaaaaaagggggggggtttttaaaaaaaaatattctttgacccccctttaatcaaataaaatatttttttatttggtttaaaataaaaaataaaat

SEQ ID NO: 31882 - DNA, 373 bp, Gossypium hirsutum
  Clone ID: LIB3148-055-Q1-K1-C4
cttgaaatacgaagatgtgaaaaaggagcctttggggtgtgtgaggaaacttgcagggttgttgggggtaccctttacaccagaggaagaaaacaacgagactgtggcagaaatagtgaagttgtgcagtttcgagagcttgagcaatcaaaatgttaataaaagtcaaaccagcagtggagaacgacctgttggtaactctgatttctttagaaaaggagaagtaggagattgggtcaaccatttgtcacctaaaatggttgaaaaattgaatcaaattacagaacaaaagcttaattcaaggtactggattcaactttgattgactcctactactttatgatgttataatgatattagagtctataaatta

SEQ ID NO: 31883 - DNA, 371 bp, Gossypium hirsutum
  unsure (1)..(371): unsure at all n locations; Clone ID: LIB3148-055-Q1-K1-C5
cccacgcgtccggctttagctgccagcatttctggcatcaactatgaccttacgaacaaactcccaggcatgtgtggggtgcacagccctttcaagatcagccccagcactaactgcaaaagtgtcaagtgaagtaggccatggaagctcgtcagcaaatgggaaaggaaataatgatatatagctacataataaaaatggatggcagcgctctttatctttgtcgtagttgtccctagaaatataataaaacctcaagctattgcatgagttttgagttaattgaatgacaacgtataacgaanaaaaaaaaaataatttaaaaaataaattaaatttaaaataaaaataatatttataaaataaaaatt

SEQ ID NO: 31884 - DNA, 291 bp, Gossypium hirsutum
  unsure (1)..(291): unsure at all n locations; Clone ID: LIB3148-055-Q1-K1-C6
cccacgcgtccgcccacgcgtccggctagcttggctagcatgatgggtatgatgggttcaggttgggcttttcgtcaacctgattcgggtcgagttgatgatgataggtcttccaatcaaagcacggattgcaattgacacaaattttcattttttgaattttgttatatttttaaccctgtaagaagggagtaaattgtaaataaataattaaattattcattaatttattgtgatacaaaataaaagtctcctaagatcatccaatacaagctttacttctattgttna

SEQ ID NO: 31885 - DNA, 339 bp, Gossypium hirsutum
  Clone ID: LIB3148-055-Q1-K1-C7
gccgttaaagaaaattaaaatgcatatctttttctttccttttcttttgtttaaggggcggtgcatataaatgaaggatggggcgttaaatggagcatgctaagtagttgcggacactttcggtgagacgagtctgttctagcttcttcaccgacaatatgaaatttcttgtatgcaagaaccaaactccattattttcctaaaccgcatatagatttgggtatgcgccaattcgcatgcattggactagtgttctccataagaaaatctaatatctactagtgcagtttaactaattgctgcaattgctgaaattctttaaaccaaacttcaagttcc

SEQ ID NO: 31886 - DNA, 218 bp, Gossypium hirsutum
  Clone ID: LIB3148-055-Q1-K1-C8
gtggttaccgtcgatgctctccagtccaatgacaagaaagtggccgcttgtaaggcaactagggagaggtttgaagagagggtcaagactgggaaaaacaggtggttctttactaagctcaggttttaagtgttttattggaacatgttttatgcttatgtagatttatcgaacaattatgaatttaatgacgcttttttaatctgtttggatgaaaa

SEQ ID NO: 31887 - DNA, 282 bp, Gossypium hirsutum
  Clone ID: LIB3148-055-Q1-K1-C9
gccgaggcttacattttttccatgttatatttcgctgcatgcttaatcctaatgctttgtgggtgccttatattttagactaggccactcatgaacttctctctctactaattaggtctgctaataataagttcgactctaaagcgcctcttacacgacctaactgactatactgaagaatgaaatactgatagcatattttataccctcacccactctgaaaatcctgcaacccgcgccgtaccgtatggctcctcatgctttggataagggggcctagcc

SEQ ID NO: 31888 - DNA, 413 bp, Gossypium hirsutum
  Clone ID: LIB3148-055-Q1-K1-D1
cccacgcgtccgggtagttgttgcagaagagtaaaatagtaaagagtcacagctgaggcacggaagaagatgccttgcctaaacctttcaaccaacgtcaatctcgacggcgtcgacacctccgccatcctttccgaagccacctcttccgtcgctaaactcatcggcaaacctgaggcctatgtgatgattgtgttgaagggttcagtacccatgtcatttggtggtaccgagcagccagctgcctatggagaactggtatcaattgggggccttaatccagatgtgaacaagaaactgagtgctgcaattgctgcaattcttgaaaccaagctacaagtgcctaagtcacggttcttcctcaaattctacgacaccaagggttccaactttggatggaacggatccacctt

SEQ ID NO: 31889 - DNA, 335 bp, Gossypium hirsutum
  Clone ID: LIB3148-055-Q1-K1-D10
cccacgcgtccgcccacgcgtccgtgcttatggtggagttctatctggaagtgctgttcgagaaaggatcataagggccttcttggtggaagagcaaaagattgtgaagaaggtactgaagattcagaagacaaaggaaaagcaatcatccaagtgagagctaggatttgctaatggattgatagtgaatcttggaatagtagtttgaggggatttaagatttggatttatgtttttacatctgttatgaatcatgttctactttatcatcttgtcgacaaatcaactttcatgtcaaaattttggttttggaacactcactttgtttgctcttc

SEQ ID NO: 31890 - DNA, 412 bp, Gossypium hirsutum
  Clone ID: LIB3148-055-Q1-K1-D11
cccacgcgttcgataaaaaaatcctgttagatcgtgattcagacctgaataatcggagtagagaaacatgtcatcaggcctggaaccggctccaaacccactccccgtcaaaccggcaccgatcactgtactggatacgggaaaaaaggagatgtgtctgaaaaactctggagcacaaaggatccagggctggaaccattctatttacaaataggccagggctctgctataaaaggatgggatgaatgcgttatgggaatgcaagtggccgaagttgctcttcttctgtgctccccatactatgcttatggagctggtgggttacctgcatggagaatacagccaaactcggatctcgtattcgtgattgaagtcctaagcttgaagtgagtagcaagcagttggtgactgt

SEQ ID NO: 31891 - DNA, 57 bp, Gossypium hirsutum
  Clone ID: LIB3148-055-Q1-K1-D12
cggacgcgtgggcggacgcgtgggcttcaattcaagtttcaacaacttactgcaatt

SEQ ID NO: 31892 - DNA, 205 bp, Gossypium hirsutum
  Clone ID: LIB3148-055-Q1-K1-D2
tctttctctcttttttttcttctgcttttttctgataataatgtattttgtctgtattatacattttcttactgtacaaatcaattattagttgtaaaataattgcaacaagcaactaagattttgtcccaatatcgcttgatctctcttccctttacaaaaagatgagtttcttttaataaagggctggcactttctttctcct

SEQ ID NO: 31893 - DNA, 407 bp, Gossypium hirsutum
  Clone ID: LIB3148-055-Q1-K1-D3
cagaatattgactcgttgagagtgaaacttacttccgatgacttgaaagaaatcagagatgctgggccgattgaagaggtcgcaggcgatcggaactacgatagcatgaagaaagcttcatggaaatttgcagacacctgcaaaagatgttggggtttcaattgaacaaggcaattgaaatggttatggcatgtttgtttcatttaagggaaaatgtgtggcatagatctttttaaggttttaaaaccatccatacttgcgtttgggacaaaaattatagatggttttgatatgaaataataaagagagcaatgttaaggcaaagacttttatgctgccactattactgatgagcgtatgaaaagaagaaaaaccagagggagctctaatgtgctgtcgatctgagt

SEQ ID NO: 31894 - DNA, 401 bp, Gossypium hirsutum
  unsure (1)..(401): unsure at all n locations; Clone ID: LIB3148-055-Q1-K1-D4
ggccttcaccatcttttaatttaagagggcctactatattttgattcacaattacaagtgttaaaagattgaaatcctttgtttgtaatatttgttttctcattgctggtacaaccatctttgtaattttctttatttttagaatgaaattgctaaagtgatgttcaagtgtnaaaaaaaaaaaaaaaaaaaaaaaaaaaaaaaaaaaaaaaaaaaaaaaaaaaaaaaaaaaaaaaaaaaaaaaaaaaaaaaaaaacaaataaaaaaaaaaaaaaattaataaaaagattaaacaaaaaaaaatataattgaaataagatttaaaaaattgggggggggccttttaaagggtacaaaatttttatacgctttctttacaaaaaattttttttttttggggg

SEQ ID NO: 31895 - DNA, 379 bp, Gossypium hirsutum
  Clone ID: LIB3148-055-Q1-K1-D5
agggtatgcagaatggacaaaggattactttcccaggagaagctgatgaagcgcccgatgcggttactggggacattgtattcgtcctgcaacagaaagatcatcctaaatttaaacgaaagggtgatgacttatttgtagagcatacattggcacttactgaggccctttgtggctttcagttcatactgactcacttagatggcagacaacttctcattaaaacccaacctggggaagtcgttaagcctgatcaattcaaagcaataaacgatgaaggaatgccgatttatcagaggccatttatgagaggtaaacttttcattcacttcactgttgacttccctgactcgttgaccccagaccaatgcaaggcact

SEQ ID NO: 31896 - DNA, 369 bp, Gossypium hirsutum
  Clone ID: LIB3148-055-Q1-K1-D6
aagatgaagaggtggttcgatccatggcccgtgttcttcaagagagagttcaatcgcacttggcctttcctcgttggtttcgccgtcaccgggaccatcatcacaaagttctcccttggtctaaccgaggaagatgctaagaactctccctttgctcagaagcacaagaggtgatccaactgatttcaaaagcctatatggttgcagtcccttggtatgagaggctcagttgttttcctttttccttttcccaatgaacaatgaaaataacagaagacatcagttctgagtacactttattttgtgaattatgattttgtcatcaattaatgattttgctttgaataaggttaaaacacccttccagtt

SEQ ID NO: 31897 - DNA, 367 bp, Gossypium hirsutum
  Clone ID: LIB3148-055-Q1-K1-D7
cccacgcgtccggtatgaatatggttgtgatatctgaatgtaaagtaataatctccatagagtcgagtgttgacatctatgaatgttttgagtggtatattaaatattaattattaacgtgttaaagttcacataaaaaaaaaaaaaaaaaaaaaaaaaaaaaaaaaaaaaaaaaaaaaaaaaaaaaaaaaaaaaaaaaaaaatgaaaaaaaaaagaaacaaaaaaaaaacaaaaaaaaaagaagcaaaaaaaactaaaaataaaaaacataaaccgggggggggccgtttttgggaaccaaaattaacggccccttatgcgcaacgataaagttttttttaggggcaccgaaattaaaattgaggg

SEQ ID NO: 31898 - DNA, 164 bp, Gossypium hirsutum
  Clone ID: LIB3148-055-Q1-K1-D8
tggagcttgttctttctggaatccgtggctggaacatgcagtattttacagttgtgatatgagttgatgtaacattgtttggaacactttaatgatctaatcgcgaacttatttcctggataagtacttcattacagttttacgaaaaaaatccagtttaatag

SEQ ID NO: 31899 - DNA, 393 bp, Gossypium hirsutum
  Clone ID: LIB3148-055-Q1-K1-D9
taacagagtacggagaatttgtgcgtagttttaatgctccttctgttgatgagaaatttgaactccttggaatcttggcgaatgtttttatcgttgctcctgaaagtctgtctagtttgtttgagggcacacctagtatccggaaagatgcacaaaggtttattcagcttagagaagactacaagagtgcgaaacttgcatcgaggctcaactctttatggtcgggttctggttgatgtagaggtggggttgttgctggttttcaaatatatagctctctttgtttgtcaccgtccttggtcaatgtattatattaaccaagaattgtttttcatgcctacttcaatcatcatttttaatttattatatctggattcaacccctccctttttt

SEQ ID NO: 31900 - DNA, 410 bp, Gossypium hirsutum
  Clone ID: LIB3148-055-Q1-K1-E1
gacagatcaacaccactatcttaaaaggccaagtttacatcggccaattcttcttctgatgttgatggtgatgatcccatggagcacaagccattttgctttagacccaccggagaagagaaacagcctcggcttctttcactgcaacggctcgtccgctgaatgctccggcggtaaggttgaggacgacatgttattggagttcttggtggagtcggaaacaagaagaatgctgcagcaaggaggcaatcggccttcgactaacacccttaagcctaatattgcagcttgtggtcgtgacaagtacggctacttatgcactccgccgagcaacaaagatgttaaaagatctgaaaactgtggaggggataacttcaatcgtgcctgccaccaattatccaaatgagcag

SEQ ID NO: 31901 - DNA, 334 bp, Gossypium hirsutum
  Clone ID: LIB3148-055-Q1-K1-E10
ggcgaacatggataagttgcaacagttgatgcattccagacccaagaaacctaggcctgtgattcctggtccccgtcttcccaagggaccaactatcgaataccaggagaagattggtctcagggctttaaagttaccctcagcagacgctgtagttgttcgaaggactcttgttactctgatggagaacccccatggtctccctgggatcaatgagagtcctgaacatattggaaagagggaggcctactggtcatcagtgaagccagctcattttggagtgaacatagcatctaaatacctattaggcatctaccgaatactcggagttggg

SEQ ID NO: 31902 - DNA, 352 bp, Gossypium hirsutum
  Clone ID: LIB3148-055-Q1-K1-E11
ccctataaaaatgccaccatatttcgtcatttaactctgggggattttgaactacaggatgggccggtcggggtcaatgatgctgagctcaaggagcgcataattcaacacttggctgctgctgctgcaatggggcagagcacaccatattttgagaagggaagctctgaggaatacgccatcagctcaaggacgtcgtccacagtacttggtcttttatcattcaaatgatgaaccctactcgtgtggccccatatcttcattatcttcaactcaaagtgaaggagaaccggtccctacgatcaccgttggatcttcctcttttcctgaaagaacagccggggaagaattt

SEQ ID NO: 31903 - DNA, 187 bp, Gossypium hirsutum
  Clone ID: LIB3148-055-Q1-K1-E12
cccacgcgtccgtaaagaacatgactttgtttaaaacaaaaaaaaaaaaaactcaagcgacggagcccataactattgcatccccctcgcacccaaaactttcccccagttagatttataaacatcagaagctgtgccccccaataccccgctccttcatttcttttcctcccaacaaaaacgcccc

SEQ ID NO: 31904 - DNA, 174 bp, Gossypium hirsutum
  Clone ID: LIB3148-055-Q1-K1-E2
gggaaaatgaacaacaaagagaagcagagaggcctttgtctttttaactaaataaattctattactttagtatgtatcagcaaatcttcatgaggatttggttcttaattatgtgtaatgtgggcttttctgctatgtcagaatgtattatgatatttaagaaagtttgttttc

SEQ ID NO: 31905 - DNA, 371 bp, Gossypium hirsutum
  Clone ID: LIB3148-055-Q1-K1-E3
cccacgcgtccgcccacgcgtccgcccacgcgtccgtccacgcgtacgcccacgcgtccgggtgcaagtaagagtgggtaaatttagatccatggggcatggtattgggatctgttttgatgtattttcgttaaagcaatatattttttaccatatttaagaatgcaaacatcatttgttgtgtgaaagaaatgaaactgctattaagtgaagaaaacaaaacaaaaaaagatggtatgtataggaggcaatataacttgggctgacgccctttgaggctcatgttgctccttgcggacaatgacaagtgctgctacttattaggtgcgacatataacaaaaatgtttactgatgttataaatgtgggggg

SEQ ID NO: 31906 - DNA, 396 bp, Gossypium hirsutum
  Clone ID: LIB3148-055-Q1-K1-E4
cagttattaaacgcaggtctcattcattttcagtgcgtttaataacccctttatacgccatggacatgaagaaggtctccaccgccatcattgttgctgccgcctcaatgagcgtcgtcatggctgccggtgcaccatctcctgccccttcagccggtggttctagtcctagctcctctcctggttccgccccagcatcaggaccggattccagcgtggctgccgctaccttgcctgttcttggatcattggcctccattgtttctttgttttcttacatgctgcaataagttacatgtatgaaaaatgaacatgtcaacgaatgttttattttattcttttcgaaagaaacatgtgatgaattttgaaaaaattgaataaaatggagctttgaat

SEQ ID NO: 31907 - DNA, 355 bp, Gossypium hirsutum
  Clone ID: LIB3148-055-Q1-K1-E5
cccacgcgtccgcccacgcgtccgcccacgcgtccgcgttaccatcctcaactgggcctgggtcagaaatgatcaggcccgggttgagacttgctaccagattgccttggccatcaaggacgaagtggaggatcttgagaaggccggtatcaatgttatgcaaattgacgaggctgctttgagagaggggttgcctcttagaaagtcggagcacgccttctacttgaaatgggctgggcactccttcagaatcaccaactgcggtgtacaggacactacccagatgcacactcatatgtgctagttccactttaatgacatcatgcactcaataatttacatggatcctgatctg

SEQ ID NO: 31908 - DNA, 264 bp, Gossypium hirsutum
  Clone ID: LIB3148-055-Q1-K1-E6
accacacgtacgcccacgcatccgcacactcttatgatagacggaaaacaactggaccatgggcgtatcatgtttgactgcgaacagcacaaaggtttctgtatcttgtatgactacaacattcatacaggtttatttattgaatattctaagaagacttttacattttaattttattaatatgcttaaaagactctggctcttaaattgtggtcgacaggtaaacaaaactagctttttttgatagctttggaggtgaaattc

SEQ ID NO: 31909 - DNA, 341 bp, Gossypium hirsutum
  Clone ID: LIB3148-055-Q1-K1-E7
cccacgcgtccgcccactcttccttttatttttataaaaaaaaaaaaaaaaatatctgataggggaaatattttataaggttcggccacacaaaaaaaacaaataatatttattacaaattgggtgtcccttttaaagaatccaattttttttccccttcctttcaacatattatttttttttttttgacccttaaattcatttcattggccgtgattttacaacttcttaatttgaaaaaccttttttttccccaacttttttcctttccaccccttccccttttatcctttttgattaatattaaaaatcccccacctttttccctttttctaaatttt

SEQ ID NO: 31910 - DNA, 406 bp, Gossypium hirsutum
  Clone ID: LIB3148-055-Q1-K1-E8
ataatttaagaggaaaatgactttcagtggaacaacagagaaatgcaaggcttgtgataagactgttcatgttattgatttattaacagctgatggcatttcttatcataagacttgcttcaaatgtagtcattgccatggtgtgttggtgatgggaaactattgctcaatggatagtgtcctgtattgcaagccacactttgagcaacttttcaaggaaactggcacttaccaaaataagaatgcaaaaccctcctctgaaaattcgaatggaacgggaaaggctcctagcaaatttgcatcattcttctctggtacacaagacaaatgtggtgcctgtaagaaaactgcataccccttagagaaggtgactattgaaggagaaaactaccataaatcatgcttt

SEQ ID NO: 31911 - DNA, 359 bp, Gossypium hirsutum
  Clone ID: LIB3148-055-Q1-K1-E9
cccacgcgtccgaaaaaataaaaaattaatttaaaaaaaaaaaaaaaaaaaaaaaaagagaagaggaaaaaaataaaaaatataaaagaataaaaaaaaaaaaaaaaaaaaaaaaaaaaaaaaaagggggggcctttttaaaggatacaaattttgtttccttttcatgaaagattataattttttttataggaaaagcaaaattaatttaaagggccgaattttaaaaacatgtgaattggaaaaaaactgtgtttatcaaaataaaataagtttaaagaaaattccctttttccacaatgttgtaaatggaaaaaggctcgatctaatgatctttaaaaaaatgatggaaatcttaa

SEQ ID NO: 31912 - DNA, 388 bp, Gossypium hirsutum
  Clone ID: LIB3148-055-Q1-K1-F1
gtcctgatgctcagattacttaattctgaccaagatcatgttggagggtccatcatatcttgtgtcaagggattttccaagctcctgcgagcaagagagcaagtggatttataacacttttcatgtaaccgagctcgcaagaagcaagtgccagatggaagatggagaagaccagatgatgagaaaagttctcaagccactcgaaggtgatgaaaacaagggggaaaaggaggatatgtcccttgcccagtttgactgtccagataaccaccgccacgcaggtgatcattcagaaacaagtttactgatccagcagcttgggcaagacatctcaattaactgtctcctccgctgctcaaggtctgattatggtgccattgcatctttg

SEQ ID NO: 31913 - DNA, 343 bp, Gossypium hirsutum
  Clone ID: LIB3148-055-Q1-K1-F10
gtggagcggattcgccattcgacttgcccttgaaggatgatgacagccttactagctgcccaccattttcagttccaaattacatgacaccaacagtttcagcgaaggccaaatcatgagccaacagcaatctgaaggagatgttcatggggactccaggaagcgagtcatcgaagaggcgggtttcattccctttgacacaagggataggatcattcaagtggagcaaagggtctttgttttcaggcaaggattcaagctctcaaaagggtttagataagaaccaatcgcttcaatctataggtaatttgagtgtggattcaaccgtttcaatgcctgctac

SEQ ID NO: 31914 - DNA, 394 bp, Gossypium hirsutum
  Clone ID: LIB3148-055-Q1-K1-F11
gagaatagcagtgttaatcttcctccagggttcaggttttatccaactgatgaagagcttgtggttcatttccttcaacgcaaggctgccctgttgccttgccaccctgatgtcatccctgatcttgaactgtatccccatgatccttgggaacttgatggcaaagctttgggtgaggggaaccaatggtacttttacagtagggggacgcaaaacaggattaccggcaatgggtactggaagccaatgggaatagaagaagatgttattaatagcagaagcaagaaagttggcatgaaaaagtatttggttttctacattggagaaggccgggctgccatcaaaaccaattggataatgcaggagtatcgtctttccaagtctgattctagct

SEQ ID NO: 31915 - DNA, 368 bp, Gossypium hirsutum
  unsure (1)..(368): unsure at all n locations; Clone ID: LIB3148-055-Q1-K1-F12
cccacgcgtccgcccacgcgtccgctttgattaaccagacatctcgcgtagctctagaggaaatcaagctgaagnncatggacacctcatcaaaattcgggcacggacgtttccagactacacaggaaaaacagaaattctatggtcgggtcaaggcataaatctgcaaattggtcaggaatttccggctatcgtatgtttaggttttgctattctctgagcttagtttatgctgattctctattatgttttgaaatgcattggttggattaattttgttttatcaactctttttgaatgtgtgcacaactggggttctggaccagttagaattcttgcatcaaaaccaatagaatcatgtatgagaa

SEQ ID NO: 31916 - DNA, 408 bp, Gossypium hirsutum
  Clone ID: LIB3148-055-Q1-K1-F2
gaagaaaatgccgtctttacaaacagcgctgccccctgagcttgctaacaacgttatcagactttaccgggagtgtcttcgaagagctaaatatataggccataagcaacataatacagcattggttgttgatatggtgagacagcagttcaaaaagcatatgcatgagacggatccagagaagattcagaagctgaaggatgatgctgcaaggggactaattaaccacatactctatgagtctgagaagctatctggacgaaaattcagcaatagctcttgatagagttggggtttttatttgagatattggtattagacaaatttcatgactgctcaactaagtaataaacaaaggcttgaattttggtgttcataatgagttcgactgtgtgctgcattgaactt

SEQ ID NO: 31917 - DNA, 320 bp, Gossypium hirsutum
  Clone ID: LIB3148-055-Q1-K1-F3
cccacgcgtccggagctaccaaggacaatgaatattctgatcttttctatgctatcccatggtctgaaggaactcttggatttcttgttgctgccgaaatcaagcttatacctgttaaagaatacatgagactgacatacacgcctgtagtggggaatttgcaggaccttgctcaaggatatatggactcttttgcacccagagatggtgatcaggataatccacagaaagttcccgattttgtagaaggcatggtctactcacccactgaaggtgtgttgatgactgtgagatatgcctttaatgaagaagccactaag

SEQ ID NO: 31918 - DNA, 411 bp, Gossypium hirsutum
  Clone ID: LIB3148-055-Q1-K1-F4
cccacgcgtgcggttgaaatgaacaaaacgattgtgaagactagacagtgggaacaacagcagcggatgctagttgatcttgtagggggtgaatggactataatgatgggatatgacgtgttgattcttttttatgcggggacaccccttttgtatatatctatgatagtaaatgagctaacgttgctcttaaacatgctcatctgtattgcgacatactgtatccttgagtacgcctgcataaataaagacaaggactaagatttttaattgcatgatgccttgcgttaatatattaataacaaaacgttaagtgtctacgcatgttaacggtattcagcggctataagcggattttaagcgggcttgaggattctttgtttaaatcaactcttattataataaatgaaa

SEQ ID NO: 31919 - DNA, 348 bp, Gossypium hirsutum
  Clone ID: LIB3148-055-Q1-K1-F5
ctttacattgttgagaatatcaatgttgctgctattgaaacaaccttatggtcaattgaagggggcattgctgagcttgtggaccatcccgagatccagcagaaactccgcaacgaaatcgacaccgtactaggacccggcgtgcaggttaccgaacccgacacccataagcttccatatctgcaggcagtgatcaaggagactctcaggctccgaatggccatgcctctactagtcccacacatgaacctccatgatgcaaagcttggtgggtatgacatccttgcagagagtaagatccttgtgaatgcatggtggttagacaataacccagctcactgtaagaac

SEQ ID NO: 31920 - DNA, 198 bp, Gossypium hirsutum
  Clone ID: LIB3148-055-Q1-K1-F6
cagacgcgtggtatggaatgaatgtgaatgcttgtcaaaatatttgaatcatctggattggtatatgccgaaaaaacgaagagaaaacacaaaagtcaaaaacggggttgtctgcggtgtattgtattaataacgtgcgatgaatcagacaagctatgaatgtactatgaatccatgagtttaattttttcacttgaa

SEQ ID NO: 31921 - DNA, 406 bp, Gossypium hirsutum
  Clone ID: LIB3148-055-Q1-K1-F7
ggaagatcacccttaagagctcagacggcgaatcattcgaggttgatgaagcggtggcgggggagtcgcagacgattaagcatatgatcgaggacgattgcgctgataacgggataccgttgcctaatgttacgagcaagatcttagcgaaggtgatcgagtactgcaagaaacacgtcgaggctcctaagacagacgatcgatccgccgatgacgagctcaagagttgggacgctgactttgtcaaggtcgatcaagctactctctttgatctcattctggcagcgaactatttgaacatcaagggcttgctggatctcacttgccaaactgttgctgacatgatcaagggaaagaccccagaagagatcaggaagactttcaatatcaagaatgacttcacccc

SEQ ID NO: 31922 - DNA, 397 bp, Gossypium hirsutum
  Clone ID: LIB3148-055-Q1-K1-F8
cccacgcgtccgcccacgcgtccgatcccaaaccagatccagtcgagaaagaaacgaatgggtcggcactagcagggtcaggggaattacctaggcagtcattgagtaaaaccaaaagtaccctatggaggatggatcttcaagctcttggaggttcctacaagatcaaaaggctgaagcaacaacttctcttgctctagaggttaaccggaaagcaagaaactgtggaggacacggagggaagccaccgcaacctgatgaaaggctttctactgactctatctttactaaacaaacaagacagccgctatcattgcctttaagggaagaccgacgatctattgtaactgatgcacttcgatgtcatatacatgaaccaaggagattgtagtactac

SEQ ID NO: 31923 - DNA, 293 bp, Gossypium hirsutum
  Clone ID: LIB3148-055-Q1-K1-F9
ctggagaaggcgcgtgtggacttggcgcggtatgcgcaacaagcgcagggatctggttcggctacggcgcaagggcagaaagctgctagggctgacgcacaagtgttttccagaaacccctagggatttctggaattcggaccgttttgatttgggcttaactgggttcatggtttgggtctggtatttgggttaaataagctaatgtaaatcacactaaattaggattggctttcattgctgggccatacggctgtgctgcatgtatttgctatctgaaatactaaacgcta

SEQ ID NO: 31924 - DNA, 256 bp, Gossypium hirsutum
  Clone ID: LIB3148-055-Q1-K1-G1
gatttgtaatattagctgactttcatttctttctttgttcctctgcccattggatgtggggggcaatggaaagccactccatttgagcattgaggaaagtatagatttgttcagagaaaaagaaaaaagaaaaaagaactacaccatgaatttagataccgatgtattttctgatgtcggaaattgtagagttaagatgatagggcgaaaagcctattgaattgaaaatgaaattcttttactattcgttttcttc

SEQ ID NO: 31925 - DNA, 302 bp, Gossypium hirsutum
  Clone ID: LIB3148-055-Q1-K1-G10
cgtgatcttgtcgacgacgtaataacagtttacgatactgaaataatcaaagcaatgagactctgctatgagatccttaaagttgcagttgaaccaagtggagccataggcctagcagctgtcttatctgatagcttcaggaccaaccctgcctggaaggactgcaaccaaataggaattatactttcaggaggtaatgtagatcttgaagtgctgtggaattcatttagcaaatgaaatttaccattgtgattgctactcctatttaaaccttttttccttttaaacttcgctttgatctc

SEQ ID NO: 31926 - DNA, 278 bp, Gossypium hirsutum
  Clone ID: LIB3148-055-Q1-K1-G11
gttctgttaaaagcataaaaatggaatgaagtatcttcttttcaaaaaaaaaaaatgaaaagggaaatataaaaaaataaaaatgacaaaacaaaaaaaaataaaacataaaaaaaaacaacaaaataataaaaaaaaaaaaagaacaaaccaaaaactaaaaagacaataaaacaaataagaaccatattataggggggggcccgtttaaaataaatcaactttaaaaaccattcatgtaaagaagatttattattttttgggatacaaatataaaa

SEQ ID NO: 31927 - DNA, 415 bp, Gossypium hirsutum
  Clone ID: LIB3148-055-Q1-K1-G12
caatgattttggaagtgaaataattccatgttctacttccattgggatgagggtgcaagcggacctgtatgatggctactgggaggacattggtacgattgaggcattttataacgcaaatctgggaatcaccaaaaagccagtgccggatttcagcttctatgaccgttcgtctccaatctacacacagcctcgatatttgccaccatccaaaatgcttgatgctgatgttacagatagtgttatcggtgagggttgcgttattaagaactgtaaaattcaccattctgtggttggtcttcgatcttgcatctccgagggtgcaatcatagaagataccttactaatgggagcagattattatgagactgatgcagacaggaggtttttgtctgcaaagggcagtgttccaatt

SEQ ID NO: 31928 - DNA, 368 bp, Gossypium hirsutum
  unsure (1)..(368): unsure at all n locations; Clone ID: LIB3148-055-Q1-K1-G2
gaccatctatgggtgatgtgctgtggaaccttgagtttgccttgcagctgcaggagagtgcagaagagagtgggaagggaattggtgaaatggacatggaggaggggagctatgaaggaacctgtaaagggaagaaagatcctaatgcatccctggggtttgatggtaacataactgattctaggagcagcgggatgagcatgagcatcggtggtcgcagcctggctagtgaagacttagagggtttgacacctagtgctgttttctcacagatcatgaaccctaaagggcgttgagatgagaagtgcacaagtgattgttgcatgacttgagcatggcatggaatggaatataggaatattgngttt

SEQ ID NO: 31929 - DNA, 388 bp, Gossypium hirsutum
  Clone ID: LIB3148-055-Q1-K1-G3
cccacgcgttcgggcaagactgttgcattggttggagaaagtgggagcgggaaatccacagtaatgtcattactgcagagattttatgatcccaattcaggacgtatcagtctcgatggtgtcgacatccaaaagctccaattgaaatggctgaggcaacaaatgggacttgtgagccaagaacctgttttattcaatgatacaatccgtgccaacattgcatatggaaaaggaggaaatgcaaccgaggcagaaattttagctgcatcagagttggccaatgctcacaagttcattagttcactacaacagggttacgatacggtggcaggggagcgaggagttcagatgtcaggaggacagaagcagcgcataaccatcgcacgtg

SEQ ID NO: 31930 - DNA, 364 bp, Gossypium hirsutum
  Clone ID: LIB3148-055-Q1-K1-G5
cccacgcgtccgattttatgcagtctcttatgtaatattaacttgcagggctatataatgggttatcattgatcctttctgtaatttatattaatgcaatctcattatgtaatagggataaaaaaaaaaaaaacaaaaccaataatacaaaaaccaaaaaaaaaataaaaaataactaattaaagaaaaaaaaaaaaaaaatctaaacccctataaaaaataaaaaataaaaatgaattatctattttgttttttccttaaaacaaatttcaaataaaataaatcaaccaaaataaatataaaggggtgcactttttaaaaataaaattttttttccctctttttttcaaaaaaaataattttt

SEQ ID NO: 31931 - DNA, 367 bp, Gossypium hirsutum
  Clone ID: LIB3148-055-Q1-K1-G6
cccacgcgtccgtgactttttacgcagtattcatgacggcctccattggaatctgagaaagacgcagtcatttgatggccctcgggatcgggatctataaggtcattttccgaacttatatctagctggaatctaacttatacattccatatgtttcagtcattgtaggaaggggaaatcaaattcacaaaaactgaaatagctgtaagttcttgttatatcacagtattatggtttacccttaaaaatgttttccccttaaaggttgtaggaaggagcactatatttgcccttctgatgctgcagatataacctaagttgtagtcaacactagattatatttagatctttattatgagatcaaaag

SEQ ID NO: 31932 - DNA, 213 bp, Gossypium hirsutum
  Clone ID: LIB3148-055-Q1-K1-G7
aggtgatccaaatcgatgcagctatgacaatccaccatccagaggtctccagtcttgtttgctatcgccgccttctctaagaagctgttaatccttggaattgtggctgctcaagactcactaggtgtcgaagttaatgtatattttgataatataagacggaacctttcttatataaatatataaatatagaaacctccacatattaatgca

SEQ ID NO: 31933 - DNA, 425 bp, Gossypium hirsutum
  Clone ID: LIB3148-055-Q1-K1-G8
tccaggcagtgtggactcaaaagtgctcatctccgacgttgaattctcaaacatcagaggaacaacaataggcagaattgctgtagtcctagcttgcagccaatcatttccatgcaaaggcattaccctcaaggacattcacttagagtataccggtgatcccgatcataatgaagacactcccttcagttctaactgcaccaacgtcaaagttaactacatcggcgagcagctgccaccgccctgcgcttaactcttatctcttcatggcggtccaacaactcccgtttattattttttattgtgtctgagccaaatgtaattgaaggagctacttcaatggaataatatagcgggcgttgggtgttctaaaaaaagtcggattagtgcttaaattgatggtattttttttaatatcggatgta

SEQ ID NO: 31934 - DNA, 375 bp, Gossypium hirsutum
  Clone ID: LIB3148-055-Q1-K1-G9
cccacgcgtccgctagtgctgctgatttttctaagaggagacaaagaaggttgtctaaaggtgtcaactccaaagggtttcacttcgaaaacacgaatgagtactcagaagagaaaacaacaaaagaataatgaacagaaagaggattctagcattcccaagttgagtgagtttgtagagccaaataatagggaaattgaattgaaagtagatgaagttgaaaataaagaaggaaaagaggatttatcatcaattggaaaagagttagatattcgcttaagcaaccataatgttgtaaatggaaatggaaatggaatgattcttggatatgttgtcgggttggagaagaaagagataaattcggaaaatggcact

SEQ ID NO: 31935 - DNA, 292 bp, Gossypium hirsutum
  Clone ID: LIB3148-055-Q1-K1-H1
aaaaaaaaaaaaaaaaaaaaaaaaaaaaattaataaataaaaaaaaaaaaaaaaaaaaaaaaggggggggtatataaaaaaaaataaagataaaattaaaatgcatacaaaataaaaaaattttgggtggtgtttctgtggggttcactactttttgtcttcttttttccgcgtccttactttttttatttggccgttttatttcattattttgcctggttttatccacgttttgccgtggtaaaaccttttggtttacctctttatttttcttgcttaatatccttttttt

SEQ ID NO: 31936 - DNA, 261 bp, Gossypium hirsutum
  Clone ID: LIB3148-055-Q1-K1-H10
cccacgcgtccgaaaggccaggtacccaactcttgggctaatgccatcttacttgtagataatgggtttggttttgtcatgaaaataaatgcaaggcacaatgcatgatcctatttggtgttcttttcgaggttggagtgcttatatatatgtttagccttgttatcctgttgaaatatttgattatagccattgaattcactagggttgtacttgacactgctattgtagatgaacaagcatgaattttgctctggtttg

SEQ ID NO: 31937 - DNA, 296 bp, Gossypium hirsutum
  Clone ID: LIB3148-055-Q1-K1-H11
tttttaaaaaggtttatagtattttttctcctctttgtaaaccctaaagtttatagtatttggcgattttgtttctctgttaataaaaatgggaagaggaaaattcaaggcaaagcccaccggtcaacgccacttctctactcctgaagagatgcttgcgggtacctcatctcgtcctcgcacttttaagcggcaagaagctgcatacaaagaggaagaagaatccgaggaggaatctggacaggagtctggagaagaatccgaagatgaaactgaacaaaagcgcaagggaactc

SEQ ID NO: 31938 - DNA, 454 bp, Gossypium hirsutum
  unsure (1)..(454): unsure at all n locations; Clone ID: LIB3148-055-Q1-K1-H12
ccggaattggaggaacgaccccgacccacgcgtgcggnagganaaaagcaatacaaagattaattttgtgtgcaaaccctaaagtttatagggttgggggattttgtttctctgtggataaaaatgggaagaggaaaattcaaagcaaagcccaccggtcaacgccacttgtatactcctgaagagatgcttgcgggtacctcatctcgtcctcgcacttttaagcggcaagaagctgcatacaaggaggaagaagaatgcgaggaggtatctggacaggagtttggagaagaatccgaatatgaaactgaacaaaatcgcaagggaactcaaggtgttattgaagtcaacaatcctaatttggtgaagccaaagaactttaatgctagagatcttgaagcttgttaaactactgaacttgtcatgtgtgaaagggatgaactagaaaattata

SEQ ID NO: 31939 - DNA, 284 bp, Gossypium hirsutum
  Clone ID: LIB3148-055-Q1-K1-H2
cccacgcgtccggcagaaatgaacaaaatgctgctgaagaagaacaatgggagcatcacagcagttgtcatggatcttctaggtggagaaggggcttaaatgaggggatatgacggttgattctttcttatggttggacaagccttttatatatatatataaaaataaataaatgaagcgtgcttctaaacctggtcatcttattccaacatatgatatccatgaatttgtatccagaaagaaagaaaaagacttttaatattaattccatgacacctttcttt

SEQ ID NO: 31940 - DNA, 202 bp, Gossypium hirsutum
  Clone ID: LIB3148-055-Q1-K1-H3
cccacgcgtccgtgctagatgagtttttttggttaagtttattattctttcaatctactaattaattcctcaagatgctttacttgtgtattagtgtttttcccccttttggccaaatacttgtgtatcataggttaaaatatgccacaggttcctgtaattttcacaaaattagaatttaatcctagagtttagttcttct

SEQ ID NO: 31941 - DNA, 168 bp, Gossypium hirsutum
  Clone ID: LIB3148-055-Q1-K1-H4
ggctgatggagctgctcgacgtttggcacggtgctataatttgagggtttcagatgactcaggcccttctacctttcactgacatgcaacaaccctatgtactaacgtaagtagagaggacctttacttgtagagaggatctttacttggcatgtattagaacacttc

SEQ ID NO: 31942 - DNA, 213 bp, Gossypium hirsutum
  Clone ID: LIB3148-055-Q1-K1-H5
aaaaaaaaaaaaaaaaaaaaaaaaatttttttttataaaataaaaaaaaaaaaaaaggagaggtacaaataaaaactttgcttgggttataaaaaaaccacttctcctttcgtctgaaacaatgcctcttatcttttaaaaatataccactactttcctttttttttcacaacatttaaaatgtaatcctagagtttagttcttctacaaaaa

SEQ ID NO: 31943 - DNA, 322 bp, Gossypium hirsutum
  Clone ID: LIB3148-055-Q1-K1-H6
atcaacattaacatcattcaagtcatttttattaacaatattaacatcattaaagagaaaggaaaaaaaaaaaaaaaaaaagaaaaaaaaaaaaaaaaaaaaaaaaaaaaaaaaaaaaaaaaaaaaaaaaaaaaaaaaaaaaaaaaaaaaaaaaaaaaaaaaaaaaaaaaaggggggggggttttaagggaccaaagttaacgtccccgggcatggaaagaaaaattttttttatgggggcaccaaaattaaattaacgggccggggtttaaaaacggggggatgggaaaaacccgggggtaaccaaattaaatggcttggg

SEQ ID NO: 31944 - DNA, 198 bp, Gossypium hirsutum
  Clone ID: LIB3148-055-Q1-K1-H7
cccacacgtacgatttccctatatattgtattttattctatctagaaagctaatggaaaaggaataaatatgcttggcttgggaaataaagattttactacttttggactaatactagagtataatatgttaaaatataccacaaagttcctgtaattataacaaaattagaatttaatcctagagtttagttcttct

SEQ ID NO: 31945 - DNA, 411 bp, Gossypium hirsutum
  Clone ID: LIB3148-055-Q1-K1-H8
agccgctctgcttctcggaccacacaccttctcaacctaactacaatgactaagagaacgaggaaggccggaattgtcgggaaatacggtacccgatatggtgccagtttgaggaagcaaattaagaagatggaggtcagtcaacacagcaagtacttctgcgagttctgtggaaagtatgcagtgaagagaaaggctgttggaatctggggctgcaaggattgcgggaaagtcaaagccgggggtgcttatactttgaacactgctagcgctgtgacggtgaggagtaccattagaaggttgagggagcaaactgagagctgagccaataacattagcatacccaactttcgtaggatgtttttgcatgttttatctaaacgtattgaaatttttttttttgacaatgat

SEQ ID NO: 31946 - DNA, 185 bp, Gossypium hirsutum
  Clone ID: LIB3148-055-Q1-K1-H9
cccacgcgtccgcggacgcgtgggttttgttccccttgctcccacacatgccaatgttgtaggagtcagcctacattactttgtacttgattgtaatcattggatacgagatgtatccgacttgggtatggtttaatgtatctggaggatttttgggaggttgaaaaatatatagagactgaagg

SEQ ID NO: 31947 - DNA, 413 bp, Gossypium hirsutum
  Clone ID: LIB3148-056-Q1-K1-A1
atttgagtgaaattagagagttgaatttagtctaaagtggaaattgaatgaaaatatggaattagttttgcagaaataaagttagcctcagtttcgggactaaattggaatttagacaaaagttgaataaatatggaaatattcaaagtgaaattgtattgtattgtattgatgaattttaattgttttaattcacgtagctaatgctgtaccgaaaactttgactaagaaagaaaaagacaaagtcgacgaggagtagctcggaaattctggttaggttaaagtcagattgccgattcagcatccatcaaagatcccaaactcaaaatgtggtgatatatatttctttttgtgtcggcatgtacctagtgtagaagcccaaatttgcccgggccctaccagcaaaacaaact

SEQ ID NO: 31948 - DNA, 402 bp, Gossypium hirsutum
  Clone ID: LIB3148-056-Q1-K1-A11
cccacgcgtccgggattttcaaggaaacaacagaccacttgtataatgcagccactcaggagcgagaaactactttgaatcagctactaatagagcttgatgggtttgatactgacaaaggtgcatactttggctttctgttccggtgttttggattctctggcggttgaattgaaagcatcaaagggattctctaagttatatgcaggcattgcaatactttggcttcatctaagcttgaaccagccctctgttgtatattgtttcttcttcttttttgatctttttcctttgattaatgagaggtaatgatgatttggcattcttttctcactaggatgaattttgttttagaaattgtaatactttgtgtgtgtgtgtgtgtgtttatgtattaaatta

SEQ ID NO: 31949 - DNA, 80 bp, Gossypium hirsutum
  Clone ID: LIB3148-056-Q1-K1-A12
cgactgttggcttgtcatcgatggccgagttctgaacgtgacaaagttcatggaagaacatccaggaagagaaaagtgtt

SEQ ID NO: 31950 - DNA, 409 bp, Gossypium hirsutum
  Clone ID: LIB3148-056-Q1-K1-A2
tacaaacactcggcttctcccagatcttcaccaacctcccaaaatgacaacccgcttcaagaagaaccgcaagaagcgcggccatgtgagcgccggtcacggtcgtatcgggaagcacaggaagcaccccgggggtcgcggtaacgctggaggcatgcaccaccacaggatcctcttcgacaagtaccatcctggttatttcggtaaggttggtatgaggtacttccacaggctccgtaacaagttccattgccccatcgtcaacatcgacaagctctggtctcttatcccggaggacgtgaaagccaaagccaccaaggatgccgctccgatgatcgacgtgacacaattcgggtactttaaagtcctcggcaaaagtgttttgccggagaatcaaccggtggtcgtc

SEQ ID NO: 31951 - DNA, 377 bp, Gossypium hirsutum
  Clone ID: LIB3148-056-Q1-K1-A3
gaacttctagtggacaaaactgagaacttacaattccaggctgatagcttccagaggcaagggcggcaactgcggcggaggatgtggctgcagaatctgcaaatgaaactgatggtggggggagctattcttgtgttgatcatccttttgtgggtttttgcgtgtggaggtttcaaatgttaacgttgataaccattgcattgcctatgttttcttttatatatacaaaaaataataattctacatttgtttagatgtacaaaatatagttatgctcttgactttgtacatggattgctgttgttatgtagcactaccttgccgtttaagatatgtaatcaaagctttgaattttatacttttttgaagttttctaa

SEQ ID NO: 31952 - DNA, 414 bp, Gossypium hirsutum
  Clone ID: LIB3148-056-Q1-K1-A5
aagggatataggtgaattcggttacatagctccagagagttcaagcacaacggttgcttcgatgaaatccgatgtgtacggattcggtgtcgtgcttctcgaattggtaaccagacaaaaacccctagaagttaatgcaggtgaagaaggattcaaaggtggtttggtggattgggtaaaccatctctcaaacacagggagaatcaaagatgccattgacaaagatctgtatgggaaggggcatgatgaacaaattgtgcaggtcctcaaaattggatgcaactgtgtggttgctcatccaaagaagagatggtccatgttcaaggtttctcagtcattgcgaaccatggctgaggaaaatggtttatcagaagagtttgatgatttccctctgattttcacagaccaagatga

SEQ ID NO: 31953 - DNA, 407 bp, Gossypium hirsutum
  unsure (1)..(407): unsure at all n locations; Clone ID: LIB3148-056-Q1-K1-A6
ctccgctcccctttctcgggcctttttaaagaattccgtttttgtaaaataaaataataaaaaaaacattgcaggtttggaccatttggtaatttgctctttctttgttagcactggtttcgaaatttgattgtgtactatactgttcagttgtactttctgtattttagaatttattctatttttattttcatttttcaaaatttcagatagataatgtcgttgaaatttttctgttaaatttatttgtattacattttaaattttaatttttttaaagtacttactagattgctgtgtaacaaagaaaatgacattgtaataaatctaaatttaatagacaatttctactgtattagttnnnaaaaaaaaaaccggaaaaacactaacattaaaaacagccgaaa

SEQ ID NO: 31954 - DNA, 207 bp, Gossypium hirsutum
  Clone ID: LIB3148-056-Q1-K1-A7
gggattgcaagttatattccaagagatctctctctcaattttctttttagttcttcacctttctcttttgcttattatcttttcttcctcctttttcattttttctttgactttttcacttgtattgaagcaaagtttgaataaggcagatcgaaaagactgtaattaagatcatgattttatgaaatctagaagctgtttaatgtt

SEQ ID NO: 31955 - DNA, 411 bp, Gossypium hirsutum
  Clone ID: LIB3148-056-Q1-K1-A8
tccaagataaggagggtatcccacctgaccagcagaggttgatttttgctggaaagcagctcgaggatgggaggacacttgcggattataacatccaaaaggaatcgaccctgcatttggttttgcgacttcgaggagggatgcagatattcgtgaagaccttgaccggtaaaaccatcaccctggaggtcgagagctcggacaccgttgacaatgtgaaagcgaaaattcaggacaaggaggggattcctccagaccagcagaggttgatttttgctggaaagcagcttgaggatgggaggacacttgcagactataacatccaaaaggaatcgaccctgcatctagttttacgacttcgaggagggatgcagatattcgtgaagaccttgaccgggaaaacaatcaccc

SEQ ID NO: 31956 - DNA, 332 bp, Gossypium hirsutum
  Clone ID: LIB3148-056-Q1-K1-A9
gccacgcgttcgacattacccattttatcctgtgtctttacttctatgaatctatccacgtggtatatagaaaaagcctttatgatgaaaaaaactgatagaataggggttgtaatatttggccccattgttgttcagttttgtggcagggtgtgtggatgactgtgttatactttaagacgatggcttagggacggtccagattttctgtaattgtagttttaaaacctcattatttatagagcatgatggaaattattatgacgcgtctatatgctttacttcagaaaatagggcttttcttgttttttattaagctcacatctcctaaa

SEQ ID NO: 31957 - DNA, 253 bp, Gossypium hirsutum
  unsure (1)..(253): unsure at all n locations; Clone ID: LIB3148-056-Q1-K1-B1
ctcaaatgtattgtgttgaataaaagcatttatatagcttcttatccatcgtcttaccttaaagcattgaagagatactagtaagttcaataattatgtatctttatctagattttgtgttcaataatattatataaaaaaaaaaaaaaaaaaaaaaaaaaaaaaaaaaaaaaaaaaaaaaaaaaaaaaaaaaaaaaaaaaaaaaaaaaaaaaaaaaaaaaaaaaaaaaaaaaaaaaaaaaaaaaagganggg

SEQ ID NO: 31958 - DNA, 238 bp, Gossypium hirsutum
  Clone ID: LIB3148-056-Q1-K1-B10
cccacgcgtccggctaacaacctaaggatgatgttcactagtggtatatatgggatggatgaggttgtgtgcttcaggttggatatatttttctaatattaccttattatttttcaaatttcttttagaatgattctcattttttccttcttgtttctattttagttggtatagagagcatttgataccgtatcgagttttggttggtttgaaacatttttcacctcaatttttttgc

SEQ ID NO: 31959 - DNA, 234 bp, Gossypium hirsutum
  Clone ID: LIB3148-056-Q1-K1-B11
cccacgcgtccgcccacgcgtccgcccacgcgtccgctgaattcgctttgtttgttgcatgtgggattcaattagacttccatacattgtttgttgtatagattctttggtccttttgctcaaatttgcaaactactagagcgtgaaaatgaacaaaaggttccaaagtaatgtagaaagacaacatgcatgtagcatatgtttcaatgtagagaataataattttcaatcatt

SEQ ID NO: 31960 - DNA, 403 bp, Gossypium hirsutum
  Clone ID: LIB3148-056-Q1-K1-B12
atttggatgcttaaggaaatgttgctgctgtatatttgcccatccaaggatcaaaactctaatgttttgtcctactatgtgttatattatgtgcctacttaagctacctttcccggttatcaagagtgcctatatagaactctctctctctcaaaaaaaaaaaaaagagaaaagagttctttatatggagttttatattatatgctgagagaataaattatcttgtaaaagcttgctttgttaatgaaataaatttctattactaaaaaaaaaaaaaaaaaaaaaaaaaaaaaaaaaaaaaaaaaaaataaaaaaaaaaaaaaaaaaaaaaaaaaaacaaaaaaaaaaaaaaaattaaaaaaaaaaaaaaaaaaaaaaaaaggggggcggccgttttaaagaa

SEQ ID NO: 31961 - DNA, 71 bp, Gossypium hirsutum
  Clone ID: LIB3148-056-Q1-K1-B2
cccacgcgtccggaaaaaaaaaaaaaaaaaaaaaaaaaaaaaaaaaaaaaaaaaaaaaaaaaacaacagat

SEQ ID NO: 31962 - DNA, 349 bp, Gossypium hirsutum
  unsure (1)..(349): unsure at all n locations; Clone ID: LIB3148-056-Q1-K1-B3
tgtacatcattgtaaattgatctgacacatttcgatattgatgcaggaaattgatctgacaaactcaagtgaaatcttaattgaagcacatttcattctagttatgtttatgttttctttatgtttgatgtgtataacaagtaaggtgaaaataaagagttttgtaagagaaaattcaaccttgnaaaaaaaaaaaaaaaaaaaaaaaaaaaaaaaaaaaaaaaaaaaaaaaaaaaaaaaaagaaaaaaaatataaagaaaaaaaattggcgaacgnttgaatggaaccaaggttcctttcttttgtgtgccccgtattaacttttttgtcgggcgacctaaatcaaat

SEQ ID NO: 31963 - DNA, 358 bp, Gossypium hirsutum
  unsure (1)..(358): unsure at all n locations; Clone ID: LIB3148-056-Q1-K1-B4
cctacgtgattgttaattgatctgacacattttgatattgatgcaggaaattgatctgacaaactcatgcgaaattttagttgaagcacattgcattctagttatgtttatgttttctttatgtttgatgtgtataacaagttgggtgaaaatatagagttctgtaagataaaattcaatcttgactattacagtggatcgatgtgttcttgaactttgaaacatgaaccaacaaattcctttgttgggttgattacaatggatgaccaacaagagatgttttcatcagccagggtttatgaaattggtcgccgaatgccaactgatgatgattctgatcctgatgatgcanaaagtg

SEQ ID NO: 31964 - DNA, 423 bp, Gossypium hirsutum
  Clone ID: LIB3148-056-Q1-K1-B5
aaaaaaaaaaaaaaaaaaaaaaaaaataaaaaaaaaaaaaaaaaaaaaaaaaaaaaaaaaaaaaaaaaaaaaaaaaaaaaaaaaaaaaaaaaaaaaaaaaaaaaaaaaaaaaaaaaaaaaaaaaaaaaaaaaaataaaaaaaaaaaggggggggcctttttaagggttcaaattttatttccggttgtttgaaaattaatattttttttttggggcaactaaaataaatttaattggccgggtttttaaaaggtggggtttggaaaaaccttgggtttcccaaatttattggttttgaaaaaaatccttttttggccagttggattaataaaaaaagggcccgaactaatcgcttttcaaaaaatttgcccaccttaattggcaattggaaccccccttttacgggccttttaagcggggggg

SEQ ID NO: 31965 - DNA, 408 bp, Gossypium hirsutum
  Clone ID: LIB3148-056-Q1-K1-B6
gtcgagaaaaaatctaccgccaagctccaggactccagatcggttaagaagattgtgaacttggataatcacattgcactggcatgtgctggcctcaaagccgatgctcgagtcctcataaatagggctcggattgaatgtcaaagccacaggctgactgttgaagatccagttactgttgagtatattactcgatacgttgcaggtcttcagcagaagtacactcaaagcggaggtgttaggccgtttggtctctcaactctgattgtgggctttgatccatactctggtgtaccgtcactatatcagacggatccatcagggacattttcagcctggaaagctaatgccactggtagaaactctaactcaatcagagagttcctagagaagaactataaggaaacc

SEQ ID NO: 31966 - DNA, 405 bp, Gossypium hirsutum
  Clone ID: LIB3148-056-Q1-K1-B7
gtctccttaccttaccatgtttctcttacgtttcaggcatatcatatgcttaactatggactttcacaatccgagtatgcgtcttgtcttttgtatttatttttctgtttttcaattaaatatattactaaatatgttgaataaaaaaaaaaaaaaaaaaaaaaaaaaaaaaaaaatgaaaaaaaaaaaaaaaaaaaaaaaaaaaaaaaaaaaaaaaaaaaacaaaaaaaaaaaaaagagggggggcccgttttaaaggatccaattttacttccccttgcttccaacttaataccttttttttggggcccccaaaattcaattcacgggccgtgtttttacaacgtggtaatgggaaaaaccctggctttaccaaattaaatggctttgcaaaaaatccccttt

SEQ ID NO: 31967 - DNA, 406 bp, Gossypium hirsutum
  unsure (1)..(406): unsure at all n locations; Clone ID: LIB3148-056-Q1-K1-B8
cgaagtgtaccttctttagatcaaacagcaataaccttcaatgcacgtggggatgtaatttatgctatcctgaggagaaatcttgaagatgtgatgtcagcagttaatacccgtcgcgtgaaacatcctttatttgctgctttccgcacattagatgccattaactactctgatattgcaactattccagtggatcgatgtgttcttgactttgcaactgaaccaacagattcctttgttgggttgattacaatggatgaccaagaagagatgttttcatcaagccaggtttatgaaaatggtcgccgaangccgactgatgatgattctgatcctgatgatgcagaaagtgacgaggacgaggatgatgatgacgatgatgctgatgtagacccaatacttgggc

SEQ ID NO: 31968 - DNA, 389 bp, Gossypium hirsutum
  Clone ID: LIB3148-056-Q1-K1-B9
cccacgcgtccgaaaaggataaatcctgtaattcatacctcaattctcgttttgcaggtgagtagctcgatcttctcctatggacaagcatactctggtggctaaggagagtgctgatgtcatcattcttgatgacaatttctcaacaattctgacagtggccaaatggggccgttcagtgtacataaatattcagaaatttgtacagtttcaactgactgtcaacattgttgccttaattgttaacttctcctcaacatgtttgacagggagtgctcctctgacagctgttcagctattgtgggtgaatatgatcatggatactttatgagcacttgcacttgcaaccgagccgccaaccgatcgggttcttcagcatgccgatcgct

SEQ ID NO: 31969 - DNA, 402 bp, Gossypium hirsutum
  Clone ID: LIB3148-056-Q1-K1-C1
gcaaactagaaattgttggagacttctattttcagacaaattaagagacaagacgcattatattaccagctgacagcagtgttgttgacaactgggctttttttaaactttttctgtgagaccaataatgcttctcctgtattatacacatttataactgttttgtgcgtgtaataaaaataccatacttttaaaattttagccaatgggaaaggtcttcatttgtgaaatgaagggttttgatggatatgaaaaggattttttggggggaggggtttggggaataaatatttttgaaaaatggcaagtgggggagagaaaaacaatgatttttatgcagatttggggtggaataaagaatgttcttcaacagagcttatgactgctttttataaacttttt

SEQ ID NO: 31970 - DNA, 406 bp, Gossypium hirsutum
  Clone ID: LIB3148-056-Q1-K1-C10
ctgagaccaacctcgattgaaaaagaggtcttcccgaagattgcagccgagaagaagctgtatgcaatggtcctaccagggttttggatggacatcggtcaaccaagggactatattaccggactaagactctatctagactcccttcgaaagaaagcttcacctaagttggccagtggtccaaacattgtaggaaacgttttggttcatgagactgccaaaatcggagaaggatgtttgatcggaccagacgtggcaattggtccaggctgcgttgtcgagtccggagtcagactttctcgttgcacggtgatgcgtggagtgcgcatcaagaaacacgcatgcatatccagcagtatcatcggatggcattccaccattggtcaatgggctagagtagaaaaca

SEQ ID NO: 31971 - DNA, 400 bp, Gossypium hirsutum
  Clone ID: LIB3148-056-Q1-K1-C11
cagaatagctcttcgtaacgtccaccgcatcgttaatacctccgccgtttccggccgtacaacaaccgttttcaggccacagtatggttgggtttcaacatatttttcaactaatattagtaacactcagccattaaacatcgatctttctaacgaagaaagcaaaaggcgtctttataacagattgttgtataggagcaaacaaagaggatttctggagctggatttggttttgggaaaatgggttgaagaacatatccattccatggatgaaaatggaattaaagctcttgttaatgtcctcgatttggaaaaccccgacctttggaaatggctaaccggtcaagaacaaccacccgaagcagtgactcttaatcctgtcttctctgctgtgcaacag

SEQ ID NO: 31972 - DNA, 404 bp, Gossypium hirsutum
  Clone ID: LIB3148-056-Q1-K1-C12
cggacgcgtggggtaatcctgcatatgcctctgctgtaaatgggtcttctatgttggagtgatgaactgcctatgacgctaggatttctccttccccattccatgctattagtcccgatgccgatctgaacgtctgacggtcaaaagctgcgtcgagatgaactgttgcccttccccttttgaacacctggtgacacttatccgaagagtgtaaattgatttctattgaaccaaataagccagagaccacaacagaatattcaaagttgctcaatatttccttgtccaaagattccaggcactgttgaaagatatggtaactgttttcttcttcacaatcacacctgggacattgagtattcattactactcacttggttttgaggttgcaaaaggatgggata

SEQ ID NO: 31973 - DNA, 396 bp, Gossypium hirsutum
  Clone ID: LIB3148-056-Q1-K1-C2
gtccaacctgtgacgccgatacctgtaccccttccgaatatctccgtcaccagaaatccatcatgaagagccagcgcaacgcgcttctcatcgctgccgctcttattttgtactggcttctttactctgttactaaccttgttgttaagatcgagcagttgaatcagcgagttgagaggcttaagaatcgcgattgagataagtgctgcgaattttagatctgttgtatttgggctacttctttttcttttctttttaataatctttttgtttgaatttcatctctgatgtgtttggatgatttgagagatttatcttgaaagaattatatgttgttattattggatctctgttattcaatttcgatttgattaaaaaaaagttggggtttggttc

SEQ ID NO: 31974 - DNA, 415 bp, Gossypium hirsutum
  Clone ID: LIB3148-056-Q1-K1-C3
cttggatttgggctagtttggctctcctgggcagttaacagactgagggacacgattgtacatatcagcatgaatactggcaagttggatatgaaggaaaaagagatgattaagagagttgagaaaagtgttgatgacatctacttaagagctgcaacattgatggctgcagcgatgttaaggtttgtatgaattctgaagatataactgatttggataaccatctggactggctgagtgtttcagcaacagaaaatattgacatctatggtcttgtgatgaccttgagctcatatgagcaggacctcagcatctgccagcttgtatatgtataataatcattaagcgctatgaatggagaagaaggtgaaaacctttgatgtaaaaaggtgcaaacattgcttctaaattgtat

SEQ ID NO: 31975 - DNA, 73 bp, Gossypium hirsutum
  unsure (1)..(73): unsure at all n locations; Clone ID: LIB3148-056-Q1-K1-C4
cgtccctttttacgcttataaattttgtaggtatggttcatttcgttgtcannnggcttaccctttttctaaa

SEQ ID NO: 31976 - DNA, 412 bp, Gossypium hirsutum
  unsure (1)..(412): unsure at all n locations; Clone ID: LIB3148-056-Q1-K1-C5
tgaaaaccttttctttcacggaaacataagaataaaaagggattccgtgttgcagtgtttcccacacaaaaggtgtaaatcctaagtcatgctttataaaaattctagtattgatatgaatgttcaatatcatagggggtttagcttcgtttcgatttttctaggtttcctagctttaagttttcgttgtttttggtaccataattagtcgacaatacaaaggactgttgggttttgttggttttgaattggtttttttggggggaggggtttggggtttgattttttttgaagaatggcaagtggaggagagaaaaacaatgatttttatgcagttttggggttgaataaggaatgcactccaacagagctcangactgcttataagaaacttgccctgagatggcaccct

SEQ ID NO: 31977 - DNA, 413 bp, Gossypium hirsutum
  Clone ID: LIB3148-056-Q1-K1-C6
cagagattgatcttcgctggaaagcagctcgaagatggccgtactcttgctgactacaatattcagaaagaatcaaccttgcatctggttctgagacttcgtggtggcattatcgagccttctttgatggcattggctaggaaatacaaccaggacaagatgatctgccgcaagtgttatgctcgtctgcacccccgtgccgtgaactgcaggaaaaagaagtgtggacacagcaatcagttgaggccaaagaagaagatcaagtagattacatatctcgacggaggattatacttttattatcagatttctggttggaaactattgttctaataacagacatctttaatttcgtttagcttgaaactctcttgtagtttatgttcttccatttgtacttgaatgcaagttct

SEQ ID NO: 31978 - DNA, 412 bp, Gossypium hirsutum
  unsure (1)..(412): unsure at all n locations; Clone ID: LIB3148-056-Q1-K1-C8
ctttaatccctctctttgaatgccgacctgccaccctaaacgacgtccagcagattcaagtttcgagggccgacattcttgactataaaaccccctcaaagctccgacttcagcgaagcaaacggaactccacagcctattcgtgcgtgattgaacacgtctctgacgtggcgtggtggatcaacgcacgtcacgggatggtggtgcctggtgcgtgagggggcacgctgtttgttgaaactgcgcaaaggggctgttagggtttcccttgctgaaatgttttaagttcgtaggctaattgggctgcgttgtaaatgagtatttatggtttgggttgaggttttagggttttgttcttatttggnttttggtttatgggctctaagctaaattgggccctacaattattact

SEQ ID NO: 31979 - DNA, 135 bp, Gossypium hirsutum
  Clone ID: LIB3148-056-Q1-K1-C9
cccacgcgtccgttttaacatttgatgcttgccatgtttgtcatacaagagtttacccaggtagttaatcgtatgaaaatttcccactttgcttaaaaaaaaaaaaacaaaataaaagcaaaaaaaagaaatgaa

SEQ ID NO: 31980 - DNA, 417 bp, Gossypium hirsutum
  Clone ID: LIB3148-056-Q1-K1-D1
cccacgcgtccggtcctccgggttcgcctacgccgcagcacaggagagcattgctgaggtgaatagcccggaagaatatgagtcgtgcgatgtgagcaaccccataagaatgtacacggacggcatagatggcatcccgctggatggggaagggatccgttatttcgtaagcggcaaggaagagagctgcaagaacggtctaaagctacatgtggaggtgatgccttttgggaaccccgagcccgaaaagcccagagttgcagtggctgctgcagcgcccaccactccttctggatcagcccggctttacggaagctccgtgttattattggttgggttatggctttgccatatggctatttaattgtaccagttatgacctctctgcactctttttcctctttagactttaccttc

SEQ ID NO: 31981 - DNA, 139 bp, Gossypium hirsutum
  Clone ID: LIB3148-056-Q1-K1-D10
gagaaaacagctgtgcttctagctattcgttattgcagtgcttgagaatttaagttgaaaacaaatgattgtatgtgacatttaaattattgccttgcaattttttgggtttagaaaaaaggaggtatgaacatttgcc

SEQ ID NO: 31982 - DNA, 422 bp, Gossypium hirsutum
  Clone ID: LIB3148-056-Q1-K1-D12
cccacgcgtccgaaaaaaaaaaaaaaaaaaaaaaaaaaaaaaaaaaaaaaaaaaaaaaaaaaaaaaaaaaaaaaaaaaaaaaaaaaaaaaaaaaaaaaaaaaaaaaaaaaaaaaaaaaaaaaaaaaaaaaaaaaaaaaaaaaataaaattaaaataaaataaattaaattttaattaaattttaaataaaaaaaaaaaaaaaaaaatggggggggcttttttttaaattaatttttttttgaatactttttaagttgttttttttttttttttttttaaaaaatttaattttttttgccttggttttaaaaaaaattgttttggaaaaaatttggtttcccaaattttttattttttttaagaaaatttcttttttaccttgtggggtaatataaaaaaggtcctccttttttttttttttt

SEQ ID NO: 31983 - DNA, 321 bp, Gossypium hirsutum
  Clone ID: LIB3148-056-Q1-K1-D2
taacatggacattaattaaaattaaattactattgcataatgatagagctgtctatagatgaggttgaaaattgcactttatattccaatatgtcaatttggtttaagaatggctcgtactacgatctcaaaatagtataaatatatatccacctatacatacatatacatctgtatatgtatgagagttctcagttaaaaaaaaaaaacaatgaagagaaaacattaaagaacaaaaatcaaacaaaagcaaaaaagctaaaaaaactatataataaaaaaaacaataaatcttcaaaagccggggggcctttttaaagg

SEQ ID NO: 31984 - DNA, 393 bp, Gossypium hirsutum
  unsure (1)..(393): unsure at all n locations; Clone ID: LIB3148-056-Q1-K1-D3
gatatgtcaagcaactgaggccatatctgctggctctcggtactttccagtnaaaaaaaaaaaaaaaaaaaaaaaaaaaaaaaaaaaaaaaaaaaaaaaaaaaaaaaaaaaaaaaaaaaaaaaaaaaaaaaaaaaaaaaaaaaaaaaaaaaaaaaaaaaaaaaaaaaaaaaaaaaaaaaaaaaaaaaggggggggcggttttaaaggacaaaattttagttccccgtgattgcaagttaaaacttttttaatagggcaacaaaaataaaattaaggggcgggggtttaaaaacttttgaacgggaaaaaccttggcgtacccaaattaaatggttttgaaaaaaatccctttttcaccagttgggtaaaaaggaaaaaggcccgaaccaatcc

SEQ ID NO: 31985 - DNA, 392 bp, Gossypium hirsutum
  Clone ID: LIB3148-056-Q1-K1-D4
gcagtgtttgatgcaaaggttctaagtaagattccaaggggaccattaaaggagaaaaagaaggattagatttaccggccaagagggtttctgacatacatttggtagctgccttccgtgaaaatgtgttatttactatatatcctgtatcagttagaaccctgtttgaatattttttcggttttagtacacaatgggttcaaaaagtttgatgaatttggcatctttttttctaaatcttgtttagttgttttttgatatggatccatatgctatgtgacgatatgttatcatattgcatgttggttggaatacattgagttgaaagttttttcaacttgcgttgtatatcttttcagaatgatcgagtttgccttgtgattgtgacttct

SEQ ID NO: 31986 - DNA, 413 bp, Gossypium hirsutum
  Clone ID: LIB3148-056-Q1-K1-D5
aatttgccagatgctccaaacagagaaaagattttaagagttatattggccaaagaggatttgtcacccaatgttgatttggaaactattgcaaatatgactgatggatattctggaagtgacctgaagaacctttgcgtgactgctgcacattgtcccataagagaaattctggagaaggaaaagaaggagagagcttcagcagcagctgagaatagacctgcacccaccttgtatagcagtgctgacgttcgacctctgaagatggatgattttaaatatgcacatgagcaggtgtgtgcaagcgtgtcatcagagtctacaaatatgaatgagttgcttcaatggaacgagttatatggagaaggtggatcgagaaagaaaaaacctctgagctacttcatgtagaggag

SEQ ID NO: 31987 - DNA, 410 bp, Gossypium hirsutum
  Clone ID: LIB3148-056-Q1-K1-D6
aacccatttgccgaaactggaaaaaacaatggggctttcacccttcttccctctgctaggaccagtgaacgcgcccatcatcgccggaccaccaccagatctagtggccgacatcgcgcaataggggtttcaaccccgttttaaaacacgcgtgccaagcggagatcgtggggaggtggtgtggcgcacgactcggagttgcgcgacgtgcggagcccggcttgcggcgctggcttccctgatgctgggtttctcatttccttttttgttttattggtatttgggcttgtgttttgttttgtatattgggctgagagatgtgggttaagttttgggtaatctgttgggctttgggtttggtttaaatttggtcctacaactatattcattaaaatcacatgactatcaca

SEQ ID NO: 31988 - DNA, 234 bp, Gossypium hirsutum
  Clone ID: LIB3148-056-Q1-K1-D7
tggagccagcttccgtgctccagttgcaccctattaagatgcttgtttagatgataatttgctgagactggatgcgtgcggcagagcttcagtggtttattgtgaccctaaaacatgtttcaataattttgatagcaattttgtacttgttcagaattatatcaatctccgtgttatttttgttggactttgcctgcatatatgctcgctattttcataaatatttgatgcttg

SEQ ID NO: 31989 - DNA, 326 bp, Gossypium hirsutum
  Clone ID: LIB3148-056-Q1-K1-D8
cccacgcgtccgccgagttcttggattcacattcttgctaaaaaaaaaaaaaaaaaaaaaaaaaaaaaaaaaaaaaaaaaaaaaaaaaaaaaaaaaaaaaaaaaaaaaaaaaaaaaaaaaaaaaaaaaaaaaaaaaaaaaaaaaaaaaaaaaaaaaaaaaaaaaaaaaaaaaaaaaataaaaaaaaaaaaaaaaaaaaaaaaaaaaaaaaaaaaaaaaaaaaaaaaagggggggggcatttaaaaaaaataaaatttaaatgcttagtatcaaaattgattttttttaatatgggcaaaaaaaaaaaattatcttgcgggcctttt

SEQ ID NO: 31990 - DNA, 317 bp, Gossypium hirsutum
  Clone ID: LIB3148-056-Q1-K1-E1
aaaaaaaaaaaaaaaaataaaaaaaaaaaatttaaatataaaaaaaaaaaaaaaaaaaaaaggggatagaagaagaaaaaattaagaaaaatataatgatgataaaaagggggcgggttttttataggttatgagttttcttacgcatgggtggttgttgttaatttttttttgttgtgaagacttttgattgatctggttatatttttacaaggtatgatttgttttaacttggtggtatgaataattattggtctggatgcttttctctttttaacaagttggtataatgaatagtaattgggacctgtatgttt

SEQ ID NO: 31991 - DNA, 420 bp, Gossypium hirsutum
  Clone ID: LIB3148-056-Q1-K1-E10
gcgtacgcggacgcttgtgctgacactttgggcaaagtgatattaaatagtggccattcaatgtcatagcggtgcctgttgacaaaccaatgattgtcttcaattacaagggcgaggagaagcaatttgctgctgaggaaatctcttctatggtccttattaagatgcgcgaaatcgctgaggcttaccttgtttttacagttaagaatgccgttgttaccgtccctgcatacttcaatgactctcagcgtcaagcaacaaaagatgctggtgtcattgccggactcaacgtcatgcgaatcatcaatgaaccaacggctgcagccattgcttactgtcttgacaagaaggcaaccagtgttggtgaaaagaatgtcttgatctttgatctcggaggcggtacttttgatgtctcccttc

SEQ ID NO: 31992 - DNA, 339 bp, Gossypium hirsutum
  Clone ID: LIB3148-056-Q1-K1-E11
tctagatcgcgagcggccggcattccttattatactgacatggtccctgtagtgtaaactgtcaaaaccatcgccattagtcttttattattattattattattattattattgttattattattattattattattatatatccttctccgattcgagaataaaaggaaaaattcatcattattatggagaaaaaaaaaaaaacaaacagaaataatattaccccaaccaataaaaaaaaataaaaaaataattatgtaaccatcccttcccctctctatctctttaaaatgctctgcctctaatgaaatatatcttattttgttttgattgtacttt

SEQ ID NO: 31993 - DNA, 150 bp, Gossypium hirsutum
  Clone ID: LIB3148-056-Q1-K1-E12
cccacgcgtccgcccacgcgtccgcgaacagttgctttgtatatatgtctcgcgttacgattaatttgggaccttgatggttcattatgtttgccaatcgggtctacacgtgtttatcagtgcaagtttaatgaattaaccttttttatg

SEQ ID NO: 31994 - DNA, 199 bp, Gossypium hirsutum
  Clone ID: LIB3148-056-Q1-K1-E2
cttgaatttggtgttattgaaacaaggttttgtagctaccttgtgtactagcttctttaaccatgattgttaattattacgtgttttttagcttcttttatatttggccgagttaatatagatcagatgagctgtgaggtagattgctcatttatttaaacataatattttaattctaaatttaaattcattaattttt

SEQ ID NO: 31995 - DNA, 324 bp, Gossypium hirsutum
  unsure (1)..(324): unsure at all n locations; Clone ID: LIB3148-056-Q1-K1-E3
gaccaaccatggttagacttaggtaatcaccatcactctctctcgaccgcaatatcacttccctttccttttctttcatccctctctgtggaacttgttaatcttttttatgtataagcctatggatttggattgtaactagggattctttctccatccatgaccttgatgcatggttgagaatgaatttgccacttactactatgctttcatttcaaaaaaaaaaaaaaaaaaaaaaaaaaaaaaaaaaaaaaaaaaaaaaaaaaaaaaaaaaaaaaaaaaaaaaaaanaaataaaaaaaaaaaaaaaaaaaaaaaaannnaa

SEQ ID NO: 31996 - DNA, 419 bp, Gossypium hirsutum
  Clone ID: LIB3148-056-Q1-K1-E4
gcatcatcatctaccaaagattttacttctctatttctgtattttttttggtgttataaaggaaaaatgaaccaatcccatagcaatagcttccaagctggccaggctcagggccaagctcaggagaagaccagtcagatggtagacaaggctagggaaactgcacaatctgctatggattcaatgcaacaggctgggcagcagatgcaggctaaagcacaaggcgcagcagatgccatgaaggatacaatggggatgaacaaatgaaactactccagcttgatcccaaattaccacccctctcgggcacctatctatctatatatgtatgtatgcatttttagcttttgatttttgttttgtcaaaattttcttcattttgctcatataatctttgagccaagaagaaagatttaccc

SEQ ID NO: 31997 - DNA, 391 bp, Gossypium hirsutum
  Clone ID: LIB3148-056-Q1-K1-E5
gataatcatatacaaaagatataacatatttataaatgaatttataaaggcgttataaaggaaaaatgttcctatcaaatagcaatagcttacaagctggccaggctcatggccaagctcaagagaagaccagtcagatggtataacatggctgggggaactgcacaatatggatatggattcaatgcaccatgctgggcataatatgcttgcttttgcacacggcgcattaaatgccatgaaggatacaatgaggatgaacaaatgaaactactccagcttgatcccaaattaccacccctctggggcacctatctatctatatatgtatgtatgcatttttagctcttgatttttgttttgtaaaaagtttgttcattttgcttttata

SEQ ID NO: 31998 - DNA, 85 bp, Gossypium hirsutum
  Clone ID: LIB3148-056-Q1-K1-E7
agccttcggtattatcttaaaattcaacttcacaaattttaaaaaccgtattatgttgtcataattaaaatacaatcttagtttt

SEQ ID NO: 31999 - DNA, 406 bp, Gossypium hirsutum
  Clone ID: LIB3148-056-Q1-K1-E8
ccgaccccgtgtctctgtctctgattaatccctaacctaacgccttcccttcccttttttcccccaaatcggaaacccacctcgcccgatccaccattccacctctggtgaccggccttccacgactccacctccgctctaacggtgcttccagcgaatctagccttcaacatcttctacctttgaatttcaaaggtcttctccgttataaactagatgctgatgaacggtgtaaaatattacatagaaatttttgggacctacctgatgatgcatgcaatattcttccagcattcaaattgagttattatcatctttcatcctatttaaagcgttgctttgcttattggtcatattttcctaaacattatgaatttcaaatagaaaaactcattcatttgtggat

SEQ ID NO: 32000 - DNA, 92 bp, Gossypium hirsutum
  Clone ID: LIB3148-056-Q1-K1-E9
tttcttatcaaactctgtttaaggaatgctgtttaattaatgggactttatccgtatgtcgaatataaaaaaacccgtttgattattgtttt

SEQ ID NO: 32001 - DNA, 312 bp, Gossypium hirsutum
  Clone ID: LIB3148-056-Q1-K1-F1
ggtggatctggtgaaagctctggaaatagatgatgtagttgacagtgatgtcaatgaggatgatgattaggttgctgaactagatgaactgaactctcaacattacaattctgggaattgtcttgccccctttcctttggtttttggtgctagaatttgcattgaaaaccagaattgttgtttatttattaactaaaatgctcctccaattggagaaagtagccttaagttttgtttgtttgtacgattggacccaaatttaatcggcttttattttaagaacataatttatttgattatgttcatttgcat

SEQ ID NO: 32002 - DNA, 263 bp, Gossypium hirsutum
  Clone ID: LIB3148-056-Q1-K1-F10
attggaattggcggtgacggagcaaaagcaagaggagcttctgcagttgttgggcagtgtagttacacatgcatagcctccgggaggccgtaatttattttcccctaaaacttattaactgtcatcatacatgtatctatgagttgtagaaactagaattgtagatgattccctgttttcggaaaagagttttgatgtttatgatgatgaacaatgctggaaacttacatttgcaataatgataaacaatgatgaattgcttt

SEQ ID NO: 32003 - DNA, 114 bp, Gossypium hirsutum
  Clone ID: LIB3148-056-Q1-K1-F11
gaaaaaaagtatagtcgtggattgactaataaggggaaaacctccctcatttgtaaggagactgattgaagtaaagttgaaggcaaaataaaagagatggcatcgagttttggt

SEQ ID NO: 32004 - DNA, 405 bp, Gossypium hirsutum
  Clone ID: LIB3148-056-Q1-K1-F12
gattgattttcttggtttgaacaattccttcttttttttttcttttttgttacggggttttcagcatacatgcaaaagaaatcgaagggcacaaaacgtaaaacccgacaggcaaaagcacttgaaaatgctaggaaggctcccagatcatttcttgagctcttacatgaggcaaacttaaagtccttgcctcctcatgttccatcttatttgagggcagcagtgggacctccaagttctaccttccgccggcatttttgcagcgtttgcggctttagtgcaaagtatacatgtgtgacatgtgggatgcgcttttgtttgtgccgatgccaaaatattcataacgatactcgtgcatgaaatttgttgcatgagtggtgatattaagaacccaaaaagattttt

SEQ ID NO: 32005 - DNA, 135 bp, Gossypium hirsutum
  Clone ID: LIB3148-056-Q1-K1-F2
aaacatgtaaaaaacgatgatccttaaactaagctgataactttacgacatagttatgggatcaaagattttgtgggtctgatactcacaccttaaactaccactagaagtgcaataaaagttaaattttcttag

SEQ ID NO: 32006 - DNA, 365 bp, Gossypium hirsutum
  unsure (1)..(365): unsure at all n locations; Clone ID: LIB3148-056-Q1-K1-F3
cccacgcgtccggaaagctcatagatggggaagtgccttcccagcagcaagcatagccaaggaagagaaatgtgtgtggagtgaaaagaagaaactggcaatctgtggggatttctgtttgagtccaaatgttgaaggtgcaattcttagtggcttggctgctgcttctaagcttaaaggcttaatcagtaccctatactataacctttgatttgctttcccttgatgttggctgcatgacatgtttaaacatgatgtaggaagggcaagattttaatattaccagcaagggctttgggatttattccnnacaaaaaaaaaaaaaaggaaaaaagaataaaaaaaagaagcttggtaaaaggggg

SEQ ID NO: 32007 - DNA, 347 bp, Gossypium hirsutum
  unsure (1)..(347): unsure at all n locations; Clone ID: LIB3148-056-Q1-K1-F4
aacggaatgaacgaggatcttgcttacaaaaacaccgttgaatgcattacaggaattatatcaaagaccatctcaacaaagggcatcttggctgtgtacaattccttgtcagaagagggaaaaggggaattcgagcttgcctatagtgcatcttattacccatgcatggatatactgtatgagtgttacgaagatgtagctagtggaagtgaaatccgcagtgttgttttggctgggcaacgattttatgagaaggatggtctccctgctttcccaatgggaaaaattgatcaaacacgcatgtggaaagtcggtgagcgagtccgaaaggcacgtncatctggtga

SEQ ID NO: 32008 - DNA, 415 bp, Gossypium hirsutum
  unsure (1)..(415): unsure at all n locations; Clone ID: LIB3148-056-Q1-K1-F5
actcgacccatctggggttatgaagagtgaaacatgggataactttgtaagcttgtgtattaaaggatacctggcttcccgtcgatatatgaacgggattatcaacacggtgttgctgatgctcgacagcggattgccatgcttcagtaggggagaccccattggaaatcttcgcaagagatttcatccagaaatgtctgagcgtgaagcagccaatttcatgaaaagtgtatgcgtagatgcatacaataagtggaccactgccggctatgatctcatacagtatctgcaacaaggcattgaaaagtaaaatggaaaagggaaaatcatgtttntgcatttgcgtaaatatttccaattttctaattatactgtttttttctttaaatcttctatggtttcgattattcttgag

SEQ ID NO: 32009 - DNA, 333 bp, Gossypium hirsutum
  Clone ID: LIB3148-056-Q1-K1-F6
aagagacttaagttgggttgtgcatacaggatcactggttaatgcgtaaaaagagttgtagtaaagactgataagcactaagctcttgtatcgcaaacttcattatacttgtgaaggcactgagaaccgaattttctgctatgtattagagaatccaagcacccatgcatgattgtagttggtgagtcaaacaaaaatgtacttagcggaaaataaacacgtagtgttggcttggctgctaaaagattcaatcagacggacgctctccttgcttttccaatgggaatatttgatcacacacatttaaagaaagggccggagctagaaagaaag

SEQ ID NO: 32010 - DNA, 412 bp, Gossypium hirsutum
  Clone ID: LIB3148-056-Q1-K1-F7
atttacaagaaaatgaagttgaggatcatagaggccattggcttagttgctttcctgaaagctgcacatctcttgtctccctcaatttcgcatgcctcaaaggagaaataaacttagcatctctcgaaagacttgtggcaaggtcgcctaacctcaagagtttgaggttaaaccgcatggtgccgcttgatacgctccaaaaactgttgatgcgagcaccccaactggtggacttgggtattgggtcttatgtggatgatccatcttctgaggtcttcagcaaactgaaaactgtcattcaattgtgcaattcaatcaggagtttatctgggtttttggaggttgctccttgttgcatgtcagctatttatcctatttgcgaaaacctgacattcttgaacttgagctatgc

SEQ ID NO: 32011 - DNA, 394 bp, Gossypium hirsutum
  Clone ID: LIB3148-056-Q1-K1-F8
aaaaaaaaaaaaaaaaaaaaaaaaaaaaaaaaaaaaaataaaaaaaaaaaaaaataatgaaagaaaaaaataaccccgcgcgtccgttggatttaagctgacaagtatttgtagttggcttgtagttgaagttttttatagggaacataatgttgtttttttggtagaagtttaaaaatttttattttttaaaaaaaggtgttttgaatgttttaaatggggttttaaaagttggattttgaactttttaattaattgaaaagcccttttgttaatgtttttgaactctgaaaactgccattcaattgtgcggttacatccagaataaatgggggcggtcggtttaagggtaccaatttttcgtacccttgcttgcgaatttttaatttttttt

SEQ ID NO: 32012 - DNA, 398 bp, Gossypium hirsutum
  Clone ID: LIB3148-056-Q1-K1-F9
gcggaatatgtttgggtgttttagtggttcaagttcttctcctaggttggattcaaggataaggagaagtagtagatcattttccctttttagtcctccttcaaggagaagaggttgggctcttgaacttgataatgcaagatctagaagtaggagaagaagaaggtaatggcttatgattttgaacataattcacacaatgtaccaagagccatagaaagtggttccattgaatgggatgttttttcttatcattgtaaattattgttagcaggaagtggggattcaccaagtacaaccgcgctgattatctgaagtggaagtctgagaacaggattatgccagatggtgtgaatgcaaagcttcttggatgccatggacctttggcaaatcgtcag

SEQ ID NO: 32013 - DNA, 413 bp, Gossypium hirsutum
  Clone ID: LIB3148-056-Q1-K1-G1
cccacgcgttcgatgtaattaaacgcgggtctctatcatttccggtgcgttaaataatcacggtatacgccatggacatgaagaaggtctgcaccgccatcattgttgctgccgactcaatgagcgtcgtcatggctgacggtacaccatctcctgccccttaagccggaggttctagtgctagctcctctcctggatccgctccagcatcaggaccggattccagcgtggctgccgctaccttgcctgttcttggatcattgggtggggcttccatcgattctttgatttcttacatgctgcagtaagctacatgtatgaaaaatcaacatgtcaacgaatattcaattaacttattatttatgaaagacacatgtgatgaatattgaaaaaaatgaataaaatggagcttt

SEQ ID NO: 32014 - DNA, 105 bp, Gossypium hirsutum
  Clone ID: LIB3148-056-Q1-K1-G10
gcatctagttatcagctctaaggagagccctcttagatcctaactatcaatcaaattagtgttattgtaattattttttttattaaggaagtttcagtttatgtt

SEQ ID NO: 32015 - DNA, 402 bp, Gossypium hirsutum
  Clone ID: LIB3148-056-Q1-K1-G11
cgtatgaaggaataaaagaatatgatccccttttttcacccaaacgatcgtgctcgggagttggattattacaggtaacggaaaacacttggtggtcaaatacctttacccgaacccagtgcgggggacccgctcagaaaagaacaaattgagttgcagcaccacaaaagcgcgatccataccatagatgattctatttgtccgtcatgggcccttgctttctttagctcacttggtggatcaaaccgccgggcgcattataataaccttgtgtgaactctcattttatgtgacggggcctataccctatttcgtcactctcatgcactttatagaccggatatgcattttttttttgaaaagtgcaaagaacctttttcttatatgattgtatcaaaagca

SEQ ID NO: 32016 - DNA, 345 bp, Gossypium hirsutum
  Clone ID: LIB3148-056-Q1-K1-G12
cccacgcgtccggcagcagtggggtatggaacaaccttggatggaaccaagtactggatagtgaagaactcatggggagcggaatggggtgagaaaggttacataaggatggaacgtgggatcagagacaaacaaggactgtgtggtatagcaatggaggcttcatatcccatcaagaactcatcttctaatcctactggaccttcatattctcccaaggatgaactctaaacataaattatagctttcctttcaaatgtgttgttttttctgtgtttccaaaagttgtatcacgcaacatatgatcatgattgaataatcaataatatacttcaatttggtttc

SEQ ID NO: 32017 - DNA, 83 bp, Gossypium hirsutum
  Clone ID: LIB3148-056-Q1-K1-G2
attttattttcatggatctagctggtcggtgatctagagatgtatgctacctttgtttaatttacaagagatttggtatttgt

SEQ ID NO: 32018 - DNA, 349 bp, Gossypium hirsutum
  Clone ID: LIB3148-056-Q1-K1-G3
tgataagcttggtcttcattctctccgtcagcgccactggtatatccagagtacgtgtgcaacttctggggaaggcctctatgagggccttgattggctttccagcaacattgctagtaaggcatgagaaaggatcagtgtattggttgttagttagacttgttgaaactctggcaactcttgaagaggatatagcttcctgtttatccagcaacgtttgtaatgacagaatatttagctttgtttaatctttttacttggaattttcattttctttaatgtatttgtgttaaatattcggacttgttatggtttatatcggaaaaaaaaaatagtaacattgcatgtc

SEQ ID NO: 32019 - DNA, 332 bp, Gossypium hirsutum
  Clone ID: LIB3148-056-Q1-K1-G4
cccacgcgtccggattgatgtatgtttgttaatttgatagatagagattgatctctaaaaaaaaaaaaaaaaaaaaaaaaaaaaaaaaaaaaaaaaaaaaaaaaaaaaaaaaaaaaaaaaaaaaaaaaaaaaaaaaaaaaaaaaaacaaaaacaaaaaacaaacaaaaaaaaaaaaaaaactgaaaacaaaaagaaaaaaaaaaagaagccggggccccactttttaaagaaaaaaaacttagttccccttcaagcaaactatatttattttttgttaggaaacaaaaataaaaaccagggcctgtgaaaaaaaaactattgatgtgaaaaa

SEQ ID NO: 32020 - DNA, 413 bp, Gossypium hirsutum
  Clone ID: LIB3148-056-Q1-K1-G5
aaagtgggttaataatgttcaactttctatttaaaaaaaaataaagataaagaatgtgtaaagaaaaataaataaattaaaaataaaaaattaaaatgaaattatcaacacgatggggctgacgctttaaaggttcaaagctttgttacgctttcttgcaacttaatagcttttttatggtggatcttaaattcaataaagtgtcagcgtttttacaacgttttgattggaaaaaccttggtatatccaaactttatgtctttgaatgatatctcttttttgctattttgtgtaatacaaaagatggcttaaccgattgtttttcccaaaattatctcttcctgattggctaattgtactcaccttgtaatggttctttaatttcgtctgaagtggtggttacccccattttt

SEQ ID NO: 32021 - DNA, 326 bp, Gossypium hirsutum
  Clone ID: LIB3148-056-Q1-K1-G6
gaattttgaaaaaattgaataaaatggagctttgaattagaaaaatgaaaataaagggaggggacaccttataaaataacaagaaaaaggataataaaagtgctgttagtattaataaaaatacaaaacaagcatgaagagtctgaaccaaggaacaaggggggggccgttttatggtgtcaaggttttcttccccttgctggcgccgtttttctttttttttgggggcccctaattttatttctgtggccgtctttttacaactgtttgtttgggaaacccttgggtttccccaatttattggctttgataatttcccctttttg

SEQ ID NO: 32022 - DNA, 413 bp, Gossypium hirsutum
  Clone ID: LIB3148-056-Q1-K1-G8
cttggtaaagacgggtcttgtatgcaagtaccatttttagcagaatgggtgcgagataaaggacaccgtataaaatcacaagtaaaggctgctaaaggtgctgttagtttaattcaaatacaagacgagctgaggagactgaaccaaggagcagacagagaagagaacatactgaaagcccttgaagaaaagaaggatgccatgcttcaatccctttggcagatcaacgtggtcgacatcgagtcaactttatctaatgtctgtttagaagtacttagagacgctagtgtttcggaagaagttctagtcttgcgagcgaaaggaatgaagaaactcggagccatttttcaaggagcaaaatctgcttatagtagagaaaacagtctgcgccgtgtaaatgtcgaaacggaaac

SEQ ID NO: 32023 - DNA, 349 bp, Gossypium hirsutum
  Clone ID: LIB3148-056-Q1-K1-G9
ggctttgctgacgactcatggattttggatggatttattgactgtaagggtcagtgttcagacatcatatcagttgatccatatggggctgtttatttgaggtatagaagagctcttggctatatggtcgtgggcaaaagaatctattatttaggtgaatacctaacccaatggcgctaatggacctgatggatgtggattcatgaactctgcttaaggtcacttactttgtggtggaaaccaccgggttcatgagactaaccttttttgaactctcatttgatgtgatagaacctattttcttttataaaactatcatgtactttatggcccgtgtatgcattttttt

SEQ ID NO: 32024 - DNA, 338 bp, Gossypium hirsutum
  Clone ID: LIB3148-056-Q1-K1-H1
gatttttggcttttaaaaaaaaaaaaaaaataaaaaaaaaaaaaaaaaaaaaaaaaaaaaaaagaaaaaaaaaaaaaaaaaaaaaaaaaaaaaaaaaaaaaaaaaaaaaaaaaaaaaaaaaaaaaaaaaaaaaaaaaaaaaaaaaaaaaataaaaaaaaaaaaaaaagggggggggcctttttaaggaatcaaagtttatttccgtgggtttggaagttttaattttttttttgggggaccaaaaataaatttaatgggcggggttttaaaaacatgggaatgggaaaaaccttgggttaaccaaattaaaatgcttggaaaaaaatcccctttttcc

SEQ ID NO: 32025 - DNA, 354 bp, Gossypium hirsutum
  Clone ID: LIB3148-056-Q1-K1-H10
aatttttgcttctctgcaaactcccttgattgcatactgttaatcaattgagccatcctcattttctacatctgctagatatctggtcaatgggcagattttttcccgagctcagtcgtttgtatacttttattacaagagagatatacaacacaccattgcatgtagtgctggcctgacctttcaaagcattcaaaatagaatcattgctgctagctgtagaattctaaatgaattttgtgagtgatccaaatggaaattcttttattttgtatccttttagttataaaagtaactgaaagtttactggtaaaaaaaaaaaactaaaaaacaaaaaaaaaaaaaaaagggcgg

SEQ ID NO: 32026 - DNA, 407 bp, Gossypium hirsutum
  Clone ID: LIB3148-056-Q1-K1-H11
cccacgcgtccgcccacgcgtccgctcatattgatcagaatccagaaacagctaaacagaagcatgttgcagcagaggcctcgtccaaggagatgcaggctaagcagggtgcatccaccacttcaaccagaagtcgtactaaggtacaaatgcaagggattgcggttggtcgtgctgtggacttaactgttgaaaggatatgatgatctcattaatgaagtggagaaaatgtttgatatcaagggagagcttcgccccagtggtaaatggtccgttgttttcactgatgatgagggtgatatgatgcttgttggcgatgatccatggatggatttttgcaagatggtgagaaagatcttcatatattcaagcgaagaggtgaagaagattagtccaagatgcaaatt

SEQ ID NO: 32027 - DNA, 307 bp, Gossypium hirsutum
  unsure (1)..(307): unsure at all n locations; Clone ID: LIB3148-056-Q1-K1-H12
atttaggtaaaaatcatagaaagatcatgtttaaatatatgtttcttgcatttgagaaccaagtctttagctagaaagggaagaagcaaaatgtgagtgtgccaggttcttcagtttggttttgatgcttgtaaggtaccatgactgatgttaccagctaactaagctactttgtttgatgatnaaaaaaaaaatgaaaagaaaaaaataaaaacagccgtaacaaagaaaggaaaagaaaatatacaaaccaataaaaaaaaatggatgcatgataaattaaacaaaatgggggggctcgttttaa

SEQ ID NO: 32028 - DNA, 367 bp, Gossypium hirsutum
  unsure (1)..(367): unsure at all n locations; Clone ID: LIB3148-056-Q1-K1-H2
ctacaatgaggttgaaggatgggctgagaattacatacttctggatcaaggaacaaattgagaaagagaaggctcaaggcatagacctatctgtctatgggtcatccaaggtcgtgggaactcaagcaccagtccagctgggctcacttcgtgcagccgatggcaaagaatgaagaagtaaaggtcttgtagttgctttaaagccaagttttattggcagatggggggaatgcataaaccagtttcaggtttagtatttaattttggtattgtagtgtgtgtactgttgtttaaaggggattgtattcgaagttagctttccatgatatgcaaggcttaaataaatgccatttcgattcctaannna

SEQ ID NO: 32029 - DNA, 400 bp, Gossypium hirsutum
  unsure (1)..(400): unsure at all n locations; Clone ID: LIB3148-056-Q1-K1-H3
cccacgcgtccgtgttaaatttgatccgagaactcgtgtcttaatattggattcgtataattttaggtatggtcatcatgtttaaaacattacatatttgtatatatttgttaataaattatgttatatttgtaaaaaaaaaaaaaaaaaaaaaaaaaaaaaaaaaaaaaaaaaaaaaaaaaaaaaaaaaaaaaaaaaaaaaaaaaaaaaaaaaaaaaaaaaaaaaaaaaaaagcaaaaaaccnnnaaaaagaaaaaaataaaaaaaaaaaaaaaaaaaaaaaaaaaacaaaaaaaaaaaaaaaaaaagnaaaaaaaaaaaaacnnncccngggggggcgcggcttaaaaaaaaaacaatttcgaacccgtagaaagaaaaaaaaaattttttttttttt

SEQ ID NO: 32030 - DNA, 417 bp, Gossypium hirsutum
  Clone ID: LIB3148-056-Q1-K1-H4
gtgagagtggaatgtaccctctgtaaggtccaatcaaaggacctcttgattaatgaaaccagccatttcttttccattgctccatatgcttcttcatatccattcgagatatggataattccccgagatcactcttctcattttgatgaactggacaataagaaggcagttgatctcggtggcttgctaaaactcattcttaaaaagatggctttgcagttgaataaccccccattcaattttatgatccatacttcaccaatacagattactgactctgagataccttatagtcactggtttttacagataatacctcagttaactggtgtaggaggttttgaactcggatctggatgttacataaaccctgtttttcctggtgatgctgctaaaattttgagggaacctaatgtt

SEQ ID NO: 32031 - DNA, 413 bp, Gossypium hirsutum
  Clone ID: LIB3148-056-Q1-K1-H5
cccacgcgtccggtatctcatgtccgcatttgatgttccagaggttatggctgtcacccgaagcaatatttgcaagaatggaatacaggcgctgtcccgagggggtgctgtcatatattatgcttcaatcttcctttacttctgggttttctcgactcctgtggtttctttggtgttcggaagctacttgtatatctgcattaactggtttcatctacactttgacgaggcgttctcttctctcagaattgctaattacaagtcattcacacgattccacatcaatcgtgatggtgatcttgaagttttcactcttgcagtcgataaggttccaagggaatggatgttggatcctgattgggatatggagcagaagcagccacaacagttgagccataagagaaaatacccta

SEQ ID NO: 32032 - DNA, 277 bp, Gossypium hirsutum
  Clone ID: LIB3148-056-Q1-K1-H6
attaaaatttcagatttgttaagtgcattttaaaaaaaaaaaaaatatggaatggggaaaggggaaattttttttaaaaatgaaaaaaaaaaatatgttatttaaatggggctgatatatattaattatgggatttatctttcggggttgggttttaatgggccctaggtttgcattggcgttcgtgcgcttgttttatctcttttttaacagttggcttgtggtatggggcgagggctcctaaaatttctgagtgggaaattacttgtttttctta

SEQ ID NO: 32033 - DNA, 375 bp, Gossypium hirsutum
  Clone ID: LIB3148-056-Q1-K1-H7
acgcacacgggttctggaagatctaaattatctttccaaaatgacaactcgctttaagaggaagcgcaagaagcgcggccatgtgagccccggtcacggtcttatctgtaagcacatgaagcactccgggggttgcgtgaacgtcttaagcatgcaccaccacaggatcctattcgacaagtaccatcctggttatttcagtaaggttggtatgaggtactttcacaggctccgtaacaagttatcattgccccatcgtatacatcgacatgctctggtctcttatcccggaggacgttgaagccaaggccaccaaagatgctcctccgatgatcgacgtgacacaattcgggtactttaaagttctctgcaaaa

SEQ ID NO: 32034 - DNA, 322 bp, Gossypium hirsutum
  Clone ID: LIB3148-056-Q1-K1-H8
gtgagagtcgtcgttaccttgagatgttttatgctcttaagtaccgtaagctggctgaatcagttccattggcagaggagtaaattgaagctgttaaataacattgggccggtttttcttggagaataatattctgttttgtaatttcaattggagaagctcctttgtatttcatcttgtcttttccttttccttttttcgccggcattgtttgaacatggggttgtgcgcccgtcaattccagttaaatatggtgacttttgtttttcaaaaaaaaaaaaaaaaaaaaaaaaaaaaaaaaaaaaaaaaaaaaaaaaaaaaa

SEQ ID NO: 32035 - DNA, 407 bp, Gossypium hirsutum
  Clone ID: LIB3148-056-Q1-K1-H9
ggaagatgaagagtgatgatggacagttggtggtgctgagtaatgatgttactctaaagatcaaggccatggcagagggtttgatgtgtgagacagtgcaagaattccgggagagtgtggtgaaccccttctcagagcggttcatgtgggcagacagctctcctagaggacacacctggtcagtgatggatgatgtagttttgaggggcaaatacaaccgttgtcccctaaagaagccatccaagggaggagatatcaagggtttgaaactcattctgcttcataattcccactatgcccacctcaattcagtccgctaaaacatctgagatatgttccagcagttatgttttgaaatctcaagtaattgcttacatatattgcaatagcatataccattgatggga

SEQ ID NO: 32036 - DNA, 278 bp, Gossypium hirsutum
  unsure (1)..(278): unsure at all n locations; Clone ID: LIB3148-057-Q1-K1-A1
tttaattngagggtcgacccacaccttcacccacgcgtccacggacacctacttccactctcgcacccatataaatctcctgagtctcagaaggattatatgagtattttagggagcgctccatcccagattaatcgttctaatctcgtgtaagcaagtgggtctaacaaccacaaaatatctctatatggacgcctcattatcctaacactgcttggagctaatgttgaaatccgcccggaaataaaggaggagaatttctttcttttctttgcaag

SEQ ID NO: 32037 - DNA, 307 bp, Gossypium hirsutum
  unsure (1)..(307): unsure at all n locations; Clone ID: LIB3148-057-Q1-K1-A10
cttaaaccttggccaggatgctcttaaactaactgaattttgtactcgctaagttgctctgaagatttagcccatgaaaaggcagttagttaaatctttgttcatttttgtgagagatgggcaagacagccaaaggtacgaaatggctattgctacaaatgcttgtacccaactgtgattttataagccaagttaacatttccgagttcgcnttggncnaaaanaaacctcccaacccctcctaaaaagagatatggggccttaaaaaataattttacccccaaaatcaaaaaaaaaatattcccaa

SEQ ID NO: 32038 - DNA, 417 bp, Gossypium hirsutum
  Clone ID: LIB3148-057-Q1-K1-A11
gtctagattccttacttcacattcataagactggtcattttgatgaccatttttaccattatactatggttaccaacttatccatcaagcactcatgttcaatcattatcacgttgtgtatataacatacaattaccacatagctatgaccacctcaattggtcatagagcatacatccaacacacatgtcatattactaaccatgcatggcaaacaaacataatcacattataaacattagacatgacatgaatagctaggcttacaagccataatcaatatgagccacatctcatggccatatgcatataactcaatctaagccaacacatttggccaaagcaaaataatgcatgtcaatcagctagatccctgtacatgccactcacttgaaaattctaatatatacttcattt

SEQ ID NO: 32039 - DNA, 228 bp, Gossypium hirsutum
  Clone ID: LIB3148-057-Q1-K1-A12
atgaattgtgagtttgattggagcaatatttcctttgcgtgaactggattgggctggagtgagatgtaaggttatggatggttttaagtggtgatggtggtaagacttattttgcttgtacaaatatgagttcactgtaatatgctatgaattgaaagtatcaacattcatattatggatggatgctaattgcttattaataaatcaatgtgatggatggatgccccc

SEQ ID NO: 32040 - DNA, 210 bp, Gossypium hirsutum
  Clone ID: LIB3148-057-Q1-K1-A2
ggactttacctgttacgagggaagaatcagtgtgtctcatctgttagttgaaatagcacaggcataggttttgtttaattggcttttagcatttgtgtgtcgaactaaatacctgttgatgatatgctccattgtcaaaagacaatatatgtgagcatctttgagcccccattttagttatcagggaaaccagactatgtctaatattgt

SEQ ID NO: 32041 - DNA, 272 bp, Gossypium hirsutum
  unsure (1)..(272): unsure at all n locations; Clone ID: LIB3148-057-Q1-K1-A5
cccacgcgtccgcggactcgtccgcccactcgtccgcccatataaatttcttgactcagaggaggattagagtagtattttattggttgtttcatgggagatttagcgttaaaatctgttgagaggaaggggttatgagtgacattttagatattaatatgtacttattaattccctttgtgtgcttganaaaaaaaaaaaaaaaaaaaaaaacataaaaaaaaaaaataaatatatttttttctagccaccttattgattacatttttcgt

SEQ ID NO: 32042 - DNA, 187 bp, Gossypium hirsutum
  Clone ID: LIB3148-057-Q1-K1-A6
acgaaacaccctcctttttttaaaacttccaatctcaacgcccatcatatgcccctgaggactgggtttaaaaaaaaaaggccgaggccgtttactttctttcacttatcacccgtcgaagaggccccccaccgttacaacacaaaatgtgggggccgcttttctacccccattcttacgaacccgg

SEQ ID NO: 32043 - DNA, 235 bp, Gossypium hirsutum
  Clone ID: LIB3148-057-Q1-K1-A7
gatcggagcaagcctaatgggattggcggtgatggctattatggttgtgcttttgaaacgagtctacaataaaagtatgagagtctgctggatcaaaaaaaacaaaacaaaacattttcatttgacgggggtgataaattgcagtgctatcgtatattggcttgtataaatggatagtgatataataattaggatcgcttttgctgaagaataataatgcaaccttcgttgagac

SEQ ID NO: 32044 - DNA, 152 bp, Gossypium hirsutum
  Clone ID: LIB3148-057-Q1-K1-A8
agcagctccacgcgtccgggtgatatttcacagctcatgttattttcaataaacaagtttatgacgggtgtaactatttgcatgctgggggaatgaaaactgaaattagtcagtctttgcagggtaaactagatgattctagtgagctagtg

SEQ ID NO: 32045 - DNA, 395 bp, Gossypium hirsutum
  Clone ID: LIB3148-057-Q1-K1-B1
gcttaagtcaaagaacacacgccttattaacctgcttttagcactgatggttggtgggtgtggcgcgggtgttcctcttatgaagaaggtccccgctgctgttctttggggttattttgctttcatggccattgaaagcttgcccggaaatcaattttgggagagaatattactgctgttcactgctccaagtcgaagatacaacgtgctggaggagtatcatgcaacctttgttgagacaattcccttcaaaactattgtcactttcaccttgttccagacaatatacttgcttgtatgctttggcataacatggatccctctatctggagtcctttttccactagtgatcatgcttcttgtgccaccgaggcaatacttgctccccatgtttt

SEQ ID NO: 32046 - DNA, 379 bp, Gossypium hirsutum
  unsure (1)..(379): unsure at all n locations; Clone ID: LIB3148-057-Q1-K1-B10
cgtgacttgattaatatgtatatggttgcagggagggtgggcaagtgtaaggaggtttgtgaggaggccactatggcgggtttttcattaaataaacgtaccttgttaaatttgtcaaaacttgacccttttcttttttgtatcattacatctttcccccnnnaaaacnnnaaaaaaaaaaaatattggtttattttattaacttaaaggtaaagaaaaaaaaaaatacaactaaaagtgccccctgttaatattctggaaaacgcgtcctttttatatacattggactaactttcttaatcaaacaaaaaaaaaaggggggcccttttaaaaaaaccaaattttttttccctcctttgaagaatttaaattttttttt

SEQ ID NO: 32047 - DNA, 135 bp, Gossypium hirsutum
  Clone ID: LIB3148-057-Q1-K1-B11
cccacgcgtccgggtaggttcaatgtgatgtgatgatgaagtggggcgtctgatatgttaatggacaataactcatgtctggtatagtcttgtttaaatgtgtttttgcttaatcgaaagttgctttgccgcccc

SEQ ID NO: 32048 - DNA, 328 bp, Gossypium hirsutum
  unsure (1)..(328): unsure at all n locations; Clone ID: LIB3148-057-Q1-K1-B12
cttcttttccttcttcaattttcttgggattttccagttttttgtcatgattatcattttgtctttgttttaaaatattacattgttacagaaatgatgactgattcttttgatagaaaagctcagctgtatacgaactgaatatatattttttgggttattaaanaaaaaaaaaaaagaaaaatttttattgtgtggccgttttaagggaaaaaaacttaaaaacgcgcctatgggacgcaaaaaaaaatttttttgtgacaacctaaataaaaaaaaaagggggggcgttttaaaggtcccaaacttaaaaacccgggtttggaac

SEQ ID NO: 32049 - DNA, 137 bp, Gossypium hirsutum
  Clone ID: LIB3148-057-Q1-K1-B2
catttgcatatgtcaaatagtgacatactttatgtttcatagtggcggtattcttattgagcatgggttatctgtataaagatggggttcttggctcccaaaccacctttctttgcttatatttatagttttgcttg

SEQ ID NO: 32050 - DNA, 384 bp, Gossypium hirsutum
  unsure (1)..(384): unsure at all n locations; Clone ID: LIB3148-057-Q1-K1-B3
gacagcctcatccacatttttttttgaccaccttatctgaccttgttattttgttgagtaagttggtcagggtttgcatgtgttgagataatgggatgttttgcaaggtatgtgttgctgtcagaagtttttgtggactccaatgaaagctttttggtatatcggctagtactggcctagcttcatggtcttcaatagaatgaatggctttgttcccattttgtgtgtagcgttaggagagtgttggtgtagtgtgcttatataatggagttcagaatttttgtatattctgttagctgcttagtggcgcttcttgttggatctcctatatatcaagtgtccagaagttggntattgtatatgatataattcacagnttttctc

SEQ ID NO: 32051 - DNA, 429 bp, Gossypium hirsutum
  Clone ID: LIB3148-057-Q1-K1-B5
gaattcccagcccgacccactcctccgaaaaaaaaaataaaaatttaaactcctaatttaacacccaaaaatttaataaaaaaaaaaaagcttattttacaaaataaaaaaagccccccctactttttcttaaaaaaattataatatacacaaaactcttaaaaaccccaccccaaaaatattttttatatatggtccccccctttttatatcccccccctttcccccccctcaattcccctgttacctttttttttattccccccaaaaaaaattccccttcccccttttttaccttccccttctttaaaaacccctcttcttcccccttttttttcccttttaaaaatcccccttttttcaaattttttttaataaaaaaaacccccccccttccccccttcccaaatttttccccccctttttttt

SEQ ID NO: 32052 - DNA, 410 bp, Gossypium hirsutum
  Clone ID: LIB3148-057-Q1-K1-B6
gaacgtaagctcctgtctaacgatggacctgagtggataggccacactgaaaggagactagttcaagcaaaaccaacagatgtgaagcctaacgttgtggttgctaaggatggtagtggaaaatatgataccatcaccaaagccttggctgaagtccctctgaaaagcccgaatcgatttattattcacattaaggctggtacttacaaggaacaagtccttttacccaaggagatgactaatgttatgttcatcggtgatggcccaactaagaccatcatcaccaatgaccttaactgcattagggatcatccgcttaaaacattcggcactgcaacagttggtgtggatggggctggtttcatggccagggacattggattcgagaacacagcaggaccccctggtca

SEQ ID NO: 32053 - DNA, 298 bp, Gossypium hirsutum
  Clone ID: LIB3148-057-Q1-K1-B7
agaagccctgtactaagagtcagattgtattttgttccctttactaaaaaatgggctaatgagtccctgtacattaaatcagagaacatattggtcttttttgttaagaatttcatccattcctactgttaaaagccgttgtgattgatggagtaattagacagctatacgtggcatgccatgtatatcttatgttgacatacatgggctagtttttaagagtaaaaatggatgaaatttttaatagaatgaccaatttattttttgatccaaagactctttccgccatttttggaat

SEQ ID NO: 32054 - DNA, 396 bp, Gossypium hirsutum
  Clone ID: LIB3148-057-Q1-K1-B8
ctcaccgccatttgtgacgcacggtgttgctatgaatcaaagattgattcaattgggaagtgtggaatttaacaaaaatgtggccatatatacaaacaacattgttcttcaagctcccgttaatagcaacattgcaccacctggttattacatgctctttgtgaactacaatggagtaccttgccgtcgatcaatgtaggttcgaattttaccttaaatctttcacaacaagcattgaattgtcaaaaccactatatgtaatacgaatcattggtcacgttttggttcacaagttgctatttgaagatcttatataaaatgtggataattagatttattttaatttctctttataaattcttaagtttataatattttataacaaatatttggttt

SEQ ID NO: 32055 - DNA, 324 bp, Gossypium hirsutum
  Clone ID: LIB3148-057-Q1-K1-B9
cccacgcgtccgcccacgcgtccgactaagtatatttttaaattttgttatttcttataattgcaggatcccatgcttagtagaaatattagacctgacggtgatgagcaatcaaatttacaggataagcctaatggccaaagtgatgaatgttgctcatatacaagctcaaacagggaaagttggggaagatgctcttcactggggggcagtgatgaagaatcttcagcagactgtacggctgctaataacggaaatcaggtgactcttgatgtgcttgcaacacctctgaaaagcacgcagcaaaaatcaagtgatccaccc

SEQ ID NO: 32056 - DNA, 388 bp, Gossypium hirsutum
  Clone ID: LIB3148-057-Q1-K1-C1
cataagccctgtactaatagtcatattggattttgttccctttactaaaaaatgggctaattggtccctgtacatgagatcggagaacatattggtcttttttgttaagaatttcatccattcctactgttaaaagccgttgagattgatggagtaattagacagctatacttggcatgccatgtatatcttatgttgacatacatgggctagtttttaagattcataatggatgaaatttttaatagaatgaccaacttattttttgatccaacgactctttcgtacatttttggaatagatgaagtagagtgccatcagcttactagtagtacaacagtctttatgatattttcactgatcatattctacactgttcgcaacatga

SEQ ID NO: 32057 - DNA, 288 bp, Gossypium hirsutum
  Clone ID: LIB3148-057-Q1-K1-C10
cccacgcgtccgccccgaagtgcataaaaagctcataatggtcccagtgtgaagggatactgctcgcatccttcacttctaataccatattttttgtttggaatcaattaaggtgggtttagatggacgttgcatttatttgtagttagtgtaaaaacagcgataacggtgaaattagatactataatgatactatagtatgagataaaaaagtaaactaaacgtgcaccgtccatccaaatccatatttaattttttttcttggagaaacaaaaattttgtactttg

SEQ ID NO: 32058 - DNA, 176 bp, Gossypium hirsutum
  unsure (1)..(176): unsure at all n locations; Clone ID: LIB3148-057-Q1-K1-C11
cacaaaatgaatgtattgggttttgtcatctctcagtactttatgggcagctgttgcttgatgaatatgggtattntgcaggtgtattttgttgaacatgttgaattgagtttgtgggagatttcgatggactaaaaagctttttcgtaataaatatatacaatttattcccaccc

SEQ ID NO: 32059 - DNA, 139 bp, Gossypium hirsutum
  Clone ID: LIB3148-057-Q1-K1-C12
aaaaacccttcttttgtaaaaaaaacaaatcttaacgcatataaaatgtctttgtctattggggtgaaaaaaaaaaaaaaaaggaaaaaaaaaaaaaaaaaaaaaaaaaaaaaaaaaaaaaaaaaaaaaaaaacaaaaa

SEQ ID NO: 32060 - DNA, 179 bp, Gossypium hirsutum
  Clone ID: LIB3148-057-Q1-K1-C2
ctccacgcctgcgccacgtaaaaataaataatttccatcactaaagcccataatcacccccagttgaagcttttccacttaaacgccccccccccttctctttctcaatccaaattaaaaaacaaacccactttcgcaacttttttccttttcacaccctcccatttatttcttttctt

SEQ ID NO: 32061 - DNA, 234 bp, Gossypium hirsutum
  Clone ID: LIB3148-057-Q1-K1-C3
caagttgtcttctagtctcagcccctcagtaggtccaatgaccagtgaaacaatagtaatattgttgggctaattctctgtgtaaatttcgcccactttaatatattttgtttaattcaactttttcaattacatattagagagtacattgtgaataaatttactcaagctattgatttatttaaatcgcatggaaaggatcagaataaataaattaaaataacatattatgaa

SEQ ID NO: 32062 - DNA, 265 bp, Gossypium hirsutum
  Clone ID: LIB3148-057-Q1-K1-C5
gtcgcttatggctgctcggtcctcaatagttgtattctcagcaaccattttctgcactggggcaacaacagcagcgagctttgcacagtcaacttggcatgagctctggcggaagcacaggccttcatatgctgcaaactgaatctagtactgcaggtggcagtggagcacttggggccagagggtttcctgattttggacgtggttcttctggagaaagcatccatggtggcaagccaatggcaagtggaagcaagcaagatat

SEQ ID NO: 32063 - DNA, 343 bp, Gossypium hirsutum
  unsure (1)..(343): unsure at all n locations; Clone ID: LIB3148-057-Q1-K1-C6
agtataattgttcttaaaataaaactttttcttctaaaaaaccccaaaagctcccacagaaaaaggtgccttctcaaataaaactagaccactcatctanactaattcctacttgttaatcaaccactcttatttactttaatttctttacactcccccccataaatatccaaactttcttaaccctttttattcccaatttaccttttttttttttccccctaatttaattccatctccctttttattaaaaaatgaaaaccgaaaaacccctcgttatcccaatacttaattacttacaaaaaaaccctttttacacacctatttttctatccaaaatccc

SEQ ID NO: 32064 - DNA, 362 bp, Gossypium hirsutum
  Clone ID: LIB3148-057-Q1-K1-C7
aggagaaggcctaaacgacctaaatccctctgcaatgcatgcggagtgtcgggtaaatctggcgggcgctttcccgattaccgaccgagggcaagtccgacgcttatcccatcagtgcactcgaattctcatctgaaagtgctgcaaatgatgaccaaatgtcagaaacctgatgcaccacaaatgatcccacaataaatgcacccaccactagataacatatcagagacacggctctggagatactctcgaaccctatagtgattagatgcaatactcacacaaagtatcccccctcccaatcttacaatataatcttaaaatgcataaaatattgggagtgacaccaatatgattgattc

SEQ ID NO: 32065 - DNA, 392 bp, Gossypium hirsutum
  Clone ID: LIB3148-057-Q1-K1-C8
cccacgcgtccggagaaaaaaaggataggattctttgaaagagaaatttgaaagtcggtgcggggtcatcaaagatgtgttaggtgacaaggtggagaaagttgtggtctctgatcgtgtcactgattccccctgctgtttggtgaccggcgagtatggctggactgccaacatggagagaatcatgaaggcacaagctttgagagataacagcatggctggatacatgtcgagcaagaagacaatggagatcaatcctgagaaccccatcatggaagagctgagaaagagggctgatgctgataagaatgacaagtctgtgaaagaccttgctctgttgctctttgagactgccctcctcacctctgggtttagcctcgatgacccaaata

SEQ ID NO: 32066 - DNA, 416 bp, Gossypium hirsutum
  Clone ID: LIB3148-057-Q1-K1-C9
ccaatttggggctaccgtaatctaccattgttagcgcttcccacgatgggaaagtaattatatggacagtggccaaggaaggggatcagtgggaaggtaaagtattgcatgattttggtacccctgtgtggagggtgtcgtggtcattgactggaaacatattggctgtggctgatgggaacaacaatgtgacgttgtggaaagaagctgtagatggggaatggcaacaggtgactgttgttgagccataatcttctaattttttttttattgtaatatttgcaatgttttatacagctgcatggttgaatcgtttatgcctggaaattctagaaccgaaattttcaacttgaactttttattggatgtagtttgcagacccatcatgttgttgttaaagaaaattatgagctact

SEQ ID NO: 32067 - DNA, 408 bp, Gossypium hirsutum
  Clone ID: LIB3148-057-Q1-K1-D1
gggagaaaggatgaacggtgtggatttgcctcaatggggtgcttctatagtgaaagaagagtggacgtatgaagtattcgagcttgaggtaatgaatgatgcatcttccattagtgatgagttgttaaacactttgaagctagctttacattgtgtcgatccatcaccgtcggcaaggccggaagttcaacaagttcttcatcaactagaagaaattagtgcagatacaccagctagttctacaccgccatgatatatggtttatatgctatacgcaatagagtataaattctttcattcttacaatataatcttaaagttcataataaattttgtgttacaccaacttgattgattcagtatgtttcaattctttcattcttaccatataatcttaaagttcataat

SEQ ID NO: 32068 - DNA, 376 bp, Gossypium hirsutum
  Clone ID: LIB3148-057-Q1-K1-D10
tgcaccatttgttgcctcctacaaaggcttcgaaatcgacgcatgcgagtgcccggtttgcgtgacagtagatgagatcgccaagaaatgcagcagcagtgctgagaagaggttctggtgggacgagccgacaatgtcggagttaagtttgcaccagagccaccaactggtgtgggttagggcaaaccacttggtctatgactattgtactgatactgctaggttccctgtcaagcctgtagagtgtgagcaccaccgtcactagtagaccagctaaagcaaaaggggttcttttgggtacattgtaaaaacatgttgtatggggcggtggaagaaccttagtcataaaaaaaacatgtactccatgtttcgtttt

SEQ ID NO: 32069 - DNA, 414 bp, Gossypium hirsutum
  Clone ID: LIB3148-057-Q1-K1-D11
gggagctttcaatgttgaatgtgatgaagtggatccaagtgatgtgattaaggtggtaaaaactgtcaagagagctcttgcaacatatgggactcaagcactgaaagaaatgatccagaattgtatggcacaagatttttcatggaagggaccatcaaggttgtgggagaagatgttgttgagcctcggggtggctggcagtgaacctggcattgaaggagaggaggttgctcctcttgccaaggaaaatgttgccacaccctgagcataatcagaaggcaactatggataaagcttagtaacctgttttcttagacaaccaagtccaagtacctgtctactctcgatagccattggcttgaccggcggaaaacaaactgacctgccatacgtgaagtcagtagtgctattttt

SEQ ID NO: 32070 - DNA, 409 bp, Gossypium hirsutum
  Clone ID: LIB3148-057-Q1-K1-D12
cccacgcgtccgaaagtcagaaagattctcatcctgtgagccagacttcggcccctgtaattcaggatgatgctccgaagaagtcatatctatcagttgtacatgcattgacaaagaattctgctccatttattgtgagagctccggctccgaaacctaaacctgtgcagcagtctcgcaaagctgcaatacctgaagaatctgctcctaaaagctacaatacctcagaaaagagcaatgaatcttcaggtaagaatacttcgatatttgttgcgaacttgcctatgagcgcaactgaggaaatgctgaaagaggttttccaaaaatttggaccaattaaacccaatggcatccaagtcagaagctttaaggacaacaaaaactgctttgggtttgtagagttcgagtc

SEQ ID NO: 32071 - DNA, 399 bp, Gossypium hirsutum
  Clone ID: LIB3148-057-Q1-K1-D2
ggtagccatgcctgggaaactgctcgtgctagtccgtccctttggcgctgctgtaacgtagtccagagtcttcaatgtttgggctctgtgcacctgctttgaaaacggacggctatgagcgatgaccatttctgcggcgctaatcatcacactagggtttgggctaacgttacccttaggttgaataattgggccacgactgggtctaatgtactgggctaatggtttcatgactgtcttggactcaatggatatctatggttttttcatttccgtttaagaactgagaaagaaggctgatgctgataagaatgacaagtctgtgaaaaaccttgttctgttgctctttgagactgcccttctcacctctgggtttaacctcgatgacccaaatacttt

SEQ ID NO: 32072 - DNA, 338 bp, Gossypium hirsutum
  Clone ID: LIB3148-057-Q1-K1-D3
cttctccttctgaggattctgagcaacttttgaaagcttttgaaggctggggtacgaacgagcaagggattatcgacatatgggctgacaggaatgcagcacagcgcaattcaattcggaaagtttatggtgaagcttatggggaagatcttctcaagtgtttggagaaggaacttacaagtgatttcgagcgggctgtgctgctttttacgttggaccctgcagagcgagatgctcatctggctaatgaagctacaaagaagttcacatcaagcaattggattctcatggagatagcttgcagtaggtcttcgcatgaactactcaatgtgaaaaag

SEQ ID NO: 32073 - DNA, 356 bp, Gossypium hirsutum
  Clone ID: LIB3148-057-Q1-K1-D4
cccacgcgtccggacaaactctttaattcttagaatcctgctgaacttgataattggctcggtgaggtcaacccgaattccagagtgggggtacctactgcatatgcagtgccatcacttggtaaggctgctgtaggggatacatttcaattcgaaaggctaagctatttcacaattgacaaggactccactgccgagaagctcgtctttaatcgtacggttactctcaaggatacctacaagtagggtgggaaataagtaagggccccatgaaccacgcacatcaagaatgcagttatgaacacacactcgttatacagtttgctgttttaatgaaattcgacatggttttgata

SEQ ID NO: 32074 - DNA, 178 bp, Gossypium hirsutum
  Clone ID: LIB3148-057-Q1-K1-D5
cccacgcgtccggtttgtaagcacttctgactgtatattctccggagagttccccgttcgatacttcttgcaataggatatgaattttaataaaaaaaaaaaaaaaaaaaaaaaaaaaaaaaaaaaggaggccaaggggaaaaaataaaaaaataaaaaggcgagcgtgcttccaagt

SEQ ID NO: 32075 - DNA, 166 bp, Gossypium hirsutum
  Clone ID: LIB3148-057-Q1-K1-D6
aggtattttaactctttgctaaattaccttttggtttccctttcgttggaatggacattggtgttttctgcctgtggctgtgggagcaaaattaaattggagtgagcgaaacttttttactttgaaaaaaaaaatacaattcaaaaaaaaaaaaaaaaaatatttt

SEQ ID NO: 32076 - DNA, 220 bp, Gossypium hirsutum
  Clone ID: LIB3148-057-Q1-K1-D7
gccaattgggccgtaagttttaatttgggtctaggtctgtttttggtatttgggctattgggaaaaaaaatggactattttatttcagtttctagtttatgggccccgggctaaatggggtcataacacatatcatgatatattctagatcttttcctgatgtggagatggggaaagagtacaaatccgatggagggtccagttcgtcagctgtgactat

SEQ ID NO: 32077 - DNA, 365 bp, Gossypium hirsutum
  Clone ID: LIB3148-057-Q1-K1-D8
gccaggcggccattttgcctaatatccgtcatatgtgcggtgacatgttcggtggcgggggcataccagactgaataccggagccatcttcagggagctgtcaacggatcaggaaactttttgggaagctgtgtggaaagcagcgtctgcctcaattgccgagtctactatagtgaatgacttcgactatatgtgctactctattggctatgaaaacactttgcaaacctacttccgcccataagatgctggtgtagaggttggagcctacatataagctttcacataatgtactatatgccgttgtcttcaccatggccaccatgttgcctacttaattgcctgtcttttttgactaacatttc

SEQ ID NO: 32078 - DNA, 411 bp, Gossypium hirsutum
  Clone ID: LIB3148-057-Q1-K1-D9
cccacgcgtccgcccacgcgtccgcccacgcgtccgcccacgcgtccgagccaaggagggcggtcgaagcagaatctgaaaccagagttttcccaggatttaaccgtgtccaaccctgaaatgattcaacttccttcatgttctgcaggagcaataaacctgggttacttctggggttactaaaattgaatattcaaaactgaaaaaaggaaaaatcaatggatgtaaatggattgaaagagttggaagaatattattgtcatgtgtgcatagataacattagtaggggaagtcaagaaaatgattgtgttgtaaaagtagttaaaactctgttaaggttttcattgccatattaggatttcactcgattatctcatcccatgcctttgtttgatacacaactattgtaat

SEQ ID NO: 32079 - DNA, 239 bp, Gossypium hirsutum
  Clone ID: LIB3148-057-Q1-K1-E1
acagccaattgggccgttagttctaattcggttttaaggctagcgcgagcatctgagctctcggttaaataaatggaggagtgagaggcaatttctaatttatgggccccgggctaaattggctcataacacatatcacgatatatctctatatctttccctgatgtgcagatggggtaagagtacaaatccgatggaggatccagttcgtcatctggtactatgcactgtgcatacca

SEQ ID NO: 32080 - DNA, 239 bp, Gossypium hirsutum
  Clone ID: LIB3148-057-Q1-K1-E10
gttgcgtggacgcagttatacttatgattgtcttctgggttttgtaacttaccagaatgaatacatacatagatatgatccctctgttgaagaaaggtttagactagattggtattgtttggtttattattggttggctggataaagcaaaaaagtacatgctaaataaatgtttctatttcctttccttccgttactgttattattattttatattaagaataagacaattatttagt

SEQ ID NO: 32081 - DNA, 74 bp, Gossypium hirsutum
  Clone ID: LIB3148-057-Q1-K1-E11
cataattcagttagtagtatttaggaataacattcctcgactttttaagcattaaggcattgtgcttcttttcg

SEQ ID NO: 32082 - DNA, 386 bp, Gossypium hirsutum
  Clone ID: LIB3148-057-Q1-K1-E12
caaccatggcagtctatgatatcaggtttccttgcgggaacagctggtccagtatgtactggtccctttgatgtcgtcaaaactaggttgatggctcaaagtcgagatggaggggaggtgaagtataagggcctggtccatgctatccgaacaatatatgctgaggaaggacttcgcgctttgtggaaaggactgctgcctcggctcatgaggataccacctggccaggccataatgtgggctgttgctgaccaaataattggtctctatgagaggagatactttcatagtgcagctctataaacttgtactttttttgcttgttctggttttgattaccatagcaaacgcaaatctttgaaatcttggacaccatttttttcagt

SEQ ID NO: 32083 - DNA, 407 bp, Gossypium hirsutum
  Clone ID: LIB3148-057-Q1-K1-E2
agcacaagcattaaagctgaaaagatttatttgtatcaaggttttgatcctgcttccgtagactttggctccaaatgaattaagccatgacacgcaaatggaagctattaaccaaagagatgcagatattctctttttatggcatatgtacaaaaattcggaagatggatcgaagaagaaagaaatactgaaacagatttctgagactatgaggcatagaatccacttggatggcagcattgacttgattggaacagtgttgtatggaccagcaaaaggctctgtcatcctcaataccatcagggaacctggtttgccccttgttgatgactggcagtgcttgaaatccatggttcgcttgttcgaaacacactgcggttcactaactcattacggaatgaaacaca

SEQ ID NO: 32084 - DNA, 325 bp, Gossypium hirsutum
  unsure (1)..(325): unsure at all n locations; Clone ID: LIB3148-057-Q1-K1-E3
cccacgcgtccgaaaaataaaaaaaaaaatttaaatttaaaaaaaaaaaaaaactaacaaaggctagggctacatatgaattagggcccgtccctcaaatgnattctattataccttagagatgctgatattctctttctatggcatatctacaaaaattctgaaatgaatccaatatcacagaactactgaaacatatttctgatactattttccttatcatccacttggatgagcaaattgacttgattcgaacatcctttcatttaccaacacataactctttctttctcaatcccttcatgtaacctttttttccccttgt

SEQ ID NO: 32085 - DNA, 401 bp, Gossypium hirsutum
  Clone ID: LIB3148-057-Q1-K1-E4
cccacgcgtccgcccttgagtgccgacgttcagccttgtgccaaagctccgattacgacagagacggcatcaactcggtggtgccggcggaaaaaggtaagtttccctttcttcccttctttttattttaaaaaaagaaaaataaaaagaaaatatatataataaaaagtaaaagaacgatgagcaccaacaaagtagaataaaataaaataaaaaaacctttgtattcaaaaagatttttgtatctgtattcaaattttctgtcttttgctttcgtaaaaatcccccttttgcagatttctttcctggccttaaatagctggaaataataaataatacacatgataaaaatacaaaatccctcttttccgtttgttactcgtttttcccctttattttgc

SEQ ID NO: 32086 - DNA, 274 bp, Gossypium hirsutum
  Clone ID: LIB3148-057-Q1-K1-E5
caccacacatactaactttaaaacctacattttttacttaaaaccaaaactcctactgccacagaaactttttaaaaaaaagtaagaccctctaaaaaaaattcattaccctttctttccttttttctattttaaaaaaaaaacaaaaaaccttaaatatttcttacaaaaaacccaagaactattaacaccaacaaaatgatacaacattctgttttctttacctttgtatacaaaaaaaaaatttgtacctcattatcaaaaaatttttttc

SEQ ID NO: 32087 - DNA, 417 bp, Gossypium hirsutum
  unsure (1)..(417): unsure at all n locations; Clone ID: LIB3148-057-Q1-K1-E6
acgacgtacgagcacaagcattaaagctgaaaagatttatttgtatctaagttttgatcctgcttccctaagctttggtcctaatgaattaaggcatgacacgcaaatggaagctattaaccaaagagatgcagatattctctttttatggcatatgtacaaaaattcggaagatggatcgaagaagaaagaaatactgaaacagatttctgagactatgaagcatagaatccacttggatggcagcattgacttgattgggacagtgttgtatggaccagcaaaaagctctgtcatcctcaataccatcagggaacctggtttgccccttgttgatgactggcagtgcttgaaatccatggttcgctttgtcgaaacacactgcgggtcactaactcattacngaatgaaacacat

SEQ ID NO: 32088 - DNA, 203 bp, Gossypium hirsutum
  Clone ID: LIB3148-057-Q1-K1-E7
tgaagattcttctttacctggacattgtgttatataactgtgggttttcagcgtgatttggttgtactagagtattagaacgattgcaaggttgaggttttaggttataaaataaaacaaaatccaagcaggtaaactgaaaaaaaaaaaaaaaaaaaaaaataaaaaatagaaaaaaaaaaaaaaaataaaataggggggcc

SEQ ID NO: 32089 - DNA, 395 bp, Gossypium hirsutum
  Clone ID: LIB3148-057-Q1-K1-E8
tttttcttagttggacttgtcatgtttttcatgttaccaatcaatgtttgctactagtttcggagagttactattgagatgggaacataatttgttctaaaaaaaaaaaaaaaaaaaaaaaaaaaaaaaaaaaaaaaaaaaaaaaaaaaaaaatataaaaaaaaaaaaaaaaaaaaataaacaccaacaaaaaaaaaataaaataaaataaaaaaaaccatagaattcaaaaaaaaaattagatataaaaaaaaaaaaatataggggggggttttctaaaaaatacaaattttgcaaatttctttccagaccttaaatatcttgtaataataaataatacaaaataataaaaatccaaattccctattttccggttggtaataacttttgccctt

SEQ ID NO: 32090 - DNA, 408 bp, Gossypium hirsutum
  Clone ID: LIB3148-057-Q1-K1-E9
attttcttttaaaaaaataaaaaaaaaaaattaaaaaaaaaaaaaaaaaaaaaaaaaaaaggggaaaaaaaaaaaaaaaaaagggaaaaaaaaaaaaaaaaaaaaaaaaaaaaaaaaaaaaaaaaaaaaaaaaaaaaaaaaaaaaaaaaaaaaaaaggggggggcccttttaaagaaccaaattttatttccccttctttccaaagaaaaattttttttttggggcccccaaaattaaattcctggcccgggttttaaaaacgtgggaatgggaaaaccctggggttaaccaaatttaatgcttttgaaaaaaatccctttttcccaagttggggaataacaaaaaaggccccccccgttcccctttccaaaaatttgcccaccctaaatggaaatgggaaccccccc

SEQ ID NO: 32091 - DNA, 307 bp, Gossypium hirsutum
  Clone ID: LIB3148-057-Q1-K1-F1
cccacgcgtccgctttaaagaaaaaaataaataaataaaaagaagtgaaaaaacatatactgacagggcatcccattcataagccacggtacatactatattcaaatttagtatcagcaattcaagagagtaggtaactctatagtctgttgtaataattttttatcggaaaaccaatataatactcatataaattattttataattttttttattatttagtaactaataatgctcgtttttagaaataaagaaaatgtaataacgagagataaaaataggagatgaactggtagtatatgttttt

SEQ ID NO: 32092 - DNA, 290 bp, Gossypium hirsutum
  Clone ID: LIB3148-057-Q1-K1-F10
gtgggattgggagaaacagagggcaaatcacatgtcttccattccaaacaccatgtgaaaatagagatgaatatgtgttttgggatgcattccatccaactgagaaagtgaatatcataatggcaaggaaggccttcaatggtgatccttccattgtttatcccatcaacattcagcagcttgccaatctttgatctttgtattagtaccataaataagccattatctggcttattttctttgtgtacttcattttctggttgattgtaaaggaagagcactttggttca

SEQ ID NO: 32093 - DNA, 396 bp, Gossypium hirsutum
  unsure (1)..(396): unsure at all n locations; Clone ID: LIB3148-057-Q1-K1-F11
cttattgcaagagcaaggagtgcaggaagcacactttgcacaaggttacacagtataagaagggtaaggatagtttggctgctcaagggaagcgacgttacgatcgcaaacaatcaggttatggtggtcagaccaaaccagtcttccacaagaaggcaaagaccaccaagaagattgtgctacggctgcaatgccagggttgcaagcatgtctcacagcatccgatcaagaggtgcaagcactttgaaattggtggagacaagaaggggaaaggaacatctcttttctagatgtgatgatattcatgtcaaattttatgttatgggtttttacttggaacttcangcagaatggagttttgttaagtttgatattagtattctaatgttgttttta

SEQ ID NO: 32094 - DNA, 376 bp, Gossypium hirsutum
  Clone ID: LIB3148-057-Q1-K1-F12
gataatccggagttcaatcatctaaaagaagccctaaaatccttgaatcaggtctgagcttgtggtttgttaggcctctttgatcaaactaagtttcatgtctgatcttgacgttcaaattcctactgcctttgatccctttgctgatgcaaatgctgaggactcaggtgcgggtgcaaaggagtatgtgcatattcgtattcagcaaaggaatggtcgcaaaagcctgacaactgtccaggggttgaagaaagaattcagctataacaagatacttaaagacctgaagaaggagttttgctgcaatgggaccgtggtccaagaccctgaattaagacaggtgattcaacttcaaggtgaccagcgtaagaatgta

SEQ ID NO: 32095 - DNA, 406 bp, Gossypium hirsutum
  Clone ID: LIB3148-057-Q1-K1-F3
gcatctcccatctagtgtagattctgacactggctctgatgatcccaagaacccgaagtggtatgtggtatggtcaaatattgcaaacatgaatattcttcccgagtctgttgtgagtttcagacctagtaacatgcaaggtcaagctccactgaaggcagttgctggtgtcaagtattccctcgaaaaattattttcgaagattaagagctctctacctcctggcaaagtccaagaaatattgatgatatacagcacatatagggtaagtaggtgtgcctgtcaattagattaagttgaacgaaactagatctttgggaatcatattgaatatttgactatacaccgcactttgctaaaaaatcgatccctgtttaccaaatttaaaaaatatttaaaggaattt

SEQ ID NO: 32096 - DNA, 362 bp, Gossypium hirsutum
  Clone ID: LIB3148-057-Q1-K1-F4
atacggtcagaaatttacaacgcagatccgtggaaacgtcgaaattgaccaacaaaagctggaagtgacgatttactcgccggcatttgtgacccacggggttgctatgaatcagagattgattcaattgggaattgtggaatttaacaaatatgttgccctaaatacaaacaacattgttcttcaaactcccattaatagcaacattgcaccacctggttattacatgctctttgtgaactacaatggagtaccttgccgtcgatcaatgtgggttcgaattttaccttagatctttcacaacaagcattgaattgtcaaagccactatatgtaatacgaatcattgttcacgttttggtt

SEQ ID NO: 32097 - DNA, 328 bp, Gossypium hirsutum
  Clone ID: LIB3148-057-Q1-K1-F5
ccggcttgttggcttgctgcgtttggcttctgaatgcacaggtcacatgtccaaggttcgagggctggtgccagagagaagaagataatgggattgaatgacaaggaaatagttgcattatctggtgcacacacgcttgggaggtccagaccagaacgtagtggttggggtaaaccataaaccaagtatacgaaagatggaccaggagcaccaggaagacaatcctggacagtgcaatggttgaagtttgacaattcatacttcaaggatatcaaagctaaaagagatgaaaatctgcttgtgttgccaactgatgcttgtctttttg

SEQ ID NO: 32098 - DNA, 411 bp, Gossypium hirsutum
  Clone ID: LIB3148-057-Q1-K1-F6
tcaaccatctttgccctttcattgcttccttgcctgccttaaacctccttcaagcatagggatgactactgaaatggtaatggttgatgaagtcccttttcctccacaaatcacaactaccaagccactatctcttttgggtcatggaattaccgacattgagattcactttttgcaaatcaagttcacagcaattggggtttaccttgaaccagaagttgtaggacatttgcaacaatggaaggggaagcctgggaacgtgctagctgaagatgatgacttcttcgaggctcttattaatgctccagtggagaagtttctgagagttgtggtgattaaggagatcaaaggttcccaatatggagtgcagctagagagtgctgtgagggaccgattggcagctgacgacaa

SEQ ID NO: 32099 - DNA, 404 bp, Gossypium hirsutum
  Clone ID: LIB3148-057-Q1-K1-F7
gaaggttttatcgataacgtaaggaaacatcgggaacgcaacaaatattttttggttttaaccctacgacatagacggaatggaaaaggaccacatagaactattttaaatttacgacggatcagtcgaccaggtctacgaatctattctaactatcaacaaattcctaggattttaggcgggatggggattgtaattctttctacttctcggggtataatgacagaccgggaggctcgactagaaggaatcggtggagaaattttgtgttctatatggtaatctgtccggtatacgaattgtatccgaaactctccatttgtgcaaaaaaaaaagaaaaaagcacgggttgtctaataaaactcctcctgccctacggtagttgatacgtcaaagaagtttta

SEQ ID NO: 32100 - DNA, 412 bp, Gossypium hirsutum
  unsure (1)..(412): unsure at all n locations; Clone ID: LIB3148-057-Q1-K1-F8
gaagcggtcgtcttcacatgttggagctgccgaaaagaactcccagtaccagtatcagtagcagtacccttggtccatcaaactcgatagatcatcggtttcgcttatagacagtgagtgcggttccaccagtacggtattgacaaacaccaactactgcagatcccatttcgggtacgatgtaagagtatgaaataacaccaaatggaatctcgaaaatgaattcgctctattcaactgagggaaagtaatcaggagccaaaaaaaagtttgacttctatgactaatgtagaagttttactgtgaacaatgacctgcgaaaattgcagggactagtgatgtagtaacattgtgtcaatagaaattctctggttgatttattctgatgactaggntttttattttatgtatt

SEQ ID NO: 32101 - DNA, 410 bp, Gossypium hirsutum
  Clone ID: LIB3148-057-Q1-K1-F9
cccacgcgtccgattctacatcttgcattgcctcaccaatttcatctatccagaataattgacagccagataaagaaacaaatccaaccacaacatcacgtcctcaagcatgtgataatgttatacatgttataaggcacagtagcttccgagttggcaatgagcagccagtgatggaaaaagtagatacaggtgtccaaaatgtagatgttgggaaactcataaatgttgtgagggatgaatcagacacaagaaacgtgacaagcccaatgaccctcaggtcatcaaatgttccagattatcctggcattaaagaaatggatgtcaggaactccatttcttcatctccaaaactggattcaccagaccctacgaagccaagctcttctctaacagacgaagagacacca

SEQ ID NO: 32102 - DNA, 330 bp, Gossypium hirsutum
  Clone ID: LIB3148-057-Q1-K1-G10
ctatctcatattacagcaacgcacaaagcttctccaactgtattcataaatgctctccaaggacaattaggggacagtaaattgggtttaaaaaaaaaggtcagggccagctcggggaataattgtatagtggcctacctgtataaagaactagcatgttaatttaaactggattcctagttataagtcatgttttacaaatattgcatcttgcattcttccaatatccttgtctatcatagttcacactggtgagaaagataaaagagggttattgttattatgtttgaaaaaaatacacacaacgagaccggtatactttccaaaaca

SEQ ID NO: 32103 - DNA, 101 bp, Gossypium hirsutum
  Clone ID: LIB3148-057-Q1-K1-G11
caagtcaacaaaggcaaaagcatagcttgcccttatttgagggaattaatttaataattgggtaataaatcaacttccagaattttcaatattatgaccct

SEQ ID NO: 32104 - DNA, 412 bp, Gossypium hirsutum
  Clone ID: LIB3148-057-Q1-K1-G12
cccacgcgtccggagacttgttaaaacagtactcaaggaagcagcacagaaaagagaaatgagatactcagacctgaacaagattgatagaggggtgaggagacattttcatgatgatataacagtcatagttgtctttctagatccccatttgatcaatggaagctcatgctacaactctcccatgtcgataaaaggcggaggaagacttgccagcctctgctagtaccgttgctggtgactcatcgctaggaaattaagatgaagagctaaatgtctaaaaaacttatcctcaaatttccttacaaataggggactaaccttgttgagattgcaagacaatgtgtagatatggtttcatgcaatttagttggtaaattgtctgctctcctgctaccacaattgataacgt

SEQ ID NO: 32105 - DNA, 416 bp, Gossypium hirsutum
  Clone ID: LIB3148-057-Q1-K1-G3
gagagatttgcggtatatatcgttattcctttgtggcccgagggtgatacaaaatctcttgctgtgcaggaaattctatactggcagtctcaaacaatgcaaatgatgtatgatatcgtcgcacgagaactcaagagcatgcagattacggactcgcatcctcaagattacctcaatttctattgtcttggtaagagggaagaggtcaccccggaaatgcttggtggaaaaagaacttcggtctctgactctgcaaagttcggtcggttcatgatatacgtgcatgcaaagggaatggtcatagatgatgagtatgtgattgtagggtcagccaatattaaccaaagatccatggctggtacaaaagacagtgagatagctatggctgcatatcaaccacattatacatgggctga

SEQ ID NO: 32106 - DNA, 333 bp, Gossypium hirsutum
  Clone ID: LIB3148-057-Q1-K1-G4
tttaagttttatatatgtaattcccatcaactaaatgaattttatatttgagtactttatgtcttagggtctataattgtgacgcttggttttgttttgtttcgtattagtgtgggattatttgctacttggtaacccattcaatcttttgttacattataaaaaaaataatacaaatgtgtgtgtaaaaataaaaaaagaaaactactacaataaattgaccagttcaacaatgcagttctgattctgaatcttctgaaaaagctatgtgcaaggagctacttgtacccataaaacattattcattcaatgggattttgtcattgtaaaatt

SEQ ID NO: 32107 - DNA, 375 bp, Gossypium hirsutum
  Clone ID: LIB3148-057-Q1-K1-G5
gcgcccacgcgtccgtccactcttccgtccactcttccggggggtgcaagagacttgagtggcgggggagctgtataaaaacgaattctattattacccaccaaggtatgccactgagttctatgctcatcctccacagcacttcactgatgagaaccctcaagcttgccctataatgtaatgaacaaaaaaaagttaggtgctctgctgatctacacgttcttctacttgttctgcttaatggctctctaaaaaagtataatctacaatgaaactctagaattctgccagtttgtatttttctttaaaatgttatatataattatatctaaaataaagatatagttccaacttatttgcacatacttttttcta

SEQ ID NO: 32108 - DNA, 388 bp, Gossypium hirsutum
  Clone ID: LIB3148-057-Q1-K1-G6
tgagaatagtatcctcaagaaaacgagagatgctgtgataactcttcagggagttctggaggggaagcatgataaaacaatcgaagagtccctagatcagcgtcagatgtctaaagatggatggtggtcagcactttacagaatggttgaaggtcttgctataatgagcaaattgggaaggagcaggcttcatcaatctgattatggtttcgaagacagatcaatcgactgggatcaaactgaaatgtagagttcaatctctcccgtctggattttggattcataactgaatgcgttttggagtgtagcatctgaaaattgtccaaagtttacatcaaggattgttagccatgaatctgtctgataaccttctctttttttttttttt

SEQ ID NO: 32109 - DNA, 400 bp, Gossypium hirsutum
  Clone ID: LIB3148-057-Q1-K1-G7
caagaataagaatactgcacttcattatgcagctggttatggaaggaaagactgtgtggcgcttttacttgagaacggtgctgctgtcacactccaaaacatggatggcaagactgctatagatgtagccaagctcaacaaccagcatgaggtgcttaagttactggagaaggatgctttcctgtgagttggagtgtcggcagcagccatgtgtattgtgtgggtcctagcatgtgataggccatttcactgtgctattagacaaaaacaaatttgctttcatttcgtatgcgggttatgatcacacagtcacggctcgactagttgtccatgctgtctggttgctacatgtaacatttttttttccctctctaaatattaattttacaattgattttct

SEQ ID NO: 32110 - DNA, 407 bp, Gossypium hirsutum
  Clone ID: LIB3148-057-Q1-K1-G8
ttccttagaggcactgaattggtttcggatgctcgaggaatggcagctttggtatacatgctgttctacgaattgtatatgctaatctgtgactggtgtgctacctccctttgttccatttgctcaggcatttgcagcagtaataactgctgctcttaccggttctctatattatgtggctgcctctccgaaagatcctacttacgtagttgcaccagttcaacgatccggttctgctcgtgaagatctgaaaaagctattcgcaggtgctcattctacccataaaacatcattcattcaatggtatttttccattgtaaaatttcaggaggctcatctttatccatggccttgaggcaaacctaatataattgcatcactgggaactaaatgttgtgatccgacag

SEQ ID NO: 32111 - DNA, 438 bp, Gossypium hirsutum
  unsure (1)..(438): unsure at all n locations; Clone ID: LIB3148-057-Q1-K1-H1
tccacccacgcgtccacccacgcgttcaatagacaccctgctctaaattttacttctaaaaataaaaaacaaatactgggtggagcttttacttaaaaaagaggtgcggctatcacactcctnnncttatattgcaacactgctttgggctgccgccttttaaacaaccactttcaaacccctaaattacaaaataaagattcttttctgtgaccccaaatttaaacaactgccccccgttttacaacacccctaacataaaaaaccccactttaccccactatttaacctttacaaaaattcccctttttcctattcgggttataatcaaaaaaaccccccccatccccctttccaaaaatttctcaaccctaataaaaaaaaaaaaacccccttctttaacactttttttacaaatgatttttttttttccccccc

SEQ ID NO: 32112 - DNA, 410 bp, Gossypium hirsutum
  Clone ID: LIB3148-057-Q1-K1-H10
ggcaatcaaacgtggaggcttatcacttgcatctggctgcacgctggtgttattcatcttgttgcaaacatgttgagcttgatcttcattggaattcgccttgaacaacaatttggattcagtacgttatctgttcccttttgcagtggtagcgtactatcgtctcttttcattcaacgtagcatttctgttggtgcctctggtgctttatttggccttcttggagcaatgttgtcagagctgctgactaattggactatctatacaaataaggctgcagctctgatcacactcacggtcatcattgtcattaacttagcagtgaggattcttcctcacgtcgacaactttgcgcatattggaggtttcttaaccggttttctcctcgggttcgttttgctgcttcgtcc

SEQ ID NO: 32113 - DNA, 427 bp, Gossypium hirsutum
  unsure (1)..(427): unsure at all n locations; Clone ID: LIB3148-057-Q1-K1-H11
cccgggtcgacaccacgccgtccgcccacgcgntccgggaaggtaaccacacatatttattgttcatatgtgtggtttcaaaaatgatgtgcggttgtatgtagtgtttcaccacaagctctgaaggatttgatgaaataagatggttaacattttttttattctctgcaaatttaaattctagccttgtctttaaagggtagcccgcttattaacatattgcctttttctggtatgttattggtagtaccctaagcttacacttttcctatttgtacattggatataatcgtatgaattttttttttttttaaaattcaaaaaaaaaaggtgtgtttattctacttttgtggctttttctcggattaaaatttttcttttttttgttttttggtagagaggggaaaaatttaaggggggggggttt

SEQ ID NO: 32114 - DNA, 383 bp, Gossypium hirsutum
  unsure (1)..(383): unsure at all n locations; Clone ID: LIB3148-057-Q1-K1-H12
gatactttcccaacttctcgaccttccgatatcggacggntnaggggcgatcgttttagaagtataactgggagagttcaaactgtgatcggggacctcncaactcaaggggaacgatttcagtccttgctaagctggagagacccgagagcaaccacattatttgtgacattctgtttgatcgctgccttggttctttacgttacgccattccaagtcgntgctcttcttgcaggaatttacattttacgacacccgaggttccgtcacaagcttccatcgacacctcttaacttctttaggaagttgcctgcaagatcagacagcatgttatgagcaccccaagcagccattatatgttttccgatgttcgcggcaatcgg

SEQ ID NO: 32115 - DNA, 296 bp, Gossypium hirsutum
  Clone ID: LIB3148-057-Q1-K1-H2
cccacgcgtccggtcaatcacctctgaagtttgaaatgttgtaatgctattgacaaaaagaagcttgtattgtcgggttttaaaatagactataacgaggattagataaggcgaataaaaaaaaaaaaaaaaaaaaaaaaaaaaaaaaaaaaaaaaaaaaaaaaaaaaaaaaaaaaaaaaaatataaataaaaataacaaaaaagaggacttacgtaaattgaccagttaaaaaatgaactttcttctctgaatcatcaaaaaaaggtattctcatgagctaattttatgcaaaaa

SEQ ID NO: 32116 - DNA, 415 bp, Gossypium hirsutum
  unsure (1)..(415): unsure at all n locations; Clone ID: LIB3148-057-Q1-K1-H3
cacgaccggagctcacttgcatatatatgatcacggcattacaaattcaaggacttacaagcgtttgctaattgacaaatctgtgtgggcgtattattgctcgtgttgtttctcgaagatggaagccattgtttattgtatgcatagctatggagtttgaagatcagtatttaaccagtgaaattcaatatatgcatatagttttgttagttatttaaagagggattttataggataatttatagtgatttgggtcaacttaatttttttgttttcttttttcatcaatttgtgcattgtggcattaatggtgatacatctaggttttatatgaagaaatattttttttttctttaaaaaaaaaaaaaacaaaaaaaaaaaaaaaaaaaaaaaaaaaacaatnaacaaaaaataa

SEQ ID NO: 32117 - DNA, 181 bp, Gossypium hirsutum
  Clone ID: LIB3148-057-Q1-K1-H5
gcaaaattggtgtgtactgttacttttactttaaaaattatcgtcacttttattatgtgcgtatggtgtatcagatctgtgaggacattatgtatttgatgattatggaacattttcctggtcctcgttttctaaatttctgtatttaaatcttatgtgaaagatatatttccggtttaat

SEQ ID NO: 32118 - DNA, 390 bp, Gossypium hirsutum
  Clone ID: LIB3148-057-Q1-K1-H6
cggacgcgtgggcggacgcgtgggttcagaaagagattcattcgaagattatggagataggaaagaagcacaatgagaccggttctaaagacttgttgcaagtgatgattgaaggttcaaaaggtggtattgggccatctataacagctgatcagttcatagtcgacaactgcaaggatatctgcatccctgcctccgagattactgcagtttccgcaatatggggtctaatgttattggcttcacatcccgaatggcaaacccgtattcgtggtgaggtttcagaaccatgtaagggtggggtgctgagtttcgatgtgcttcacaagatgaaagcgttaaaaatggtggttcttgaagtgctacggctttatccagcaacagcatttg

SEQ ID NO: 32119 - DNA, 406 bp, Gossypium hirsutum
  Clone ID: LIB3148-057-Q1-K1-H7
gctttctctccgattaccaccgctgcttctgccccttattcttcggtttccgatcggagagtatccgttagattaccgggagttcgtggtctcaagagtaaatcgacgtcggcgtcggtggttccgttgttccgatcggtgatccgggagccgcttatacgcggtcgaggtggccgtgtagtatgtgaagcccaggagaccgctgttgatgtgtcagcagtgaatgaagatgcatggcaatcacttgttcttgattgtgaattgcctgtgctggttgagttttgggctccatggtgtggaccttgccgtatgatacaccccgtagttgacgagctgtcgaaggattacgccgggaagctcaagtgttacaaagttaacaccgacgagtgccccaacattgcaactc

SEQ ID NO: 32120 - DNA, 64 bp, Gossypium hirsutum
  Clone ID: LIB3148-057-Q1-K1-H8
aggagaaattcatgttataaattgcaagcaaaactcaacatttgaatgtatgtagttctttgat

SEQ ID NO: 32121 - DNA, 260 bp, Gossypium hirsutum
  unsure (1)..(260): unsure at all n locations; Clone ID: LIB3148-057-Q1-K1-H9
gaatgctgcagtgcatagccaaaatgtgaatgggtatttcccaggatggatgctttaattatataaaagaaggaaatatctagctacctacttttcattatttatttaaacaaaaattaacgcaacttgtaattatatttgtgtgaatgacaataaacataaacataaacatgaacatataatatattgtgaggacttaatttctaannaaaaaaaaaaaaaaaaaaaaaaaaaaaaaaaatnnaaaaagggggggggca

SEQ ID NO: 32122 - DNA, 376 bp, Gossypium hirsutum
  Clone ID: LIB3148-058-Q1-K1-A1
gaagctaaatccccagcggctgcaccttcaccggcgacaaagaaatcatcaacagggtctaaatcgaactcaagagcatcagcaaccgcagatgagccagcttctgctgataattcaggctcagccggaaggaatatggggctgagattcgttgttgggcttgcattggcttgcatgggatttctctcatgagcggatatatatgaagttggtctgcattttttactataaattttcgtttttcaaatggatcgataagggtctgattggtcgttgaacatattcttgttatccacattatttgtatttccagaattttttgttgattttgcttctgcgcgctgcttgatgttaataataatatatgtgagtttct

SEQ ID NO: 32123 - DNA, 412 bp, Gossypium hirsutum
  Clone ID: LIB3148-058-Q1-K1-A10
tagatgagctagaaaagaaccttgagctctcagattggcacatggaaccatcgaggatgacactttacaggttcggtaacacgtcgagcagctctttatggtacgaactagcttactcggaagccaaaggaaggatccgaaaaggtgatcggacatggcagattgcattcgggtcagggtttaaatgcaacagtgctgtatggaaagcattgaagaccattaatccagcaaaggagaagagtccatggattgatgaaattgatgaatatcctgtttatgtgcctaaggtggccactgtttcttcttcttcttcttcccaaaaaaccatataattttcatcattcaaaggaagagaatagagagaaagagaggacttaatcagtaattattagaactatgatttattttttat

SEQ ID NO: 32124 - DNA, 393 bp, Gossypium hirsutum
  Clone ID: LIB3148-058-Q1-K1-A11
cacttttgtccaagagtggagaagagaaaagaccatgggaatcaaccatttcatcattgcacttatctccctcacttgtctcttctccttctcagcctctaccaatgcacctctacccctttccgacgcttctagccctacttcttcaaaacttcatgatataattgaggtcatgtttgaatcaccatctccatttgcatttgatggtacaacgttggaaagtattgatgatgtattaagcatactacctggcagcgtcgaccctgcccttcagaaaatctgtgggaacactgatcaccccgttgaatgtataaaagcaactatgccgttcctagatgagaaaactcctattgagcctctttctgtccttaaagcttggattgaagcaatgga

SEQ ID NO: 32125 - DNA, 405 bp, Gossypium hirsutum
  Clone ID: LIB3148-058-Q1-K1-A12
gcttcttcctctttcgtttattttttggtaagtggggggagtcttatagcagtttggattagtgatagttctctttggcttttccagcaaacattgtccttggatctgtatcatttattgcacgcattttacctctaccttctaacacccaaagtggatcaaactggaaacttcttgagcctgcacttaatcctttacaggaagctaggctgagaagtcttcagcaaagattgggaatcccctatgatggatctcgcctggagcatcaagaagctcttaagcaattatggaaattggcttaccctcacagggagcttccatctcttaaatcagaactttggaaggaacatggatggcaaggtccagatccctcaacagattttcggggtggagggatcatatcat

SEQ ID NO: 32126 - DNA, 148 bp, Gossypium hirsutum
  Clone ID: LIB3148-058-Q1-K1-A2
cccacgcgtccgcttttagtccactttaatatttaacgttatctgatttttccacaaaacaggaggtattcctaattatgaaagctggccccgtaattacgaggttaagtttgcatgtctattcaaataagatcatgggaacagtttc

SEQ ID NO: 32127 - DNA, 344 bp, Gossypium hirsutum
  Clone ID: LIB3148-058-Q1-K1-A3
cccacgcgtccgcccacgcgtccggccacgcgtccgcccacgcgttcgcgagaaacaaacgagtactggtaaagaaacagtcagttctgaagagaatggtagtgagaaggagagccctcattgtgaagatggcaatctgccagaaagtttggagcataaccttactgatagtccgtttgcgtctactgggaaagcctctaaagagtacctgtcttttcaacattgcggtcacggagaaggatggtaccatctcggctaacaataattggattccttcaccttactttctggaaataatgcattagacatgttattcttcaacttctttcactggcaaattccca

SEQ ID NO: 32128 - DNA, 379 bp, Gossypium hirsutum
  Clone ID: LIB3148-058-Q1-K1-A4
cccacgcgtccggtaagggaggattttttaaggctaaagaagatccatggttgtaataagagggcaatagagaaacagctagctgccgcaaaggatttggtcgaggataagttcgctgagaatatattcttgcacaaagggatttcaataaatgcagcttacaatttgctatctgccgtcagggagaatgatgacgacattattttttgatgaagaggttacgtctgtattttttctggcattctcggtttttctattcgatgtatgttccactgctggagattaccttattttcatgtggtgttttgaataaatgttatatgcatgtctctactggacttactttgtgttatagttaatgatcatacatacaccattt

SEQ ID NO: 32129 - DNA, 101 bp, Gossypium hirsutum
  Clone ID: LIB3148-058-Q1-K1-A5
gtgaattctggttagttttagttgggcattaactgagatccaagtagaaatataccaaaggggtatgaatattcttggtggattatagcctggaatgatta

SEQ ID NO: 32130 - DNA, 285 bp, Gossypium hirsutum
  unsure (1)..(285): unsure at all n locations; Clone ID: LIB3148-058-Q1-K1-A6
cccacgcgttcgcccacgcgtgcggctgctcatcccgaccctgctttgctcttaaccaagcaccagagagttgatgttgatgacaactgtgaaggagttgggaaagaggagagcttgatgcgaaaacctngctggtcattgatatattttcctcaaaccaatagcccaggaattagtttgggtcaaatgttaaacaataaggaaatggaatgaattggattagatggtttaggctaattaatggcaccaaaccaattcccttaaaatggaggattccggcggttt

SEQ ID NO: 32131 - DNA, 234 bp, Gossypium hirsutum
  Clone ID: LIB3148-058-Q1-K1-A7
gaaccagtagctgcctgatttcccaaaaagaaagtgtacgaacacactcttggaaataaggaaatggtgattggtaataaactctctggtcttggaagaaggggcaaacgcaggaccgcattttctagcccagactgggtaaaaatcttaaattttgggggcgccctttgagggggtcaaatgtttctgacccgggtcaagacggttattacttatttttttgtgacccttaaa

SEQ ID NO: 32132 - DNA, 323 bp, Gossypium hirsutum
  unsure (1)..(323): unsure at all n locations; Clone ID: LIB3148-058-Q1-K1-A8
cccacgcgtccgctctgttgttttccctcaaaattatgattgttatactactattcaaccagctttgacgaaaaccaatgttgccctcttttttttttattagttatttttaatttaaaaaaaaaaaaaaaaaaaaaaaaaaaaaaaaaaaaaaaaaacaaaaaaaaaaaaaccaaagaaaaagataagggtacaaacgtaaacaaataaataaaatgaaaagaatctgatcaaaaggaatatgacttactattcgcaacaaaaaaaaattcccattacattagaagattcctggcgaaaangggggggaggctaataaaaat

SEQ ID NO: 32133 - DNA, 215 bp, Gossypium hirsutum
  Clone ID: LIB3148-058-Q1-K1-A9
ggtcgaccacgcgtccggaacattcttcgataatgaatattcatattaaaagaatatagacgaacaaatgtatgtggagcgttatatatgccaaatggatcagcatcctgaacaatccatggatgctcaagaagcttatgtagcgggaggcgctgggaggaatcttcgacaagcatttgtaaatgacgtggaaatgtgaacagcatatgccagat

SEQ ID NO: 32134 - DNA, 113 bp, Gossypium hirsutum
  Clone ID: LIB3148-058-Q1-K1-B1
cccacgcgtccggttaatttcagaaaaaaacaaaggcaataaaaccaaatataagaaacaagaattaaaaattagatggtacaaccaatttataaagcgatattaaaaagagg

SEQ ID NO: 32135 - DNA, 394 bp, Gossypium hirsutum
  unsure (1)..(394): unsure at all n locations; Clone ID: LIB3148-058-Q1-K1-B10
cttagccttgtttgtgagctaatgcaacttgaggttttggatgagaaagatcgtgagaggtttttgggtccatacaagaaagttcagcagtggattaagcatacaaggaatgctacgagtcctcactttgacaacgtgcataatatcctcatgaaagtcaaagaaaaactaaaaaataagccgttaatggaagcaaatcatggaggtgcgcttgacatccaaaagcgattgcgttcaagaatatgacatgtgaaagaaaactgaataaatcatggagtccccagcttttgtgttgtcttggtatgaataaattggaaatgaaaggaagtatggatgtaagccatcntgcttggatgaaaggtttttgaaacattattgaaagttcaacgaaaat

SEQ ID NO: 32136 - DNA, 236 bp, Gossypium hirsutum
  unsure (1)..(236): unsure at all n locations; Clone ID: LIB3148-058-Q1-K1-B11
aattttgtatcacaaagcccttccctcccttatatgtacctatatttttaggttttaactttcttgtgtccgttttgttgaactatatattgctggagaatttgaaacatgttttctttgtgtttgacttattgaatgatattccttttatttttcagaaaggaaaattcctttggtttttacttgtnaaaaacaaataaaatatgtaaacttgaaaaccaaaaaaaaaaacaatt

SEQ ID NO: 32137 - DNA, 188 bp, Gossypium hirsutum
  Clone ID: LIB3148-058-Q1-K1-B2
cccagcgtccgcagttgttgaaggaataaaccaagcttataccccgctagaaatgaagcaaaacatatgcagaattggaaatgctatccgagtattgaccagttagtttaatgtgattaattgatcatgagacgtggtggtgctacttaatgcatcatactgctgtcgtatttgtgcatgagtacaat

SEQ ID NO: 32138 - DNA, 185 bp, Gossypium hirsutum
  Clone ID: LIB3148-058-Q1-K1-B3
ccgtccggtaggattgagtatatacacgtacgaagtataatcgagtatgaggggatgtccgttgcattttccaaaaatggataacggtgggttcttacttgagaaacatgttatcgacattgacaaaaccaataagccgaaaccgcccacgaccagccttaaaagccttgcccggccccttttta

SEQ ID NO: 32139 - DNA, 133 bp, Gossypium hirsutum
  Clone ID: LIB3148-058-Q1-K1-B4
cacagccgtattaccacgcagtggaagcaactaaagccgtaaagccaatattgagcgagtattactcatctgaaggtgcaccagtttataaagcgatatttaaagaggcaatggattgtatttacgttgaacc

SEQ ID NO: 32140 - DNA, 301 bp, Gossypium hirsutum
  Clone ID: LIB3148-058-Q1-K1-B5
cccacgcgtccggtcgcggtggatattttgatgaatacggaattatccgtgatattatccaaaaccagctattacaggttctttgtcttgttgctatggagaagcctgtctctctcaaacccgagcacattcgtgacgagaaagtgaaggttcttcaatctgtacttccgattaaagatgaagaggttgtactcggacaatatgaacgttacagggacgacccaacagttcccaaccactcaaacacttccacatttgcaactgttattctccgtatacataatgaaagatgggaaggtgt

SEQ ID NO: 32141 - DNA, 285 bp, Gossypium hirsutum
  unsure (1)..(285): unsure at all n locations; Clone ID: LIB3148-058-Q1-K1-B6
aaagtgacctttagaaactacaaatataatggtatctccattgacaatgttgacgcccttttcctatttatatgcatatatatattaatgaattttggtcttcctggtattctaggtgatagtttattcttaatggaactttggatatgtggtaaatattttcgttttgtggagtaaattttggtacaaaaattgcatattagtccaaaaaaaaaaaagaaaaaaaaaaaaaaaaaaaaaaaaaaaaaaaaaaaaaaaaaaaaaacaattatcaaaaaaatangg

SEQ ID NO: 32142 - DNA, 412 bp, Gossypium hirsutum
  Clone ID: LIB3148-058-Q1-K1-B7
aaataattgtatatttcttggaacaaaatgggagtggagaagaagatcatggtgttgtggatgtgttcattggtaataacctcaatgcttatggaagagggtccaaccccgccaccatttacttacccgggactgggaaaaaatctttaagttccatgcaacctaggaggcggaaattgcttcccaccaccttaaaccggttatgacagaggttgttctcccctaaaactatgtcgaagtctttttacatcgcccttttttatttgaccacatctagaaagcgcacataataaccttctccctttttcctataaaattctgtgaaaaaaaggatttaatcatctcatttgttagttctttccttattttagaaagccattatttccaaaaatatattcaacaattttttttt

SEQ ID NO: 32143 - DNA, 122 bp, Gossypium hirsutum
  Clone ID: LIB3148-058-Q1-K1-B8
gatttgtatggtaaggcaaccactgtgtacttagttgtttaaaataaaatgatattctgattgggaaaaaaggggcaacttactataaaagaatgttagaaagaagcgaaagaatcagtgag

SEQ ID NO: 32144 - DNA, 179 bp, Gossypium hirsutum
  Clone ID: LIB3148-058-Q1-K1-C1
cccacgcgtccggtttcccctcggtttaaaatttggtgcaaaatctagtaatagaaaggatatgaagcattttgtaaggactcatttgttgttataaactttggagagtattattctacgaaaattctttttcagaagataaaccataaacgtgaaacaaaaagaaacaaattttaaaa

SEQ ID NO: 32145 - DNA, 409 bp, Gossypium hirsutum
  Clone ID: LIB3148-058-Q1-K1-C10
cccacgcgtccgctggaatgaggcctgttggacctcctatgccaaattgttttgttcccatggtacagcagggccaatgccctcgtggacgacgaggaacagttccagtgcaacaggctcagcaaccagtttcattaatgcagcagccgatgctccccaggggagaagtttatcgttacccccctggtcataaaatgcctgaagttgcaccgtctaatgttcctggaggcatgctttccattccatatgatatgggtagcatgcctgtgcgagatgctggcagtggacagcctatgccggttactgctttggctacatcacttgcaaatgcagcacctgaacagcagaggacgatgcttggtgaaagcttgtatccccttgtggagcgactggagcgtgatgcagcagc

SEQ ID NO: 32146 - DNA, 364 bp, Gossypium hirsutum
  unsure (1)..(364): unsure at all n locations; Clone ID: LIB3148-058-Q1-K1-C11
ttctccttctcttcgagactgctctcctcacctctggcttcagccttgatgagcctaacacctttggcaacagaatccacaggatgctgaaactcggcttgagcattgatgaggatgcaggtgaaggtgaaggtgatgctgatatgcccccattggaggatgctgatgccgaaggcagcaagatggaggaagttgattaagcctaacatgtttttataagatcagtagatttatcttacttttgaagcatctgttagcttgttttacattttgtttggtgcttttgcttttgttatgttgatggtagttattgtcgagtactcttaaatgataagtgctgtttttttctgggttnaaaaacaaa

SEQ ID NO: 32147 - DNA, 397 bp, Gossypium hirsutum
  Clone ID: LIB3148-058-Q1-K1-C12
cttttaaagctgtttacccatctgttaagagtgccaaagtggttactgataggactacaggccggtctaaaggttatggctttgtaaagtttggtgatgaaactgaacaaattcgtgcaatgactgaaatgaatgggatttattgttcaactagggcaatgcggattggaccagctgctaataagaagcctgtcactgatcagcagtatcagaaagctgcttaccagaatactcaaggaaattctggagagaacgatccgaataataccacaatttttgttggtggtttggatcctagtgtttctgaagaccaactaaaacaaatatttagccagcttggtgaggtagttcatgtaaaaattccggctaacaagcacttggggtttgttcaatatgc

SEQ ID NO: 32148 - DNA, 344 bp, Gossypium hirsutum
  Clone ID: LIB3148-058-Q1-K1-C2
ctgcattatccttggcattgcacctacgattttctgactaaggtcaaatacaaagcaatcttgatctgcatcacacactaaatgtctgattctgactgttagagtgaatattcccttttttgcttgcgttttagcttgaaaaaaacataaaaatgcataccgctcttgcatgtaataactagcttgctgaaccttaaaaacgctttcactgtaggtggtctgaattcaatctatttatgaatcaagatttatcaatcgacgaattgtgtaggcctctagctaacacagctctgtatcatatatcctcattctattttattttttgcaactttggataaaaccct

SEQ ID NO: 32149 - DNA, 351 bp, Gossypium hirsutum
  Clone ID: LIB3148-058-Q1-K1-C3
cccacgcgtccgaaaaaaacttcaaaacctctccccaaccctctcctttcaggccaaggggcccggccgcaggccaccgcgccgaccggcgccagcgccggtgccgccgtatgcggcggtcagaaggcgaaaggtcgggtttttttaaccccgttgcaaggcctttcatagatcaggctctcctatccttaaagccgagaggaaaacccccaaaagccgccatccccgtccattttcggtgacccgaaggactccggcgacaactcaaacgcggcgttcaggtaagtttcgtttattactttaagcctattaaccgtgaaagaaaagaaagagcgaaaacagaatcgaatc

SEQ ID NO: 32150 - DNA, 267 bp, Gossypium hirsutum
  Clone ID: LIB3148-058-Q1-K1-C4
gtgatgagatatttaccacctcaaaggtcaggtatcgcagctttagacttctagtatctccaatctcttggattatggcagtagttatttacttaaaaattgcggtgtgataaatttaaggatatacttttagtgaactcatttatttattttgtgttcttgggatttaaaagcaaacttcattttaatttataaacattttttttgaaataaagtgctacgaaaaaacgagggcttacttcttttataatgcacaacaaaatcaat

SEQ ID NO: 32151 - DNA, 114 bp, Gossypium hirsutum
  Clone ID: LIB3148-058-Q1-K1-C5
gaatactacgcgttcgataataacttaaaaatctattctgaaccctctatgataaggccaaggggccttgtcggactcaaacgagctgaccgctgcaagaaccagtgcacacgt

SEQ ID NO: 32152 - DNA, 177 bp, Gossypium hirsutum
  Clone ID: LIB3148-058-Q1-K1-C6
gtgcattacccttgtcattgcgcctttgattttcagactgaggtctgggccatagcaagggggtctgcatcacacactaaatgtctgattctgactgttagaggtaatggtcctttttttgcttgtgtacttgcgtggaagaaccatcaaacttaacaaaaactttgcatttaaaag

SEQ ID NO: 32153 - DNA, 276 bp, Gossypium hirsutum
  Clone ID: LIB3148-058-Q1-K1-C7
gttatgaagaaggatgagaccctccgattatgtattgattataggtagcagaaaaagtgaccatattaagttgcccaggattgagaacttttttgatcagctaactggagctagagttttctcaaagattgatctatgagctaggtattatcaagttgaaacttccaaatataaaaacaacgtaggattttaataatatcctttaaaaaataataaaatgacttgtattattaaaacaaaaaccggtaataatatcttacaatttatactatttta

SEQ ID NO: 32154 - DNA, 381 bp, Gossypium hirsutum
  Clone ID: LIB3148-058-Q1-K1-C8
atcgcgatcttcaacttaaagaacaacaatcttcctctgccaaacaagcctttaatcacactttcgttccttcgtcgtcttcattgccatcgtcatcatcggcccgatcttcgttttcggcatccttgccggtggaggatgaaccatcggcgggaacgaaggaaacgaaggtggtggagggggaggaagttcaggttacgccaaacagatgcttgagttgcaagaaacgcgtggggctcacggggttcaagtgcaggtgcgggatggttttttgtgggatccataggtaccctgaacaacatgcttgtacttttgatttcaaagggatgggaaaacaacaaatcgccaaagctaatcctcttgttaagggtgagaagcttc

SEQ ID NO: 32155 - DNA, 283 bp, Gossypium hirsutum
  Clone ID: LIB3148-058-Q1-K1-C9
gaaatggaagggagtgaggaaaacgaagaatatgtgaacctacagaaacagaaggttagggattatttggatggtgtcatagttgttgattatgtggtgccatcatcatcatcatcatcatcatcatcatcatcatcatcatcatcatcatcaaatctttgatatgttgttaactacaaagaaaaccttgttacttgcttaattaatggttgcttttggaacaatattcaactttgaatgattttgggactgattggattttaaatgcaagattttgcatttt

SEQ ID NO: 32156 - DNA, 360 bp, Gossypium hirsutum
  Clone ID: LIB3148-058-Q1-K1-D1
agaagaactcatgtttcattgttcaaaacggggtgcgtgaaatatataaaactattgcagacaattttgttgcaattcaattgttttttgtctgcgattctttcttatcataataattccgacaaactccctgaccatgtttttccttgggtgcattgatgattgttagcaagctcggccacggatacatataagtgttccagaatcttttgtaagtaagtccaccttataagcaggcttagcagaaaccttagtgtcgcctttgaatttcgagctggcttttggatcaccggattgagagaaaaaagccccattcagcagcaggtccccttctgatctccaattccacgtcttccatac

SEQ ID NO: 32157 - DNA, 389 bp, Gossypium hirsutum
  Clone ID: LIB3148-058-Q1-K1-D10
aaattttattctcaattcttatgctcttgtttaaagcaatgaaaaattccgatgaaagctttttcatccaaaaaaaaaaaaaaaaaaaaaaaaaaaaaaaaaaaaaaaaaaaaaaaaaaaaaaaaaaaaaaaaaaaaaaaaaaaaaaaaaaaaaaaaaaaaaaaaaaaaaaaaaaaaaaaaaaaaaaaaaaaaaaaaaaaaaaaaaaaaaagggggggcccttttaaaaaaaaaaattttacttccccttccttgcaaaaaaaaacttttttaatagggccaccaaaataaaattaattggccgggttttaaaaacgtggaaattgaaaaaaccttggtttacccaaaataaatgcctttgaaaaaaatccccttttcccaagttggtt

SEQ ID NO: 32158 - DNA, 348 bp, Gossypium hirsutum
  unsure (1)..(348): unsure at all n locations; Clone ID: LIB3148-058-Q1-K1-D11
gaggatctgaagaagaagctcgtgagcacataaagaaattgattgatgcggcatggaaaaacatgaacaaagatcaaatggccgccaagtctctttcgtctcgaatgttttttgagactgctatgaaccttgcgagagtatccatgttggtataccagaacgatgacggtcatggtattgaagatggtgagcctaaagagagagcattacgattatttattcaatcagttccattgccaaaatgattgagtacatgtttggtacttttcatgtaaaagacgtgttgtcttaaataacataagtttcaaaacataatgtattaaagtatttggttgttgaaacttanna

SEQ ID NO: 32159 - DNA, 408 bp, Gossypium hirsutum
  unsure (1)..(408): unsure at all n locations; Clone ID: LIB3148-058-Q1-K1-D12
cccacgcgtccgcccacgcgtncgcggacgcgtgggcggacgcgtgggcgaacgcccattacttcgggggttgagagttcagataccatcgaccatgtcaaggctaagatccaggacaaggagggtattcccccagaccaacagaggttgatctttgccggtaagcaacttgaagatggccgcactctcgctgattacaacatccaaaaggaatccaccctccacttggtacttcgtcttcgtggtggtatgcagatttttgtgaagactcttaccgggaaaaccatcaccttggaagttgagagctccgacactattgacaatgtcaaggccaaaatccaggacaaggaaggtatccctccagaccaacagaggttgattttcgcggctaagcagcttgaagatggc

SEQ ID NO: 32160 - DNA, 386 bp, Gossypium hirsutum
  Clone ID: LIB3148-058-Q1-K1-D2
gggacaagtaaacataggattgctggaatggtttgtcaagctggtggaaggatattcttttttgcgttgagaacatttttatcaagtcgctctgttttggaaaaaactgttggttttaggagaggatggttttgatctcatcctccaaattacggagactaattatttttgtaatagttagatcataaatgaacaacaaagagaagcagagaggcctttgtctttttaactaaataaattctattactttagtatgtatcagcaaatcttcatgaggatttggttcttaattatgtgtaatgtgggcttttctgctatgtcagaatgtattatgatatttaagaaagtttgttttcaattgaaagaatggcagttccttttaaaaa

SEQ ID NO: 32161 - DNA, 353 bp, Gossypium hirsutum
  Clone ID: LIB3148-058-Q1-K1-D3
attacacatctcgagtactcatcgatttctgttgtccacacctcttccatagaccagagcgcgcagtcgacattaaccggcgtaccttctctagatgacgcacacggcattgccgaaaaacatagacacaagtgttaatcgtctaatcgccctttgcgacatctttcatatacaagaaccccctcttctctaagactagcagaaaacacaataaaaccctcatcaactccccatattggtaaccttattgttttcggcaactactcaaacccaaggttcatgtaaaattcgcttaatactgtctgccgtttaaccgtgaaaaaaaaaaaagagctaaaacataatcgaattat

SEQ ID NO: 32162 - DNA, 322 bp, Gossypium hirsutum
  Clone ID: LIB3148-058-Q1-K1-D4
gttataatcgcgagcactgcacgatttttggcgtgccataacatctatcgagaggagctcaggatttttcttgaaagggctctctaaagatgtaccaatggccgccagatcgatcatacatttgagtcgcccatagataatgacaatatcatgcagaaccccctgtttaatatcgtgaagcatagtttaatgctatgaactcgcagagtgaaatttaattattgcgaatctgtgtatcaaaactacctagtaacagagcttaactagacgttaattcgctctttgtcaccagctggcttttgcataacggtttgagagtaaa

SEQ ID NO: 32163 - DNA, 419 bp, Gossypium hirsutum
  Clone ID: LIB3148-058-Q1-K1-D5
aaaatagccgatatgatcgatggagaaattgcttccttagtacctggttggagacgagggccgggaattgatgaatcaccgcgcttttcgaatcagaacttttgtcacaattgtgcttcgaaccgtacatctaccggctccctcttagattttttgacacataatggaggtgtcaaagactcgcgagttcttcagtgttgtagaactggatgtgcttcaatgcatggccggtttgaagagattacttttcaagttgaggaatccgagcattgtgtgacagatggtgcaccgaacgagtcaagccagtcggacaatttgcattaccaggaaatatgggatcagcacgaaaatcatgaacttagacagagaaattcagacgaagagtttgataaatcagatcaatcattcttggcaaatgg

SEQ ID NO: 32164 - DNA, 384 bp, Gossypium hirsutum
  unsure (1)..(384): unsure at all n locations; Clone ID: LIB3148-058-Q1-K1-D6
gtttgaagtcaatgacataatgtgttgtggatgatgcatgtggagagtttttaccaaaggagtaaggccgttgcctcaagttgtgttcctttaattgcttgcatagattgcctgtcttgctctgaagatttagatctgatgatccataaatctaacaatgcttgtgcactgaatggctgctatctcaattataaacactcgtactgtattggcagtcggttctctctctatatatgaatcaaggattatcaatcgaggaactgtataatatcataatggcagagctcagnatcagctattgaaagttaatcaaatagtttgccactttggttaatcctttgtacacagttgatacctaataatacaattcgatgctttctttct

SEQ ID NO: 32165 - DNA, 248 bp, Gossypium hirsutum
  Clone ID: LIB3148-058-Q1-K1-D7
cttttgtggaatattttctaaaaggtattttcaattaaatcagctttccactttcttggtggtgcctcaaaaaaaaaaaaaaaaaaaaaaaaaaaaaaaaaaaaaaaaaaaaaaaaaaaaaaaaaaaaaaaaaaaaaaaaaaaaaaaaaaaaaaaaaaaaaaaaaaaaaaaaaaaaaaaaaaaaaaaaaaaaaaaaaaaaaaaataaaaaaataaaaaaaattaaataaaaaaaattttaaagggggg

SEQ ID NO: 32166 - DNA, 407 bp, Gossypium hirsutum
  Clone ID: LIB3148-058-Q1-K1-D8
caaagaaccagggaacaccgaaggaagaatcttgagaaccatggacagagactggggctccaaacccgtttctggaggtgctgcctccgcccaaactgaagccatggaccgtcgcgagcggctccgtcagcttgctcttgaaaccatcgatctcgccaaagatccctatttcatgcgcaaccacctcggcagttatgagtgtaagctttgtctgacgctacacaacaatgaatggaactatatggcacatacgcaagggaagcggcaccagaccaacttagctaagacagcggcgcgtgaggctaaggaggctcctgctcatcctcagcctcacaagcgtaaagtttctgttcgtaaaacattcaaaattggtaggccaggatatcgtgtgacaaagcaatatgatc

SEQ ID NO: 32167 - DNA, 352 bp, Gossypium hirsutum
  unsure (1)..(352): unsure at all n locations; Clone ID: LIB3148-058-Q1-K1-D9
cttcaattgttaaaatctgtcttggatttcccttgttctgctttttgctgccttgctgactggagtctcgatagattggtttgttttactttgttgttttaggtcgcatatttctcccttcgcttgccatatagtaggatagagggagactttgtatcttggttgattgtataggttatagttccattgaaggatttcttctctcatgttgtaatggagaaatacttggatgcctgcatatccctccccccccccctttcttttgaaatgttattgacttggttgttttgacttgcttatnaaaaaatccaaaaataaaaaaaacctcctccttaaaaaaataactccctgt

SEQ ID NO: 32168 - DNA, 309 bp, Gossypium hirsutum
  Clone ID: LIB3148-058-Q1-K1-E1
aggtttgatgaccgagaagctgcagatcgtgttgccactcccggagtatctgttgggcttgtttggaccaatttcggaggagaggttcagtttgtggaagctacagcaatgattggaaatggtgaattacatcttactggccaactgggtgatgttattaaagaatctgctaaaataccattaacatgggtgaaagccaggccaccaaattttaagtggccccttgcaaagaaaaaaatggtcctgcaggttaaaaatatcctattcctttttcaacttgggcctgaccaaaagaatggcccttaagcc

SEQ ID NO: 32169 - DNA, 398 bp, Gossypium hirsutum
  Clone ID: LIB3148-058-Q1-K1-E11
gtggggtaaaagcaaagatggggaaaacccggaaacagatgtgaaatgcaatggcctgcaggaattgcctatcacaggcaatgctaaatcaatcactgatgatgatgatgatattaatggacctaccaaaattgttactattccagtttcaaacacccccttcactcaaggaacataaaaaatattcccttccaggtgtttgattaaattcctagcagagttgttcttcccccaaccaataaaaaaaaattaaaaatcactatgtaaccatcccttcccctctctatctctctaagctgctctgcatctaatgtaatttagctaattatgttttgattgtactcttgaggcttctgaacttggtgcagtaaaaattaaaaaccacgagtggtttgcct

SEQ ID NO: 32170 - DNA, 413 bp, Gossypium hirsutum
  Clone ID: LIB3148-058-Q1-K1-E12
cggacgcgtgggcggacgcgtggggcaaagtgatatcaaattgtggccattcaaggtcatagcaggacctggtgacaaaccaatgattgtcgtcaattacaagggcgaggagaagcaatttgctgctgaggaaatctcttctatggtccttattaagatgcgtgaaatcgctgaggcttaccttggttttacagttaagaatgccgttgttaccgtccctgcatacttcaatgactctcagcgtcaagcaacaaaagatgctggtgtcattgccggactcaacgtcatgcgaatcatcaatgaaccaacggctgcagccattgcttacggtcttgacaagaaggcaaccagtgttggtgaaaagaatgtcttgatctttgatctcggtggcggtacttttgatgtctcccttc

SEQ ID NO: 32171 - DNA, 412 bp, Gossypium hirsutum
  Clone ID: LIB3148-058-Q1-K1-E4
acggacctctacttccaccacccccaccaccaaccaccgcaattcactccttactttagacccccaacggggttcctccacatggctggacagcaaaggccgttagccctaccatcgatatcaggaggcggcggaggacacagcagggaagaccaagatgatgtttcgaatcaagggagttcgaggaagaggtttcgaacaaagttcacgcaggaacaaaaggagaagatgttggctttggctgagaggttagggtggcggattcaaaaacaagatgaagcgattgttcaacagttctgcaatgaaactggggtcaaaaggcatgttttcaaagtttggatgcacaataacaagaatactcttgataatggtgcattgaggcaaagtggagacatgcaatgcaatacaatgc

SEQ ID NO: 32172 - DNA, 418 bp, Gossypium hirsutum
  Clone ID: LIB3148-058-Q1-K1-E5
gatcaactaaccaagcttttgagtacaaggtgtatttcattgatctggatctgaaacccctgaagaaaatggaggcttattacgagttagataagaaaattgttagctgctattctcagatggtgaaaactgagcatgaaacagataaagctgttacaataaactccaatggaagtgtacgagatcaaagatacgcattagaagacggtttgtttactgaaggttgtactggtaagtgcaagtagttcttattatatgttccctgaactgttgttgtaaaagtaaaggttgcaaggagccaagatgattaactcgtcattaggctcgagttcttcctttcaccactttttggggcttttggatttcccttggagaaaataatctcttgtatgtatcttttgcttaaagatttatttga

SEQ ID NO: 32173 - DNA, 327 bp, Gossypium hirsutum
  Clone ID: LIB3148-058-Q1-K1-E6
ggaacacagtagtccaaatgaaggaattgaatcaggttcaacttcaagtatagctagagaatcgagggtatcgtttgagggtctaaaagaggctgtgagcctaccaaagcccgagccagccccaaagaatgaaccctgatgttgcacaccatgaaccatttccttgagacgacaatctttcacctctttctataattattgttcttttataaaatttggtaccaataggaaaatgtttgagattgatgaacagtattcaccctgttatttgttctgtatcctaaatgcaaccaacgctgatgaatgtaattcaaccagttgtcccaa

SEQ ID NO: 32174 - DNA, 373 bp, Gossypium hirsutum
  Clone ID: LIB3148-058-Q1-K1-E7
gcttatcctagtcttctttttttcttctcctttcatctgtattaatttgtgttggtaagctgaaaaagcttgacgtttgatgtacgttgtgccaggtgttgcttattaagctttttgaatctgcattaaaaaaaaaaaaaaaaaaaaaaaaaaaaatacaaaaaaaaaaaaaaaaaaaaaaaaaaaaaaaagaaaaagaaaaaggaaaaaaaaaaaaaaaaaacaccggggggccggtttaagaggctcaagttttacatacgtttggttgggggggattgttttttttttgggttaaaaaaaatataaatatatggggcggcgttttaaaaagtttgtgaattgaaaaaccctggggttgccaaattttttt

SEQ ID NO: 32175 - DNA, 402 bp, Gossypium hirsutum
  Clone ID: LIB3148-058-Q1-K1-E8
agaagaacaacttggtcaggtcctaacggagccaaaaaatgcactaggcacgcaatacaaaaagatgttccaaattaatggcgtcaaactgcatatcactgaaaatgctttgaaattaattgccagaaaagcaatcaataaaaatacaggcgctcgcggcttaagagccatcttggagaatatcttgatggatgccatgtatgagataccagatgttaggaccggtgatgatgtaatagatgctgtagtagttgatgaggaagccattgtatctgaagaccatagacagggagctaagattctttatggtaaaggtgcattagaccgttacctttcacaacaaaaattgagggacttggagacaactgtggacggattggacggtgagcttgaagtggaagc

SEQ ID NO: 32176 - DNA, 409 bp, Gossypium hirsutum
  Clone ID: LIB3148-058-Q1-K1-E9
cccacgcgtccgctgaagagaaaaaactgggtcagaagttcttggtggatgtagatgcttggatggatcttcggaaagccggtgaatctgacaacttatcggacacccttagttacaccgatatttaccggatagtgaaggaagttgtggaagggccatctcatgatcttttggaatcagtggctcaaatgattgcatcaaaaaccttcacaaatcactctcaaatatctgcagttcgagtaaaggttgggaagcctcatgttgctgttcatggctgtctcgactaccttggagttgagattatcagatatagaaccatcgatgcgcctaactgacctgaatatatatcatcctttgagcagtccgtcacgtggatgtggtaacagatcatctttcatccatgcttggt

SEQ ID NO: 32177 - DNA, 321 bp, Gossypium hirsutum
  Clone ID: LIB3148-058-Q1-K1-F1
cccacgcgtccgcccacgcgtccgcaaatctgagcatccacatgcaatcagcttaaggagagaggacaattatgtgtagatagcatccttgtaaggtaccagaagtcataatatattggattggaaaaaaaaaaaaagattgtaccatttgactgagtactgcaaagacatagctaagcaaatatttgcagtatatacaccaattctcttttaactctcccttttataaaatgaaaatcgaataaattttggaaaaaaaaaaataaaaaaaatacaaaatgctcatagtacaatgttatattgaaagtaacatattagaaa

SEQ ID NO: 32178 - DNA, 412 bp, Gossypium hirsutum
  Clone ID: LIB3148-058-Q1-K1-F10
ctttttactcatcttttcctctcaattctcactacctttacctccgttcttttgcccgcgtattgggtatccagagacttggtcttttcgcttctttcgctatggggaagatcaagatcggaatcaacgggtttggaaggatcgggcgtttggttgccagagttgctctccaaagtgaagatgttgagctcgttgctgttaacgatcctttcatcaccaccgattacatgacctacatgtttaagtatgacagtgttcacggtcaatggaagcaccatgagcttaaggtgaaggactcaaaaacccttctctttggtgaaaagcctgtcactgttttcggcatcagaaaccctgaagaaatcccttggggtgagactggagctgattatggtcgtgagtctactggtgtttt

SEQ ID NO: 32179 - DNA, 414 bp, Gossypium hirsutum
  Clone ID: LIB3148-058-Q1-K1-F11
gtcaacacttccgtctacatcaagaagcagctccttgacggtaagattttggaacctacaacggagcagaacttcgaagattgctcggaaaattacgaggatgcaatgcaggagcttgacgatgggctggcagtcacactgtcgagggatttcaaacaagtgaaaatcgagttggaaagcgccatagacgatgccgacacctgcatctccgtgctgaatcaaaaagcaggaaaagacaaggaactgtatgagaagactaatcactttcgccaactaatcagcaatgcctacgacattgccaatattttggctccaaaataatcatgtgccccgcttagcttcattgcctactataatttaattattcctaattatagaacaagctgttgtgctatgtaattgttggaaatgaga

SEQ ID NO: 32180 - DNA, 405 bp, Gossypium hirsutum
  Clone ID: LIB3148-058-Q1-K1-F12
cccacgcgttcgtgggggtttgcttagagaatatatcacatattgcaaagtgagtgggtgccacgttgcgctttgctggttagacttattaacaaatatgtgaggtgtatcctatgccatagatgagactcttggatacattctgtgcctactaatgacttttcagaataataatcaatctcttttagggtgttggtcctcagttcctggtcagtctctgatagttgtgagaatgagtcttgatttatattatcctactaaatgacatcatcttgggtggctaaactaggttcaaggtataattgtttctgatcttaaattgtgcacaaaatgcttctgccttgtggtctgcctccagaaagagaagatgattaagaactactggttgggctgtgaagtgaaatg

SEQ ID NO: 32181 - DNA, 370 bp, Gossypium hirsutum
  unsure (1)..(370): unsure at all n locations; Clone ID: LIB3148-058-Q1-K1-F2
cccacgcgtccgatgtccacttcccatgagtcccaccaggcctggtgctcgtgtggctgggagaaaaatgagcaatggagcatatttcaaacttcttctttttttcagctcctttttagaagtgtttttcaaaagcatttttgaaaagctaaaaatttcagcctaaagcagcttgttcttcacaagttttctttcaaaagtgcttttggaatcagaagtgctttttttaagctatgaagaactggccctaactcatcacctccctctctaagatcgacnncnnanaaaaaaaaacataaaaaaaaaacaatgagctaaaatttataaatgaacatatgcatgaattgttacaaattctttcctactaaaa

SEQ ID NO: 32182 - DNA, 362 bp, Gossypium hirsutum
  unsure (1)..(362): unsure at all n locations; Clone ID: LIB3148-058-Q1-K1-F3
agcctaatttgtatgaagctgacgaacattggccactccatttagcttttgtcgtgcgcatttttgcgcatctttactgctttcttaggcagatgatgatttctaattgacatgtcttactttgagcaatgtcaaactttagtgactcaaaattttgctgtgtgctgaaaaggtaccacattacagnttagtatgtcttattctttcatgtatttttcattttttccaggaagagatggaagagcttgagagaactgacaatgtatcaacattgtctgaggagttgctgcttatcatggagacaatacctgatccactactcccattaacaaatggtcctataaacccatcttgggatagat

SEQ ID NO: 32183 - DNA, 59 bp, Gossypium hirsutum
  Clone ID: LIB3148-058-Q1-K1-F4
cccacacgtccgctcaagcggccgctaatttgagcataaacatacgttctcgtgcaggc

SEQ ID NO: 32184 - DNA, 380 bp, Gossypium hirsutum
  Clone ID: LIB3148-058-Q1-K1-F5
cccacgcgtccgcccacgcgtccggacctacactgagcacgccaggagaaagacggtgaccgccatggatgtcgtttatgccctcaagaggcagggtaggactttgtacggtttcggtggttagattggtgtttactgttcaggattgctgaagttggctgcgatggcggcggcggcgatggtggtggggggatttgaagtcttgcggtcaagaatgtttgagcgtagtatcagcgttagggctttgtaattagtgactattagaaattagacattgggtactgtatgctttcgtttacgatttgtgattcttgtactggattacagattttaatgaagttttgagttcatttctaagattagaagtgtacttgtttgtt

SEQ ID NO: 32185 - DNA, 304 bp, Gossypium hirsutum
  unsure (1)..(304): unsure at all n locations; Clone ID: LIB3148-058-Q1-K1-F6
gactgatccgtggaacaacatagacagttcgtacatgcatgactacgaggagttggatgaactagaacaatggctgcaggaaggagagtgggagagtgatgatgaagagatggaggatgctgaagatgatgcagatgtggtggtggaatgatttctgtttgtatttttactttcgtaatgttgtttgttagtgtaactagctactgctgaatgtgctgttaacttattagtgggagtcacaatggattgtgaatattcaatctgattgtttttgtggattaaaatatgggtaaattacacanaa

SEQ ID NO: 32186 - DNA, 243 bp, Gossypium hirsutum
  unsure (1)..(243): unsure at all n locations; Clone ID: LIB3148-058-Q1-K1-F7
agcctaatttgtatgaagttgctgatcatagggctcataaaatntagcttttggtcgggcccagttttgcccatctttactgctttcttaggcgatgatgatttctaaatgacatggcttaccttgagccatggccaaccttattggcctaaaaattttgcgggtgcctgaaaagtgccaccataccagttagtatgtcttattctttcatgtatttttcaattttttcacagaaagaatgga

SEQ ID NO: 32187 - DNA, 369 bp, Gossypium hirsutum
  Clone ID: LIB3148-058-Q1-K1-F8
tgaagatatgacacttattgtggacatattgatgcaagcctgaaatgtgtggagccaaggatagtcttacctgttaaatgtggttggaacatgcactgcagatcatataatcaagaagctgatccagatgccagatttactactgtatacattgtcaatatttttgagttacacctgcaattcattcctctattgtttgttttaattagtaaaataaaactcaatcaacacatacttattagttcttcatatgtttatctattacgaatgtcagtcattgtcttggaaaatgtttgtttcgtgtataataatttgtatacttgagactttctattgagatatacgatgaataatatatatatataattc

SEQ ID NO: 32188 - DNA, 315 bp, Gossypium hirsutum
  Clone ID: LIB3148-058-Q1-K1-F9
ctttttactcattttttcctctcaattctcacttcctttaccttcggtcttttgccggcggattttttttccagagatttggtcttttcgcttctttcgttatggggaagatcaagatcggaatcaacggatttggaaggatcgggcgtttggttgccagagttgctctccaaagtgaagatgttgagctcgttgctgttaacgatcctttcatcaccaccgattacatgacctacatgtttaagtatgacagtgttcacggtcaatggaagcaccatgagcttaaggtgaaggactcaaaaacccttctctttg

SEQ ID NO: 32189 - DNA, 206 bp, Gossypium hirsutum
  Clone ID: LIB3148-058-Q1-K1-G1
tccaagcctaatttgtatgaatttgctgatcataagctcataaatttagctactgtcgagccgcagttagtgccatcatttctgcttttttctgacagatgatgagctctaattgacatgtctctactttgagcaatgtcaaactttagtgactcaaaattatgctgtgtgctgaataggtaccacattacagcttagtattggac

SEQ ID NO: 32190 - DNA, 418 bp, Gossypium hirsutum
  Clone ID: LIB3148-058-Q1-K1-G10
cccacgcgtccgcttgcttttcttgttttgaacttttccttcttttttttttctttttttttaactttattttcagcatacatgcaaaagagatcgaagggcacaaaacgtaaaacccgacaggcaaaagcacttgaaaatgctaggaaggctcccagatcatttcttgagctcttacatgaggcaaacttagagtccttgcctcctcatgttccatcttatttgagggcagcagtgggacctccaagttctacctcccgccggcatttttgcagcgtttgcggctttagtgcaaagtatacatgtgtgacatgtgggatgcgcttttgttcgtgccgatgccaaaatatacataacgatactcgtgcatgaaatttgttgcatgagtggtaatattaggaacccaaaaggattttgt

SEQ ID NO: 32191 - DNA, 409 bp, Gossypium hirsutum
  Clone ID: LIB3148-058-Q1-K1-G11
tggaaacattcaaaggaaatatgaaattgagccatgttttacccaaaagtgtttttgtttcatttttttcttattacaggtagcaaaagcacttggtggtctaattcccttacccgaacccggtccgagtgacccgagaagaaaagaattaatcgagttggagcaacaaaaagccgtgatcgatacgaaagctgattccttggtccgtcgtgaactctggctcggtttagcttacttggtggttcaaaccgccgggttcatgagactaaccttttgggaactctcatgggatgtgatggaacctatttgcttctacgtcacttccatgtacttcatggccggatatgcatttttccttagaacgtccaaagaaccttctttcgaaggattctatcaaagcaggttcaac

SEQ ID NO: 32192 - DNA, 339 bp, Gossypium hirsutum
  Clone ID: LIB3148-058-Q1-K1-G12
cccacgcgtccgaaaaaaaaaaaaaaaaaaaaaaaaattaaaaaaaaaaaaaaaaaaaaaaaaagtaaaaggaattataaaaaataaaaaaaaaaaattaaaaaaaaaaattaatttaaaaaaaaaaaaaaactaatgaaaaaaaaaaaaaaaaaattttttaaaattaaaacacctaaaaaaacataataaatacaaaattttgattaattaaaaaaataaaaaactttggctgggggggggcttttttggaggttcaaacttttcggccccgtgatactaatttttttgtttttttttttggcccctaaaataacatatttggcccggctttttata

SEQ ID NO: 32193 - DNA, 410 bp, Gossypium hirsutum
  unsure (1)..(410): unsure at all n locations; Clone ID: LIB3148-058-Q1-K1-G2
cttgatcgttgataagagacggcatggcagaacagcaattctttcccttaagaaatccggccctgaacttcctcagctcttgtcccaattctccgctggcattgctgggaccggtcttgctgttcttttatctgttatttggaaggtagcttgttggagagttccattttgtacacctaaactctttagcgccagcatcggttttgggctagtttggatctcatgggcagttaaccaattgagagacacggttgtacaaatcagcaaaaatactagcaagtctggtctgaaggaagaggagatggttgagagagtggagaaaagtgttaatcagatatatntcagagccgcgacattgatggctatagcagtgctgagatttgcatgaactctgaagatctagacagtcg

SEQ ID NO: 32194 - DNA, 417 bp, Gossypium hirsutum
  Clone ID: LIB3148-058-Q1-K1-G3
cccacgcgtccgcccacgcgtccggaggagacacattttacctaaggatgatgatcgaagatggctacaaagacctcaaacgcaaagaatttgtaattatccgcataaaccgatcatggccttccctccatataaccatgtcccggttggtccagtctatcccatgtggcgagcaccttctcatccacccaccatccagatgtggggcacccaaggttaccccccatggcaaccaaccgaaagttggcattggaagccctatcccggggtgcaagctgatgcatggggttgcccagttatgccgccacctcaaggatatttctctacattccctcaaaatgcgtccgggtttcaaccgtgcaacgtggacaaaagaaatggcatgccgcaaaccttagttgaacatcatccggaaga

SEQ ID NO: 32195 - DNA, 412 bp, Gossypium hirsutum
  unsure (1)..(412): unsure at all n locations; Clone ID: LIB3148-058-Q1-K1-G5
cccacgcgtccgctccctatgtcttcatgttgaggtttataaaggctgctcagtcagacaccaagcttgaacatctagccttctacctcattgagctgtgcttggttgaatatgaagctttgaagttcaagccttccttgctatgtgcatcagctatctatgttgctcgatgtaccctgcaaatgtctccttcttggaccccattgctttgcagacacacacgctatgatgcatcagaaatcagggagtgtgcggaaatgatattaagattccaaagagctgccagttcagggcaattgaaggtgacatttgagaagtacgcgagccatgaactcagtcaagttgcaatgattacacccttgggtaggcttncttgaacttgattttagttgaatgagttcaattttagcat

SEQ ID NO: 32196 - DNA, 397 bp, Gossypium hirsutum
  Clone ID: LIB3148-058-Q1-K1-G6
atttattggacacttatttcatctccataataacaagttctatcttattttctaaaaaaaaaaaaaaaaaaaaaaaaaaaaaaaaaaaaaaaaaaaaaaaaaaaaaaaaaaaaaaaaaaaaaaaaaaaaaaaaaaaaaaaaaaaaaaaaaccccaaaaaaaaaaaaaaaaaaaaaaaaaaaaaaaaaaaaaaaaaaaaaaaaaaaaaaaaaaaaaaaaaaaaaaaaaaagggggggggcccttttaaggggaaaaaattttctgcccggggattggggggtaattttttttttttggggccccaaaaaaaaaaataaggggcgggggtttaaaaaccggtgggggggaaaaaccggggggtaccccaaattattcgtgtgggaaaaaatcccctttt

SEQ ID NO: 32197 - DNA, 158 bp, Gossypium hirsutum
  Clone ID: LIB3148-058-Q1-K1-G8
cccacgcgtccgcggacgcgtgggttcactatctatagttgcaagtgggatctgtaatattctttgtgcaatgtccagttgaaaggtatgagtaacaacctccactttccacatcttatgtattccatcaataagatctgatacattttccagctctc

SEQ ID NO: 32198 - DNA, 403 bp, Gossypium hirsutum
  unsure (1)..(403): unsure at all n locations; Clone ID: LIB3148-058-Q1-K1-G9
gtcaagcatgaaagattccgaagctcaaatgaagaagaaaaaatggtggacttgcatggatctcacccttatatgtgtgtgtgtgtgtgtggcagtaattgtagtacttaagaatagccataaatgtatttaggaagaggaagaagagcttaatgggtgatcattgtttcctcttttgtttttgtttttaattgaggaaggaatgttattgtaatatatatatatatataaagttnaaaaaaaaaaaaaaaaaaaaaaaaaaaaataaaaaaaaaaaaaaaaaaaaataataaaaaaaaaaaaaaaaaaaaaaaaaaaaaaaanntttaaaataaaaaaaaaaannttggggggccgttttatagaaaaaaaaaatattttngtttgggttaagaaaaattta

SEQ ID NO: 32199 - DNA, 279 bp, Gossypium hirsutum
  Clone ID: LIB3148-058-Q1-K1-H1
gtcgacccacgccatttttacaccttccatttgtttcgcttgtcattgagacagttttcttggaacttaagatcagggggactacaactgattgcttgctttgcccatttttataaacaaattttgcacctcaatttaaaaaaaaaaattaaaaaaaaaaaacaaaaaataaaaaaaaaaaaaaaaaaaaaaaaaaataaaaaaaaacaaaaaaaaaaaaaaaaaaaaaatgataaaccgacaaaaaaaaagcaacacttactaaggattggaataaaa

SEQ ID NO: 32200 - DNA, 418 bp, Gossypium hirsutum
  Clone ID: LIB3148-058-Q1-K1-H10
ggattgtttaaaaatgaagaaccagttgatggagttacagtaaaaaattgcaccatgactaatacttccaatggtgttagaatcaaaacttggccaggtgctgaacctggcacttgttcgaacattcactttgaggatattaccgtgaccaatgtcagttctcctattataattgatcagaaatattgcccatggaacaaatgcaaaataaatgaagaatcgaaagttaaactaagcaacattagtttcaaaaacattcacggcacttctgcgcgtccagaagctgtcaagattatttgtagtgctactttgccttgtgaaaatgtagaacttgcagacattgaaattacgcatagtggaccgactggacctgcagtatcacaatgttcgaatgtgaagcctaaagttagtggcaaac

SEQ ID NO: 32201 - DNA, 283 bp, Gossypium hirsutum
  Clone ID: LIB3148-058-Q1-K1-H11
atgatcgtcactgataagccacgaaggaggatttggtgggctaaatccatgaggggaaaaatatgtgccgatgctgggaatgggatcattagaacgtggactccattgctgaagtttgtcattgcttcttttctttttctttcacttcctttcttgcttttcttgctctcgtagtcgtagtctgatttgtgccataatttatatgcaaacttttctttttattaatatataataggtttgtatttgatataaaagttatacatactgatttaaatttgttttt

SEQ ID NO: 32202 - DNA, 359 bp, Gossypium hirsutum
  unsure (1)..(359): unsure at all n locations; Clone ID: LIB3148-058-Q1-K1-H12
atttcatatgcttgttgccaaaccgttgttcaatttacttggttgagttactagtatgatgttcttatatataccctatgtatggcggatttgccctccttttcaactaaagaattttattggctagcatcatgcttttgtggcatcatcacctgcaaactggtctatgatataacaggttttatcagccctttttgtttcaaaggatatggaaaactaagtgataaagaaaaaatggaatggaacaatcggtgcaattttgtcctatgttcttttcttctttttcctttttcttgtataaaaatttgttcaaaatataatctactttcctaaatttctttgcnnnnnanaaaannnna

SEQ ID NO: 32203 - DNA, 223 bp, Gossypium hirsutum
  unsure (1)..(223): unsure at all n locations; Clone ID: LIB3148-058-Q1-K1-H2
gctggaaaagccaaggcttagcgcttcttcaagtagagtgttatttaatgttgcattccatggtcgtttatcttagttggaacttgaattaggtgttattgaaatagggttttgtagctaccttgtatactagcttctttaaccatgattgttaattattacttgttttgtaacttcttttatatttggccgagttaatatagatcatatgagtttgaacana

SEQ ID NO: 32204 - DNA, 357 bp, Gossypium hirsutum
  Clone ID: LIB3148-058-Q1-K1-H3
gggcataaattttgtcactactagtactaaaagaaataggtgtatttgggttccaaaacccaaagccttgaaggatttggcaggaaactttggattcgaaagggttggtcttaaaagtgtgttcatttgattttcgaaggaatccatcgtttcttaaaaaaaaaaaaaaaaaaaatgacagacatttaaaaagaaccaaaattaagtacacatgaaataaaaataaaaataaaaaataaaatttggacctaaaattaataaaatgtgaggtcgcaatacaaatttaaaaatggggggggccctttttaggggccaacatttttttccccggggctttgccattttttactttttttt

SEQ ID NO: 32205 - DNA, 323 bp, Gossypium hirsutum
  Clone ID: LIB3148-058-Q1-K1-H4
ccgaatgaagggtcgaccgacgcatgcgtaccgtcaatatcgaatctcgctttgcaaaaatctgtggagtcagcgtggataaaagaaccaacgggtgcatcaacaacagaagtagtaaaggctaatgtcgatgtgaaacctgtacaagagaatggatcagtttcagcaactgaagatggccccaactcagtatgtgttgcgagtgcttgctaattgccttcttagattcggaaatagtgttgaccttttggttggttattgacaagttagctgattcagatcagagcctctgattggctgggactggtctatatctttttcat

SEQ ID NO: 32206 - DNA, 412 bp, Gossypium hirsutum
  Clone ID: LIB3148-058-Q1-K1-H5
ggagattggatccttcctgatcttacgatccagggatcgataaaactgaacagtaatctgcaaacctttgcgaatacgttctatttcagctatgctacaaaacgtacaaggaagatccttggtgtcacagttccttctggcattcttggtattcatcctatgctttttattcgagttctacagatgagcctgtatcgatatcctaccgatgttcctccgccgtataaaggctaccgggacgaggattggcaggacaacgatggagcacttaatacgatatccatgactcaccctcgtctcccgatagaacacccaagctgttccattgtgaatgattctgattgccaacctttgcagccaggcatatggtattacaagattgtagaggcagatcacatatttttcatattga

SEQ ID NO: 32207 - DNA, 418 bp, Gossypium hirsutum
  Clone ID: LIB3148-058-Q1-K1-H6
cccacgcgtccgcgaaagataatggaggcatggttaccaaagttagctcaattctgggacctgaatcacctgaaactgagccaagcaatgtggaaaaatgggattctcctgcaaagtatcaagctgatattaaaagagagaaaaggaaaatgaagggtaggccactctggacacagtttgtatgctgttcatctgcaaattaggataggatcataaatgcctctagacattattgagtgggggattgcttctcaatggcattgtttaatagcaactcttttattttttttctttttagccttgaatttttcttattcatgggaatttgtagcttgtaaattatttggacaattgcattgtttttttttggtgttgctgtagtactagtatattcatcttatttagtatactataattc

SEQ ID NO: 32208 - DNA, 147 bp, Gossypium hirsutum
  Clone ID: LIB3148-058-Q1-K1-H7
cacagacttagagaacatacggaacagaggttactctttgatgtatagctccagaaagcggcgagtttccttgctattaaacatggatcatgtaatgaactgtccttttgttttttcttaactattaaatgaaaatgatcgtatccg

SEQ ID NO: 32209 - DNA, 419 bp, Gossypium hirsutum
  Clone ID: LIB3148-058-Q1-K1-H8
ggcaatagcaaataacgctttggaaaagtctgtggagtcagcgtcgataaaagaaccaactgttgcatcaacaacagaagtagtaaaggctaatgtcgatgtgaaacctgtacaagagaatggatcagttacagcaactgaagatggccccaactcagtttgtgttgcgagtgcttgctaattgccttcttagatttggaaatagtgttgtccttttggttggttattgacaagttagctgattcagatcagagcctctgattggctgggactggtctatagctttttccatggaggtaggaatgagcaacacctttcagcattgtaggcaaaatagcaattagcagcatggttagactgaatgtgactgctcaatagcgtgaggttttcttttttgtctttcatttctcatctgtttt

SEQ ID NO: 32210 - DNA, 255 bp, Gossypium hirsutum
  Clone ID: LIB3148-059-Q1-K1-A1
cccacgcgtccggagaaattgctgctggtacttgctcgacatggagggacatgaatctgatatcttgagacaatctcctggtgaataaatgtttatgaccgatctatagtggcctcgtgcgggtactaggttgtcctgcttttctatgtactcacgccagggagttgctatacaagatatgcctacgtatttataaccaactatactatctatggtgatcgtttccccatctactactgatgggcatgactgtgc

SEQ ID NO: 32211 - DNA, 377 bp, Gossypium hirsutum
  Clone ID: LIB3148-059-Q1-K1-A10
ctcatatccgaattccgagtcgactcaggaatggcaactggaacagcaccaccaagaggaagtgcagcagcagctgcaaacatgcggaggaggagaacgacaagtggtgcaggtgcctcgggaggagctgctggcacaatgcttcagttttacacagatgatgccccagggctgaagatctctccaaatgtggtgcttgtcatgagcattggtttcattgcatttgttgccattctccatgtcatgggcaagttgtattttgttcgtaaggagtagggaggggctttcctcaatacctgtattaacaagtaccaaacaaagatcaatgttgtagttttcagttttgcttaataaatggattttgatttgatttctcc

SEQ ID NO: 32212 - DNA, 52 bp, Gossypium hirsutum
  Clone ID: LIB3148-059-Q1-K1-A11
gacgtcatatctcgtctattgagtcacctaaactgaacgcactggcccaacg

SEQ ID NO: 32213 - DNA, 367 bp, Gossypium hirsutum
  unsure (1)..(367): unsure at all n locations; Clone ID: LIB3148-059-Q1-K1-A12
cccacgcgtccgaaaaattttaccatcaaagtatatacgtaaaacttttagaactttttttatataaataaaatcttttcactgattttatttttgttttttgggggatagacaattagtttgtaggtatatggatgatggtgggatggatgatttttgttttgtcatgttgtggtgatgaatgaatgggggggacggcgttgatatttcagtgttaatagaccaatgtctttgctttatcatcaccatcatctattttatctaggaatagtattggttgaatatagtgaaggaattttaattttccaaacntcctctttataaaaaataaaaaaaaaaaaaaatttataaaattatcttattattg

SEQ ID NO: 32214 - DNA, 400 bp, Gossypium hirsutum
  Clone ID: LIB3148-059-Q1-K1-A2
gccggatcaaaccgctaaacaaggtttttttttccaggaagaggggaaggaggattgtttggtttcgccatggatgatgatgaagaaggtgaaggtttgagtgatggtggtgatggtgagagttgttgagggtttaaaggcttgtgcgttcgaggatcgatcccttgacttatcaatttcttactcagaaaaaaagagaggaaaaagttaccgattccctaaaaggcggtgaaggcggaggatgagatcttcttcatcgggagcaatctggccacgtttaacagaaggtcggagataattcatccatcggagacgacagctttttccgcatcggagaagaccagcccgtttaggtaaagtccgccaccgtccttcgccttctttggtgatgtaattagat

SEQ ID NO: 32215 - DNA, 185 bp, Gossypium hirsutum
  unsure (1)..(185): unsure at all n locations; Clone ID: LIB3148-059-Q1-K1-A3
cagaattcatgtttctgtatattggtgaaataatgttgtattgttaagtttggaagatgtataatataagtgtacaaatactgaatcagcctgcttctgtgaaaccagaaaaaagagctgaaagaagtgtttgataaattgaaagttgagttctatcaatgaaattactcattattgattcanaa

SEQ ID NO: 32216 - DNA, 384 bp, Gossypium hirsutum
  unsure (1)..(384): unsure at all n locations; Clone ID: LIB3148-059-Q1-K1-A4
atgacagtgaatggagctggtgccatccttcagctcatctatgttatcctctttctcgtatatgctcctaaagatgcgaaggtggtattactttataagtttgaaggcatcatatttgtgcgggttgaaaagtgttttgtttagagatttttttatttatttttagattcaagtgtttggaaagttgaaatattgttttagacaaaagaattaataaatttaaatgaaatgtaaataatttaatatatatattaaatataatgataaataatatttaaataatttaatatatcananaaaaaaaaaaaaaaaccaaaaaaaaaaaaaaaaaaaannnnnnaaaaaaaaaaaagaaaaaagcgatttgaaggaccaagcttacat

SEQ ID NO: 32217 - DNA, 385 bp, Gossypium hirsutum
  Clone ID: LIB3148-059-Q1-K1-A5
catcatttttgttccttcttgttgctttgaaaattagggatcctctcattcaaacattaaaattataaaattttcccactagaaattgagtttacgcgtaaaaaaaaaaaaaaaaaaaaaaaaaaaaaaaaaaaaaaaaaaataaataaaaaaaaaaaaaaagaaaaaaaaaaaaataaaaaataagaataaataaaaaaactataaaatagaattgtaataattaaaaaatatcataattgttgattaaactgtactacaatatataaaattgcaccgatttaggaggggcttttcttaatacctgtattaacaagtaccaaacaaagaataatgttgtagttttcagttttgcttaataaatggattttgatttgatttctcc

SEQ ID NO: 32218 - DNA, 323 bp, Gossypium hirsutum
  Clone ID: LIB3148-059-Q1-K1-A6
cagcatcaagtggaatttttccaagttcttggtcgataaggagggccatgtcgtcgatcgttatgctcccactacttctcctcttagcattgagaaggatataaagaaactgctggcttgaatttgatgggtggaagagattagctgatcacctcatggagttaataaattagatatgcctacgaataaaaaaaaaactattctatctctggttatgtttcccccatctcctaatgatgggttagactgtactacaatttagaagttgtaccttttataatattttattcaccatggaaaagcacacatctttgtttgtctta

SEQ ID NO: 32219 - DNA, 376 bp, Gossypium hirsutum
  Clone ID: LIB3148-059-Q1-K1-A8
cacaagcgtacgattgccggatccaagcgcgataagtgctgaggagcatataggctacacggaaagacctatatctatctatctataatgaggacctgattcacgagttggtaaatccaaagttgcaggattaaggatcacaattgcaatgcggacctggacgttctgggaatttgtaaaacggaggaacagagagaggttaactgacgtatgaagatgtacggtgattggagataacggtaactgattgtgacatagaaaggactatggacgggcgcatatatagtattaagatacatctagtactactgagtcatatgctgacgactagaatcgatgaacatcggatcaaagagataatttaccgtttgtgttt

SEQ ID NO: 32220 - DNA, 401 bp, Gossypium hirsutum
  Clone ID: LIB3148-059-Q1-K1-A9
cccacgcgtccgggttttttgactccgatggatacttgcatcttgttggtcggatcaaggagctcatcaatcgtggaggtgagaaaatatcaccaattgaggtagacgcagtgttattggctcacccagctgtaacacaggcagttgccttcggtgttcccgatgagaaatatggcgaggagataaattgtgcggtgattttaaggggaggaagcttggatgaagcagaaatcacgaaatattgcaaaagaaatcttgcgagtttcaaagtacccaagaaagttttcatcacggattccgtgccgaaaacagctactggaaaaatccagaggaagatagtagcagagcatttcttggctcaaacgtctgccgcttaagtacccaaatttggagcttaaatt

SEQ ID NO: 32221 - DNA, 388 bp, Gossypium hirsutum
  unsure (1)..(388): unsure at all n locations; Clone ID: LIB3148-059-Q1-K1-B1
cccacgcgtccggcgcaattttacaagcagtttacatgcattacggtaatgatgatgatgatggtaaaatgtttattaaaaatgatttgctgacatttgtgtacttggatcagttcttgttggaaaaccaattacctttttcgtgttcttgaattgcttacaagccagagagaaaatggcgaaaaattcatgaatgtaatccaaaggttcatcgacgatactgttatcaacccaggcgaggatagggtaattgactcttcaaagagggaaaatttgaatttgccagggcaaaatatgaaaatgtgtctaatgtgatgctggatatgtttacttcaagaaaataaagaggaatcttangcatttgttntctcaaacgttctcgccagca

SEQ ID NO: 32222 - DNA, 186 bp, Gossypium hirsutum
  Clone ID: LIB3148-059-Q1-K1-B10
ggatgatctgctaaaataagaatgggctcaaactgattcttttaacatattgagttcaaaaactttatgtactgaagttatggcgactccccaagatacaaagatagagactgacttgattctaaaaatgagcatttaacctctctgaatactatttatagcaatcacgagtgtccatacatggaa

SEQ ID NO: 32223 - DNA, 394 bp, Gossypium hirsutum
  Clone ID: LIB3148-059-Q1-K1-B11
aaaaaccctaaaactcccctaaaaccaccacggtcaatacttcggagtctctttctagttcgttctcactgtcaaagcaagcggtggtaccggcaccggcgcctcattcacctcagttctcaccgctcagattccttgtagtctccccgttcattctcatttcggtctcaccgttctgccttcctctttcagattcactaagtggacagtttttgcagatagtgattttgaccttttataagcagtcaaagtgaatacagaaaagaaacaagatgaaatcggttgtgggcattgttgtatcaaataagatgcagaaatcagtggtagtagcggtggacaggctcttccacaacaagatttacaaccgctatgtcaagcgcacctccaagttcat

SEQ ID NO: 32224 - DNA, 387 bp, Gossypium hirsutum
  Clone ID: LIB3148-059-Q1-K1-B12
ggttgaaatccataacatggatgaggaagaagcttttaccattcttttggagctgtctgataagaacctactcactctggtgaaagatgcacgggctggagaggcatattgcagttaccatgaaatctgtgtaactcaacatgacgtgttgagagaccttgctcttcatttaagcaatcaaggagaagtgaatgagcggaagcggttacttatgcctagaagagatactgaacttccgagagactgggagaaaaatgcagatcaaccgttcaatgctcagattgtttcagttcatacaggagaaatgggggaaatggactggttccacatggagttccctaagacagaagtacttatcctaaatttttgctcggacaaatacttctt

SEQ ID NO: 32225 - DNA, 221 bp, Gossypium hirsutum
  unsure (1)..(221): unsure at all n locations; Clone ID: LIB3148-059-Q1-K1-B2
cccacgcgtccggttttatcatcatttttaacttgtctgttttgttaaattcgaaaccttccgagaactcttccatgatatgtgtacctcctgcaccccctttcacctgtnaaaaaaaaaaaaaaaaaaaaaaaaaaaaaaaaaaaaaaaaaaaaaaaaaaaaaaaaaaaaaaaaaaaaaaaaaaaaaaaaaaaaaaaaaaaaaaaaaaaaaaaataaaaa

SEQ ID NO: 32226 - DNA, 388 bp, Gossypium hirsutum
  Clone ID: LIB3148-059-Q1-K1-B3
atcaaaatcactccagttttctttatcactgaaaaatgtcttgctgtggtggaaactgtggctgcggtactggctgcaagtgtggcagtggctgtggaggatgcaagatgtatccagacctgaacgctgccgagatgaccacaactgagactctggttcttggtgtagcaccccagaaagcacactttgagggagctgagatggaattcggggctgagaacggctgcaagtgtggagacaactgcacctgcaacccttgcaattgtaaatgattagagaccaaagccaaagctccctggaagcagaggcgcctttgtctttaagaaataatatgttttggtgtttatgtgtttttagaataaagtagccatggcttgtcgtaggtttt

SEQ ID NO: 32227 - DNA, 399 bp, Gossypium hirsutum
  Clone ID: LIB3148-059-Q1-K1-B4
gcgttgtcaattctcatggccgtagaaggggtgactacaaggatgcaaaatgaattaggaataatataaggcgagcttactcaactgcaagttgaattcactcagttagatgcacgcttcaagaactttcaagaaggaattaagtcggaagttcgttcggagatctgttactcttgcgactttttttggtgctacatcagggagtcgaaatgttttcctacttgagccatttcgtgtattgctcaattcggaatttgaggacctgttcagaaaaaaggacactttcgaaagatgtgctccatggattctttattatttctacatactgggcataaattttgtactccaatgtttctttgttgtaaatttgataatgtgtgcatgtaatttttaataatt

SEQ ID NO: 32228 - DNA, 149 bp, Gossypium hirsutum
  Clone ID: LIB3148-059-Q1-K1-B5
caaattttatcaaacttcatttctatttatgggggttattgctaactttcaaaattataaatcgatctcttttagtactgaagttatggctgactcccctaagatacaaagatagaaacatgacttgattcttaaaatgaagcatttaa

SEQ ID NO: 32229 - DNA, 356 bp, Gossypium hirsutum
  Clone ID: LIB3148-059-Q1-K1-B6
tgaagatggaggtgaggaggaagatggatctggcgaagaagatgaagaggaggaagaagaggaagaagatgaggaggaagaagaacttcagccaccagctaaaaagcggaaatgagctcgggtcttttttctcgttcttttattttgccttgctgcgttgtgtagtgggaagttatgtctgtctgtctgtctaaattagagtagaggggattgtgacatttcagcagaacagacttgtttccatatttctgcttccattcttctcattcaaggattacaaagaaaaatttccacttaaaaaaaaaaaaaaaaaaaaaaaaaaaaaaaaaaaaaaaaaaaaaaaaaaaatttaaaaa

SEQ ID NO: 32230 - DNA, 141 bp, Gossypium hirsutum
  Clone ID: LIB3148-059-Q1-K1-B7
cgttttcatcgcctcatatgccgaagataattttgcttaaatttcaatgttgttgctattttaaatattgaagagttggctttagatttttattttttgtgaaggttgagtttgatattctataaataaatgttgactttc

SEQ ID NO: 32231 - DNA, 402 bp, Gossypium hirsutum
  Clone ID: LIB3148-059-Q1-K1-B8
tcacaagaagttccaccattgaagaaagatagtgaagaagcttgcaaaactgaaataaaagattctgaagcaaagccaccatcacaagaagttgaaccagtaaagaaagatagtgaacaagctttgaaaactgtcgccaaggactcagaaactgtggcgcagtcttccgaagattctacaacaaacaaagataccgaagaagcagcaaaaacagagaattcggtcaagggttcggaaattagcactaatgaagattgaagatggtaacagggacttcaaatcatgatgtttggactttaaccagccatagacatgaaatgaagaaagctttcagcctctacaatatatgtggattttttttcctatattctttcatttcggttgaatttttggattaatatt

SEQ ID NO: 32232 - DNA, 217 bp, Gossypium hirsutum
  Clone ID: LIB3148-059-Q1-K1-B9
cccacgcgtccgaaagaaaagagagcagcaaaccggttcgaaagggatcgagcagggagtttgaatgtgttcatcagcatgaagaaaaaaagagaagaaattattaagagacaagaaatctatacgaaaaatatttacaagacttggttttaatttcttctgtgggttgtgtaagaattaataacctaaaaattattaataatgtttttgattagtt

SEQ ID NO: 32233 - DNA, 394 bp, Gossypium hirsutum
  Clone ID: LIB3148-059-Q1-K1-C10
aaagctgcagcaatggattccgaggtacttaacagcgatgtcttgaagctttctagaggcattgaaaacatcagcgacgttctaagattaaatgaaaaaatggcattggatgagagcctggagaagttttccgaatcaatgaacaagttcatgaaaatggccgaggaagagattataaggattcaagcccatgaaagtgtggccttatctctggtaaaggagattactgaatacttccatgggaactcaacaaaagaagaggcccacccatttagaatctttatggtggtgagggatttccttacggttctcgaacgggtctgcaaggaagttgggatgataaatgaacgaactgttgttagttctgcccataaattcccagtcccagtgaatc

SEQ ID NO: 32234 - DNA, 255 bp, Gossypium hirsutum
  Clone ID: LIB3148-059-Q1-K1-C11
gcaaatatagctttagttcagcgtataagttggttttggtctttgatatttcttttgttatttttaatcagatgtaaacttaatgtaaaatattttagaatgattcttttgtgaaaaaaaaaaaaaaaaaaaaaaaaaaaaaaaaaaaaaaaaaaaaaaaaaaaaaaaaaaaaaaaaaaaaaaaaaaaaaaaaggtgggacgttatggggggtcctattttgaggacccaattcttactaactcgtccattcaac

SEQ ID NO: 32235 - DNA, 104 bp, Gossypium hirsutum
  Clone ID: LIB3148-059-Q1-K1-C12
aaatattggggtggcccaagcgtccgattaaagttatctttatcgaaaccttttgatttttataaaaaaaaaacataaaaaaaaagggggggaatttatcaatc

SEQ ID NO: 32236 - DNA, 402 bp, Gossypium hirsutum
  Clone ID: LIB3148-059-Q1-K1-C2
cccacgcgtccgactactttagaaactcaaacaaaccttttacttctcaactctttcaaattcatcatgtctgacaagtgcggcaactgcgactgctctgacaagagccagtgcgtgaagaaaggaaatagcttggtcattgagactgaaaagagctacatcagcactgtagtggtcgaggctgtggcagagaacgatggcaagtgcaagtgtggagatagctgcagctgcacagactgcacatgtggcactcattaagcagacatagaaccatgatgttttagtccatagcaatattaggacctaaaaataatgaaattgagttgaataaattggtgttttgttgttgtagtttgagacattgaatgcgttttcatgcctgtctgtcttatgtctgagtct

SEQ ID NO: 32237 - DNA, 306 bp, Gossypium hirsutum
  Clone ID: LIB3148-059-Q1-K1-C3
acagatttaagcaaatggaattgcttgttgattacagtggcttggggtttcttgtttcggattttgttttacttctctttgttattgggaagcaaaaacaaaagatcatgaaaaacccggatgattgtttttaacaagtttaaggttgggatttagcagaaaaatgttgctgtaatttgtgtgcatctttattgtatttgatttttactgttggtaaagcttagattgaagtgcaaaaccttttcatatctggaaaataattcatgttccatttcttaaatcgttatttttttgattaattgttac

SEQ ID NO: 32238 - DNA, 398 bp, Gossypium hirsutum
  Clone ID: LIB3148-059-Q1-K1-C4
cccacgcgtccgcccacgcgtccgctttgcttaagaagttcaatgctccagactctccttattttatgtttctattaagcactcgtgctggaggtcttgggctgaacttgcagacagcagacactgtaattatttttgatagtgactggaacccccaaatggatcagcaggcggaggatagagcccatcgtataggacagaagaaggaagtcagggtttttgtgctgtttagtgttggatcaattgaagaggttattttagagcgtgcaaagcagaagatgggtattgatgctaaggtcatccaggctggattgtttaatacaacttccacagctcatgacagaaaagaaatgctggaagaaatcatgcggagaggaacaagctcacttggaacagat

SEQ ID NO: 32239 - DNA, 92 bp, Gossypium hirsutum
  Clone ID: LIB3148-059-Q1-K1-C5
aattgttttgtgccatatggcctgtctgttttccctaaaacacagcattttatttcctgctttagtatcctactagacttgcacccatttgc

SEQ ID NO: 32240 - DNA, 87 bp, Gossypium hirsutum
  Clone ID: LIB3148-059-Q1-K1-C6
atttaagttatctttatcgaaaccttttgaataaaaaaaaaaaaaaaaaaaaaaaaaaaaaaggaaaaaagggcaaacgataatgac

SEQ ID NO: 32241 - DNA, 391 bp, Gossypium hirsutum
  Clone ID: LIB3148-059-Q1-K1-C7
cccacgcgtccgaaaaaaaaaaaaaaaaaaataaaaaaaaaaaaaaaaaaaaaaaaaaaaaaaaaaaaaaaaaaaaaaaaaaaaaaaaaaaaaaaaaaaaaaaaaaaaaaaaaaaaaaaaaaaaaaaaaaaaaaaaaaaaaaaaaaaaaaaaaaaaaaaaaaaaaaagggggggggggtttttaagggtccaaatttttttaccgggtgtttgcaaatttttttttttttttttggggcactaaatttattttaaggggcggttttttaaaaagggggggatgggaaaaaccttggtttccccaatttttttggtttggaaaaaattccctttttcgcaggttgggttttttaaaaaagggcccgcccgtttcccttttcaaaaatttttc

SEQ ID NO: 32242 - DNA, 403 bp, Gossypium hirsutum
  Clone ID: LIB3148-059-Q1-K1-C9
ttttaaaaaaaaaagaaaaaaaaaaaaaaaataaaaaaaaaaaaaaaaaaaaaaaaaaaaaaaaaaaaaaaaaaaaaaaaaaaaaaaaaaaaaaaaaaaaaaaaaaaaaaaaaaaaaaaaaaaaaaaataaaaaaaaaaataaaaaaaaaaaaaaaaaataaaataaaaggggggggcccctttttggggcccaattttttttccccgtggctggcactttttttttttttttttggggcccccaattttaatttcgtgggcggcgttttaaaaagcggtgcttggaaaaacccgggtgttcccaattttaattgctttgaaaaatatccccttttcccccttttggatttttacaaaagggccccccctttttttctttccaaaatttttcccctttttttt

SEQ ID NO: 32243 - DNA, 400 bp, Gossypium hirsutum
  Clone ID: LIB3148-059-Q1-K1-D1
gaaaaagtttgaaacccggaaatgtcggacgaggaacaccattttgaatccaaggccgacgccggtgcctccaaaacctacccacaacaggccggaaccattcgtaagaatggttacatcgtcataaaaaaccgtccctgcaaggttgttgaagtttcgacctccaagactgggaagcatggtcatgctaagtgtcactttgttggaattgacatcttcaccgccaagaagctggaagatattgttccctcttcccacaactgtgatgttccacatgttaatcgtactgactaccagttgatcgacatttctgaagatggatttgtgagtttgctgaccgaaagtggagacactaaggatgatctgaggctcccaactgatgagaacctgttgaaacaga

SEQ ID NO: 32244 - DNA, 388 bp, Gossypium hirsutum
  Clone ID: LIB3148-059-Q1-K1-D10
gaaatattggaatcatggaagaaaagcagggaaagtgatgggatatacttccctttccatcttgggcagaagtgagtggaaccatttccatagcattatcagaactgaagttttgggattaaagaacaggtcggcacccataggcagaggtgaggatcttcgaggggaagagaatgaagcacaaacagaagtatttccccggaagtgggtcctatagagtaatcctattatcaacacttaaacttcttaggagatattggcaacagatctaacattctaggcaagcagtgttaaacttgattgatgtaaaggtcgaggcttaggcaatgggagaggaagtattgcaggagcagattagaaagcaaaatggtaacagtgatgtgtgtgt

SEQ ID NO: 32245 - DNA, 396 bp, Gossypium hirsutum
  Clone ID: LIB3148-059-Q1-K1-D11
cccacgcgtccgcccacgcgtccgcccacgcgtccgccccaccctctcattcagttggaccccaaggatatctgccaggaaggctatatgatcttgatgcatcgaagtatggatctcaggctgaattgaagtcactaatagaagctttccatcagaagggaataaaatgtttagctgacatagtaataaaccatagaacagcagagaggaaagatgggagaggaatatactgcattttcgaaggaggaactccagacgatcgattagattggggaccatcttttatttgtgggaacgataaggagtattcagatgggacaggcaatcccgacactggactggattatccaccagctcccgacattgaccatctcaacccaagggttcaaaaagagt

SEQ ID NO: 32246 - DNA, 396 bp, Gossypium hirsutum
  Clone ID: LIB3148-059-Q1-K1-D12
aaccccaagtttgatttaagttagtgagtttcttagtttccctagaagttaagcatggctcaaattaagaggatggagtgccaactcgagatcaagtcctcagctgataagttctttgatgcctacaagaccaaagcccagcttatgccaaaaatggccaatcaagtcgttagagatgtaaaacttgttgagggtagtggttgggattccgagggttcggttagacaatggtattttgttgccggaggtaagcttgagacttgtaaggaaatgatggaaaaggcgaatgataaagacaggactattggttacaaattggtggaaggtgaaatcatgaaagctttcaaaagctggaactccatcctcaacgtgatgcctataggggagggaagtttg

SEQ ID NO: 32247 - DNA, 343 bp, Gossypium hirsutum
  Clone ID: LIB3148-059-Q1-K1-D2
gaggatcttataaccaatgttggtgctgctggtgctggtgctccagttgccgcagctgcacctgttgctgctggcggtggtggtggtgccgctgctccacctcctgctgaggaaaagaagaaggaagaaccagaggaagagagtgatgacgatatgggattcagtttgtttgattagaagttcctttcagtgcttgatttggttgattactgttttaatgcattaaagctgtgacagtagttgttgaggtttcttggtattattattatttatctgcttttgagtaaaaactttctttgagttgtatgtttgaatcttctatatataaaagttttctagacca

SEQ ID NO: 32248 - DNA, 398 bp, Gossypium hirsutum
  Clone ID: LIB3148-059-Q1-K1-D3
ggaaattcaatggctcctcatggtgcttggaagagaacagagttctttttgaatcatgaagcacttcaacaggtcatcagagttgatcagagacaaattacccggagcctctctggaagaacttcagatgtaacagatatggacaaaagggctataagagttgatattccagatattgtttctgtatcagcatgtgctgatctgactttaccaccaggtgcaggtctctgtatcgataccacctctggtccagttttcttggttgctgactcgtgggaatcactagacggatggcttgacgccatccgcttagtttacacaatttatgcacgaggtaagactgatattctggcgggtatcattacgggctaattgttgctttatgtaaggacctttca

SEQ ID NO: 32249 - DNA, 293 bp, Gossypium hirsutum
  Clone ID: LIB3148-059-Q1-K1-D4
catgaccatccagtgcaaggtttgcatgcagacattcatatgcaccacatcagaggtgaagtgcaaggaacatgctgaagcaaagcacccaaagtctgatatctttgcttgcttccctcaccttaagaaatgaaatcaagtttgtgtatttgtgtgattaaatttgaagtttgtgttaaaagttgttgccaaggtattggattcccacacaattcatacttgttttgtgctattatatatggtatacttgttatataaaaaaaaaaaaaaaaaaaaaaaaaaaaaaaaatttt

SEQ ID NO: 32250 - DNA, 371 bp, Gossypium hirsutum
  unsure (1)..(371): unsure at all n locations; Clone ID: LIB3148-059-Q1-K1-D5
gcatattgttgcgcgtgtagagaaacttgttgctgctggagagaggagaattgctgctcagtctgtgcacccttcttaaatcggtgtaggaaagaaacatgtttgtacagctaacagaatctatgtgaagctttcccttcttccctccgtatgtagggccatggttcttctacctatcttcttagacaggtaagtaagaactgtatgaaaataaaggtgttgcttgccttgtaccaggaaaaagaactgtacattgtgtagcttaagggtttatacatagaaatggagccaaagctgagagtttcagctgttgaaatccanannaaaaaaaaaaataaaaaatataaaaaaaaaatataaaaaataaaaat

SEQ ID NO: 32251 - DNA, 397 bp, Gossypium hirsutum
  Clone ID: LIB3148-059-Q1-K1-D6
atgaaagttacattagtttttaaccatttcggtgagggtcttatcgagaggatgccgagggtcaggataggctatgcacatgttgctaacaacaaatacgacgaatggaagatgtacgccatcggtggtagtgcgaatccgaccattttcagcgaagggaacaacttcgtagcgcccgataatcgtagttccaagcaagttacgaaaagagaagcaacaaattggcaaaactggaaatggcaatcttcaaaggatgtgtttataaatggtgcatattttgtaccatctggttatggtagctctgctcctctctatactcgagttcaatcgttcaccgttgctccgggatacatggtccctgttttaacatcaaatgccggtcctttacgttgtcttg

SEQ ID NO: 32252 - DNA, 395 bp, Gossypium hirsutum
  Clone ID: LIB3148-059-Q1-K1-D7
cggacgcgtgcatttggctgaagccagtgttacttccacttgatctaaaattgctgtggggtgcaaccatcttaaagacactaatgccacagcgattgataaggcatacccttgtgatatcatgcaaagagggcgagtgcgggtccatttaaaaaaggaaaatggtactttatggaatccgttcattacttcaaggaaacatctgatacaccaagtacctgtattggtacctacacaccgggaaaggactaagaagcaggaatctacatcgacatcaattgctgctgccggatcttacaaaccctggatgggtggaagaaaaaagcgattgttctcgtactgcctaattaacagaatgttagtgattataccttttaacatttccaattttgcca

SEQ ID NO: 32253 - DNA, 393 bp, Gossypium hirsutum
  Clone ID: LIB3148-059-Q1-K1-D8
ggaaatagtgcttcctgaaaagaaaaatccaggattaactcccatggactgggtcaagttccttgcctctgctgttgtggggccggttactgtgtttagttctcttcaaatgcctacagctgatctttgggtcatctttgccattttgtcaactgtgattggttactgcgctaagacatatttcacgtttgaagcaaacatggctacatatcagaatttaataacacagtccatgtatgacaaacaactcgatagtggaaggggaactttacttcacttgtgtgatgatgtgattcaacaggaagtgaaagaggtaatcgaggtaatcatctcattctttatactaatggagcaaggtaaagccaccatggaggatttggatctaaggtgcga

SEQ ID NO: 32254 - DNA, 115 bp, Gossypium hirsutum
  Clone ID: LIB3148-059-Q1-K1-D9
gtctcttccaccctcaaagaacatcagtacccttccacggctaccgctggcttcgtaacgcccaccagtgttttgccccaaacatcaggtgactggtccgattttcccggctggg

SEQ ID NO: 32255 - DNA, 368 bp, Gossypium hirsutum
  Clone ID: LIB3148-059-Q1-K1-E1
gaaaattgcccatccttacctcccatttatgataggcctacgagatgttaaaagctgatagcaatctatttgtcgtttatcgctatcccactcatgcttgtattaaatgcaaagacgcctttctggaaaaatcctcactgtacctgcactatatatatatgcggccactcaatttctgtaaatagtactttcagtgttagtaaacataatttgtgtgatagaggtagtcgcaatttggcccctaaaatctttgaagcccaggcccatattgtgttctgcccaatatttggagttaccacaagtgagcttgaagtcataacacgagcgaactcttgaaattgagttgctcatttctcgtgccagtcgtt

SEQ ID NO: 32256 - DNA, 214 bp, Gossypium hirsutum
  Clone ID: LIB3148-059-Q1-K1-E10
caaaaagcattgaattacataggcagtagaataggtgtaaatctatctactctgacttccaggacccagtcggtgtttatcttgtccatattgcatggctcacaactgggtcccgacacccactccatttttttacctttcttttatttaactcttgaattcgctttgaaatgttatatcaacttttataaggtaaattaaaataagattttat

SEQ ID NO: 32257 - DNA, 348 bp, Gossypium hirsutum
  Clone ID: LIB3148-059-Q1-K1-E11
cccacgcgtccgcaagaacggtaggttggctatgttctcaatgttcgggttcttcgttcaggccatcgtgaccggaaagggaccattggagaacttggctgaccaccttgctgacccagtcaacaacaatgcttgggcctatgccaccaactttgtccccggaaaatgatgggaacgtgaaccaggagacatctcaatttctactattggcatttacatggcaatggctgctgctggcgccacagttcctaccctttttgtatttgtcttgttcatgtttttatttgttggtgtgaatgtaaatttgttgcacaatcaatgaaagcagaatgtgaattttgtgtgctc

SEQ ID NO: 32258 - DNA, 392 bp, Gossypium hirsutum
  Clone ID: LIB3148-059-Q1-K1-E12
gataattcgaaatccaccaaaaaggatcacttctgcttacatctcaaattcaattcgctttaatttaaaatcaaaccaattttttttattgattattgatttgaaattctcaggaatagacaaccaaaacaagtggatttatcagaggttttggatttcaaatacatttcagaaagctgcacttcctcaaggagttgtagcgattaaaaatggattagatcgtccagtttttggcttggaaaatcggtgtggtgtcaatttgactggtctaaggtaggtgtctaggtcatactcatttagtcttcgatcctcttccttgcatcttttgtcgatgaatttgttaactgtctaattacagacgttgatgctcatacaacaccattgtatgcaat

SEQ ID NO: 32259 - DNA, 188 bp, Gossypium hirsutum
  Clone ID: LIB3148-059-Q1-K1-E2
acaaattactacagcttttatcctttttgttagagaaaaaaatttatagagagagatgatctgaattggtgtaaatcagccttttcaaatttttttcatattatgttggatcttgttgtattggggattatcatatgaaaaaaatttatgaaatacatctaaagttgggttgtaaacactttcttttc

SEQ ID NO: 32260 - DNA, 348 bp, Gossypium hirsutum
  Clone ID: LIB3148-059-Q1-K1-E3
cccacgcgtccgcccacgcgtccgagtgatcaaaaatcccttgaagccatctccaaccatagccttgttcagttgagcacagaactaggcgccaatgtggaaaatgtactcggttgtgacaatgctttcaaacaggctaagcttgaatctccaatgaaggacatggatgcaatgcttgcaaatatcattagcaacaccttgaccattggtgtcgacatggtccacttttagaggaacaaacgattaaaaggatgactacaaacacatgaagcctaagtgggatattataattttattgttgtatccttttaagagaagcaggaagtatataagaacctttgtcactaa

SEQ ID NO: 32261 - DNA, 134 bp, Gossypium hirsutum
  Clone ID: LIB3148-059-Q1-K1-E4
tgtaaattggccagaatgttctcctcgccaaacttgaaagtcgccatgttcttcttctgccaaaggaatttgcagaatcttttgtggaatattttctaaaaaggtattttcaattaaatcagctttccactttg

SEQ ID NO: 32262 - DNA, 56 bp, Gossypium hirsutum
  Clone ID: LIB3148-059-Q1-K1-E5
ctaactcaaacaataaaggttaaaattcatttatttaaattcaattattagtcatg

SEQ ID NO: 32263 - DNA, 384 bp, Gossypium hirsutum
  Clone ID: LIB3148-059-Q1-K1-E6
ggcaaagttatttcaaatagaagcagctgatgtcataaagaccttttctcatgaagacgaattacttatccgtgtccatcgttgttgtatataacactctagcagatgagttccttctcttagaatctgtaatcagtttattgttgtcttgccgcgtcatatttttggaatataaatgtttttttacaaaaaaaaaaaacaaatagtaataaaaaaaaaaaacaaattcttaatttaattaatttaactatcatcccccttaaaaaaaaaaaaaaaatttttttattaaatacctacctatttaccatttttgggggggccctttttagaggtccaaattttattccccggtgtttggaagtaataattttttttttggggccc

SEQ ID NO: 32264 - DNA, 222 bp, Gossypium hirsutum
  Clone ID: LIB3148-059-Q1-K1-E7
gccacgcgtacttcaaatggatacaggtattgtcataaagaccttttctgatgaagacgaattacttatccgtgtccatcgtggttgtatataacactctaccagatgagcgccttatattacaatctgtaatcagcatattgttcgattgccgctgcctatttttggaatataaatgctattttacaaaaggcaataacaaaacgtcaaggcaataaaacc

SEQ ID NO: 32265 - DNA, 379 bp, Gossypium hirsutum
  Clone ID: LIB3148-059-Q1-K1-E8
cccacgcgtccggcttttgcctaaactgcctccgctcctctgccatagggtggaggagattcggagaagcagaaaaagggctgttgctgactccggtgaagatcttatttcccaaaatgataatagtaatgaatcaaatggaagtcaaaagctttcctctgtacaaacaaatgatagcaacaacaacaacaacagagaaagaagaagtcagagtttaaaggttggcaatgtagatggccctcttaattgtccaagctcaacaaaccttcagattttacattacacctttggtcaaggataagaagaatgatgataattgtaattgcaaaaatgatcttaagaaagaaagagtcgtttagcaaatccgatgggacggacg

SEQ ID NO: 32266 - DNA, 393 bp, Gossypium hirsutum
  Clone ID: LIB3148-059-Q1-K1-E9
tcccacgctttcttcttttgcctaaactgtcttcgctcctctgccatagggtggaggagggggggagaatcataaaaagggctgctgcttactccggtgaagatcttatttcccaaaatgataatattaatgaatcaaatggaagtcaaaaactttcctttgtacaaacaaatgatagcatcaacaacaacaacagataaagaataagtcatagtttacagtttgtcattgtatatggccctcttaattgtccaagctcaccaagcttcagattttacattacaccttttgtcattgattataagaatgatgattatttgcaattgcaaaaacgatcttaataagaaatagtctcttatcaaatcccatagtacttaccaattccattacatt

SEQ ID NO: 32267 - DNA, 76 bp, Gossypium hirsutum
  Clone ID: LIB3148-059-Q1-K1-F1
tgttttcatatttatggccggacaagaaaaaaccctctttgtatctctttttcctttttttggtggtttatttttc

SEQ ID NO: 32268 - DNA, 394 bp, Gossypium hirsutum
  Clone ID: LIB3148-059-Q1-K1-F10
tgggataagaccgtgaaagtttggaacttgactaactgcaagattcgtaacacattggccggacacactggttatgtgaacacggtggcggtttcgcctgatggttctttatgtgctagtggaggcaaagatggggtgattctgttgtgggatttagctgaaggaaagaagctttacagcctcgaagctggtgccgtaattcactcgctttgctttagtcctaataggtactggctttgtgctgcaacggagcagagtataaagaatctggatttggaaagcaagagcgtagtcgaagacttgaaggttgacctcaaaggccgaggcttaaaacatttgccagccaccgccaacgcaaacaaaaagaaagtgatatattgcacatgcttgaact

SEQ ID NO: 32269 - DNA, 173 bp, Gossypium hirsutum
  Clone ID: LIB3148-059-Q1-K1-F11
attttaataaggctttcattggagttttattttggtttcaaaaaaaaaaaaaaaaaaaaaaaaaaaaaaaaaaaaaaaaaaaaaaaagggcggacgataataaaagaaccaagctaaaatacacatgcatgcaaaaggaaaaactcttatatagtgacaccttaattcaattg

SEQ ID NO: 32270 - DNA, 335 bp, Gossypium hirsutum
  Clone ID: LIB3148-059-Q1-K1-F2
cccacgcgtccgattcgctggtgtgtgcgctcttgctgtcttgtacatagctggtaacgttgtggaaacaaaggggcgatcattggaagaaatagagcttgctctgaatccgacgacttaatttgtacaatatccaaaggtatgcagaaataatctctgaagctggttaatgctcatctcatgagcattccattattttgcatcttttggttaaggccagagagaggcaactagttctagtgacgtgtacgtatacctatgttgcttgaaatatggaaagaagagatttttggtagtttgaactctgttggtttatgaaatgcaagatgttgcgt

SEQ ID NO: 32271 - DNA, 398 bp, Gossypium hirsutum
  Clone ID: LIB3148-059-Q1-K1-F3
aaaggaactcagacaagctaccaaccaagcccttaacttgcttcaagataactatcccgaatttgtggccaaacaagtgttcatcaacgttccatggtggtacttggctttcaataggatgatcagtcctttcctgactcagagaaccaagagcaagttcgtatttgcaagtccagccaaatctgctgagaccctcttcaaatatattgctccggagcaagtaccagttcaatatggtggactgagcagagagggtgaacaggaatttagcgtggccgatgccgtcacagaggttacaatcaagccagcagcgaagcatagtgttgaattccctataactgagaattgtaatctggtttgggaactccgagtagtgggatgggaagtcaattatggag

SEQ ID NO: 32272 - DNA, 394 bp, Gossypium hirsutum
  Clone ID: LIB3148-059-Q1-K1-F4
atgagttgcctgatggacaagtaattactattggagctgagagattccgttgtccagaagtcctcttccagccatctctcattggaatggaagctgctggaatccatgaaactacctacaactctatcatgaagtgtgatgtggatatcaggaaggatctctatggtaacattgtgctcagtggtggttcaactatgttccctggtattgcagaccgtatgagcaaggagatcactgctcttgctccaagcagcatgaagatcaaggttgttgcacccccagagagaaagtacagtgtctggattggaggatctatcttggcatcactcagcaccttccagcagatgtggatttccaagggtgagtatgatgagtcgggtccatccattgtcca

SEQ ID NO: 32273 - DNA, 385 bp, Gossypium hirsutum
  Clone ID: LIB3148-059-Q1-K1-F5
gagccacaagatgcttacggcttggagaatcttgcaacagacgagttgtgcaagcattacaccgaagactttggaattgaatgtcgcattggaaggttccacaacatttacggcccttttggaacttggaaaggtggaagggagaaggctccagctgccttttgcagaaaggctattacttccattgacaagtttgagatgtggggagatggtcttcagactcgatctttcactttcattgatgaatgtgttgaaggtgtacttacattgacaaagtccgatttccgtgagcctgtgaacatcgtaagtgatgagatggttagcatgaacgagatggcggagattgtgcttagcttttaagataaaaagcttccgatccaccata

SEQ ID NO: 32274 - DNA, 98 bp, Gossypium hirsutum
  Clone ID: LIB3148-059-Q1-K1-F7
gagacacgtacttctaaaggatggaagtattttgataaaggcatgctatgtagaagaaaaaatagatgagtctcgtatatcggggtggatggtaaggg

SEQ ID NO: 32275 - DNA, 80 bp, Gossypium hirsutum
  Clone ID: LIB3148-059-Q1-K1-F8
cggacgcgtgggcggacgcgtgggcggtatttcttttaaaaacaattctaaaataaaaaagggggagattattcaagtaa

SEQ ID NO: 32276 - DNA, 310 bp, Gossypium hirsutum
  Clone ID: LIB3148-059-Q1-K1-F9
ctagttctagatcgcgatcggcgccctttttttttttttttttttttttttttttttttgggaaatccaatattcttgtcaagaatttcatattcaaaaacatattgaataactttcacacaaggattttactcaaggcagcaaaatccatagacataataagcaaaagtcgaaaacaccaccaaagatccaccataacaattatattcgaaaattcccatcacttgaattgccctatctgtttgtaaatatgcaaaatgttttctgcataaaaaaactttcttttggacttttatgaaagggtaatttt

SEQ ID NO: 32277 - DNA, 156 bp, Gossypium hirsutum
  Clone ID: LIB3148-059-Q1-K1-G1
gttttttccgggtaaattttcctggctattcttggattcaatatacagggatatttggctatcttttggttaataatgtatgtgtgcatgttctaatgcaaagatgtactctttagctatgaaattcaatgataatatatcagattccttggaatc

SEQ ID NO: 32278 - DNA, 259 bp, Gossypium hirsutum
  Clone ID: LIB3148-059-Q1-K1-G10
accacgcgttcgaccactcaatcgatttttataagaaagggggtggtaaatctctatagggcgactttaatctagcagggtactatgaagccccaaattgacgatgactgataatgaatgttctgtccacataattatatttcggcggcgtcttatgtgaatctcatactctcatctagcatgcttatatggtacaaattaaacactggcgtgtacacgtatactgaaacctgcgaccacttatcgcttgataatccct

SEQ ID NO: 32279 - DNA, 392 bp, Gossypium hirsutum
  Clone ID: LIB3148-059-Q1-K1-G11
caagaagaaggtgaagaaaacaaatgtcccggtggcagagttggtctacggtgcaatgttgtctggtgaccttcaaaaagcagtcgagaaggagtttgaaatggctttgcaagatcgggtgatggaagaaacaaaggataaaaagaatgctgtagaggcctatgtctatgacatgaggaataagctttgtgataaataccatgattttgtcactgcttcggataaggaagagttaatggctaagcttcaggagacagaggattggttatacgaagatggagaggatgaaactaaaggtgtttatattgccaagcttgaagagcttaagaagcaaggtgatcctattgaagaacgttacaaagagtattctgagaggggaactatcattgatc

SEQ ID NO: 32280 - DNA, 341 bp, Gossypium hirsutum
  unsure (1)..(341): unsure at all n locations; Clone ID: LIB3148-059-Q1-K1-G12
cccacgcgtccggattcttgagttatgtggtgtattgcatgcgcatactggatggaaacgtacggatatgagaggaataaaaaagaagaagctatggctgaattctaaataaaaaaaaaaaaaaaaaaaaaaaaaaaaaaaaaaaaaaaaaaaaaaaaaaaaaaaaaaaaaaaaaaaaaaaaaaaaaaaaaaaaaaaaaaaaaaaaaaaaaaaaaaaaaaaaaaaaaaaaaaaaaaaaaaaaaangggggggccctttttaaagagcccaaattaactccccctggtttgccaagatatatttgttattagggggacccaaacctaaacttacggccaatt

SEQ ID NO: 32281 - DNA, 196 bp, Gossypium hirsutum
  Clone ID: LIB3148-059-Q1-K1-G2
cccacgcgtccgatttaaaccccatcagttttgttgtagttattaagtttcaaacctcaattaagtacaacaaaaaccctgtaacaactaagaaatttagatgcaactgatattttagtctctatcttcttttcactaaatattatagacaaaccgaaaagaaatgacataataacttatttggctcctttcattt

SEQ ID NO: 32282 - DNA, 424 bp, Gossypium hirsutum
  Clone ID: LIB3148-059-Q1-K1-G3
ccggtgcggtattcgggggtccgccacgacgtccgcccacgcgtccgctcatgccaaaggcattgtccttgataagatagggattgaagctaagcaacctaactctgctatcagaaagtgtgctcgagttcaattgatcaagaatggaaaaaagattgccgcattcgttccaaacgacggttgtttaaattacatcgaagaaaatgatgaggtgttgattgccggatttggacgaaagggtcatgccgtcggtgatattcccggtgttagattcaaggttgtgaaagtgtctggtgtttcattattggcactttttcaagagaagaaggagaagcctagatcctaatgttgcaacaatgaggatatcttttatgatgttttcatagattgtgttttgcggattgaatgtaaaagcaattgtgtt

SEQ ID NO: 32283 - DNA, 397 bp, Gossypium hirsutum
  Clone ID: LIB3148-059-Q1-K1-G4
gtgtcatggatcctcatctatatctgcacacgttatgcattcgcgcgggccattactctactatctgagaacaatcctataactaggtagcaagggtgagatcaggaagcattgcaatcttgcaaacaagcttcactaaaatgcctcgccaaagagaaagccgagtgtggccgaataaaatgtttgtttactcagtttcttttccaagagacgagtttgttaatgtgcaagtgagtaatggtgcaatggtactggtttgtaacgatcgatccattgcatttttcttttagcataagccaggttgccttctcttgatgttggtcatgggcttggtggatgtagggatggatgtaatatatgtatgtaaggatggtgttgactgtgtatgatgcatgaa

SEQ ID NO: 32284 - DNA, 394 bp, Gossypium hirsutum
  Clone ID: LIB3148-059-Q1-K1-G5
cccacgcgtcctgccacgcgtccgcccactcttgcgaacagccgtaaccgaggcgtgaaggtggatgatcctatgctattagcatcttctgttcatgtgatcaataaaaccattgatgaagacaggtttgatattccagatgtacctatggcggaggattgactttactatggctgaccccattgatgccttgtattttgatagggttgctggacgaatccccttaagattaaatgtgaaagctgggttgctgagatgggatattcgctaggagtaagcatgaattctcaaggtgggggcttgccaattagaagttattcgagaaggttataccataatggcatgtaatatatgattgctagtaagggatctttacaattctttgttctttttt

SEQ ID NO: 32285 - DNA, 385 bp, Gossypium hirsutum
  Clone ID: LIB3148-059-Q1-K1-G6
acggaacaaaattcacaacggagaaagggttttctccaccctttgagataccccatttcgaactccggggaacggatagctcggaagatgcaagaaatttctctaatgaaacccatctctaatggggatcaatggtgggaattaatcagggaggatgatttgccaagtctcgaccaagagacagatcctgatctgctgctgctgctcctcaaatacaaggtccatatcttgatggagatgatgaagcttttcaccaatggcagtccgaaatagctcgtcttggtatttaggatatataggagattagtatgatgtatcctaaacttaaggataatttagtcttgtaattatccatattttctttatatagaaattcaactttgat

SEQ ID NO: 32286 - DNA, 365 bp, Gossypium hirsutum
  Clone ID: LIB3148-059-Q1-K1-G8
cccacgcgtccgggaatataggagctgcaaatgcatagcatatggatcagtctccatgtgaataactgagtcccagtacttgtagaatgggaaatgaaatgaagaataaaataatgaagaataagaactgtttggttatgagaaatggcagtaactttctgtttaggtagctttatgttaaaactagcttttattcctgtttcgtcctttgtacatcataatgtcagcttcaacttctagtctaataaaagcttgtttgatggtcccatatcgcttgatattgtaaattgcaaaactgtcgatacatatttgttacgcatgaaatatgctttaacaaatattttttactaaggggctgccttttt

SEQ ID NO: 32287 - DNA, 132 bp, Gossypium hirsutum
  Clone ID: LIB3148-059-Q1-K1-G9
atgttttagtccataattaaattaagttgaataattggtggcgtgttgcatgtttgtctccgcctcattgtataccatgatagaatggccatgtctatggactttgtctgattaatgaatgattattagcac

SEQ ID NO: 32288 - DNA, 392 bp, Gossypium hirsutum
  Clone ID: LIB3148-059-Q1-K1-H1
ctgattttaaagctgcacccgaagccaaaagaggaaaggaaaaaggaggattgtttgttttgcgatggcggacaaggcggtgacgatcaggacaaggaagttcatgaccaacaggctcctttccaggaaacaatttgtcattgatgttttgcatccagggaggcccaatgttgccaaggcggagctgaaggagaagctttctaggatgtatgaggtgaaggacccaaattcgatctttgtgttcaagttcaggactcattttggaggtggcaaatctactggatttggtttgatttatgattctgttgagagcgcaaagaagtacgagcccaaatacaggctgatcaggaacggactcgataagaaggtggagaaatcaaggaagcaaatga

SEQ ID NO: 32289 - DNA, 382 bp, Gossypium hirsutum
  Clone ID: LIB3148-059-Q1-K1-H10
gaataatcgaagacaagttaaacatttcaaagtatttatcctggacattttgttcgtgtatgtatggaaagaggaagcctgatcctgatttctatttggctgttgtggaacatcttaaagttgatccagcaagctgtatattcgttgatgacaggataaaaaacgttgaggctgctgtatgagttggcattactggtcttcaattcaagaactcagatttactacgtcaagatcttctacggttgggggttgacattgcaatagatgcacagtgaggatcatcttaatgctgcagaatgaacagacattgtgacctccaaacttgcattaaactatatttagattttgtccatttttgctcttctgcctttttaaaaattat

SEQ ID NO: 32290 - DNA, 391 bp, Gossypium hirsutum
  Clone ID: LIB3148-059-Q1-K1-H11
aagttgcacattgcaagtgattgggattttcatttttttttaaaaaaagaaaaaaagaaaaagttaaaacaggtaaaaagtgttcccatgttattggttgaatggggtgatctatatttatttgatgcatgttgccattaattttaggatgaagctggagacgacatcaaggatgcttccaaacccgagtcaagagagggacagcagtgatgagttaagttcatatgatatgtactctgtaatttatgttgcaagatgtacttttacgtacatgcaacatgagctgatgtataaagatccaacaatcatattgaccttcatacttgcacatttatcaatacttagagtggaaattttacattccaatactattatcattcagacatgaatt

SEQ ID NO: 32291 - DNA, 394 bp, Gossypium hirsutum
  Clone ID: LIB3148-059-Q1-K1-H12
tctctattatgatttacgaatataaatatgaagtgctgaaatgatgatcatgtaaaagaatattatatataaaattcttcatattattttaaaagtataaataaatacaaccatttccatattagctgctcacgaatgtttgtagtggttttattatgctccttatggggtgggtttgggtatgaatatgattaggttgtttcattgagggacggaagttttctggctcttcagtcgtaatttgttctgaaaagagaagtaaacaaattgtgctttttgatcttatctggttggtcttatttgttacaaggcaacttcttggtgtttcatcttttccttcccattaggatgttcttttgactcttcaacccaatgtcatttagttttgtaacca

SEQ ID NO: 32292 - DNA, 399 bp, Gossypium hirsutum
  Clone ID: LIB3148-059-Q1-K1-H2
agtggggagcgactaaagagatatatataccacaagatatgcagtgagttgcctgaaggtccattctgcatagtttatatgcacagtacagtgcagaaggaggataactcccctggtgttactatcttgaggtggatttacgaagaacttccccctgagatcaaggataggctgcaagtcatctacttcatacaccctgggcttcgttcaaggcttgtctttgccactcttggccgattcttcttaagtgggggtttatactggaagatcaagtacataagccgcctacaatacctatgggaggacataaagaagggagaggttgagatccctgaatttgtgcaaaaccatgacgatgttcttgagcaccggcccttaacagattatggtattgagcca

SEQ ID NO: 32293 - DNA, 394 bp, Gossypium hirsutum
  Clone ID: LIB3148-059-Q1-K1-H3
gtgggcttgcacattgttggaacctttaatgctgatacggggttcaaagccggttatttaaacgagttataaaaatgttagaaaaagctttacccaatgcattctatgcatcatgcatcatgaattacttttcatcactactattttaattacattcacttatcatatattctctttgtaacctattccaacttatttatatgaaatataaatgagattgatattaattcttagataaaaggatgtgaaagtgtcatggagtttaattattggcacttttcaaagagaagaaggagaagcctagatcctaagtttgcaacaatgaggatatcttttatgatgttttcatagttttttttgggattgaatttaaagcaatgtgtttctcgttagc

SEQ ID NO: 32294 - DNA, 170 bp, Gossypium hirsutum
  Clone ID: LIB3148-059-Q1-K1-H4
ggggaggggggggtttaaaaaaaaaaaaattttttatggggattaaaaaaaattaggggttttttttatgggaaaaaaattaaaataagggggggggttttaaaaaattttttattggggaaaaaaaatggattatcaaaattttttttttttaataaaaaaattttttt

SEQ ID NO: 32295 - DNA, 403 bp, Gossypium hirsutum
  unsure (1)..(403): unsure at all n locations; Clone ID: LIB3148-059-Q1-K1-H5
gccacgcttacagagacccgtgagctgtgatcgttgagcggatcaccccaaaacacaaaaatgggtgcttatgaatcagttcctcaaaaatcaatccatgaatttacagtcaaggattacaaaaaccaagatgatgaccttagtatgtacaaaggaaaagctcttcttgttgttaatgttgcctctaaatgtggactcactgattcaaattatacccagttgactgatctttacaacaaatacaaggaccaaggactggagattttggcattcccatgcaatcagtttttgagccaagaacctggtaccagtcaagatgcacaagaatttgctcgtatcaagatacatggctgaataccctantttccaaaaggttcatgtcaatgggccaaagacagagcct

SEQ ID NO: 32296 - DNA, 311 bp, Gossypium hirsutum
  Clone ID: LIB3148-059-Q1-K1-H6
cagaatcgaacctggaatcgctgatggtacagtaaacagctgttgcaagaggaataaaacgagtgaccattaccccaaagcaggaatctcacgttattgttcaaaggggagcgtctcatgctatcaaggggcagtagatattaattctaggatgaaacgggaaaccagatcaaggactcgtacacaccagaagtctgggatgtacagtccagctcatttaagttgatataaagtgtacacgagcaattagggtgcaagatacacttttacgagcatgcagcgtgaactgaggtataaagggccaactattg

SEQ ID NO: 32297 - DNA, 309 bp, Gossypium hirsutum
  Clone ID: LIB3148-059-Q1-K1-H7
cccactcgtacgtccactcgttcgctgtacttaactcagccgatgcaatgcccatatactagcgaccattattcggttgcacgaacctaacttaatatttccaacatgtccttctcatgctttagaggaagatgcaatgctactagaaagcttcatatattatcctggaaaccaactttagcactccttatttcttaataagaacccttagctcagtcagcctgtttgatgctatcaaaactgtataaatgctcgttactcagcatatctagctcgatcttgcaaagagcaaactggcggatcataatt

SEQ ID NO: 32298 - DNA, 395 bp, Gossypium hirsutum
  Clone ID: LIB3148-059-Q1-K1-H8
cccacgcgtccgcccacgcgtccgcccacgcgtacgcccacgcgtccgggctctgctacgaacgaggaataaacattggtgcgaaccaccgtcttaagcaccaacaaatcccctttttggtcccatgctaccagtcctgttgctgacttggagcttcttctgtcatacgctgcgtctaactgaatcgttgcttttgggcactctcaaaatacatggaggctttcttcaaaccaggaccggctacgtgggcattcatcatttgtaatgactttcctgcacctgagattaacaaaattgggaatatagtctcatgagattctacaaatagtcattgtaatttttggggcgaactgtaagccccataagttgctataaaattctttatatttggtctg

SEQ ID NO: 32299 - DNA, 222 bp, Gossypium hirsutum
  Clone ID: LIB3148-059-Q1-K1-H9
cccacgcgtacgcccacgcgttcgccctcttttactcccacgcatccgggctctgctacgagcgagtaatatacatttttatgaaccaccgcctaaagctccaacaagtcccctttttggtcccatgctaccagccactgttgctgacttgcatcttcttctgtcaaacgctccgtctaacatcactcgttacttttgggcactctccatttacgaggttga

SEQ ID NO: 32300 - DNA, 418 bp, Gossypium hirsutum
  Clone ID: LIB3149-001-P1-K1-A1
aaacatttgcaagtttgcaaagaagggcttgaccccatctcagattggtgtcattctccgtgattctcatggtattgctcaagttaggagcgttactggcagcaagatcttgcgtatcctcaaggctcacggtctggcccctgaaattccggaggatttgtatcaccttatcaagaaggcggttgccatccgaaagcatttggagagaaacaggaaggataaggattccaagttcaggttgatccttgttgagagccggattcacaggcttgctcgctactacaagaaaacaaagaagcttccccctgtctggaaatacgaatctacaacagccagcactctcgttgcttaagctaggcatgtggcgtggtgcaattttgggggaatccgggttcgatgtggatgctacgatggaagc

SEQ ID NO: 32301 - DNA, 491 bp, Gossypium hirsutum
  Clone ID: LIB3149-001-P1-K1-A11
agggcgaatgggtacgtcccacgcgtccgcgagcgtttgacaaaccgcattcagaatggtgttacagaagtcgttgaggcaaaggctggtgctgggtctgcaacattatcgatggcatatgctgcggttcaatttgccgatgcatgtcttcggggcttaagaggtgatgctgacattgttcgatgtgcatttgtggcttctcatgtgactgaattgcccttcttcgcatccaaggtaagactcggtcgttgcggagttgaggaaatataccctcttggcccactaaatgagtatgagagggttggcttggagaaggcaaagaaagaactagaaactagcattgagaagggggttgcctttgtcaagaaatgaataggtactccaatacccccaaatctaccttttctctgataaccaaagtttgtaagaataaggggtaactctcctcttttgttctacataaacccttagccatcgggttcctagatgtg

SEQ ID NO: 32302 - DNA, 423 bp, Gossypium hirsutum
  Clone ID: LIB3149-001-P1-K1-A2
aggtgacccatagcttctctaccaatgaaaacaccatcaccatcggtacacaacatgcattggatccattgacgatggttaaggcacgggtgaacaacgctgggaaggcaagcgcactaatccagcacgagtggcgccccagatccctctttaccatttctggggaggtggataccaagtccattgacaagagtgccaaggttggacttgctttggcactcaagccttgagctttataagagctccatcttggaagagtacggcaaggtaagcttagaattttgaaatgtaatctggtgacactttttcatggcgttgccatagacacttatgtcagtggtccttttttttctttttggcttaaaataagaagaaaacggaacaaaaagaaaaagaaatggcatgttggcttctttttgaaca

SEQ ID NO: 32303 - DNA, 418 bp, Gossypium hirsutum
  Clone ID: LIB3149-001-P1-K1-A3
gggactttgaaggatgaagagcctttgattgtttacaaaattaacaaggtattgttgcccagggagttgtacaagccagtggaagcaccggctgagtcacccaagccatccaaatccaaatccaaatccaaacacaagatagccgatgcaccggaatccgatgcaccagcggagagtgatccagctgatgatcagacggcagacaatgacaatggggttgcaggactggacggtaggagattggtgatggggatgctgagcctgtgcattggggtattgctgatttgaatacactgatatagaaatatttatcagattgatacaaatggtatgggagacaatactttttaggccattggataacgagaaatggggtccttatttcatgtgagagatttgaaaattttcttttctttta

SEQ ID NO: 32304 - DNA, 423 bp, Gossypium hirsutum
  unsure (1)..(423): unsure at all n locations; Clone ID: LIB3149-001-P1-K1-A4
gcttatcagaaatcccaacacttattcaagcttaataggactcacttggtctctaatcgcattcaggtggaatgtacaaatgcctgccataatagccaagtccatttccatactgtcagatgcagggcttggcatggccatgttcagtcttggtctgttcatggcattgcaaccgaggatcatagcatgtggaaattccgttgcagcttttgccatgggtgtgagattccttgcaggtccagctgtgatggcagccgcttccatagctgtcggactccgtggcgttctcttacacgttgccattgtgcaggcagctctcccacaaggcattgtcccctttgtctttgccaaggaatacaacctacaccctgatattctcagcactgctgntatttttggaatgctaatagccttgcccataac

SEQ ID NO: 32305 - DNA, 327 bp, Gossypium hirsutum
  Clone ID: LIB3149-001-P1-K1-A6
cacgagctcccattatcagaggacccgatttgacgctcgcgatcttatgctgtccaagaatctatcgaaggctgcgcaaagctaagacctagtgcggatatatcaatccccacagctgcagattctgtgcctcctgaattgcgccactataggtaacagaggcagagtgaacctgctctcatggtcgcggctggtcaggagtcgaacgttaattcagacatgctcccagtctaaatggcgatctgaacgcacgcttgtccgacgcagtctgcgcggtaagagaagtggtagcacccagctctgtcgttgcacttgatggaacgcttg

SEQ ID NO: 32306 - DNA, 119 bp, Gossypium hirsutum
  Clone ID: LIB3149-001-P1-K1-A9
attttcgggaatatatgaattgccttcaattactttgaaaggcacgaaatttggtagtgtatcttttatgagcctaatgaaaatgtcagtactggctgtggctgtggactgactatatt

SEQ ID NO: 32307 - DNA, 420 bp, Gossypium hirsutum
  Clone ID: LIB3149-001-P1-K1-B1
tataggaaaagacctaatggtgctaagggccatgatcatgaaaggaaaaaaggtgtccgatggactgaagatgaacacaggaggtttctaatgggacttgtaaagtatggtaaaggggattggagaaatatttcaaggaactttgtggcttcaaagacacctacacaagttgctagccatgcccaaaaatattaccaaaggcaactttcagggggaaaagataagaggagaccgagcattcacgatattacagttcttaatctcactagcaccactacgttttccgaccatcgtaaggctctgtctgtaaaccagtctaatgtccttgcattgcagcataagatagcgagtatgtcaaaagctgtaagccttaatgggtcggatactagtttcgattcggagaatggaaacaggtttaca

SEQ ID NO: 32308 - DNA, 431 bp, Gossypium hirsutum
  unsure (1)..(431): unsure at all n locations; Clone ID: LIB3149-001-P1-K1-B11
gggaattcaacctcgaagcaaacgaatctagagttagatggtgatagggcaaattgctatgggcgatcagcatggtctgccacctgaagctgattggcaatataggggatttaggtctaaggtaaatctgcagcaggagccttgtagaagcgatggtgctactcatggaagatcggatggatatagtgaggcagaaacaatgcagctgttgagccaaactcttatccaatctccagcatcgattaagtctaatgaaatgcaaagatatggacagttcaggagacctggaaataacaatgtgtttcacattcctncatcatcttatcagattcattttccaagcagcagcaatggaggccgaataggaagcgatcttttactatccattagtgaacaacaatgggcatcaggtcctcaccaaaatgttggaa

SEQ ID NO: 32309 - DNA, 332 bp, Gossypium hirsutum
  Clone ID: LIB3149-001-P1-K1-B12
acccacgcgtacgctgaggtcatccaactagtttaccactcgggtgtcatatagtcattggctcattgctatcaggcatcattataatctgccaccggactctcaacaaccatataactgacatatcaataaggtacatctgaaacatcatccctagtaaaacgacacagctcactcatacagaccatatatatatacaagtcaaagacaatacaacatgccatccttactcttaaccaacctacaactacatttaatatttctgacactccaagatattcacaaggcacgacaccagctaataacactgctattgacattcctacatcatc

SEQ ID NO: 32310 - DNA, 422 bp, Gossypium hirsutum
  Clone ID: LIB3149-001-P1-K1-B3
gttttcaggacacaaaaagtatataactccaaataaaagacatatgcttccttattttctgaactcctcaatgcccgaagcagagttcaacaggatcataaaagaattacaccatgaatctttgggacaaccagaactcaggaccagcaaagctggaagggatgtaaccaagtatccggttccagaatgtatgtgcaatgatgcacattcccacttcatttgatacagaaagcttccaacccgatagctaacattgcaagagtcttcatcgagaatccaaatttctctgtgcttccccgaattcgagccctttgaaaatggagaataatgatttttcagacactgatgattgttgggagcgccatttcaagaaggaccacagccctcacaagcttttctgcaagcgtatcgtattccggtct

SEQ ID NO: 32311 - DNA, 304 bp, Gossypium hirsutum
  Clone ID: LIB3149-001-P1-K1-B4
acggacactttggaagggacgacccggacttcacctgggaagttgtgaagcccctcaagtgggagaagcctcagtcttaaaatccagctttggctgttctcgagtgtctctaatctcatacatatgatgcccctcattcattttcattttcctttttcttatttgttctctttcacctttaattgtgtccttctgtcaatgttgtgttccaaaaatgtatgagaattttgcttatattgatggcactggaagtaaacaatcttcctcttataattgcttaatggaattcttggctaccttaatc

SEQ ID NO: 32312 - DNA, 408 bp, Gossypium hirsutum
  Clone ID: LIB3149-001-P1-K1-B5
cccacgcgtccgagaggccaaactatttattgcacctttctctttctccgatggctaagccctcactcttgttctgcaggctcctactattatccgccaccgtagccgccggcgaacggatcgacgatgaagacgaccttctgatccgtcaagtggtgccagatgcggaggaccaccacctgctcaacgcggagcaccacctctccgccttcaagaaaaaagttcggcaagacctacgccacgcatgaggagcacgaccaccgcttccgtatcttcaagaacaacttgctccgcgccaagtcacaccataaattgcatccctccgccgtccacggcgtcaccagtgtctccgatctcactccggcggagtttcgccgtcagttcctcggcctgaagccgctccgactt

SEQ ID NO: 32313 - DNA, 386 bp, Gossypium hirsutum
  Clone ID: LIB3149-001-P1-K1-B6
ggttattgtaacaccattgaacatttcccatgttcaagcaacgatttattgctccaaaaagcatggcctagaaattagaactcgaagtggtggtcatgacttcgaaggtctttcctatgtctcccatgtcccatttgttgttatcgatttggttaatttgcgatcagtcgatgttgatgtcgaaaacgaagaggcgtgggttcaatcaggtgcaaccgtgggtgaagtatactacagaatcaatgaacgaagcacgaacctttccttcccagcacctgttttccgcactggatgaattggtgggtccattagcggtggatgcgtttgttcattggttcgaaattattgcctttccgctggttaacgtcattgatgctcatttggtc

SEQ ID NO: 32314 - DNA, 421 bp, Gossypium hirsutum
  Clone ID: LIB3149-001-P1-K1-B7
tactttccactgtagagtccagaatgaggcaaaaacaagaagcacagcagtctcatggaaggaatatgcctcaagaatattattcatccattcaaccagcttctccacatcaggcccaaggacttccagcacaggccagttctcaaggattgagccatctgtatagccattctaggttctcttctgtggcatcacaaccattattgcattcttctggactcacgcttcccatgtatgcaacagcagcaccatatatgacttctgcaaacccactttatgccaattttcagccatctggtctatatgcttcacaatacaatatcggtggatatccattgaatcctgcatttcttcccccatttatgggtggatacccttctcatgctgctatttctttgccatttgactctactgcttctgg

SEQ ID NO: 32315 - DNA, 442 bp, Gossypium hirsutum
  Clone ID: LIB3149-001-P1-K1-B9
ctctggtattgaagataaactgcaacaaggagtgccagaagccattgaatctcttagaacagcggggataaaagtatgggtgttgactggggacaagcaggaaactgccatatcaattgggtattcctcaaagctcttgactagtaaaatgacacaaatcataattaacagcaaatctatggagtcatgtagaaagagtttagaagatgccatcattatgtctaagaaacccacaactacatcggctatatcaggcactacaaataacacaggaggaacgtcaggagctggttcaactcctatagccttgattatggatggcactagtcttgtatatattcttgacagtgaactggaagaaaggctcttccagttatcctgtaactgttctgtggtattgtgttgtcgggttgccccactacagaaagccggaattggttcc

SEQ ID NO: 32316 - DNA, 425 bp, Gossypium hirsutum
  Clone ID: LIB3149-001-P1-K1-C1
ggagccaagggttgcgaggttattgttagtggaaagctaagggcacaacgtgccaaatgcatgaagttcaaagacggatacatgatttcttctggtcacccagtgaacgagtacattgactctgctgttcgacatgttcttctgagacagggagtactgggcatcaaggtgaagatcatgcttgactgggatccaaagggtaagcaaggcccaacaactccacttccggatcttgtcaccatccaccctcccaaggatgatgaagttatcaaggtggaagcacccgtgccgaccgagattgaactttcgccagtggcttaaagccgatgatgactgttatgatagtcatctatttgatatttggagcatgtcaagtgtcttagattatgaaggccttaagtttggcacctaaaatgaacttatgc

SEQ ID NO: 32317 - DNA, 308 bp, Gossypium hirsutum
  Clone ID: LIB3149-001-P1-K1-C10
ctgaatactcgaagagacaatttcttgctttcgtttctttaatgaagtggataaatcactatactaaagggttctatattctatctgtttccccctattttggctacgtttctttttggcccgaacctaacaatccatcccttctatcgcagaaaaccttgcatctggctcagggttttgaatgcctgattaaataatttgaagatgagtccattttcaatcacgcgtaagaaaacgcctttccagaagcacagagaagaggaagaagccaagaagaagagggcagaggacgaaactgctcgattata

SEQ ID NO: 32318 - DNA, 265 bp, Gossypium hirsutum
  Clone ID: LIB3149-001-P1-K1-C11
ctcacccttcgcactcctctaaactagttcatcccccagtctcattaattctcgaagagacaatttcttggcttcgtttctttaaatgaagtgaataaataactatacttaaaggttctatattctatctgtttccccctattttggctacgcttctttttggcccgaacctaacaatccatcccttctatcgcaaaaaaccttggatctggctcatggttttgaatgcctgattaaataatttgaagatgagttcattttcaat

SEQ ID NO: 32319 - DNA, 346 bp, Gossypium hirsutum
  Clone ID: LIB3149-001-P1-K1-C12
cgcagccgctctagaactagttcatccccccagtctcattaattctcgaagagacaatttcttgctatggtttctttaatgaagtggataaatcactatactaaagggttctatattctatctgtttccccctattttggctacgcttctttttggcccgaacctaacaatccatcccttctatcgcagaaaaccttgcatctggctcatggttttgaatgcctgattaaataatttgaatatgagtccattttcaatcactcttaataaaacgccttttcagaatcacatagaatatgaagataccaataataaaaagtcatatgactaaaactgctccattata

SEQ ID NO: 32320 - DNA, 423 bp, Gossypium hirsutum
  Clone ID: LIB3149-001-P1-K1-C2
aaaaaagttgtggagaaaaaaatattacgtttgggaagcgagaaagtgcgagaaaatgagcggagcaggaaagaaagtagtagatgtggctttcaaagcaggaaagagcattgattgggaagggatggcgaagcttttggtctccgatgaggctcgcaaagagttcgccactcttcgtcgcactttcgatgaagttaactccactttacagaccaagttcagccaggaacctgagcctatcgattgggaatattatagaaaaggaatcggctcgcgattggtggatatgtacaaagaggcttatgagagcgtagagatccccaagtttgttgacacagtcactcctcaattcaaaccgaaatttgatgcattgttggttgaattgaaagaagcagaagagaattctttgaaagagtccgagcg

SEQ ID NO: 32321 - DNA, 289 bp, Gossypium hirsutum
  Clone ID: LIB3149-001-P1-K1-C3
aaaaaaccctaaactctttcttctccccactgtcctctttcttccagccacaaacaaggccaacaccaagccttcattcgcctccgtgacgaccaacagagggccgaagaacccctcttgcgaagcgaatcgagaggtactcaccttttccccttttatttcgtattttcggatttgaatggaaataaaaatcaagcaaaagaacgggaaaagaaaatgataaaataaccaccttagaaatattttcttggctgctctttactctcttttttggtatcttttgtatttc

SEQ ID NO: 32322 - DNA, 422 bp, Gossypium hirsutum
  Clone ID: LIB3149-001-P1-K1-C4
gaataaactccaagatgtccttcctcctgagatcggtgagctgaaaagactaacccatctgtcgttgagctttaacaattttaagggtgagattccaagggagcttgcaaatctacccgagcttcgctatctctaccttcaagaaaaccgtttcactggtcgagttccagcagagttgggcactttacaaaatcttcggcacttggatgtcggtaataatcatttggtcggtaccattagggagcttattcgtattgaaggaggctttccagttctacgtaacttgtatttgaataacaattatttgactggaggaattcctgctcagctggcaaatttgacaaatttggagatattgtacctttcatacaacaagatgtctggagcaataccaacagcacttgcccatattcctaaattga

SEQ ID NO: 32323 - DNA, 411 bp, Gossypium hirsutum
  Clone ID: LIB3149-001-P1-K1-C5
cccacgcgtccgggacactaacttgtgtgccattcacgccaagcgtgtgactattatggccaaggatattcagctggcaagaaggattcgtggtgagcgtgcttgagttggtgcgttctgtgtttgtgaagatggattgttggtggctgcggatggtgttttgttactaagttttctttttgttgaagcctataggttattagggaaaaataggtgtttacttggtagtcatattaattgtcattggcaaatactgcctaagacactgtgaaggtctggttgttagaaatttggcatgtatttgatctttttggatcctttatttctcgttgtatttctggttgtgcagccactttgggaattgtattggacaactttctgttgccatctaatctagttgaagctagctta

SEQ ID NO: 32324 - DNA, 418 bp, Gossypium hirsutum
  Clone ID: LIB3149-001-P1-K1-C6
atttcttgccgctataatgatactagcatcaggttggatgtgcatgagtttccggcgcaagatacttgcatccaatagcttgaagtaccgaaggctcgacatggagctgcctgtatccgttgcggcaaaagcagaaccagaacgagatgttaacgacgggtgggataacagctggggtgatgattgggatgacgaggaagcgcctatgactccgtcgaagcctgtcacacctggcctctcctccaaaggccttgcctcccgacggttgagtaaagagggatggaaggactaataccatttttgattcaaacaagcaaccaaaacttgatcaaagaatactgtagtatgtaatatgctggtttattttagttgatcagtttttccacttagaaagctgtttgtttctttttgttttatt

SEQ ID NO: 32325 - DNA, 406 bp, Gossypium hirsutum
  Clone ID: LIB3149-001-P1-K1-C7
ttcttgcctctattagacattagctgtaggacgcatgtgcatgagtttcgggcgggtatacttgcatccaggaggtcgaagtaccgaatgctcgacatggagctgcctgtatccgttactgcaaaagcagaaccagaacgagatgttaactactgttggtataacaactggtgtgatgactgtgattactaggaagcgcctatgactccgttgaagcctgtcacaccttgcctctccttcaaaggccttgcctcccgactgttgattaaagaaggatataaggactaataccattttagattcaaacaagcaaccaaaacttcatcaaagaatactgtaatatgtaatatgctggtttattttagtcgtatcaatattttcacttacaaagcttgttcgtttcttt

SEQ ID NO: 32326 - DNA, 459 bp, Gossypium hirsutum
  Clone ID: LIB3149-001-P1-K1-C9
aaattacttggtcacctttttattaattcagggggctaaataatagaagagacaatttctttctttcttttctttaatgaagtaaataaatcactatactaaagggttctatattctatctgtttccccctattttggctacgtttctttttggcccgaacctaacaatccatcccttctatcgcagaaaaccttggatctggctcagggttttgaatgcctgattaaataatttgaagatgagtccattttcaatcacgcgtaagaaaacgcctttccagaagcacagagaagaggaagaagccaagaagaagagggcagaggacgaaactgctcgattatacgaggagtttgtggcatcgtttcaaggagataatacccctggatcgaaggcatttgttcgaggtggaacaatcaatcccaacgagaggttgaaatccgattcttgaggtgaaaagt

SEQ ID NO: 32327 - DNA, 404 bp, Gossypium hirsutum
  Clone ID: LIB3149-001-P1-K1-D1
cctacacgtacgatcatgctttctatctttgttctcttcaacgcactccacatgacagggtggagccttcaaggactatgcatgaccaatcaacttataagaacgttcaagagcacttctctcacctcaaacgatcccacaactatgagactcaccatatgggactgatatcgtgaacactgctagactcaacgactcgactaactatgatcctaactggtactatgctagatcttgttccattgcaagaaagatctactcgagacgacgacttggcagtacccccttagacatgactaatcgtgcagcaaaagtagtagcatgcctacttctcatacttgcaacaacagtcgtactattgctggaaacatacttcagccgatgccgaatatgcacttcattta

SEQ ID NO: 32328 - DNA, 457 bp, Gossypium hirsutum
  unsure (1)..(457): unsure at all n locations; Clone ID: LIB3149-001-P1-K1-D10
gttggatggtattctaccgggctaggagtcacaggcggcagtgcattgatccatgatttttattctagggaagtatctaaccctattcatttgacggtggatacggggtttaggaatggagagggtaccgtaaaggcttttgtttctgtcaatttagctcttggagacagacaacttgcagctcaatttcaagaaattcctcttgatctatgtatggttgaagctgagcgagttggatttgacatcctcaagaaaacagcagtcgacaaatttccaaatgatttggaaggaatggaagtcacaatgggaaggctatcggctttgatagacgatgtctacaaatacgttgacgatgttgtggaaagccgtgttccagccgataacaacataggtagatttatagcagaaacagtagcttccttacctaaactatctnccccagctttcgataaactca

SEQ ID NO: 32329 - DNA, 330 bp, Gossypium hirsutum
  Clone ID: LIB3149-001-P1-K1-D12
cccacgcgtccgaaaaaattgatctcacagtttttaatttaataaatacctacaatgaatagtgatatatataaaattaaaaaaagtataaattaaataactgtctaacggttttacagctttcgatactctaccatacaactgtccttattttcctaaatttacttcttaaatcatatacactttcgcctgctttcactcatccttaatctgccaaaatcttgtccttaaaaaacctgttattcaccctgtacataccctttaaaacaatcctctttataccatcaagccattcttccagaatccttactaacattttaacccccacaa

SEQ ID NO: 32330 - DNA, 203 bp, Gossypium hirsutum
  Clone ID: LIB3149-001-P1-K1-D2
aattaaatgagagccatttcttgaattcattcccacacatacagagatacaaagaaagccatttcttaatatcttagatctgtactcgaaattacttcattgttacttgtttgttttatgtacattaaatgattgtaacaataataaatactactgaaaatagcaccaaaaatggaagactggacagcccctttttttttttc

SEQ ID NO: 32331 - DNA, 405 bp, Gossypium hirsutum
  Clone ID: LIB3149-001-P1-K1-D3
caaatcataaggaaaaaaaaagtttgctttcggtatgtaagaaatgacatgtttccattctgtctttttgtgattcgaacagtatttaatgaatcaatttcttgctttcttgtttaaaaaaaaaaaaaaaaaaaaaaaaaaaaaaaaaaaaaaaaaaaaaaaaaaaaaaaaaaaaaaaaaaaaaaaaaaaaaaaaaatataaaaaaaaaaaaaaaaacaacaaaaaaaaaacaaaaaaaaaacaaaaaaaaaaaaaaaaacaaaaaaaaaggggcggcccttttaagggaccaaatttttactcccaatactttgacccttatacatcttttttgggtaccccaaatattaatttttgggcgctgttttaaaaacggattagtcggaaaacccttgcgttttcca

SEQ ID NO: 32332 - DNA, 422 bp, Gossypium hirsutum
  Clone ID: LIB3149-001-P1-K1-D4
aaaatatacgcaattcctcttggtggaactctgattgagcagccttttgctattggaggatctggctccagttacctatatggattttttgatcaagcatggaaggaaggaatgacaaaggatgaagctgagcaattagtggttaaggcggtttcccttgccattgctcgtgatggtgctagcggtggtgtcgttcgcactgtgattatcaactctgaaggagtcacgaggaacttctatcccggtgacaaactgcagctatggcatgaggaattggagcctcagaactcgttgctggatttactgaattcttctaatcctgaacccatgaatatttaatcaaatcaaaggctaaggggaaattttttattatttttatgtggaaatttttgggtagatccaagaaatcgcttgaaattgat

SEQ ID NO: 32333 - DNA, 418 bp, Gossypium hirsutum
  Clone ID: LIB3149-001-P1-K1-D5
gcctctcttaaaacacctccgtcgccgtcagacaagcctctcggcaccacttccgacagtccgttttttggattttttgatttctgggtgaagtgcggaaagagttgctttcctaaagggtacagaaatcttaacacacaggtgccagaactacctacaatatgtcaggcaggaaggaaacagtgttggatttggctaagtttgttgacaaaggtgttcaggtcaaactcaccggtggtagacaagtcacggggaccctaaaaggatacgaccagctactgaatcttgtcctggatgaagctgtagagtttcttcgagaccaggatgatccgttgaagactactgatcagactaggcgtcttggcttgatagtttgtaggggcacagcagtcatgctggtgtcacctaccgatggcac

SEQ ID NO: 32334 - DNA, 415 bp, Gossypium hirsutum
  Clone ID: LIB3149-001-P1-K1-D6
gttttccttgttctcttctacattcagctaaggggtgctctgagatcacataccaaaatggtgaaggccgttgccgtccttggcagcaatgaaggtgttagcggaactgttttcttctcccaagaaggagatggtccaactaccgtgactgggaacctttctggtcttaagccgggactccatggcttccatgttcatgcccttggggacacaactaacgggtgcatgtcaactggaccccattttaatcctgctggcaaagagcatggtgctccagaagatgagaaccgccatgctggtgatctagggaatgtcactgttggtgatgatggctgtgcaagcttctccatcaccgacaaacagattcctctcacaggcccaaactccattatcggagagctgtagttgtccatgc

SEQ ID NO: 32335 - DNA, 413 bp, Gossypium hirsutum
  Clone ID: LIB3149-001-P1-K1-D7
gttaatttaagtgtaggtcagccttaacaaaaaaatgtctcggagatatgatagccgcacaacaatcttttcccctgaaggccgtctctaccaagtagagtatgcaatggaagccattgggaatgctggctctgcgattggaatattatcaaaggatggtgttgtcttggttggtgaaaagaaagttacttccaagcttcttcaaacctccacatctactgaaaagatgtacaagattgatgatcatgttgcttgtgctgtggcgggaataatgtccgatgcaaacatcctaatcaacactgctagggtgcaagctcaacgatacacatatgcttaccaagagccaatgcctgttgaacagttggttcaatctctctgtgatacaaagcagggttatacccagtttggtggtc

SEQ ID NO: 32336 - DNA, 282 bp, Gossypium hirsutum
  Clone ID: LIB3149-001-P1-K1-D8
cgttatgttcacaactttggtatgatgttcgtgtatgtgttggctacaaaccagttgagtcattttgttgacaattatggcgcttagttcttaattttatatcttaactctggtgttggagctttattaagttcaaatatttgagtattcttgtttcatgaatgtcttgttactttgcatcaaattaagttggtctttgtcggcgttctataatgctgcatatttagcaataatcgggatcaggtattttgcttgaaaatgacttcttttgtttattattgt

SEQ ID NO: 32337 - DNA, 401 bp, Gossypium hirsutum
  Clone ID: LIB3149-001-P1-K1-E1
cgtattctccgtccaagtggattcgttatcatccgggacaaacaaccagtgatagattgcgtaaagaaatatttatcagctttgcactgggaagcagtagcaacagctgattcagataatgaaggggatgacattgtttttatcatccaaaagaaattgtggctgacaagtgaaagcctcaggaattctgaatagagtatttcaaccctcacagtttccccctttcttatttcatctgcagctccaaagagattaagaaggccaggcattattaaaatgcagtaaacagtttcattttgtagcattaaacaaatggttcacattatttttttgtttacctttttttttctttttctttttaatgaattacttgacaagccataaactggtcattgtgatct

SEQ ID NO: 32338 - DNA, 447 bp, Gossypium hirsutum
  Clone ID: LIB3149-001-P1-K1-E10
cctggaacgaatggccagcacagcttttatcaactaatccaccagggacgtgtaattccttgtgatttcattggtattgtgaagagccagcaacctgtgaaccttaaaggtgaagttgtgagcaaccatgatgagcttatgtccaactttttcgcacagccggatgccctagcatatggaaagacagcagagcagttgctgaaggagaatgtttcgcagcatcttattcctcataagacgttctctgggaatcggccttctctcagtcttttgctaccatctcttaacgcttacaatattgggcagctcttggcaagctatgaacatagagttgctgttgaaggttttgcttggggcatcaattcttttgaccagtggggagttgagttgggtaagtcactagctactcaagtccgaaaacagcttaatggatcacgtacaaaaagt

SEQ ID NO: 32339 - DNA, 250 bp, Gossypium hirsutum
  Clone ID: LIB3149-001-P1-K1-E11
agccagcaacctatgaaccgtaaacatgaacaacttagctcgcttaataagcttacgtgcaactttatcgcacattcggataccatagcataatcaaagacagcagagcaattgctgaacgagaatgcttcgcagcatcttattcctcataagacgttctctggtaatcgaccttctctcagtcttttgctaccatctcttaacgcttacaatattggtcaactctaggcaagctatgaacataaagttg

SEQ ID NO: 32340 - DNA, 434 bp, Gossypium hirsutum
  unsure (1)..(434): unsure at all n locations; Clone ID: LIB3149-001-P1-K1-E12
tgcagttttgggttctgttggcgctccattcactctagcatcatatgtggttgaaggtggtgcatcgaagaacttcacaaaaataaaaaaattggccttctctcaacccaaggtacttcattctttgcttcagaaatttgcgacctccatgacaaagtatattcggtatcaagctgacaatggagcccaatctgttcaaatatttgactcttgggcaacggagctaagtccggtggattttgaggagttcagcctgccgtatttgaagcaaattgtagatgctgtaaaacaaacccatccggatcttcctctaatcctttatgcaagtggatctgggggcttgcttgaaaggctagctntaacaggtgtagatgtagttagcttagattgngactgtgacatggctgaaggtagaaaacgacttggacacgata

SEQ ID NO: 32341 - DNA, 424 bp, Gossypium hirsutum
  unsure (1)..(424): unsure at all n locations; Clone ID: LIB3149-001-P1-K1-E3
tgatcctaaactctcaattatgtcttccaagcaaggtggcaaagcaaagcctttgaagcaacccaaagctgagaagaaagaatacgacgagcatgatttggctaacattcagaaaaagaaagaagaagagaaggcccttagagagctgagagcaaaggcatcacaaaagggatcatttggtggttctggtcttaagaagagtggcaagaaatgagtttcttaaaaacccgagctaaaccgaacttatcgagtcctgtcttgggattaaaacatctattatgctgatgtctcttgtttctattgtgatagttgggatgatttgatgctctagtttcattctgaatttgctattaaaaacattgtgtgtaatttcgtgacgtataacttaataaattcaagttctacgtntgtgttttttgtcaaa

SEQ ID NO: 32342 - DNA, 420 bp, Gossypium hirsutum
  Clone ID: LIB3149-001-P1-K1-E4
gcgagatgctgcgttgcttgcagatgcatacaagcaggagcttacaaatgcaatgaatgctgctgaaataactgacatgcttggccttcattcccttcgacagcgctactgttatatccagagtacgtgtgcaacatctggtgaggggctatatgagggcctagattggctttccaacaacatagctaacaaggcctgaagctattaagaagatttttgcaatgtgggaagatctggaagcacgggggagcattatatcgtcttattattattattattcattctcctttacgcctcacttttcatctgagacagtcggattgttgatatgcctttatttgcattttgtgatgatcattaatttacgtgggaacttatggctatattggcactaaaaaactgggtgattggatatataat

SEQ ID NO: 32343 - DNA, 417 bp, Gossypium hirsutum
  Clone ID: LIB3149-001-P1-K1-E5
gcagagttgcaacttttgacgttttgattttgttgtatagaacaacatggtgttgctcggtcactgagttgagttcactggttacacaatgtctaatagagaagaatttgctccgtggcacttctttcttcttcttcttcttctatgggggtttgtcggcggcgatgcgccggcgagggaggtgtggtgcgtggcgaagaacaactcggaggacacggctctgcaatcatcggtggagtgagcttgcggcgcatgctgagccgattgtagagcgattcaaggaagaggaccctgcttcgacccttccagtgtgcagaatacggcttcgcatgctttcaatgattatttccgcatacacgctatctctgaagagaattgcaacttctgacacaacgccgtcattaccttcttcaaccc

SEQ ID NO: 32344 - DNA, 419 bp, Gossypium hirsutum
  Clone ID: LIB3149-001-P1-K1-E7
tacgatgtgagcttggtggatggctacaacatagcaatgtcaataaccccattcaaaggctcaggcaaatgtagctacgctgggtgtgtgagtgacttgaacttaatgtgcccacttggtttacaagtgagatcgaaggataacaagcgagtggtagcttgtaaaagtgcttgctttgctttcaactcgccgaggtattgctgcactgggaccttcgggaacccccagtcatgcaagccaacagcgtattcgaagattttcaaggcagcttgtcccaaagcatattcctatgcatacgatgatccaaccagcattgctacttgcacccgcggcaattatttggtcactttttgcccccatcgtcgctagaattgttattttatatatatttagggttagtttggatgggcgtgctaatt

SEQ ID NO: 32345 - DNA, 281 bp, Gossypium hirsutum
  Clone ID: LIB3149-001-P1-K1-E8
gtttttacagagaagaaagcataactggtttcaatttctattcatattctctgtttctggctactttggttttctcggaagcatgggaacaaacgttatctctgatgaagaagatgagttggaggtcgacgaggaaggagagccgatggaaggggacaatatcaacgaccgcgaccctgatgacgaggatgaagaagacgaggatgggcaggatgagtatgagaatgatggattcatagttgatgatgtggaggatgaagatgtagatgaagatgaagaga

SEQ ID NO: 32346 - DNA, 237 bp, Gossypium hirsutum
  Clone ID: LIB3149-001-P1-K1-E9
cgactgtgaaattaatctgtctgcaattcttgctcttttaatgcaccgcagtgctcttaagattttcgcgtattgatatatggttgtttcgatcttatcatctgtcaacatggtcaacttccattgcttaagattatatcttgtattgttatgcaatttcagtggatgaagggaaaccgttttacttgaaaaaaaaaaaaaaaaaaaaaaaaaaaaaaaaaaaaaaaaaaaaggcaa

SEQ ID NO: 32347 - DNA, 210 bp, Gossypium hirsutum
  Clone ID: LIB3149-001-P1-K1-F1
ctcaaaaggacgtaatgctccactcaatttacttaacagtcaccatcataaactaccgggccggggtcactataggtccgccgagttcaccagtatgtaatgcacagtcaaagtaacacgctatactgctaaacaacctatcggcaccattcgtataagctcctaagaacaacatgatcctcatttacaacagaaatttacttgcttaac

SEQ ID NO: 32348 - DNA, 461 bp, Gossypium hirsutum
  Clone ID: LIB3149-001-P1-K1-F11
gcgagatgctcatctggctaatgaagctacatagaagttcacatcaagcaattggattctcatggagatagcttgcagtaggtcttcgcatgaactactcaatgtgaaaaaggcgtatcatgctcgttataagaaatcccttgaagaagatgtcgctcaccacactaccggagagtactgcaagcttttggtccctcttgttagtgcattccgatatgagggagaggaggtgaacatgacattggcaaaatctgaggctaagatacttcatgataaaatctcggacaagcattataccgatgatgaggtgattaggattgtatcaacaaggagtaaggcacagctcaatgcaactctcaaccattacaatacctcattcggcaatgctatcaacaaggatttgaaggctgatcccagtgatgaattcctcaaattactaagagctgtgatcaagtgcttga

SEQ ID NO: 32349 - DNA, 415 bp, Gossypium hirsutum
  Clone ID: LIB3149-001-P1-K1-F3
gagctttgctttgaagcacgttggacccggcgtattaagtatggccaatgcaggtcctaataccaatgggagccaattctttatttgcacagtaaagactccatggctggacaacagacatgttgttttcggacatgtgatcgatggaatggatgttgtgcgtgaactagagtcccaagagacaagcaggacagatggccctcgagtaccatgcagaattgtcaattgtggggagctgcctataggaggctaatatccgatccgtttaaccactaccacaaatctcccattttatcatttactttctctgcttcaagatgattttacctggtaatacctataacagtcggtgttaattatagaagagagaattttggatgatactttataagctcttggcaagggtgtgctatta

SEQ ID NO: 32350 - DNA, 395 bp, Gossypium hirsutum
  Clone ID: LIB3149-001-P1-K1-F4
ggttctcctcaaacaaagaaattgcaagatattctccctggaatcatcaaccagttgggacctgataacttggacaacttgaggaaattggcagagcaattccagaagcaggcacctgctgccggttctggtgacggtaccggtgcagccactactcaggaagaggacgatgaggaggtaccagatcttgtacctggcgagacctttgaagctgcagcagaaggccaagctgctaaatagagtttttatctttaattttcttttgttatatgtttttgatgaatttaactatttggttctttttccaaaatttctctatctgtggtttttggttgctctaccttgtactcttaatggtttggttcagggtaagccttctagaattcctattatta

SEQ ID NO: 32351 - DNA, 418 bp, Gossypium hirsutum
  Clone ID: LIB3149-001-P1-K1-F5
gaaagcaaaaggagaaggtgaacaacatggtgctatttgatcaagctacctatgacaagcttctctctgaagctcctaaatacaagctcatcaccccctctattctttctgatcgtatgaggatcaatggatcacttgcaaggaaggctataagggaattgatggcaagggggtcgattagattggtgtctgctcattctagccagcagatttacactagggctaccaacacttaggatcatttttccccttaatttagttattatttagaattatatttgctgagtttatcatcattgaatgctttcttttgttatttatttaagacttccctgtagtcactttttttccctctacaatgtttaagcaacaggttcttgatattgttatggtttaaaggatgtacttttcagatttt

SEQ ID NO: 32352 - DNA, 230 bp, Gossypium hirsutum
  Clone ID: LIB3149-001-P1-K1-F6
ggtttctgtaaaggagggcgagggtttgaagaccactgggactgctgtgggcttggccgctggggaaagcagcggtcccgccgacgatatccagaagaagattcgacgagctgagcgaatccgccttcccaatccagtaatctaaccaggaaaggcgaattttaggggccgaaaggttgggcactgcacccagctcaaagggatcggaggaatctaagcattcggaggag

SEQ ID NO: 32353 - DNA, 417 bp, Gossypium hirsutum
  Clone ID: LIB3149-001-P1-K1-F7
gttgaagtcaaacaaggaaaagaaaatcattcagctcagattcatggctacgcttatgacaaatctgctgctcacggcatgcattgctcttttcttggtatcagctgccaccgccgtcggcgactcccccttcatcatcgctcacaagaaggcatcgctcaccagactcaaatccggcgccgagtgcgtctccgtctctatcgacatctacaatcaaggcttctcgacggcatatgatttgagtcttgtggattatagctggccccaagatgcatttgatgttatcagtggaaatatttctcagtcatgggagaaacttgacgctggtggtattctatcacattcatttgaattagaggcaaaaaaacaaggcatgttctatggggccccaacagttatctcttttcgcattcccac

SEQ ID NO: 32354 - DNA, 422 bp, Gossypium hirsutum
  Clone ID: LIB3149-001-P1-K1-F8
caaaaaatcttcagctgcaagaacctttaagctagaggaggatgttcatgtagtacgttgttcaagagaaaggagtagagcagcatggaaagtaattgaagagtatctaatgccgtttgtggagcaagagcgatacaagatttcaagtggatgtaggcttcaccctgacaatgatttgtatagagatcaggaacagcacaagcatcatctagatataaacgaatggcgatgtgggtactgtagaaagaacttctatgaagagaagtacctggataagcattttgacaacagacattttgatttgctgaatacgagtcatagtaagtgtctggctgacctgtgtggtgcattgcattgtgaccttgtcatggattcttcactccgcaggactaagtgcaatcctgctgctgctgcaaggaata

SEQ ID NO: 32355 - DNA, 309 bp, Gossypium hirsutum
  Clone ID: LIB3149-001-P1-K1-F9
cgtgatagatcagctgttaacaagcttcagattgctaaaattactgaagatggtgtaacaatttcccagccatattcattgaagacgtactgggaattctctgcttttgagaaccctgcacagggtgctataggatcatggtagctgtagcaaacttttcatcccttctggaatcttctatgcaatcatatgaaaagaacattaaacatagatggaagacaacttgtttcatgttttatgtctggttgaaacttattgagtttgaggctgattgtcatttgatttaatgcgacagcgtatgctttactt

SEQ ID NO: 32356 - DNA, 360 bp, Gossypium hirsutum
  Clone ID: LIB3149-001-P1-K1-G1
gtcaggcgggattacccgctgagtttaagcatatcaataagcggaggaaaagaaactgaccaggattcccctagtaacggcgagcgaaccgggaaaagcccagcttgagaatcggtcgccatcggcgtccgaattgtagtctggagaagcgtcctcagcgacggaccgggcccaagtcccctggaaaggggcgccggagagggtgagagccccgtcgtgcccggaccctgtcgcaccaagaggcgctgtctacgagtcgggttgtttgggaatgcagccctaatcgggcggtaaattccgtccaaggctaaatacgggcgagagaccgatagcgaacaagtaccgcgagggatagatgaa

SEQ ID NO: 32357 - DNA, 457 bp, Gossypium hirsutum
  Clone ID: LIB3149-001-P1-K1-G11
attatattatgcctcctactttcattcttatatttcttaattaattgtgctataatatgtagaaatattttatatttaaaatagtaaaaataatttaaaagtctatataaaaatttgtatataaaaaaaaaaaaaagccggttatacccgagaagtaccttgatgagaaaaccattttccaccttaacccgtcaggccgtttcgtcattggaggtccccatggtgatgctggtctcactggtcgcaagattatcattgatacttatggaggatggggtgctcatggtggtggggctttctctggtaaagaccctaccaaggtggatagaagcggggcttacattgtgaggcaagctgcgaagagcattgttgctaatggactagctaggaagtgcatcgtgcaagtctcctacgccattggtgtacctgagccattgtctgtatttgtggacactta

SEQ ID NO: 32358 - DNA, 444 bp, Gossypium hirsutum
  Clone ID: LIB3149-001-P1-K1-G12
agactggccttattgttggcgggtgggatatttatgaaggtggtaaaatatacgcaattccgcttggtggaactctgattgagcagccttttgctattggaggatctggctccagttacctatatggattttttgatcaagcatggaaggaaggaatgacaaaggatgaagctgagcaattagtggttaaggcggtttcccttgccattgctcgtgatggtgctagcggtggtgtcgttcgcactgtgattatcaactctgaaggagtcacgaggaacttctatcccggtgacaaactgcagctatggcatgaggaattggagcctcagaactcgttgctggatttactgaattcttctaatcctgaacccatgaatatttaatcaaatcaaaggctaaggggaaattttttattaaaaaaaaaaataaaccatcataattaat

SEQ ID NO: 32359 - DNA, 421 bp, Gossypium hirsutum
  Clone ID: LIB3149-001-P1-K1-G2
caagaagaaggtggcggagagtagcggatactcgggggctaatgtgaagcggctcgagactgaaacagatgcaaagatcaatcacttgaaaaacgaagctgcaaggatatctcatgatgttgtacagatgcttttgaagaatgtgacaactgtgaggaactagggggtcttccatgaagactgatggtttaattttctacaacattctatcaattcccaaaactcagagctcatgcttaggaacaattttatgtcattattttatgatttgctgttatttttgtttgtgccatgttcctgttctgaaataaactccaatgtgtgccttctagaaatggtttctcttagtatttcttggaacttgatttgaattcttgatgagtcttgatctcagctcaatattgcttaatggattcatttt

SEQ ID NO: 32360 - DNA, 265 bp, Gossypium hirsutum
  Clone ID: LIB3149-001-P1-K1-G4
gcatcttcatcttgttctatggcgatgatgagtagctgtgggaacataaccgtccaatcggctgaccaactgaagcaattgaaggacatattcatgcgtttcgacatggattccgacggcagcctcacccagcttgagctggccgctctcttgcgctccttgggtctcaagcctagtggtgaccagatccaccttttgctaggcgacattgatgctaacgggaatggccttgtggagttcgaggaattggtgagcgccatttttg

SEQ ID NO: 32361 - DNA, 419 bp, Gossypium hirsutum
  Clone ID: LIB3149-001-P1-K1-G5
ggcaaagccaagccaaagaagcacacagtcaaggaaatagcggcgaagatcgacgccggcacaaccaatagaggcggcggcaaggccggatttgctgaccgttcgggtgtggagaaaggtggacatgctaagtacgagtgtcctcattgcaaaattctaaatatattttaaaggatgaaaatgcacagcatggtggagataatagctcaagatatgagatggtatttgatggggatgctcccgagactcctcagcaaggaaaaatggatctgtcccatgagtctgatggcaatgagcgcagatacaaaataaacaggaaaagttctcatactatggaggggaaagacttcaatgataaggataaacagagaaacagaagtagagattacagagcggatatgagtcgatctggtgggtgg

SEQ ID NO: 32362 - DNA, 422 bp, Gossypium hirsutum
  unsure (1)..(422): unsure at all n locations; Clone ID: LIB3149-001-P1-K1-G6
gttccggcgcccttcttgacgaaaacgtaccagctggtggatgatccgaacaccgacgacgtgatttcttggaacgaaagcggcacctcttttgtcgtttggaaaactgctgatttttctaaggatttgctccccacctatttcaaacacaataacttttccagcttcatccgtcagctcaacacttacggatttcgaaaggttgttccggacaaatgggaattcgcgaacgacaacttcaagcgaggggaaaaacagctcttgtccaaaatcagtcgtcggaagacggtgacatcaccgncggctgatgctccggcgaaaggcaaaacatctggtgctgcaactccctcttcgactgacttcggagaggacctaggatccacttncacgtcatcaccggaatcgaagaatccgggatcggt

SEQ ID NO: 32363 - DNA, 237 bp, Gossypium hirsutum
  Clone ID: LIB3149-001-P1-K1-G7
cctaaccaaaacacaggcattgtgatccataaatgtaggataggtgccacctctgattgacagcctgttcgtaaaaacttgccaacatatcttgggaggccctggaaggaatactcgaggactggggtaatgcaatcaacaatcagtgacgtgattcaacctgctggctggcacgagtggagcgggagtttcgccctgaaaacactggtttattgcgaggtccagaacactggggcc

SEQ ID NO: 32364 - DNA, 440 bp, Gossypium hirsutum
  Clone ID: LIB3149-001-P1-K1-G9
ttggggaattggtcgatactaagaccaacattcatgcatgcatgttgtgccttccaatgagtaatcatatagtattaaggaacatgtagtgatacttttagttgcttctcttagcattttcaaacctttttaaagattttgtttaaaatgttgtaaggattgcttttattttgtttggaggttttcattgagccctatgctcttatgttattttggtttggttgttacattagaagatattttacttaaaaaaaaaaaaaaaaaaaaaaaaaaaaaaaaaaaaaaaaaaaaaaaaaaaaaaaaaaaaaaaaaaaaaaaaaaataataaaaaaaaaaaaaaaaaaaaaaaaaaaaaaattaaaaaaaaaaaaaaaaaaaaggggggccccttttaagggtcccaagttttcttccccgggcttgcaacgtaatagcttttt

SEQ ID NO: 32365 - DNA, 456 bp, Gossypium hirsutum
  Clone ID: LIB3149-001-P1-K1-H10
aagatacccaaatatgagctgacggtggaggatggccgtagattggccaaggagtatagtcgggttttgatgaggaagcatagggcaaggcaggctgctgagactaatttgttgagaatgaaaaaggaggcaattgaagcgttgccggagaaacttaaggaggcggctatgataccagatttgaccccatttccggcaaatcgattgatggcgtctttgactccacctattgaagggtatattgagaaggttaaggaagcggctaagaaaagttcttccaagcagaagcttatgtgaaggcgaggtggaagtatgcaagggacaaacttcactcagtgaaactgatgatcaattacagctgcaatgtactgtgattttctctgatggcaatgagtctcaaaacaagaattattcaacattgaaattgagcaatgccatatttttcggttaacattg

SEQ ID NO: 32366 - DNA, 312 bp, Gossypium hirsutum
  Clone ID: LIB3149-001-P1-K1-H12
ggagatccacgcgtgcggccagcaacaactccaaaaccgtcttacagttacattacaccagttgccgcctgataggggagaggaggattgcatacaattatgaggacaaaggtgcaaattacactcatggactaacctatgcttgagagctagcatgacatgctgtgacagatgcacatgtgacccaccagggacatatggcaacagagaaatgtgtggcacatgttacactgatatgagaacccaccgaagcaagcacaaatgtgcttgagaaacccaatcaaagccctcaaacaacgacacttcttgagt

SEQ ID NO: 32367 - DNA, 215 bp, Gossypium hirsutum
  Clone ID: LIB3149-001-P1-K1-H4
ggatgaagagagggttttgcagcagcttgaaggagatataatatatgattaaaaagaagaagaagaatgaataaggattttgggatggaattttcaaaatccaaaattagtctccactttagtgtagtgaggctttgtttattttgtttaatgttttggtccctgcatgtattggctgttttaatgttttaatgaaaggaagtttatgctttgtc

SEQ ID NO: 32368 - DNA, 368 bp, Gossypium hirsutum
  Clone ID: LIB3149-001-P1-K1-H5
attgccaccgtcacttctgcagctcgtttttattccctcattcactggcctcaaggcaggcgcatgcaaagtgagtgccggacttaaagactcagctccccaagccacaaggttgggcatcaaggcttcgctgaaagacgttggagtcgctcgctgtgccactgccgctagtgcagtgctggctagcaacgccatggccattgaagtgttgctgggtggtgatgacggctctctggctatcgttcccaacaatttctccgtggcctttggggagaacatcgtgttcaagaacaactcatgtttcccccacaacgtcgtgttcgacgaggaccatattcctagcatccatgatgcaaggaaaatctcca

SEQ ID NO: 32369 - DNA, 415 bp, Gossypium hirsutum
  Clone ID: LIB3149-001-P1-K1-H7
agatatggtaatggctactgtcaagaatgggaagcctgatcttaggaagaaggtcttggcttctgtcattgtgagacagcgcaagccctggcgcagaaaggatgttgtttacatgtactttgaagataatgctggtgtcattgtgaacccaaagggagaaatgaaaggttctgctataactggtccaattggaaaagagtgtgctgatctatggccaaggattgcaagtgcagctaatgccattgtttaggaactcacattttagtcattgggtttctctgcatgggactaatatagtttgctggatcaagattttgtttatttttatttttccttcagaacatcatttcgatggtatcttttgatttgatcttgattttggaggtaaattgtagtttgtggagagttttttaat

SEQ ID NO: 32370 - DNA, 236 bp, Gossypium hirsutum
  Clone ID: LIB3149-001-P1-K1-H8
ccactttgtctctcttaagtcttaccataaaacagagcagagaaggtaaaacccaaaggttgaaaaccatcaaaaatgggtcaaaggctcacttaccgtactcgccatagctacgctaccaaatccaatcaacaccgtgtcgttaagacccctggtgggaaattggtctatcagacaactaagaaaagagcaagtgggcctaagtgtcctgtcactggcaagagaattcaaggtat

SEQ ID NO: 32371 - DNA, 292 bp, Gossypium hirsutum
  Clone ID: LIB3149-002-P1-K1-A10
tatcgaatatctcggattcttatgagagggtcaaagttatcgtaggcccgagaagcaacaacgaacttgatgcgaccaaattgaagacagaattccctgagctcctttcgattaaagagtctcttattaagtatgtattcgaaccgaataagaagactggtggagcttgatcagttactttgcctgttaaaaagtttgtcttcaaaggtaaactatgtgagactagttgagcttgagatcttaggttatgaattcattgatattcctctctttttttatcaacttttttatg

SEQ ID NO: 32372 - DNA, 431 bp, Gossypium hirsutum
  Clone ID: LIB3149-002-P1-K1-B12
gcgtccgactcttagctctaagccaagaaagcaggcctttaacatcaaaatggcttcaaaacaatcaggttccatggccctccttgtggcactcaacattctcttcttttccttgcgtagtgctactgccccatcccctcccaccaaacctaaccataaaccaaaggcaaaccccaaccccagcaccccatcttcacaaggcacgtgccctagagatgcccttaaattaggtgtatgtgctaatgtgcttggcttagtcaagcccgtcattggttcacccccagtgatgccatgctgttcccttcttgatggcctcgtcgatctcgaagctgctgtttgcctttgcacagctatcaaagctaacatcttaggcatcaaccttgacattccagtttctcttagcttgctccttaatgtttgctcaaagaaag

SEQ ID NO: 32373 - DNA, 347 bp, Gossypium hirsutum
  unsure (1)..(347): unsure at all n locations; Clone ID: LIB3149-002-P1-K1-C11
atgctcctnctggacagaaagttggtcttattgctgctaggagaactggtaggctcagaggacaagctgctgctacagctgccaaagctgacaaggcttaagcttaggcttaggcttaggatattacttgctgtaattttagttcttttggtcttcagattttacattcaagagtgtttaagacctttatgcttgaaaatgtgtttgaattatcagatattggtactgttttgagttgtttgagcaatgattttgtttttgattcggatttttacccatgtttttggtatttgttgttttcggcttttaccccctgttttatggtcgagtttttttgaatcgagtta

SEQ ID NO: 32374 - DNA, 404 bp, Gossypium hirsutum
  Clone ID: LIB3149-002-P1-K1-C12
cccacgcgtccggagcagcaaagtatgaatgaatgtgattatctactgtacaaatatacatagtaaagtctagagtatgaatcgaattgctatgagcagcacatttagggataaaatgtcacactaaattgctatgagcagtaaagaaaatttttttaattgcagaaaaccaacttcccttctttcccatactgccagaaaattgagggaccgcacgacacttaatttcttgtggttgatttcgataggtggtggactggtgaggaatctgtgaatgttctcttagaatccgcaggtcaagcatgacactgatggttttgataaacaaggaatgaggcttctgcttgcgacacttaacaggatatttgattcattgcagacaacttatgaaggatttcagactt

SEQ ID NO: 32375 - DNA, 149 bp, Gossypium hirsutum
  Clone ID: LIB3149-002-P1-K1-D11
acttttgcttattgatgtctatggattttgctgcctttagtaaaatccttgtgtgatagttaattctatatgcccttgaatatgaaattcttgacaagaaaaaaaaattagattaaaattaaatacttattaactatatatattacaat

SEQ ID NO: 32376 - DNA, 346 bp, Gossypium hirsutum
  Clone ID: LIB3149-002-P1-K1-F11
aaagccggatccctggaaggctgggaaggcaatgcaatctgaagccacttttaagaaaaaggccaggagaatccgaacaaaggttacgtttcacaggccaaggaccttgaagaaagataggaacccgaagtatccgcgcattagtgccccaccgaggaacaagcttgaccattaccagattctcaagtttcccctcacaactgagtcagccatgaagaagattgaggacaataacactttagtatttattgttgacatccgtgcagacaagaggaagatcaaagatgctgtgaagaagatgtatgatattcaggccaagaaagtgaacaccttgatcaggcccgat

SEQ ID NO: 32377 - DNA, 438 bp, Gossypium hirsutum
  Clone ID: LIB3149-002-P1-K1-F9
ccacgcgtccgcttcactcgcacactgcttgaacaatggccatgcccacattatgccggcttgaccttaccgtgttaaccctctctttactggccgtcgccgtcaatgctcacaacatcaccgccatactcgaagggttccctgattactccgtttacaacgatttcctcactaaaaccaagctcgccgatgagatcaatactcgacaaaccatcacttgcctcgatcttaataatggagctatgactgctctcactgctaaacacccactttccgtcgttaaaaacatccttagccttcatgtgcttttagattattatgacccacagaaactccataaaatttccgaaggtactacacttactactactctttaccaaaccaccggaaatgctcccggaaatttgggtttcgctaatatcaccgatctacaaagtg

SEQ ID NO: 32378 - DNA, 309 bp, Gossypium hirsutum
  Clone ID: LIB3149-002-P1-K1-H11
ctaacagggagattttcctgggcgatgctggttatatggatgcagatcaacagccttaattgactgtgccatccaaaattttgttctttgatgatatagttggtgtttaagaagagggtatttatttaaatgtttaatttaatttaagttttatgtatccatttatttcctagaagttccttcataatgatgttactctgaaatattttcattttgatcaaggatagcctgaaatttgctgttaagtttgattatgccatgagaattctggaaatgaatctagatcccatcacaaaaaacaatcacgct

SEQ ID NO: 32379 - DNA, 321 bp, Gossypium hirsutum
  Clone ID: LIB3149-002-P1-K2-A11
ggaaaaacaggctcatctccaaataggcatgtgcttaccaaaggtctgggggagactgctgtggccagatggaatgatatggacaaagtatctcctgctcagaccatagaagcaaatgattcggaaagtaaaggaattggttatgttccagatgaatgggatgaagaatatgacaggggtaagaggaagaagataaggcaaaataagcacaagttcggcggtgcaaatcttttccaacaaatcgccaccaagaaaacacggtttaagaaggctaagttagaccattctaaatcagaaaaccgaccattcaggatatgaagt

SEQ ID NO: 32380 - DNA, 343 bp, Gossypium hirsutum
  Clone ID: LIB3149-002-P1-K2-A12
atgaagacaagggtcttggtgatcttgacttatgaggaatggacttctcgaacttcgggggaatgggcggcatgggcgacatgatgggcggcatgggcggcatgggcggcatgggtgacatgatgggtggcatgggcggcatgggtggcatggatgaatttgaggacagtgatgatgaagggcaagaagtgacaaagccagatgacaaggccgaaagagatgcaaagcctgaggagcatggcatcggatcttcagagaaaaaggaggctgaaccgagcacatgaaatcattttagctgaaacctgaaatgctggtaactatagttatgggtgatattttgctc

SEQ ID NO: 32381 - DNA, 481 bp, Gossypium hirsutum
  unsure (1)..(481): unsure at all n locations; Clone ID: LIB3149-002-P1-K2-A3
ctcaaagatatcactgcaagaaaatttaaattccagacatggcttccaacactgtgggatccgctgctcttcttcttaccttgaacttgttgttcttcactttggttagctctacctacgtgccttgcccaccaccaccaaagagccacaagcctacccacaaaagcccaccctcggcacctgaacagccaggcacttgccccagagatgcactgaaactaggcgtttgtgctgatttgttgggctcagtgcgcgttgttgttggaccgttgaggaccaaatgctgttctctcatttcgggtttggctgatctcgatgctgcttgttgcctttgcactgctattaaagctaatgtgttgtgggttaacctaaacgttcctgttcattgtctttgctcctcaattcctgcgaaaagcaaattcctgctggttacaaatgncctaaacctcatttccacttgttcctaacaaattttggtttt

SEQ ID NO: 32382 - DNA, 400 bp, Gossypium hirsutum
  Clone ID: LIB3149-002-P1-K2-A5
gaaatgtaccgtgactacattgaccctaacttcacctggaagaacttcaatctcgaggagcgggccaaagttatcgtagccccgagaagcaacaacgaacttgatgcgaccaaattgaagacagaattccctgagctcctttcgattaaagagtctcttattaagtatgtattcgaaccgaataagaagactggtggagcttgatcagttactttgcctgttaaaaagtttgtcttcaaaggtaaactatgtgagactagttgagcttgagattttaggttatgaattcattgattttcctctctttttttatcatcttttttatgaatttggttcgtgtgggtcgatatggatggtgataacctcgggcgatacgcacgcacgcctctttccagatgac

SEQ ID NO: 32383 - DNA, 374 bp, Gossypium hirsutum
  unsure (1)..(374): unsure at all n locations; Clone ID: LIB3149-002-P1-K2-A8
cacaaagttgctttttcgaaaggagtgaaagcaagaaaaaaatcgagtaagatatagaaagatggcggtgatgcanaagctgaaaatattcgtggtgcaagagccagttgtcgcagcttcttgcctcatcgctggttttggtctctttctaccagctgttgtaaggcccattctagattccttagaatcatcaaagcaagtccctcagcctgctttaagagatgtggttgctggtgtgactggtaaaaagcagggctaatgtgatttatgagttgggaagaagcagaaactcaaatgtagctagtaatcagcaacaaaataaacttgattttaaagttgaactcttgcgccttcaacttcatctttagcatgag

SEQ ID NO: 32384 - DNA, 421 bp, Gossypium hirsutum
  Clone ID: LIB3149-002-P1-K2-B11
taatctccacgccttcttcccattacttcattacattctcaagagaaaaacccagagccaaaggaatggccaaattattgctgttcattgcactatttgtggttccatgtcttgttagtgctacacgcatggtgaagaacccgttggtggttcaaggtcaagtttactgtgaccattgccgtgctgggtttgaaacaccaaagactagaaacatggctggtgccaaggttaaggtggtatgttccaaccggaagaccggtgatgtcgtgtacgagaaggaaggacacacggattcaaccggacaatacaagatcgctgtctccgaggatcatttggatgagatctgcgacgctgttctcgttaagagctcgcagcccgagtgcgctgaaatgtcaccgggacgtgaacgtgcacgcgtggt

SEQ ID NO: 32385 - DNA, 410 bp, Gossypium hirsutum
  unsure (1)..(410): unsure at all n locations; Clone ID: LIB3149-002-P1-K2-B12
gctactttgtctcttcagtttgatttgctatttttgctccatttgtcggttaccggagttctcaaacaaaaaatgtaaagatataataagcttgtatcacctgaattctagagacacttcgtccttaggtgtttaattttagctggtagttgtatttttcctctggaacacaggttttacttgttacatcctttattaatggcgagtgaagggaaatgatgcaattagtaaagtttttctctagacttaatcagttgcactcagagaagtagaggttaatagatttttcgtaaatcctttgcaggtttaaagacaggcttaactattacttagatcatttacatgatgacaagctntctcagtacaagaagcaccatctatgctaaattttggttttgttttcttttttc

SEQ ID NO: 32386 - DNA, 498 bp, Gossypium hirsutum
  Clone ID: LIB3149-002-P1-K2-B2
cgggccgaccgcacgcgtccggctactttaactcttcatttagattttctattatagctccatccgacaattaccgtggttcgcaaacataaaatggagagatagactaaccttgtatcacctgaattctatagacacttcgtccttaggtgtttaattttagctggtagttgtatttttcctctggaacacaggttttacttgttacatcctttattaatggcgagtgaagggaaatgatgcaattagtaaagtttttctctagacttaatcagttgcactcagagaagtataggttaatagatttttcgtaaatcctttgcatgtttaaagacaggcttaactattacttatatcatttacatgatgacaagctttttcattacaagaagcaccatctatgctaattatcgatatgttttctcttttcccttttttgttttttaacattgaaaaatttataattcctatcacttacctttttgtatcaaatctatt

SEQ ID NO: 32387 - DNA, 401 bp, Gossypium hirsutum
  unsure (1)..(401): unsure at all n locations; Clone ID: LIB3149-002-P1-K2-B6
ccaatgcctacctcaaccgtcaatcgttgtcgttcaaggtcaccactaccgatggtgttacgcgactgttccctgatattgtgcctgcaagttgggggtttggccagactttctctagcaaagtacaattctaagctcactaaaagctttagttcccggcggaggcgtgctacattattttacaaaaaagctgcccgccatacatggtatttatcgatacatcacatggtcaataatatcaggctacttgtttttctggagaactggttgtttagatggaagtgaaatctttgtttttgatacaagtcgatgtttgaaattatttcatgatcataataaattgtcaataagaagtgcaagaaaaacatngcagcttcagaagatgtaaattttgtcatcac

SEQ ID NO: 32388 - DNA, 279 bp, Gossypium hirsutum
  Clone ID: LIB3149-002-P1-K2-B7
ccacgcgtacgcgtaaccaaagagaaaaaaagagatgtcggatgccatacatgtgcatgatatcagtttatgtcgtcgaggagatttatatgttttgtaacacagattgggacctaagaccaacaaccctagtatctttgtgttcacttctattcgtctacgtggtattgctgatgaagtttgatgttgatgttgtgtaattttacaaagtatattttttcattattatgtagtgatatttattcacccaatgttatgaaggggacttggttctgggtt

SEQ ID NO: 32389 - DNA, 351 bp, Gossypium hirsutum
  Clone ID: LIB3149-002-P1-K2-B8
gcagcccaagaagcagcggctaccaccaagcttcccgtggcaaggaactaccattaatgtcggtgatgcatcaggaaacaccaagaaaggatgctgctctacataaataaataaataaggtgataggttatatttgctagcaagcaggccttatcatttctttattattcttctttctaaaccccttgttttttattctttcttttttctattcaaatgtttagctttgagagagtcttttagattacttatttttacgaaattgatttcatttttttgacaagtcacttgtactaaaagtgtgtctccttttatatttgctctccctatctttttcaacatgacaagatc

SEQ ID NO: 32390 - DNA, 309 bp, Gossypium hirsutum
  unsure (1)..(309): unsure at all n locations; Clone ID: LIB3149-002-P1-K2-B9
nnaaaaaaaaaaaaaaattaaactttaaattttgatttaaataataaaaataaaataatatgggaaagagtaaaaaaaaataatggtggaaaaaaaaataaaaaaaaaaagaaaaataaaaaaaattaaaaaaaaaattaaaaaaaaaaaaattaaattaaaattaaaaaaaaaaaatttaaaaaaaaaaccaaaaaaaaatttactttaaaaaggaaaaaaaaaaaaagggaaaaaaaaaaaaaaattattaaaaaattaaaaaaaaaaaaagaaaaaaattttcaaaaaaaaaaaaaataacttcgt

SEQ ID NO: 32391 - DNA, 408 bp, Gossypium hirsutum
  unsure (1)..(408): unsure at all n locations; Clone ID: LIB3149-002-P1-K2-C10
gagagaaaaaaaaagttgaaatcttttttgagcaatggaaggatcagtttttactccatcattggaaggaatgaagcatatcaaatctccagaaggggaaatgcttaccaagccttttttggatgtctgcaagttgattttgccagtcctcgataagttcggatctgctatgagccttgtgaagagtgatgttggtggtaacatatcgaggttggaaaagaaatatgaaactgatcccgctaaatacaatcacttgtacagtatggtgaaagaagaggttgattgtaaaacagcaacagattcatctagttgtaccaatggtcttctctggttgacacgagcaatggatttcctcgtagaattgttccgcaacttacttgcacatnncagatgnactatgactgaatc

SEQ ID NO: 32392 - DNA, 305 bp, Gossypium hirsutum
  Clone ID: LIB3149-002-P1-K2-C11
ctatactatgaacccagtgttgaagttttgttatgaagtgcttttatggattttgaatttgaggaagaaaaaaaaaaaaaaaaaaaaaaaaaaaaaaaaaccaaaaaaaaaaaaaaaaaaaaaaaaaaaaaaaaaaaaaaaaaaaaaaaaaaaaaaaaaaaaaaaaaaaaaaaaaaaaaaaaaaaaaaaaaaaaaaaaaaaaaagggcgccccttttaaaaaaccaaactttacttccccgtgcatgcaacataaaaattttttaaaagggccacaaaaataaaataaacggcccgccttttaaa

SEQ ID NO: 32393 - DNA, 439 bp, Gossypium hirsutum
  Clone ID: LIB3149-002-P1-K2-C3
gtaaactgcaatggtgttgaggtgctatgtctgggttctgctccaacaatttcaggggacagcacatctggctgtcagttgtacgtaagcaaagactctttagggacatctataacatcagcaaagtcaagtgagatcaatgtgttggtgcctaccggacctgatggtgactggggggagcattcattgccgcaacagtatatccatgtatttaaggatggtcaatttgaaactaccccagtgtcgcactcaggagcataaatgaggcctatttgaattgaaaacttatctttcctttgtgtgaaaaacaattatattcttttattttcttggatacatacctatgggtgaattttaactttttctgacggctggttatttaatttaacacacatatcatttggtcatcattctgaatatttctacatttcatttttaa

SEQ ID NO: 32394 - DNA, 465 bp, Gossypium hirsutum
  Clone ID: LIB3149-002-P1-K2-C4
acttttagctctaagccaagaaagcttgccactaacatcaaaatggcttcaaaacaggcagggtccatggccctccttttggcactcaacattctcttcttttccttggttagtgctactgccccatcccctcccaccaaacctaaccataaaccaaaggcaaaccccaaccccagcaccccatcttcacaaggcaagtgccctagagatgcccttaaattaggtgtatgtgctaatgtgcttggcttagtcaagcccgtcattggttcacccccagtgatgccatgctgttcccttcttgatggcctcgtcgatctcgaagctgctgtttgcctttgcacagctatcaaagctaacatcttaggcatcaaccttgacattccagtttctcttagcttgctcctcaatgtttgctcaaagaaagttccttatggcttccaatgctaatttaagtcaatcattttc

SEQ ID NO: 32395 - DNA, 456 bp, Gossypium hirsutum
  Clone ID: LIB3149-002-P1-K2-C6
tggtgtagctatgaaccctgttgagtatcctcatggaggtggtaaccatcaacacgggggtgatgctagtactgttaggcgtgatgctcctcctggacagaaagttggtcttattgctgctaggagaactggtaggctcagaggacaagctgctgctacagctgccaaagctgacaaggcttaggcttaggcttaggcttaggatattacttgctgtaattttagttcttttggtcttcagattttacattcaagagtgtttaagacctttatgcttgaaaatgtgtttgaattatcagatattggtactgttttgagttgtttgagcaatgattttgtttttgattcggatttttacccatgtttttggtatttgttggtttcggtttttacccctgttttatgttcgagttttttgaatcgagttattaggtatgaaatattttggatttttgt

SEQ ID NO: 32396 - DNA, 336 bp, Gossypium hirsutum
  Clone ID: LIB3149-002-P1-K2-C9
gcgaaagagtttcttgagcgttctaaagagtatcagaggcgaatgcaaggacaaaggcagcgaggtcgtttctggtggagatgaggagaggatcatgtatagtcgatgattgtggatttcagaaatcataggatggagttatgtatagttgatggttctggattttcagaaatcattctgcaggatgaatccgaagaatgtgaaagacaatctagtttccacccctccaattttgccagtaaagaagccattttctgatgaagatcataaattaaattgattaactgcatcatttaaatgtctgacccaaaggactattttttctctcttcttttt

SEQ ID NO: 32397 - DNA, 68 bp, Gossypium hirsutum
  Clone ID: LIB3149-002-P1-K2-D10
attcatctgtgtcatttctccgaaaattatttaaatttgttattaacttaaaaaaaaaaagagaaggg

SEQ ID NO: 32398 - DNA, 378 bp, Gossypium hirsutum
  Clone ID: LIB3149-002-P1-K2-D11
gccacgcgtccgaaattttctcgggaaaggaaagagtaaattagaaaaaagagttagggaaatggagaaagtggtctcggaggcggaagagctgccgaaggccatcgtgcgacgggtggtgaaggagaagctctctgagtgttcaccggattacgactttaacgttcacaaagacgcccacctcgctttcaccgaaagcgctcgcatcttcatccattacctttccgctacggcaaatgacatatgcaaggaatcgaagaggcaaacaatgaatgcggaggatgtgtttaaagcacttgaagaaattgaattctcggaatttgttaaacctctgagggcttcgcttgctgagttcaggaaagaagaatgctgtgaaaa

SEQ ID NO: 32399 - DNA, 311 bp, Gossypium hirsutum
  unsure (1)..(311): unsure at all n locations; Clone ID: LIB3149-002-P1-K2-D12
naaaaaaaaaaaaaaaaaaaaaaaaaaaaattataattaaaaaaaaaaaaaaaaaaaaaaagagggaggataaaaaaaaaaaaaagaaaaaaaaaaaaaaaaaaaaaaaaaaaaaaataaaaaaaaaaaaaaaaaaaaaaaaaaaaaaaaaaaaaaaaaaagggggcgccccttttaaagaataaaattttttttctcttgacaataaaaatattttttttttttttgtgcactaaaaaataaattaaatgcccgcgttttaaaaattgtgaatttggaaaaaccttggggtcacaaaatttaattctttt

SEQ ID NO: 32400 - DNA, 386 bp, Gossypium hirsutum
  Clone ID: LIB3149-002-P1-K2-D2
gaggacgcttggaagatcgttcatcccttatggcagatattcagaatataaagccaacccatgtttttaatgctgctggtgtgactggtaggcccaatgttgattggtgtgaatctcacaaaacagaaacaattcgcaccaatgtggctggaaccttgaccttagcagatgtttgcagagaacatgggcttttgatgatgaattttgctacagggtgtatattcgagtacgatgcaggacatcctgagggctccggcattgggtataaagaggaagacaaacccaatttcactggttccttctattcaaaaaccaaggctatggttgaagagctgttgaaagaatatgacaacgtctgcactctcagagttcgaatgccgatctca

SEQ ID NO: 32401 - DNA, 464 bp, Gossypium hirsutum
  unsure (1)..(464): unsure at all n locations; Clone ID: LIB3149-002-P1-K2-D4
gagcagcaaagtatgaatgaatgtgattatcaactttacaaatatacatagtaaagggtaaagtatgaatcgaattgctatgagcagcaaatttagggataaaatgtcacactaaattgctatgagcagtaaagaaaatttttttaattgcagaaaaccaacttcccttctttcccatactgccagaaaattgagggaccgcacgacacttaatttcttgtggttgatttcgataggtggtggactggtgaggaatctgtgaatgttctcttagaatccgcaggtcaagcatgacactgatggttttgataaacaaggaatgaggcttctgcttgcgacacttaacaggatatttgattcattgcagacaacttatgaaggatttcagacttcaacggtaaaggcaatatatatnattgatttatctgcacaagtttcctttctgtcgaaaatgcatacttaca

SEQ ID NO: 32402 - DNA, 223 bp, Gossypium hirsutum
  Clone ID: LIB3149-002-P1-K2-D6
cccacgcgtccgcaagtagggaggatttacataggatgagtttgtagtgtaggaatgttcggatataattgttgttatggtggatctttggtggtgttttcgacttttgcttattgatgtctatggattttgctgcctttagtaaaatccttgtgtgatagttaattctatatgtttttgaatatgaaattcttgacaagaaaaaaataataaaaataatata

SEQ ID NO: 32403 - DNA, 165 bp, Gossypium hirsutum
  unsure (1)..(165): unsure at all n locations; Clone ID: LIB3149-002-P1-K2-D8
aaacataatcagttctttgaataattatatatatttatgcaatcagcatattctgttttnagaccaggaaaaaaaaaaaaaaaaaaaaaaaaaaaaaaaaaaaaaaaaaaaaaaaaaaaaaaaaaaaaaaaaaaaaaaaaaaaagaaaaaaaaaaagatgaccat

SEQ ID NO: 32404 - DNA, 285 bp, Gossypium hirsutum
  Clone ID: LIB3149-002-P1-K2-D9
gaagaagaagaagaggcgtgactagatcatgctaaagctgaaagcagtagcagcggagttttgctaatctgatatcatttttcttttttatctttttctcttttgccttggaagatgaagtttgtgatgaatacaagtcgtttttcttgcgctttgtactaaagcaccatgttaatatgtcaaaagaagataggttttactttctgcatcttttgatggtattgattagtacttggaagagtacatcaaattaataacacgttactatgtttgcatttttcgttt

SEQ ID NO: 32405 - DNA, 359 bp, Gossypium hirsutum
  Clone ID: LIB3149-002-P1-K2-E1
cgtccaccacttctacttttagctctaagcttagaaagcaagccactagggttttaggataggattaaaatggcttcaaaacaatcagcttccatggctctacttttggcacttaacattctcttcttttctttggtcagtgctactgccccgtgccctcccaccaaacctaaccataaaccaaagccaaaccccaaccccagcaccccatcttcacagggcaagtgccctagagatgcccttaaattaggtatatgtgctaatgtgcttggcctagtcaagcccgtcattggttcacccccagtgatgccatgctgttcccttctcgatggcctcgtcgatcttgaaacttctgtttg

SEQ ID NO: 32406 - DNA, 267 bp, Gossypium hirsutum
  Clone ID: LIB3149-002-P1-K2-E10
tgtaatttaagatacataatggtctcaaagatctctgatacaagaggtgaagcctgggtttcagcctttaatgaacaagcagagaaaattgttggatgctcagctgatgaacttgataaactcaagtcggagcaaggggatattgatggataccaaaaaaagttgaaggaagcaacttgggttcctcatcttttcaaagtcagtgttactcaaaatgagtataacaatgagaagcggcaaagataacagtaaggctgttgctcaatc

SEQ ID NO: 32407 - DNA, 347 bp, Gossypium hirsutum
  Clone ID: LIB3149-002-P1-K2-E12
cactaggattgtgcatgatggaaatagggctctgtcttgctcgaatatgtgatatggccattggaggcaatgagcttgagcaaagcttattggaatcatgtgctgcaaaaggacgacttatacattatcattcaatggttgatagccttgttcttagagaagctggtccaaagaagggatcgagtaaaagaaatgctaataatcatgcaagaagcaaggagaatttattgaaaggtgctaatttggacacaaatggtaatgaagttaggttatgtgaaattcatcccaacctatggcaacagtggcattatgactatggtatcttcactcttttgactgatcccatg

SEQ ID NO: 32408 - DNA, 466 bp, Gossypium hirsutum
  Clone ID: LIB3149-002-P1-K2-E2
gttgatgtgttaggtggcttagtgcacattggtatcggcagcagcgccaaggacacatgttgcccagtgcttcaagggttgctagacttggatgctgctatctgtctttgtaccacaatcaaggccaagcttttaaacatcaatatcataataccaattggccttcaggtcctcatcgactgtggcaagactccacctccaggattccagtgtccagcataaggatagtacccctttttggacaataacatcatgttcatctcatgacaagaagttataattgtcgaaaatttcgagtttccccgtaaagatatattgaggcatgacaagatgtgctgatgtatttcttagtaggtagtgttccgagttcctaaggagggagtgggcttcaagtttctattatgttttaatttgatttatcgcacttacatttgtggggctgtttttctttcaatgtattttgatg

SEQ ID NO: 32409 - DNA, 327 bp, Gossypium hirsutum
  Clone ID: LIB3149-002-P1-K2-E3
gaaattttctaaccgataccatgagagctgtaagggggggatgaatggttgttgagagcaagaggccaataaccataacagtgagtattaagataaataggtaagttagctgtgtggttgctgcttggttactgggaaaatgtagaaacaaacatggagttatcgacagtttgtgtattctgttttaaaatgtagattctgaatctacaatatgtggaagatgacccttgcaagatcagggccagggtagtgcatggtctaagtgacacaattattcttgtattatgatcatttgaaaatgagtgacatcatgatgttcattattat

SEQ ID NO: 32410 - DNA, 436 bp, Gossypium hirsutum
  Clone ID: LIB3149-002-P1-K2-E4
aacatgcaacaagaaagttactgaagctgttggatctggctattggtgtgagggatgccagaaaaatgatgaagagtgtaatttaagatacataatggtctcaaagatctctgatacaagaggtgaagcctgggtttcagcctttaatgaacaagcagagaaaattgttggatgctcagctgatgaacttgataaactcaagtcggagcaaggggatattgatggataccaaaaaaagttgaaggaagcaacttgggttcctcatcttttcaaagtcagtgttactcaaaatgagtataacaatgagaagcggcaaaggataacagtaagggctgttgctccaatcaactttgctgaagaatccaggtttctgcttgaagagatcaagaagatgagaaatcctcagtagattgtttagttttgggttgtaatgatg

SEQ ID NO: 32411 - DNA, 444 bp, Gossypium hirsutum
  Clone ID: LIB3149-002-P1-K2-E5
aaaccagactcctttaactgttgtgcggggtcccttgttggatgaagtacatcaagagctgaattcatggatatcacaggttaccagggtatacaagggaaaagagcatgctgagctcgagttcagtattggacctattcctgtgaatgatgggataggtaaagaaatcatcactcaaattacaacaactatgaggaccaacaaaacgttctatacagattctaatggacgtgacttcattaaacggattcgagattttaggaaagactgggaccttcaagttaaccaaccaattgctggaaattactacccggttaaccttggaatctatgtccaagatgatagcacagagctctcagtgttggtggatcgttcagtgggggcatccagcttagctgatggccaaattgagctgatgcttcacaggagggtgattcacgatga

SEQ ID NO: 32412 - DNA, 344 bp, Gossypium hirsutum
  Clone ID: LIB3149-002-P1-K2-E7
gcttacttccatagatttatcactttcttccggacaagaaattgtaatcgaggaaagatcaggtaaggagttattgcacacacggggaggactgggagaacaagtggctgcttccgggatctcagtctggaacccggctttcgatgtcacccctgccaatctaatagccggtatcataacagaaaagggtgtaattacaaagaatgacataaaggatgatgcatttgacattaaggatttcatagagaaggcaacaggcaaatctaccgtatgaagtcggcatctctaaccttaaacgattcctaggtctcaccattcacgagactcgatatcgagaacttact

SEQ ID NO: 32413 - DNA, 284 bp, Gossypium hirsutum
  Clone ID: LIB3149-002-P1-K2-E9
ggttaatagactactgtaaattagtgatcgtatagataagtgagtttctaaattcttagggggcttcgatttaggccctaagggtgaaatgtcttccatgtgtccccggacttttaaccggatatacgggcaacagagaaacagagatttgtatttggtgtgatttcagtttgtatcagtggggggaaatcgaacccctatcaggttcatgttgggagcggttcctagtatggccattgttttatgtgcagttcctgaatccaaaagtcttctttttcagttgt

SEQ ID NO: 32414 - DNA, 135 bp, Gossypium hirsutum
  Clone ID: LIB3149-002-P1-K2-F1
gtttttcatgttgtaagatttgtctaatgcttttttatgctatcaacggagtgatatggtaggtttaaaaaaaaaaaaacaaccagtggatgagtatgattcttcaaaataaataaaccgtgggtgagtatgatt

SEQ ID NO: 32415 - DNA, 221 bp, Gossypium hirsutum
  unsure (1)..(221): unsure at all n locations; Clone ID: LIB3149-002-P1-K2-F10
naaaaaaaataataaaaaataaaaaaaaaaattataaatataaaaaaaaaaaaaaaaaaaaatgaattgggttaaataacaatcttataatatccatccttactaactcccgctttagaacatctattttttttttttctacactgacctgtaataaattttctatcttgttacataaattatattgacaaaaccctcttttcacctacttaaattaataa

SEQ ID NO: 32416 - DNA, 320 bp, Gossypium hirsutum
  Clone ID: LIB3149-002-P1-K2-F11
cctgctcgtgttggtctggttgcgcctatttatgtggtcgttccacctggaaacactggtcgtgacgcatcacagacctctttcttccaggtgctcaatattcccaccaagattaacaaaggtactgttgaaattatcactcccgttgagcttatcaagaagggtgagaaggttggttcttccgaggctgcacttcttgccaagctcggaattagaccattctcatacggtcttgatgtcttgtctgtttatgacaatgggtcagtctttagccctgaggtgcttgaccttaccgaggatgacctgattgagaaattcgc

SEQ ID NO: 32417 - DNA, 393 bp, Gossypium hirsutum
  Clone ID: LIB3149-002-P1-K2-F12
tctagttctccaggcaagcttccagataaggcattacaccagggactgtgttgattttgtgtggctggaaggtttatggggaagagagttgttttcttgaagcaacatacttctgggctccttttggtcaccagtgggcattacatattttactgctatccttgtctcgtcattgatttgcttactgcttgaaaatattggatgtatgatatatgttattcaattgcgagctggatatatgaacatgtttgttaaaacccttgttattgatttattttaattttgattctaaatttttatttttactttaatatttacgacaacttgagttttaaaaaaaaaaaaaaaaaaaaaaaattttattttttataatatatttttattttttttttt

SEQ ID NO: 32418 - DNA, 368 bp, Gossypium hirsutum
  Clone ID: LIB3149-002-P1-K2-F3
aaaaaagttgtggagaaaaaaatattacgtttgggaagcgagaaagtgcgagaaaatgagcggagcaggaaagaaagtagtagatgtggctttcaaagcaggaaagagcattgattgggaagggatggcgaagcttttggtctccgatgaggctcgcaaagagttcgccactcttcgtcgcactttcgatgaagttaactccactttacagaccaagttcagccaggaacctgagcctatcgattgggaatattatagaaaaggaatcggctcgcgattggtggatatgtacaaagaggcttatgagagcgtagagatccccaagtttgttgacacagtcactcctcaattcaaaccgaaatttgatg

SEQ ID NO: 32419 - DNA, 277 bp, Gossypium hirsutum
  unsure (1)..(277): unsure at all n locations; Clone ID: LIB3149-002-P1-K2-F4
aaaaaaaaaaaaaaaaaaaaaaatatattatttaaaaaaaaaaaaaaataaaaaaaagaaaaagttaaaaaaaaaaaaaatgtaacataaaatattcttctataaaaatacttaaatttattttaatgtttgaatttttaaaaacatttcattgaaaaaaatctttctttaaacatcttaattattttatatcatatcctaatttattaaactttctttatattttaaaattctttnacttttaaaattttttcaattttcattcttatttattttt

SEQ ID NO: 32420 - DNA, 392 bp, Gossypium hirsutum
  Clone ID: LIB3149-002-P1-K2-F6
gggattgagacagctgtaaccaatgtctcccaaggttgagaagaaggcagatgcagaggcgcgaggccttgaaggctgcgaaagcagtgaaatctggagccacttttaagaagaaggccaagaagatccgaacaaaggttacgtttcacaggccaaggaccttgaagaaagataggaacccgaagtatccgcgcattagtgccccaccgaggaacaagcttgaccattaccagattctcaagtttcccctcacaactgagtcagccatgaagaagattgaggacaataacactttagtatttattgttgacatccgtgcagacaagaagaagatcaaagatgctgtgaagaagatgtatgatattcaggccaagaaagtgaacaccttgatc

SEQ ID NO: 32421 - DNA, 161 bp, Gossypium hirsutum
  Clone ID: LIB3149-002-P1-K2-F7
gcgtccggtttgaaaggatcaattttttcttcccctcttttgttttcctttttccctcgtttttcctgcatgcctccctgtgtaatattgttaggctttgtgctttcaagaggagtaggaataaaaataaaccttttttttttcttcttttaccaatcatt

SEQ ID NO: 32422 - DNA, 366 bp, Gossypium hirsutum
  Clone ID: LIB3149-002-P1-K2-F8
atagatttcaaagtcagagaaaaaccaaaacagatagggttttccaggatctaatcgtttacggaccggaaaaccagttttgatggcaacaaatgattatgaaagtgggttgaagatgatggaggaactaacaacagatgctcgacaaattcaagaccagttattgggtgaattactgagtaaaaatgctgaaactgagtatttacagggattcctccatggccaaaccgacaagcaactctttaaaaaaaaggtacccatcgttacttacgaacatctcaagccttatattgatcggattgccaatggggagcatcatctgatatcttttaagttgaacccttaattgggtcttttttaactttt

SEQ ID NO: 32423 - DNA, 351 bp, Gossypium hirsutum
  unsure (1)..(351): unsure at all n locations; Clone ID: LIB3149-002-P1-K2-F9
cagagcagttgctgaaggagaatgtttcgcatcatcttattcctcataagacgttctctgggaatcggccttctctcagtcttttgctaccatctcttaacgcttacaatattgggcagctcttggcaagctatgaacatagagttgctgttgaaggttttgtttggggcatcaattcttttgaccagtggggagttgagttgggtaagtcactagctactcaagtccgaaaacagcttaatggatcacgtacaaaaagtgaacctgttgaaggctntaattttagtactactacgttgttaacaagatatctacaggcaaagttctgatattccagctgagccactcact

SEQ ID NO: 32424 - DNA, 366 bp, Gossypium hirsutum
  unsure (1)..(366): unsure at all n locations; Clone ID: LIB3149-002-P1-K2-G1
cttcactcccacactgcttcaacaatggcgacgcccacatttcgccggctagacctgaccctgttaaccctttctttactcgccgtcgccgtcaatgctcacaacatcaccgccatactcgaaggtttccctgattactccgtttacaacgatttcctcactaaaaccaagctcgccgatgagatcaatactcgacaaaccatcacttgccttgttcttaataatggagctatgtctgctctcactgctaaacacccactttccgtcgttaaaaacatccttagccttcatgttcttttagattattatgacccacaaaaacctccataaaatntccgatggtactacacttactactactcttta

SEQ ID NO: 32425 - DNA, 403 bp, Gossypium hirsutum
  Clone ID: LIB3149-002-P1-K2-G11
tgaggaatgactttcagccttgaaatcttcttttggtttcgactttaacgaagcaaagaaaggaaatccatgtcattttgcaaggtaaaacttaccttttcctttttcttttatttttttacatgtaattatgaaagactcaacaaaacaaaaaaagaaaatggaatcgaaaattaaagagactggaaaatggagaatcaccttttggttttgatagcctttttttttatttcaatatgcatagtatgcgtaacctcgaaaatacattgttttttggctttatagccgaaatccaaaacaaataaaataaaaaaaatacaacatttcttcgctttttcctatttgctgttgtcctgctgccgtttgcttgtttttggttgcaggcaaggtgtacggggccagc

SEQ ID NO: 32426 - DNA, 369 bp, Gossypium hirsutum
  Clone ID: LIB3149-002-P1-K2-G12
cgacccacgcgtacgcactggccacaatcaatcttacaaggctcacaagaatggcatcaagaaacccaagaggcacggccacacttccaccaaagggatggatcccaagttcttgaggaaccagaggtatgcaaggaagcacaacaagaagagcggtgagtctgctactgaagaagagtaaatttttaatggcaaaagatctagctttgattagtgttttccaattgttgtttttccccccggtggaattgagtgttcgtttactataatcaccttagttgaaatgttattttgggattgttgaatctcattttcaaaagagatttgaagctgtgagcttattaatattaaagaacatgttttgagctt

SEQ ID NO: 32427 - DNA, 378 bp, Gossypium hirsutum
  Clone ID: LIB3149-002-P1-K2-G2
ggctgagcatctggtagctttctctttgtttctccaaactgtgtgcttagatttgaggaccgagtccctgtgaacaaatcttgttgttcatttctgggtttaatttctcaagaaaaagaagatgacaaaagataggcaaatcggtgtagcaatggatttctccaagggaagcaaagcagctcttaaatggacaatcgacaatctggtagacaaaggggataccctttacctcatccacgtcaaacccaatcagagcgacgagtctcgtaaccttctttggtccaccagtggctcacctttgattccattatcggagttcagagagaaggaagtgatgaaacattatgaggtggaacctgatcctgagggtttagactt

SEQ ID NO: 32428 - DNA, 427 bp, Gossypium hirsutum
  unsure (1)..(427): unsure at all n locations; Clone ID: LIB3149-002-P1-K2-G4
caacttctcattaaaacccaacctgtggaagtcgttaagcctgatcaattcaaagcggtagacgatgaaggaatgccgatttatcagaggccatttatgagaggtaaacttttcattcacttcactgttgacttccctgactcgttgaccccagaccaatgcaaggcactggaggctgtgcttcctcccaaggcatcggttcagctgactgacatggagctggatgagtgcgaggaaacaaccatgcatgatgttaacattgaggaagagatgcgtaggaaacaggctcaagctcaacaagaagcttatgaggaagatgaggacatgcatggtggtgcgcaaagagtacaatgcgctcagcaatgataaaaaaagccgaatgtccgagacacagacnggtggtttttgccatggaatgtactgtggt

SEQ ID NO: 32429 - DNA, 417 bp, Gossypium hirsutum
  Clone ID: LIB3149-002-P1-K2-G5
ctaagaatagttgtccaagtcctgttcttcgagcagcttcagcttaggacctcaagggctggatgctttttggtttctgataatcttgatggatcacgacagttacgtagtgggatcacagggtctaccgaaggagggtgggcctcagctgtgagagaaaatcaggttttgaaggtaggcatggatactatgagaatgcgggtttccgagcttgagaaagaatgctcaaacatgaggcaagaaatcgagaagctaggccgggtaaagggttctagcacttggggaaacgtatcgaagaaatttggattcaagttgaagtctcaaatgtgcaatgcgcaggaggattctgtaagcaaccagaagaatggaagtggaaagatcgagaaaccgaaaggtaaagcacaagaaaaacacaag

SEQ ID NO: 32430 - DNA, 226 bp, Gossypium hirsutum
  Clone ID: LIB3149-002-P1-K2-G7
ctccggtcctccacccaattccagaatcaactcatcaaagttcaaacaacagtgttagaatcagagagacaagtgacattgaaatcgatttggcttaccttagcttcatttcccataagctttcatttacattttctttttagaatttaatttaatataatttgattttcttttattttactttgtacaacattttgcaattaaatgcaggattagcagattttct

SEQ ID NO: 32431 - DNA, 276 bp, Gossypium hirsutum
  Clone ID: LIB3149-002-P1-K2-G9
cgggtttatcgtctactccattggcaagccattggatcaatggctcaaggacatgccagctgtggcagaagagcatcattttgagaggcgtataatccgattacacagttttcattgcattacattttatttcttctagttttaagatcctgcttccgacttgtattgagttattacatgacacagtagtgtctgaatctgtcatcaacgggtaggatatatttgattttgttattggcttattgtaataaaacctttaccagtggattttattcc

SEQ ID NO: 32432 - DNA, 403 bp, Gossypium hirsutum
  unsure (1)..(403): unsure at all n locations; Clone ID: LIB3149-002-P1-K2-H1
ggaatttgaagaattttccgagcaatatcctcttgaaagctattatcccatatgggtgtccgatctcctctgtctactctccagcacatccctctttggagaagaccctttgcagcccatatgcttttccaggaataaagagctagagaatactaccaatagccgattgacttaatgaagagatccttgagagacgtggaagatcaaacaatagaaataaaaaaaaataaatagaaaaaccaagaaaaaaatcacagaaacctaagactcgtgccaaagacggcagacagaaccgtgctagggtagcagaccttttagcgtttcagtaattaaaattgaatgtgtatgtaantaaggtataaattataatatttgataaatcttgaacacatcgatattaagt

SEQ ID NO: 32433 - DNA, 284 bp, Gossypium hirsutum
  unsure (1)..(284): unsure at all n locations; Clone ID: LIB3149-002-P1-K2-H11
ggaagccgtggagtttgcagacgaaagccctgttcctcctcgaagccagctgctcgaaaatgtatttgcagatccaaaaggttttggaatcggacctgatggccaatatagatgtgaggacccaaagttcactgaaggcactgctcaggtctaagctttcaaaataggaggttgatcaaaactatttttgtcaacttatttattatttcatggtcacatatgtttagtttgtggtagcagtcacgcgttcacttgattntagtgtttattgtgtaccaagtatt

SEQ ID NO: 32434 - DNA, 326 bp, Gossypium hirsutum
  Clone ID: LIB3149-002-P1-K2-H12
cagatctgcagaaatggcaacttttggatttctcaccattgcttttttcttagtttttgaacgtcacgttcgccacagattcgccggcgcctgctccctcgctcggtgcagacacatcaccgctacttgctcctactccggttacgggatctccggactcggcaccgttaatctcaccggtgatgcctgcttcgcctccggcgccaatcgcgccgtccccatcagatctggcagaaggagagtcatcgccttcaagttctcctgctcccttcaccggcgatgcgagtgatatcaaccacagcaacaacaatgcaaaggaaagcgaa

SEQ ID NO: 32435 - DNA, 279 bp, Gossypium hirsutum
  Clone ID: LIB3149-002-P1-K2-H2
ccgggcccacccacccgtgcgatcataaacaaataaaaagtcgatttatttactccttaattagtactaaaaatttctgtccgaataaaaaaacaaaaaaagaaataaaatatataaaaatttaataaaaaaaaaaaaaaaaataaaacaaaagataatttaaaaaaatatatctattaattatttacaaaggaagcaaaacacctattaaaatatatcattcaacaataaaaaaaaaaggccggcctattctttacctcattcttattaaacccaatg

SEQ ID NO: 32436 - DNA, 326 bp, Gossypium hirsutum
  Clone ID: LIB3149-002-P1-K2-H6
tcgagccacgactcacgcatagcgtgaagatatcgagttggctaagagggagaatgcactggtcgatgctggttatatggatgcggaacaacagccttaatttactgtgccatccaaaattttcttctttgatgatatagttggtgtttaagaagagggtatttatttaaatgtttaatttaatttaagttttatgtatccatttatttcctagaagttccttcataatgatgttactctgaaatattttcattttgatcaaggatagcctgaaatttgctgttaagtttgattatgccatgagaattcttgaaatgaatctagat

SEQ ID NO: 32437 - DNA, 203 bp, Gossypium hirsutum
  Clone ID: LIB3149-002-P1-K2-H7
gtgccctcaaaaacccaaaaaaaagccttatgttgtatctgttagacatgctatatatgccatgttccagttgttcccatgtaatggaatggtatgggtgagattgtgaagagattgtgaaacaatcaaccttgtgtgatattgttgtatctttcagtagactatgaaatataattgaaaaggccatcaaggatattttttat

SEQ ID NO: 32438 - DNA, 268 bp, Gossypium hirsutum
  Clone ID: LIB3149-002-P1-K2-H8
gtcttctttcctgggtataaatctgttgttcctccggtgattgatcatcgccggttgtgttgggttgcacaccaatgggagacgagtatttgcagcagttcttggatgaaaccacttggtacaatcacattgttttgggataccttttgcctacaaatgtatggtaccctcttccccgtttcttgcagacatggctactaaactaccttgctgggactttgctttacctcatctctggtttactttggtgtttctatatatactactt

SEQ ID NO: 32439 - DNA, 330 bp, Gossypium hirsutum
  Clone ID: LIB3149-003-P1-K1-A10
ctctgacacctcgtggtttcagtttattctaactcgtcgccatcatgaatcccgaatatgattatctgtttaagcttttgcttattggtgattctggtgttgggaaatcatgtctacttttgaggtttgctgatgattcatatctggatagctacatcagtaccattggtgttgactttaaaatccgtactgtggaacaggatggaaaaaccatcaaactccaaatttgggacactgctggccaagaacgctttaggacaatcactagtagctattatcgtggggctcacggtatcatacgttgtttatgacgtgacagaccaaagagag

SEQ ID NO: 32440 - DNA, 83 bp, Gossypium hirsutum
  Clone ID: LIB3149-003-P1-K1-A11
ccgaattcccgggcgccccgcgtccggtaaactataaaagaatatatatgtatatgattaagtacattttgatcattatgggg

SEQ ID NO: 32441 - DNA, 283 bp, Gossypium hirsutum
  Clone ID: LIB3149-003-P1-K1-A12
ggcaactaagttgttcttgttgcttgctatctgtgtcctccctgtgcttgttaatgcaaacaataaagctttccaaatccgttggctgggtttactgtgatgcctgccgtgctggttttgaaacatctaaaagcacttacatccaaggtgcaagggtcgaaatcaagtgctttgataggtctacattgaagctgaaatacagcatcggggcagagacggacgaaactggaacatataacattggttgaagatgaccacgaagaccaaatttgctacgcaacac

SEQ ID NO: 32442 - DNA, 441 bp, Gossypium hirsutum
  Clone ID: LIB3149-003-P1-K1-A5
gatttggaaagaaaggttgtgaattggagagatgatgatgacaacactgtgttgcacattgcagctacaaagcaacagcatcaggcagtacaactgttgttggattccttttatgggttagatgcaaacgctaagaactcggaaggcttgacagctcgagaaatcatagaaagggttgaaagacaggggttgaacatgagtggcgccgaagacgatgataccaccaccgtcaagattgagcgcattaagaaaagaaccaggacgtctgaaagagcattaataaagttgattcgtgcaaagaatgggttgttggagaacatgcttaacgcaacaattggggtagcggcgctggtcataacaacaatctaccagtcatctttaaagccaccaagaggtctttgggaaggggataaacactatcccaacaacaccacaaacctt

SEQ ID NO: 32443 - DNA, 441 bp, Gossypium hirsutum
  Clone ID: LIB3149-003-P1-K1-A6
aatggatcgtagaagtgcatttgcagttgttttgatttgttttgtggtgaccgctgtcggtggtcaatctccggcagcctcacctactaaagctccgccggccgcgactactcctgctactgctactgctcccgctactgcccctgttagcaaacctaaatcaccggctccaactgctgcccctaccacttccccaccaacttcttcaccaccggttgcggctccggagaagtctgcggcggttccagccccatctaaatctgctccgtcttctcctccggctgctgcgccggtgagttctccaccggctccagtacctgtgagctctccttcagccagatcgccttccgttgctgcaccgacgactccaccagagagcttggtctttccttcggctcctgttacggcaccaactactgctgaggtttcggccccaacttc

SEQ ID NO: 32444 - DNA, 266 bp, Gossypium hirsutum
  Clone ID: LIB3149-003-P1-K1-A7
cccacgcgtccgagaggccgccgttgtccgtccttgcgcaaaaccaccaaagaagccaaggcatggcaaggatcaaggttcatgagttgcgacagaaatcaaaaaccgatcttttggctcagttgaaagatctcaaagctgaacttgctcttcttcgcgttgctaaagttaccggtggtgcacctaacaagctttctaagataaaggtggtgaggctgtccattgctcaagttctgactgtaatctcacagaagcagaagtctgca

SEQ ID NO: 32445 - DNA, 316 bp, Gossypium hirsutum
  Clone ID: LIB3149-003-P1-K1-A9
ggcgctttgaacactcatcttgcttccaacacatttcttgttggacattttgtcacccttgctgacattatcatgacatgtaacctctacttgggtttctcccagatcatgaccaagagttttacctcggagttccctcatgttgagaggtacttttggaccttggttaatcagccaaaaatcaagaagattcttggtgaagtgaagcaggcagtctctctaccacctgttccttcaaagaagcctgctgcccagccaaaagaaactaaaccaaaggctgaaccaaagaaagaagccaaaaaggaggttgagaaac

SEQ ID NO: 32446 - DNA, 417 bp, Gossypium hirsutum
  unsure (1)..(417): unsure at all n locations; Clone ID: LIB3149-003-P1-K1-B10
aaaaaaagcaccttgaagattacaatgaagaagagctccatgcctcatccttaccacagctccaaagttgcagaccctaatgttaatggtgatcatttgaaagataacagaggcgtcaggtccaacgtgacagagaaaaagtcagctgctggtgctgccactaataagctggagaaaaatccatccgtcgacataaacgaaagtgcggaggccttcatccagaaattcaggcaccagcttttgctccagaggcttgagtccattgaaaattatgagaaaatgttggctagaggactctgatcatcgatgcactggtattctctgctggccaaacatatttcatttgcttcttttaactngtatactctctattatgatttacgaatatggatatgaagtgcttgaatgatgatcatg

SEQ ID NO: 32447 - DNA, 266 bp, Gossypium hirsutum
  Clone ID: LIB3149-003-P1-K1-B3
gaaaaaaaaaaaaaaaaattaaaaaaataattatatataaaaaaaaaaaaaaaaaaaaaacgggggtaatataatttagggggggaaaaaaaaataataaaaaaaaaaatttttttttttttattttaaattatattttattaacgtgggtattatatcttttttatttgtgaaaccctttttttttcccactttttttcctttttttatatcttcctttttttaatttatgtgataatcaaaaaaactcttctcctttctttttt

SEQ ID NO: 32448 - DNA, 436 bp, Gossypium hirsutum
  Clone ID: LIB3149-003-P1-K1-B7
ggagccagttgagaagtgtttgagggatgcttagatggataagagcagtgtccatgatgttgttcttgttggtggttccactcgtattcctaaagtgcagcagttgttgcaagacttcttcaacgggaaggagctctgcaagagcattaatcctgatgaggccgttgcttatggtgctgcggttcaggctgctatcttgagtggtgaaggaaatgagaaggttcaggatctattgcttttggatgtcactcctttgtcccttggactcgaaactgctggcggtgttatgactgttttgattccgagaaacactaccattcccaccaagaaggagcaggtgttttcaacttactctgataaccaacccggtgtcttgatccaagttatgagggtgagagagctcgaacccggacaacaattttgtggtaaatcgagc

SEQ ID NO: 32449 - DNA, 150 bp, Gossypium hirsutum
  unsure (1)..(150): unsure at all n locations; Clone ID: LIB3149-003-P1-K1-B8
acgggagccaatagagaagagnnagagggttgctaagatggaaaagagcagagtacatgggggggggcttaaagaagggggggcggacaaacctaaagtgcaccaaatggagcaagactccagcaacgggaaggagctcggcaagagcat

SEQ ID NO: 32450 - DNA, 240 bp, Gossypium hirsutum
  Clone ID: LIB3149-003-P1-K1-B9
gggagggaagcacatagaagaattctatggcaaagtggctagactacacggatccgttaagaatttgccagcgtcttgcacttcaagaatgggagccagaccagagttgtgtttcttcccacagtacgtggtgcagactatgcaaacaccaatcttcttcggtaattcagcttatgactcctggcagattaagaacattttggctcccagtgctgctgacaaaagtaaggagtggaaaag

SEQ ID NO: 32451 - DNA, 434 bp, Gossypium hirsutum
  Clone ID: LIB3149-003-P1-K1-C12
gcgagaggcgaaccaaggagccaaaaaatccgcagttcagcaaccaaggagcactcattcgacaagtccgccatgggtaaggttcatggatctttagctcgtgccggtaaggtaagaggccaaacacctaaagtggctaagcaagacaagaagaagaagccccgtggccgcgcttacaagaggatgcaatacaaccgtcgtttcgtcactgcagtggtgggattcggcaaaaagaggggacctaactcatccgagaagtaagagctatgcaattgaaaaaaggtcttgtttgaagcttttatgggtttagtctgtgttttccccccctttttttttgtaatgttttatgatacttatttttatccactggtattaaggttcaagttgaacttggaagttttgttagctaaatattatgtgatttcgatattcgt

SEQ ID NO: 32452 - DNA, 294 bp, Gossypium hirsutum
  Clone ID: LIB3149-003-P1-K1-C2
tgaaatcccacctgagaagattgaggaactcataaaaggctatgccaatcttgttaatctcattcaccccatgaaagctttccactgggggaaggatgttagtattgagaacctgcatcaagggttcactcatgtgtttgaatccacatttgaagcacagaggggattgctgagtatatagctcatcctgctcacgtggagtttgcaaatctgtttctccccagcttggacaaggtcattgtatttgactacaaacccaccgttgtacgttgctaagttacaagcatagttctg

SEQ ID NO: 32453 - DNA, 439 bp, Gossypium hirsutum
  Clone ID: LIB3149-003-P1-K1-C3
gagaggcgaaccaaggagccaaaaaatccgcagttcagcaaccaaggagcactcattcgacaagtccgccatgggtaaggttcatggatctttagctcgtgccggtaaggtaagaggccaaacacctaaagtggctaagcaagacaagaagaagaagccccgtggccgcgcttacaagaggatgcaatacaaccgtcgtttcgtcactgcagtggtgggattcggcaaaaagaggggacctaactcatccgagaagtaagagctatgcaattgaaaaaaggtcttgtttgaagcttttatgggtttagtctgtgttttccccccctttttttttgtaatgttttatgatacttatttttatccactggtattaaggttcaagttgaacttggaagttttgttagctaaatattatgtgatttcgatatttgttaagctt

SEQ ID NO: 32454 - DNA, 277 bp, Gossypium hirsutum
  Clone ID: LIB3149-003-P1-K1-C4
aaaaaaaaaaaaaaaaaaaaaaaaaacaaatatactcatacaacaaaataaacccaaaactagggggacctaaaaaaaaaaaccgcggccaccaatattatacaacccatctaaataaaaccccaacaacctacatccttatacaccctattaaaatcaatactcctccttcaaattgccgccccccccctttaaaaacaccaatttttctccccctctttttctcataatattcttctttattgggtccccacatattaatacctccccccccttt

SEQ ID NO: 32455 - DNA, 380 bp, Gossypium hirsutum
  unsure (1)..(380): unsure at all n locations; Clone ID: LIB3149-003-P1-K1-C5
naaaaaaaaaaaaaaatttaaaaaaacaattttttaatattataaaagataaaaaatttatgggggctaaaaaaatttaaccggggtgctatatataataaaaaaatacaaaaaacacaaaccttaccattaaccatttacaatatataaaaaatcaaaaacattaaaaaaaaaagggccccccctttaaaaaaaccaaattttttcaccccccttttccacataaaattttttttttttgggcccccaaaattaatttctccgcccccctttaaaaaaccttggatttgaaaaaaccttggcttccccaaaaaaaattcttttgaaaaaaaccccttttttcccagtgggtataaaaaaaaaaaagcccccccaaatcc

SEQ ID NO: 32456 - DNA, 157 bp, Gossypium hirsutum
  Clone ID: LIB3149-003-P1-K1-C7
ggctgcaatgccaaggttgcaagcacgtttcacaacatccgatcaaaaggtgcaagcactgggaaattgttgaaaacaggaggggaaaagaacatttttggtttaaactgttattcagggatcttggttgtttgctttatttatatggtatttgaac

SEQ ID NO: 32457 - DNA, 389 bp, Gossypium hirsutum
  Clone ID: LIB3149-003-P1-K1-D3
tggccgagttgttagaagtggaaagagttggtgtatgccatcaagctggttcggatagtttgctcacatcatgcacatttaggaagttgagggataactttttcaaatcagtacagaaatatgcaggtgtactgtatggcttagaggtcgagggcgggcagaattcggattaaaagagaaaataattgggaaaaaggatgtagactactaagtgtgtgagacttaattttatttgtatacattggcctaagaagaaagattgttgatttagttgtgactttttctcttttgcttgcattgtaactaaaacctttaactggtgttcaagttaaagtccagtgtaaattatgcagttagtgtttcaataataattgtaacaattcccatct

SEQ ID NO: 32458 - DNA, 411 bp, Gossypium hirsutum
  unsure (1)..(411): unsure at all n locations; Clone ID: LIB3149-003-P1-K1-D8
naaaaaaaaaaaaataaaaaaaaaaaaaatttattaaaaaaaaaaaaaaaataataaagagggggtcgtgtctttatagcgggggcgcgagcaaactatatacatacattataacgtctcccttttatatatcgctacccttcttcattcaacttcccgactttttatatccttttttcttataaaaaactcttttttctcaacatacttttttttcttcttattcatatatctttagttttcctaaatataaataagtccaacccctttcttctattctaatgttatgcatcttttcattataatttacacatcttctcttcttttattttttctcatcaccactaaatctttttttttcccctctccttataatcttatattctttatttttctatctctttctatttc

SEQ ID NO: 32459 - DNA, 452 bp, Gossypium hirsutum
  Clone ID: LIB3149-003-P1-K1-D9
acaatgactgtaatttgggtcacaggtaccaaagagaggaagcaaaaatccaagcttgggtgaaccttcaaaatgcaaaagcagaagctcaatcaagaaagcttgaggtgaaaatacaaaaaatgagatcaaagttagaagagaaattaatgaaacgaatggcggttgttcatagaaaagccgaagaatggagagcttcagcccaacagcaacatgctgagcaaatgcaaaagccaaacaacattctgattagtaaccgaagtaacttgcaattttcaggcaacatttcatgtggttgtttcccttgcaataacagccgctaatccaatgttccattgagtgtaattccaaaaccccattcttgcaaagcttttttatgggagaaaaaatcacaccatcaattttgttggcaactgttggcatgaaaattgtatcatatcggaaaaatttta

SEQ ID NO: 32460 - DNA, 334 bp, Gossypium hirsutum
  Clone ID: LIB3149-003-P1-K1-E1
gaatgttcctcaaatcaccgaacatcgatggcaatgtacaagattaagcttgtagggccgaagggtgaagtgaatgagttcgaagtccccgataaccagtacatcttagaggcagccgaggcagcacgagtagagctgccttattgatgcagagctggagcttgctctatatgtaccgcgaaggtcgtttcgggtacggtacatcaaccagaagccatctacctcgaggacgatcaaattaaggatgggtatatgttgacttgtgtttcaaagccaacctcagattgtgagattcacactcacaaagaacttgatgcttactctccatcaaaaa

SEQ ID NO: 32461 - DNA, 378 bp, Gossypium hirsutum
  Clone ID: LIB3149-003-P1-K1-E3
agactttcactctcttatctagggactcaatatggggcactgaatgcgaactgccggagaggtgtgggaactttggactctgtgaggagaaccaatgcgttgcttgcccgtcaacaaacggattactcggttggagccagaattgtcagccgaagaaggtgaattgtaggccgaatggtttcagctactacctagaaggagttgaccatttcatgagccagtacaacgaaggagaagggataaaggagagtgattgtgggaggaaatgcacctctgattgcaagtgtttggggtacttttaccacagggaaacatccaaatgttggatcgcttattagttgaaaacccttgcttaaacctctaactcttcccatgtta

SEQ ID NO: 32462 - DNA, 422 bp, Gossypium hirsutum
  Clone ID: LIB3149-003-P1-K1-E4
ctttcctaaggttgctgtggaaaggcaactggttcatacaagaaaagagctgcaagatactggccttgatagtaagtgcaaggccaaaaacccaggatggcgttgttgcaaatggagaaaattcaaagaagaagggcactaccattaatgatgtactaaaggaattggttgaatggctgtgcacacagctgaagaagccttcccatcctacttgtggtattccaactgctattaactgccttgcatcattactgaaggaacctgtcgtcagatcttcctttgttcaagcagatggggtgaagttactgattcctttaattactccggcatctacccagcaatctatccagcttctctatgaaacatgcctctgcgtgtggctgttatcttattatgagccagcaatcgagtatttagcaaca

SEQ ID NO: 32463 - DNA, 158 bp, Gossypium hirsutum
  Clone ID: LIB3149-003-P1-K1-E5
gtcgctgaggtccggtcggattccggtcgccccgcgtcgcttttctaggttgctgtggaaggcaactggttcatacaagaaaagagctgcaagatactggccttgatagtaagggccaaggccaaaacccaagattgccttggtgcgaattgggaaaa

SEQ ID NO: 32464 - DNA, 296 bp, Gossypium hirsutum
  unsure (1)..(296): unsure at all n locations; Clone ID: LIB3149-003-P1-K1-E7
caaaatttgagcaggatgaggatgtaaatcttgatgacatagatgctgtctttaatgactcaactgaacaccttgtaacagaaaggaaagagaaacctgtgtcaatgaatgcttttgagcttatctctaggtcacagagctntagtcttgacaaattgtttgaaaggcagtgtggttctgggaacccgaaaccagtttcgcttccaacgccctctaatgaaattctgccaaaatgaggaactgaaaaccttgggcttaatgtacagcaactacagatgagtgaagggacaagtgga

SEQ ID NO: 32465 - DNA, 413 bp, Gossypium hirsutum
  Clone ID: LIB3149-003-P1-K1-F1
aaaaaccagcaaaaaacaaagtgtgtttgtttccttcacagatctgagatccaaaaacctctcatgtcttcctctaagtgtaaagaattatttcaaagatatttattataagagagtaaaagcaagcaaacatgtcaagaaggcaagtaagttccacgcgccgctttgttgacagcggaaacttcccattctctggtgctttacattctaaatcccgatcttctcctattttatctatcgctcttgtcgctgtgggaagctatccttctcattggctatgcctataggggttcaagtaaattccgaggggaagccgttagtcggatcgaaagtgactatacatgcagtctagaagttcaaaaggcaataccatttttgaagaaggcatatggggacagcatgcacaaggtttt

SEQ ID NO: 32466 - DNA, 272 bp, Gossypium hirsutum
  Clone ID: LIB3149-003-P1-K1-F12
agaatcttgcattctgagatgtggaattcacactatcttacacctacgacacctttattttaacactcacatcatggaaagaatgcccctgtattccgacttctttctattagatgccttccatcacccgaggctgatcctactaaagtattacttgcaaaaaattcaaagacttttaattaacaatgacatacttttgggaacaaagaaaaaaaaaattgattggtggttttaccatgacaaaatcaactacaataatgcagacaacatac

SEQ ID NO: 32467 - DNA, 409 bp, Gossypium hirsutum
  Clone ID: LIB3149-003-P1-K1-F3
caggattaagagggttccgactgttgtttcgaattaccagaaggatgagacggaagagactgctcgccgcagcagtgggtgtggaaagaattgccttagaagctgctgcatcccaggagcaaagcttcctttatatgctttcaggaaactgaacaatattgagagtgaaaaagttgtgcttggaattgagaataaagatccccctgttgcttttcttgactcgctcattcttggggagtgggaagatcggatgcaaagagggctctttcgctatgatgttactgcctgtgaaaccaaggtgattcctggtgaatatggcttcattgcccagctgaatgagggtcgccaccttaagaagaggccaactgagttccgcgttgataaagttctccagcccttcgatgggaac

SEQ ID NO: 32468 - DNA, 322 bp, Gossypium hirsutum
  Clone ID: LIB3149-003-P1-K1-F7
gaggaatcgacatgctcaaggagagatcaatgctgggatcaatgtgaggaaaggacagatgactaatatcttggaggagaatgtagtgcagcctttgcttgtaagcacgagtgcaattacactggctacagagtgtgtgaggatgattttgaagattgatgatatcgttaatgttaggtaatttcatgctctggagatgatatgtgtttctctagttatcttttgcatctgttggctatttgaattagtagttatgtttcattttagactcgactatggttagaattatgaaatggcaatctactgccaaatatttgctttc

SEQ ID NO: 32469 - DNA, 326 bp, Gossypium hirsutum
  Clone ID: LIB3149-003-P1-K1-F9
gtttcaaactcagaagttggatataaatgggaaggaagttaaggcacacatctgggatacggctggtcaggagcgcttcagggccgttacacctcggttcagaaatgctacatcgaaatctccaagcaggtcaaggcaaaactaggcaaggtagatgactacttcaacaagctggctgatgctatggggacctggatcgaaacatgggatgagctgaatccatctggtgcaaaatcccgcgagctgtccaatggtgcttcgaagtaagcttggtcaagtagcaacttacatattggttagcaaccctaggcttggttggggatcac

SEQ ID NO: 32470 - DNA, 325 bp, Gossypium hirsutum
  Clone ID: LIB3149-003-P1-K1-G11
acaagaaaaaggtggatgcaaagaacgcgttggagaactacgcatacaacatgaggaacacagtgaaggatgagaagattggtgccaaacttgctgcagcagataaaaagaagattgaagatgcaattgacgaggccatccaatggttagacaacaaccagcttgcagaggcagatgaatttgaagataagatgaaggaattggagagcatctgcaatcccatcattgccaaaatgtaccaaggcgctggtgctgacatgggtggcatggatgaggatgccccagccagtggaaccggcgcaggccccaaaattgggaagtggac

SEQ ID NO: 32471 - DNA, 389 bp, Gossypium hirsutum
  Clone ID: LIB3149-003-P1-K1-G12
gaagaaatgaccttttaggattttaatcgcctttttgtattgcgtattgagccttttgtattctctcttaacgtaaacttttacaattgattctcttcaggctttatagccaagagaagaagagaaaaaaaaataaaatatacaatttttccatttttttctgtctgttattttcttgtatgcatttgctgctgtggtttgtccctttcttcgcaggtacaggtgtgcgctcgggtacggggccgtgtgctggcgcgggcatgactgctgggcggtacggaggccaaggctgaagcttggctggttgcggcgcatgggaaagaaacctagggttctaaaatttctgggccatttgggccaatgtgattttgggtctcgggtttatttgg

SEQ ID NO: 32472 - DNA, 125 bp, Gossypium hirsutum
  Clone ID: LIB3149-003-P1-K1-G4
atcaagattcagggtttttgagtggttttagggatgtcatgtcttttgattttaatacctctggtctgtgggaagaaccctaatggaatatgatgctgtagtcttactttcatttataataaata

SEQ ID NO: 32473 - DNA, 343 bp, Gossypium hirsutum
  Clone ID: LIB3149-003-P1-K1-G8
gcctgcctggctcgaccgacgcgtgcgcgcggttaacatttcgcttcttcaccctatcccaaactcatttacttggcctcttctttctttttctcggatcttgctttctacgtctcagcaaagatctttgattctttctgtctccttttcgttcgctctctgattaaagtgcttttaatggctgctaaaggattttaatccagattgcggggactctgtctacgctggtaggattgtggacttgttacttgaatgtgtggaattgtcctatagaccacgacatttttctcaaggtagaaagcagggatattgtcatgtttgatcactgaagatgctatggtca

SEQ ID NO: 32474 - DNA, 331 bp, Gossypium hirsutum
  Clone ID: LIB3149-003-P1-K1-H10
gaagaacaattgttttttggtgaaacaatttggaagaggaactgctggcgttcgattcagcaaagagcccaacaatctctacaatgtcaactcttacaaacactctggtttggcaaacaagaaaactgtcaccattcaacctgcaggcaaagaccagtctgtactcttagccacaaccaagtctaagaaacagaacaagccttcgagcttgctccataagtctgtcatgaaaaaggagttccctaggatggccaaggcagtcaaaaaccaggtgacagacaactactacaggccggatttaacaaaagctgccctagcaaggttgagtgct

SEQ ID NO: 32475 - DNA, 332 bp, Gossypium hirsutum
  Clone ID: LIB3149-003-P1-K1-H11
gttctatggtgttcttgcttcccttggtctatggcagaaagaggctaagatcttgtttctcggtctcgataacgccggcaaaaccactttgcttcatatgttaaaagacgagagattggttcaacatcagccaactcagtatcccacatcggaagagcttaatattgggaaaatcaagttcaaagcttttgatttgggtggtcatcagattgctcgtcgagtctggaaagattactatgctaaggttgatgctatggtgtacctggtagatgcctatgataaagaaaggtttgcagaatcaaagaaagaactggatgcccttctttccgatg

SEQ ID NO: 32476 - DNA, 143 bp, Gossypium hirsutum
  Clone ID: LIB3149-003-P1-K1-H12
gttctatggtgttcttgcttcccttggtctatggcagaaagaggctaacatcttgtttctgggtcttgataacgccggcgaaaccactttgctttatatgttaaaagacgagagattggttcttcataatcccactcatattt

SEQ ID NO: 32477 - DNA, 135 bp, Gossypium hirsutum
  Clone ID: LIB3149-003-P1-K1-H4
acaattgttttttggtgaaacaatttggaagaggaactgctgtctttttcattgaggggggttttcaacattgagggggttcattattttatcttaaacttttttgtctaactttataatgataaaaaaaattaa

SEQ ID NO: 32478 - DNA, 119 bp, Gossypium hirsutum
  Clone ID: LIB3149-003-P1-K1-H5
tttggtgaaacaaattaataaaggtcttcttctaacttcttgggggggtttaataatgccggcaaaaccactttgcttcatatgttaaaagacgagagattggttcaacatcagccaac

SEQ ID NO: 32479 - DNA, 422 bp, Gossypium hirsutum
  unsure (1)..(422): unsure at all n locations; Clone ID: LIB3149-003-P1-K1-H7
ctaaacaatggttgggctgccggacgtttgaactcgacggttgccggtgaagaaaacttcgtgttcagctcaaacagagttttaaggcaataaataaactcaaacttgtttcatgtttttttatttgttgttgtattcttcatagttaagcccacaataacgtgaatgtttaagggctaagcatagctggcattatatgatttatccattgtttgaagaacataatatcagatgaaagttatgtttatttctttgaagaactaaatgataatttgttaaaatnaaaaacacacaaaaacatttctctttcttttattcttttctctttctttttttttctctttctattttttatttactttttcctctttttttattttcttttttttaatattcttttttatatttaagggggggccctt

SEQ ID NO: 32480 - DNA, 142 bp, Gossypium hirsutum
  Clone ID: LIB3149-003-P1-K1-H8
cccacgcgtacgaccacgcgtacgcttcctctggtaaaaggctcattattctctgtttcgcatttctcttaaaactctacaatggctaaaaactttgcttgctttgtcctaattaactttataatagtgcgcactggcagct

SEQ ID NO: 32481 - DNA, 414 bp, Gossypium hirsutum
  Clone ID: LIB3149-003-P1-K1-H9
atttatggctaggaaagctctcagagcttcctaacaaatatcagaaggatgctctcccaacactgttttatggatttaggttttggatccccgtcaccttgttgaatttttggatggtccctcttcaagcccgtgtagctttcatgtccgtaggatccattttttggaacttttacttgtcgtcaactatgagtaagtagattcaaccgcaccgcaccggaccggacaattgattgattaattcatgtcacatgagctaatgatgtatttttttgttcttgctcccaattttacttcctttgggcttgctttatttaagaggtaccggcttttttggctgggccggtacggtttaccgtcggttttcatatatgataaattggcggtgccttaaaaaaaaaaaaatggaatttt

SEQ ID NO: 32482 - DNA, 425 bp, Gossypium hirsutum
  Clone ID: LIB3149-004-P1-K1-A10
cgacccacgcgcacggccaggacaaaggaaaccaatgccatattttgaagtataaatcaataccaagcggccctaatggtgtcattgatgcatcttttggctttgatagctcatatgattctttttctgtgacatcttcggtctcatcgtcaccccatccactgttcataaggagtatttctcttgaccagtttttgcgtttactttcactaaaccgtatgtttgtggattttcttattagccctcgttaatctttctttgtcttatttactagtactgttaaacattttattagattttcctcatctgcaaatcagtagtaatctttctttaatgtgcaattgatgtgcttcataacctataagtagccgatgatagccaaatgttctaacatggatcaaagatgtactaatatctgctaaatt

SEQ ID NO: 32483 - DNA, 439 bp, Gossypium hirsutum
  Clone ID: LIB3149-004-P1-K1-A12
aaggactctgctgttaatgctatttgttatggggcgaagttgatgattcctggattactgaggtttgagaatgacattgatgttgtggaggaagttgtgttaatgacgacaaaaggagaggcaattgctctgggaattgctgaaatgaccactgcggttatggctacttgtgatcatggtgtgttggcaaagattaagagggtagtttaggacatagatacttatccgaggaagtggggcttggggtcaactgcatccatgaagaagaagttgattgcagaaggcaaattggataagcatggaaagccaaatgacagcactcctaaagagtggttaagaaatgtcgcgttgccaactggtggggattctatggttgccagcctagcagcttctgctgaacctgcggcggtggaaaaggaaaaggaggatggagaggggc

SEQ ID NO: 32484 - DNA, 402 bp, Gossypium hirsutum
  Clone ID: LIB3149-004-P1-K1-A2
aaagtaccaaaagagtactgagcttcttatcaggaaattgcctttccagaggcttgttcgtgaaattgcccaggacttcaagactgatttgcgtttccagagccatgctgttctagctctccaggaagctgcagaggcataccttgtgggtctttttgaagacaccaacctttgtgcgatccacgccaagcgtgtcacaattatgcccaaggacatccagttggctcgtaggatcagaggagagcgtgcttaatttccatgtgtgtggatcagtcgcttagaaagaagaaactattgtttatttttaggcaaatgtattggcttttttgctttttctaatcatcttttaggccatgatggtagtggtaggttcaatgtgatgtgatgatgaagtggggcgtc

SEQ ID NO: 32485 - DNA, 394 bp, Gossypium hirsutum
  Clone ID: LIB3149-004-P1-K1-A7
tttttgtgtggaaaattaagggagaaagggaaagatgtagatcacgtcgttattggtggtgaagtgcaacccagatggacctgatccgatcatattagcgaacgcaactgatgtgagccatttcggatacttgcaaaggtaaagcgtgagggagtttatcgtctttgttgctcgaaccgtcgccaaacgtacacctcccggccagcgccagtcccgtccagcacgaagagtacaaggtacacgcttacaacagaaatggacttgttgtcttgggatttatggatgaccactatcctgttcgaagagctttttacgctttaaaccaggtgcttgatgaatatctgaaaaattttgtggaatcatggagaaccgtgcaagctgatagtactcaatc

SEQ ID NO: 32486 - DNA, 315 bp, Gossypium hirsutum
  Clone ID: LIB3149-004-P1-K1-A8
ggaagcttccaaacccgagtcaggagagggacagcagtgatgagttaagttcatatgagatgtactctgtaatttatgttgcaggttgtacttttacgtacatgcaacgtgggctggtgtagaaggttccttttattttattttttttttatttttacatttatcagtacttggagttgaaattttacattccaatattattatcattcggacatgaatttggttttgtttggtttggtttcaatgttgtaatgctaaattcgagtttattgaatgttaaaaaaaaattatactgttaaaaataattttgtaatt

SEQ ID NO: 32487 - DNA, 431 bp, Gossypium hirsutum
  Clone ID: LIB3149-004-P1-K1-B10
acaagtctcttcaatggtgggtgaagcaaagttgatagaaaatagggtgggaaaacccgtatccacagatgatttatttcgttttattaaatcagtcatttccgatgaacaacaagaagaaacaggcccattttacgtgctggatttgggtgctacgaggtcgctagtcgagacatggttccataatcttcccatggttcaacctttctatgcagtcaaatccaaccctaaccctgctttcctcaaagaaatggcagctctcggcacggtctttgactgtgcaagccttcatgagatcgaaaccattttatcgcttggggtttcgcctgatcgaatcgttttcgcaaacacatgcaaacccgagtctcacatcaagtatgcagctaaagttggcgttaacttagccactttcgactccaactgtgagctcg

SEQ ID NO: 32488 - DNA, 354 bp, Gossypium hirsutum
  Clone ID: LIB3149-004-P1-K1-B11
tccggatatgggtatatatatgttggacatgggtgagagcaagagggcccaccaggttccgctgcttctacacgtgaatacaccatgttcttgttagcattgcttggaggagttgcactctttgtttaggacacttctttttttggtttcgtttactttgatgtagattaagctatttatgagtgtattcttttttccttgttccattttatatctcttatcgtcgattcttggagctgatgcttttgtgagttgtgagggctcttttgtagcagttttactttagcttaataaagagagactttgtgattcttggttgtgttactgtaatctttagtccaattattttcttct

SEQ ID NO: 32489 - DNA, 395 bp, Gossypium hirsutum
  Clone ID: LIB3149-004-P1-K1-B2
cattattggtcctcataatactgtacatgaaggtcgaatctatcagctgaagctgttctgtgataaagattatccagagaagccaccaagcgtccgttttcattcaagaatcaacatgacttgtgttaaccacgaaactggagtggtggaaccaaagaagtttggacttcttgcaaattggcagagggagtataccatggaggatttactgacacagctgaaaaaggagatggcagcaccacataaccgaaagctggttcaacctcccgagggtacctacttctagctctcaagattatcggacatcctggatctaagtgcatttctggtatgcaatatatagcttgtaatgcttgttgatctttaaagaaaatagtggggaatgccccaaaagc

SEQ ID NO: 32490 - DNA, 415 bp, Gossypium hirsutum
  Clone ID: LIB3149-004-P1-K1-B3
gttgggaaatcatgtctacttttgaggtttgctgatgattcatatctggatagctacatcagtaccattggtgttgactttaaaatccgtactgtggaacaggatggaaaaaccatcaaactccaaatttgggacactgctggccaagaacgctttaggacaatcactagtagctattatcgtggggctcacggtatcatagttgtttatgacgtgacagaccaagagagtttcaacaatgtcaagcaatggctaaacgaaattgaccgctatgccagtgacaatgtgaacaaacttttggttgggaacaagtgtgatctaacagaaaacaaagttgtgtcatatgagacagctaaagcttttgctgatgacattgggattcctttcttggaaacaagtgcaaaggatgccacta

SEQ ID NO: 32491 - DNA, 282 bp, Gossypium hirsutum
  Clone ID: LIB3149-004-P1-K1-B4
gaggtcgagagctccgacacgatcgacttcgttaaggcgaagatccaagacaaggaaggcatcctcccagaccagcaacgtctcatcttcgccggaaaacaacttgaagacggccgtaccttggccgactacaacatccagaaggagtcaacgctccatcttgtccttcgtttgcgtggcgggatgcaaatcttcgttaagacgcttacgggaaagaccatcactctcgaggtcgaaagctctgacacgatcgacaacgtggaagcccaaattcaagaccag

SEQ ID NO: 32492 - DNA, 278 bp, Gossypium hirsutum
  Clone ID: LIB3149-004-P1-K1-B7
gcaggttgttgccaaaaccagccaggcctcctccgaaattgaaggataaagttgacaggattggccgccttccttctccaacaaaacctatcccgtttttcactgaagaggaggcatctgcctctcctgctttgtagacagatgctttgtttgttggttgaacagcaagattgatattcataatgagttattttgcaatcaaaaaaaaaaaagaaataaaaaaaaaaaaacaagagagtttcaacaatgttaagcaatggcttaaacgaaatttgacc

SEQ ID NO: 32493 - DNA, 422 bp, Gossypium hirsutum
  Clone ID: LIB3149-004-P1-K1-C12
gtttgtttagatggaaaggctaaaaaggctaaggaagtagtggaagcagtagaccctgagaagaatttggtcactttcagagtgatcgaaggagatctaatggaagagtataagagctttgtaatcacgattcaagtttcgcccaagagcgagggtagtggcagcgtagtgcacttgactttggaatacgagaagctgcacggtgggattgagcatcctgagactctgctgcaattcggtcaagaagactctaaagacattgacggccgagctaaccaagcaagttaagccagatcacatgatgctattggtggccgttactggaagcacttatcatcaattaaaggaataaggggccaccttccttcttcatgtattttgatctgaatatgtacgtttagatcaatatgcagtcacgggga

SEQ ID NO: 32494 - DNA, 119 bp, Gossypium hirsutum
  Clone ID: LIB3149-004-P1-K1-C2
ttaggtgattacattcgtagagagacaaaggacttttgcggagaaagagagacacttcacttaatataataatcagtacaatacatagatataggaaaaaaaaaagaaaagggttagag

SEQ ID NO: 32495 - DNA, 420 bp, Gossypium hirsutum
  Clone ID: LIB3149-004-P1-K1-C3
tggcattttgccacttttccaagctgcatagcaaatacccaattgttagggttttggcgcagcaaccttcatcccctagggccatttaatcatcagttcaccattaaaattggtgagtgacgtagaagccttctttgtttccatcaaaatcgacgcttaaaagccatttccactcgcatctctaaccccgacttcgatagagaagacaaggatctcatcgatgcatccgcgaaggtaaatttctcatttctctttctttttttttagaaaaatgttctaaaagaaaacaaggtacatgcaaaggaaaaaaaatattgaagacgaaaaagattcaaatcaccttctgattttttttgctggttctttgtattgaatttgtgtagtgtgcgtaaaaaaatatggtatggctattacatggct

SEQ ID NO: 32496 - DNA, 349 bp, Gossypium hirsutum
  Clone ID: LIB3149-004-P1-K1-C4
cgtccttcaaaggatcaaatataaccggtgctgatttcacagatgtaccattgcgagatgatcaacgagaatatctttgcaaagttgcagacggggtgaatccaactaccggaaacgcaacgcgggacacattgctttgcaactaggtgaaaattcgagaattgacactgcggctgttattattcgaggtttgtaactattttgctgtaaacggttgtcatattcttttgttgaagatgcatacacttcgatttgtacgacaaagaaagttatataaactctctttatagcctgtaaaaaaaaaagcatgaatagcttggattatacaacattgagttgttattgagaa

SEQ ID NO: 32497 - DNA, 344 bp, Gossypium hirsutum
  Clone ID: LIB3149-004-P1-K1-C8
aaaggttcatggagtgatccaatcgctaggggaagcttgcgacctgattatctgcaacaaccgatgcagcaatatctgggggacattggtgatcgagttctcatattttggatggcacatttacggattcatactttctgactatgaagatgttcgatgcaaacaggcatgaattcacatgcattcgttttgattttgattttgggttggcatcatctgtggctgatagtggaaaaattacaatgctttttttttatccatgtaaagtagtttatatgctatatgttactatcaactctgtccatatcattgcatgtatagcttggattatcccccattgagtt

SEQ ID NO: 32498 - DNA, 442 bp, Gossypium hirsutum
  Clone ID: LIB3149-004-P1-K1-C9
cgattatgttgtatattgaatatttgagattctgatattctattgagtgttggattgaattctacattgcaggtggtagaatgttttgtggtgcagaccaatgtgcaaggctgtcaagtttatatcttaattctcccctctgattggcagaggatcatgttctgttcatgcccaaaaacgatttctagcatatgttgaaaaagccaagactgctggagggttggattcgtcatttcattatggcaatggcagaaacggtaaagagaatgggccgtgccaataataacgactgctgtagttatgtaaagagaatggagcctgccaataataatgaagcatgtaagcactaaatctgcagttcaaattcgaagccatgctcaaaagttcttctctaaagctcattgctttgagttcattacaagatttccttgattaagtaaat

SEQ ID NO: 32499 - DNA, 382 bp, Gossypium hirsutum
  Clone ID: LIB3149-004-P1-K1-D2
tggcaacgatccaatcgcttttagaagctttagacctgagtatcttcaagagcccctgggggagtatctgggggacattggacatcgagttctcatatcgtgcatggcacatttactgattcatactttatgcctatgaacatgtgcgatgcaaacaggcatgtattcacatgcgttcgcctagactacgattttggcttaccatcatctgtggctgatcttggaaaaattaccgtgctttattctcattcactgtaagtggattatatgctatttgtcaccattaaccatgtgcatatgaatgaatgtgtaggcttggattttccccattttgttgtattttgaaaaaaatgcttttctttttaactaaaggccttttttt

SEQ ID NO: 32500 - DNA, 385 bp, Gossypium hirsutum
  unsure (1)..(385): unsure at all n locations; Clone ID: LIB3149-004-P1-K1-D3
acaaaacgcagagcaaccaaaagcagataaggtgattgccactttcgatttctataatcttttctctttttttgctgttatttacttgaatctttcatcatttttttttaaaaaaaagagaaaataaaaggaaagggatgggatgagctttaccttgctttagggccatcggttttcttttgctccatcgaaatcggagttttaaggggagcttagaggctacaaggtagcccttcaaaacccgaactggtcgagtgctgcgtgtgaaggcagatcggcgctagtgctaaagaggtagggatcggctaaggagaaaaggaggggtaggctagggttctggaatggctttggaataaaggcattgnttagcctttgagagcagata

SEQ ID NO: 32501 - DNA, 384 bp, Gossypium hirsutum
  Clone ID: LIB3149-004-P1-K1-D5
acgttttaccggacggtactctctgcgacttcgacgccgatgataagctccagcaggtgtccgtacattccctggctgccggtaaaaaggttatcatctttggcgttcccggtgcctttacccctacttgcagcttgaagcatgttcctggattcatcgagaaagcaggggagctgaaatccaagggcgttgatgaaattatttgcattagcgtgaatgatccctttgtgatgaaggcatggaccaaaacttaccctgagaacaaagatgtcaagtttctagctgatggttcagcaacatacacccatgcccttggtcttgagctcaaccttggcgataaaggtctcggcactcgttctaggaagttcgcactcttggtcgatg

SEQ ID NO: 32502 - DNA, 415 bp, Gossypium hirsutum
  Clone ID: LIB3149-004-P1-K1-D6
gacccacgccgttcgcacatgatcctatggctgtcgaacgctgttttttgaagttttaccagcacggtactcttctgggacttctgcgcgcgatgataagctacaacaggtgatcgtacattcactggctgcctgtaaaaaggacatcatctatgcgcgctccgatgcctatacccctactcgcacctcgtagcatgttcctggatttattgagaaagcatgtcagcttagatccaatatcgatgatgaaagcccatgtactggcactgcttatattagaggtcggatgcttttcaatacttgccatagtgcaaacatggtaaggaccattatagttcgaaggaactaccttgactacattaagatataccaaagatacgaaataaaggcactgcaattattccaggttatatat

SEQ ID NO: 32503 - DNA, 307 bp, Gossypium hirsutum
  Clone ID: LIB3149-004-P1-K1-D7
tacaaaacgcagagcaaccatattcagttttagtgattgccactttcgattgctataatgtgatctctttttgtgctgatatttacttgaatctttcatcatttttttttaaaaaaaagagaaaataaaaggaaagggatgggatgagctttaccttgctttatggccatcggttttcttttgctccatcgaaatcggagttttaaggggagcttataagctacaaggtagcccttcaaaacccgaactgttctagtgcttcgtttgaaggcagatctgtactagtgctaaaaaggtatggatcgtc

SEQ ID NO: 32504 - DNA, 206 bp, Gossypium hirsutum
  Clone ID: LIB3149-004-P1-K1-D8
atgtaaccgttgttcacggcaccatcacaggtgtggatatcagtatgaacacccatctcaaaactgtgaaacttacattgaagggaaaaaatccagtgactatgcatcacctcagtgttaggcgtaacaatattcgctactatatcctgcctgacagcttaaatcttgaaacattgctggttgaagagacaaccgaggtgaaacca

SEQ ID NO: 32505 - DNA, 418 bp, Gossypium hirsutum
  Clone ID: LIB3149-004-P1-K1-E1
ctcttttacgtggtatcctttattggattgctcaactccttggctcaaccgtcgcttgcctgttacttaagttcgccactagtggcctgggagtaccagctttcggactatcatccggcgtgggagcattaaacgcgttcgttttcgagatcgtgatgactttcggactggtctacaccgtctacgccacagccgtcgatcctaaaagaggcaacttgggagtgatcgcaccgttggcgatcggtttaatcgtgggagccaatattttagccggtggggcattcgacggagcctcaatgaacccagccgtttcatttggaccagccttggttagctggtcctgggaaaaccactgggtctactgggctggaccacttattggtggtgggctcgctggtctcgtctatgagttcatctt

SEQ ID NO: 32506 - DNA, 434 bp, Gossypium hirsutum
  Clone ID: LIB3149-004-P1-K1-E10
cacactctctggtcacagatgtcatcatgatcttgagactgcaagaatcaatggaatgttaggaaatattgatgcatacactggggatcctcaagatggttgggacacagatcagttcttgactgatgtcggggaggcaaccatgattatgctaagtgtgataagaaatggaggattagcaccaggaggcttcaacttcgatgcaaaattacggagagagagtacagatgttgaggacttgttcattgctcatattagtggaatgtacaccttggctcgtggactccgaaatgctgctaaactgattgaggatggttctttggctgagcttgttcgtaaacgatattctagctttgacacagaacttggtgcccagattgaggctggttaagctgattttgaaatgcttgagaagaaagccatggaaatgggag

SEQ ID NO: 32507 - DNA, 393 bp, Gossypium hirsutum
  Clone ID: LIB3149-004-P1-K1-E11
gttgactcagtaaaggttgaaaagtatcactttatatgcaccatgtcgacaagtactcgggctgctcacagagcttacattgtgcaatctagaccgttgtctttggtggttgcaccaagcctgcaaagacatctccaaaatgtcatgaattatatatctgacatatagcctcccctaacagtgccatctgagttgaccaatctatctattctctcatatggatctgcaattcctcttgttcataggcctcgtcttatgctacgtggtgatgatggacctgacctgaaacataagggaccaccagtgacgaacgagctcgagaattgagcagaacatcacatcaggcaactcaaatgcgcgttcggatcctagtaccttgacatgagcagaagc

SEQ ID NO: 32508 - DNA, 67 bp, Gossypium hirsutum
  Clone ID: LIB3149-004-P1-K1-E12
ttccccaatctccaaacccgcaaagagccatggccaccaggaggaaaaaagcagaagaagcctaccg

SEQ ID NO: 32509 - DNA, 387 bp, Gossypium hirsutum
  Clone ID: LIB3149-004-P1-K1-E2
ggcaaacagctcaatctctctcccgcttcctttcacagttcaacaactgctgcctctctttctctcacatttttgcttcaaccattacctctcctcaacatgaagctcgtcaggtttttgatgaagttgaacaatgaaacagtgtcgattgagctcaagaatggaaccgttgttcacggcaccatcacaggtgtggatatcagtatgaacacccatctcaaaactgtgaaacttacattgaagggaaaaaatccagtgactatggatcacctcagtgttaggggtaacaatattcgctactatatcctgcctgacagcttaaatcttgagacattgctggttgaagagacaccgaaggtgaaaccaaaggagccaacagctgggaag

SEQ ID NO: 32510 - DNA, 415 bp, Gossypium hirsutum
  Clone ID: LIB3149-004-P1-K1-E3
gccggaggaagcgacgagagtgacacgtagtattatgatcgtaaagccgcctggttaccagagcggatcgcctccggtttcgccggccggatcgacccctccggtatctcctttttccggaggcagagaatcatatcggtttcggagaaggtccacatcggatgcatacgagaaggctaacgaggttggaccaaggagcccttgtcctcctccttacgacgtgtgagatatgagtcctctcccatatttggcgacaaatcaaatgggttttggtactgtttgcatgcttaggtctttcaaatgtgtaacttaatagtgtagtatggggtgatgtatgcaagaatgtagtctggtacttgtgtatatagagcttgtaatagtacggttcggccgttgtttgtcgggataagatttc

SEQ ID NO: 32511 - DNA, 361 bp, Gossypium hirsutum
  Clone ID: LIB3149-004-P1-K1-E5
aaccattcaccgccacctactgtcacattttgcacctttctcaccacatccacctcctggaccaccagcaccatgtgtagagtacacgccatcaccctcacccgcaattcattacaaaccaccttcatcaccttcacccccaccctccaccaatccattatcattcacctgcaccaccatcacctgcaccggctcccgtatacgaagggccactttcaccagtaatcggagtatcatacgcttcaccttcaccgacacctttctattgattctttcaagaatttccctctaaccctgattaaaaaaaaccccaatatagacgagaaattctctcccataaattattttgatattttggagt

SEQ ID NO: 32512 - DNA, 153 bp, Gossypium hirsutum
  unsure (1)..(153): unsure at all n locations; Clone ID: LIB3149-004-P1-K1-E8
atattttctaatctgcccttttatatattatgatgattgccaaaatttttgatactgtgttcacttgtagcttgttggttatgagttaaaattttaatagagtagttttttattttatggcatgacattcacttgnagtcttgtgtttgggtg

SEQ ID NO: 32513 - DNA, 384 bp, Gossypium hirsutum
  Clone ID: LIB3149-004-P1-K1-F1
gttcgtgctctcagatacacagatccaaattattccttcgtcaaacaccctttctccggtcttctcacggccaaaattttaaacagcgatgtcgggaaatgctaaattgcggcggtcggtgatgttccaggcggtgctattagtggtattgatgttagcttcgagtaatgctccggtcggtgacgccatatggttgaacgttcctccgactggcactaagtgtgtttcggaggaaatccagagcaacgtcgtcgttttgtctgactacgtcgttgtttccgacgatcacggtcacgtccctaccatttcggccaaggtgacattcccttatgggaacaatcttcatcacaaggagaatgtgacacatggtcaattcgcattcac

SEQ ID NO: 32514 - DNA, 409 bp, Gossypium hirsutum
  unsure (1)..(409): unsure at all n locations; Clone ID: LIB3149-004-P1-K1-F10
gacccacgcgnccgcgaaagcggaggacctttggattgacgtgcacagngnacgccacagccgnggancccaaaaagggaagctngggaacaagcgtaccanaggcaaagggcnncatcgngggggccaacattttggcaggaggtgccttcgatggagccttaatgaacccatctgtttcattcggtctagccttggttagctggacatgggacaaccactgtaactactgggtcggaccccttatcggtggtggtgctgctggtctcatctacgagttcatcttcatcagcaacacccacgagcagctcccaaccaccgattattaagcctaatcagggtttaattgatttgtctgtcactttgaaaccggattttctccgatcacatttgagtctcctatctcttt

SEQ ID NO: 32515 - DNA, 327 bp, Gossypium hirsutum
  Clone ID: LIB3149-004-P1-K1-F12
ccggattctctcttcatctggcactggtcaaaaccctaattatatattgttatttcctattttgtttcatataattttgcttttcaatggccaacagtaatctccctttatttttattattgttctttatttttactcattgtaccttttatttgaattagtgctttaacttttttttttatattcgatattataatgtgatgattctttgttctacacagtcttcatatttttgaggggttttcaagttggaactttttttgcctgaagaatattccatggccgctcccaaggttcgatttcttacaaagatatatcatcctaaca

SEQ ID NO: 32516 - DNA, 406 bp, Gossypium hirsutum
  Clone ID: LIB3149-004-P1-K1-F2
caaatttacagtattgctaatgccaaatggatcagatcggattacatcccatcccctgcaagaactgcagccaaccaagatgatagacgatcctgaaatcaaggcctggttggctttgggaacaaagacaaagaagaaaggtggtgggaagaagaagaaaggtaagaagggtgataaagctgagggtggagccgagggtgaggccatggatgcatcgacaaattgtggtgcatcataaggaaacaataataaaaatgtttttgcgcatattttctaatctgcccttttatatattatgatgattgccaaaatttttgatactgtgttcacttgtagcttgttggttatgagttaaaattttaatagagtagttttttattttatggcatgacatccacttggagtc

SEQ ID NO: 32517 - DNA, 397 bp, Gossypium hirsutum
  Clone ID: LIB3149-004-P1-K1-F6
gattcccggtcgactacgcgtccgcgcacaatcaccagattggtgctttggctgttgccttgaaacaatccatgtcacctgggttcaaggcttacgccaaacaagttaaggccaatgcagttgccattggaaagtaccttatgagcaaaggataccagcttgttacaggaggaaccgagaaccaccttgttctttgggatctccgacctcttggattgactggcaacaaggttgagaaactctgtgacctgtgcagcatcactgtcaacaagaatgctgtatttggtgacagcagtgccttggcacctggaggagtacgaattggtacccctgccatgacttcgagaggtttggtcgagaaagacttcgaacagataggtgaggttcttcaccgagc

SEQ ID NO: 32518 - DNA, 275 bp, Gossypium hirsutum
  Clone ID: LIB3149-004-P1-K1-F7
gttatggtggtgccggttctgcaagcggttcaggtcttccatgagttttgtgagtttaggttgaatggcacttcctagttcattttggggtgtgcttttttgcactcaaatgattgagattatctatgttcttttttcccccttgtttttgatgcttttgttgcattgattttccttgtttgaattagacagtaaataccgaagttgtgcagctcaatttcggaagaaacattaattattataatatataatgaaatcagtatctttggcatttt

SEQ ID NO: 32519 - DNA, 148 bp, Gossypium hirsutum
  Clone ID: LIB3149-004-P1-K1-F8
atgacattgtacactaggaaaagtgcaagcttggtagcagttacaaaattttattggactatatagttgatgttgctctgagattcctttttgggatgttagaaccgtatttttttgcagacaatgtagcacaatttactgtcttgtc

SEQ ID NO: 32520 - DNA, 250 bp, Gossypium hirsutum
  Clone ID: LIB3149-004-P1-K1-G1
aaaagagagccgggaaaggatgctagatttatcatagcgaaaatgaatactggactttgcggcgagtcaatggacatacccgatggctgttaggagttatgttaaggctaaaggattcacattatataggttcttttgtttgtctagctattgatgcttataatgcattaatttatgcttgtttgtattttacattttatactctatagttgatcgttttaagtttttgttgtaacactatttatggtaa

SEQ ID NO: 32521 - DNA, 449 bp, Gossypium hirsutum
  Clone ID: LIB3149-004-P1-K1-G11
gattcctactgcctttgatccctttgctgatgcaaatgctgaggactcaggtgccggtgcaaaggagtatgtgcacattcgtatacagcaacgcaacggtaggaaaagcttgacgactgtccaagggttgaagaaagaattcagctacaacaagatactcaaagacctgaagaaggagttttgctgcaatggtactgtggtccaggaccctgaatgagggcaggttattcaactccaaggtgaccagcgcaagaatgtctcaaccttccttgttcaggctggcattgtgaagaaggaaaacatcaaaatccatggtttctaaattgcatctgcttatggttttctgctaagtcacccgtgcctcgtgtcaaagcaggaaacacaacttgattacaacttgattagaatctatatagtgttatgttttctttatgttggtttgataaaaa

SEQ ID NO: 32522 - DNA, 379 bp, Gossypium hirsutum
  Clone ID: LIB3149-004-P1-K1-G2
gttggccaagaagcacttgtagaagcataacgtgcgatactggcttctagtgattgctttcaacatggacagatctgcctatgaactgcgcttcttgaatattgccgagcatgaacgggaggaggaagaatgatgaatcagctacacatttctaaaacctagattactggtacattacgtcttaggatcactgtggacatccatttaaggtgtcagagtgcagatttgccacttcagaccgtactgtaacctgcaatgaagaaccgaatgctgatagttatgaggtcaatcctgatatgatatcacaacttgaagcagctggtctatcatttgttggcagagatgaaagtggtaggcggatgaagattgtagaactacc

SEQ ID NO: 32523 - DNA, 273 bp, Gossypium hirsutum
  Clone ID: LIB3149-004-P1-K1-G4
gcagctcgtcctgttaaccgtcacgcctaacatgccttcacacatgactgtacgtatgacgatgaagctggccaagaagatgaggcagaacatgccgatccactagcggatccgtatgcgcaccgatatcaccattaggtacaccgcgaagcgcaaggactggcgccggacctagctagggacctaagctggatgcgccgctttaggagccttgtacgcacgcaaagacttgcgcataggtctatttcatggaatattgaaggggccttggac

SEQ ID NO: 32524 - DNA, 374 bp, Gossypium hirsutum
  Clone ID: LIB3149-004-P1-K1-G5
cagatatcatgaattgggcaaaccggatagtcaaaagtacaggaagaagtactcaaagagaaagcttgaaggataaaagcctttccactggactgttcttcctcgaacttttaagtgctgtggagcctagagtggtcaactggaaccttgtaaccaagggtgaaagtgatgaggagaagaggctgaatgcaacatatatcataagcgtggcacgaaagcttgggtgttccattttcttgttgcctgaagacatcatggaagtgaaccagaaaatgatccttacattaacagccagcataatgtactggtgccttcaacacgcagcggaagaaggtgaggtggctctatcccctgctaatggcaacggaagcact

SEQ ID NO: 32525 - DNA, 243 bp, Gossypium hirsutum
  Clone ID: LIB3149-004-P1-K1-G6
gttatgatgccataacttcattgtttttatgtgttttcatttgcaattttaatttctgcgagggggatagatatagaataagtttaatacttttcttcaagtgttgttagaagtttttttataactccaaagaacatggaaagacttgtattatttagctcgttaatttattcccttgcttatttatcaatttattaatatgagccccatttcatatttgtaccgtaattaaatcatgttttt

SEQ ID NO: 32526 - DNA, 340 bp, Gossypium hirsutum
  Clone ID: LIB3149-004-P1-K1-G8
tcttgctgtcctggacatagggggtaacgttgtggaaacaaaggggcgatcattggaagaaatagagcttgatctgaatgcgacgacttaatttgtacaatatccaaaggtatgcagaaataatctctgaagctggttaatgctcatctcatgagcattccattattttgcatcttttggttaaggccagagagaggcaactagttctagtgacgtgtacgtatacctatgttgcttgaaatatggaaagaagagacttttggtagttcgaagcttgacggttatgaaatgcaagatgttgcgtaagactattaatccccatgtacacgctttaagcgtg

SEQ ID NO: 32527 - DNA, 445 bp, Gossypium hirsutum
  Clone ID: LIB3149-004-P1-K1-H11
tggtgttggaatcggatcaattctgcttcttggcctagcagggttcttgttctggttcgtcaaacgtcaacgccaagcttacaaggtcaggccaatagctactgcttcaccaccaccaatgccaccattcaatctgaaacctttctcggattcaacaacttacacttcaaactcctggtctgtttcaatatcttcccaaggggttcgtcatgcaatcgaatccttaactcgttacaagttcgaggacttgaaagctgctacagggaactttagtgaatccaacaggattaaagggtcagtttttcgaggttctttccaaggtgatgctgctgctatgaaagtaatgaacggggatgtttcttcagagatcaatttattgaagaagatcaatcacaccaacattataaggctttcaggtttttgtgtacatgaaggaaacacatac

SEQ ID NO: 32528 - DNA, 440 bp, Gossypium hirsutum
  Clone ID: LIB3149-004-P1-K1-H12
gcagcaccatgtaagaagaactaaaagcgttgtgaggtttttttccccttaattttctagggaaacaaacaaaaccatggatgattacacgatagagattatggatttgaaaaccctggttactcgaaccctagagaagaaaggggttttagctaagatccggtctgaactaagggctgatgtctttgaggcaatagaagaggaagatcgagtaatttaaaaagaggagagtttacctcctgcattattggtaagttgcaatgatcgcgctatacgacttcatgcttctccttctggaagattgttaactgcactagtgtgtgagtacttagactgggcgcaactaaaccacactctaaaagtgtaccagccagaatgcaatttgcaaaaagactcctggaaagctgagttggaagactttagcggcaaaaatggttatg

SEQ ID NO: 32529 - DNA, 428 bp, Gossypium hirsutum
  unsure (1)..(428): unsure at all n locations; Clone ID: LIB3149-004-P1-K1-H2
gtttgggatcagctcggtgtacttgggattcgctggtgtgtgcgctcttgctgtcttgtacatagctggtaacgctgtggaaacaaaggggcgatcattggaagaaatagagcttgctctgaatgcgacgacttaattcgtacaatatccaaaggtatgcagaaataatctctgaagctggttaatgctcatctcatgagcattccattattttgcatcttttggttaaggccagagagaggcaactagttctagtgacgtgtacgtatacctatgttgcttgaaatatggaaagaagagatttttggtagtttgaactctgttggtttatgaaatgcaagatgttgcgtaagaaaattagtcccatgtacaacgctttaagcgtgaaataantttattaaaaaaaggaaggaagataatgagatgat

SEQ ID NO: 32530 - DNA, 206 bp, Gossypium hirsutum
  Clone ID: LIB3149-004-P1-K1-H3
caaatatacaacgcctaaccctgtttaatatgagcgtacagaatccggtcatccagttttgtagcttccctatcatattggatcagcaagcatctataccatactgaaagtctttgttttggcattaattttatcttattaaattcctaataatccctgtgacattgattttatacatcaaatgatatcatagtttctatggcctc

SEQ ID NO: 32531 - DNA, 398 bp, Gossypium hirsutum
  Clone ID: LIB3149-004-P1-K1-H4
cccaacacccccaaccaaagcaccaacttcagcaccagcaccgccaactaaagcaccagctcccccatataagcccccagttcctacacctccagttaagccaccaacaactccagcaccgtcttacaagccaccaagtccaccattgccacctgttaggacaaaaaaggattgcatcccattatgtggacaaaggtgcaaattacactcaaggactaacctatgcttgagagcttgcatgacatgctgtgacagatgcaaatgtgtcccaccagggacatatggcaacagggaaatgtgtggcaaatgttatactgatatgagaacccaccgcaacatgcacaaatgtccttgaaaagcccaaccaaagcccccaaaaaacgacacttcttgagtat

SEQ ID NO: 32532 - DNA, 414 bp, Gossypium hirsutum
  Clone ID: LIB3149-004-P1-K1-H6
cgttgagtcagcaagtagagtatttcaaggagtaccaggcaaagctagcagaggtagctggtagtagcaagtcagcagccatcatcaaggatgcactctatgtattgagtgctggaagcggtgactttctccagaactactatgtcaatcctttggttaaccatgcctatactccagaccagtatggctctttccttattgatgccttcacaagattcgtccagaacgtgtatggcttgggagcgaggaaaattggtgttacttctcttcctccgttaggttgcattcccttagcaagaacattgtttggttaccatgagaagggatgtgtgagcaggttcaataccgacgctcagcaattcaacaaatagctcaacgcagcaacaaccaatcttccagagcaacaccctgatc

SEQ ID NO: 32533 - DNA, 397 bp, Gossypium hirsutum
  Clone ID: LIB3149-004-P1-K1-H8
gaaagcaaagttcctttcctgggcatctgccttgggatgcaaatagctgtagtagagtatgcacgttcggttcttggcctgtatgatgcaaatactgaagagtttgatcctcaaacctcaaatccttgtgtcatatttatgccagagggttctaaaactcatatgggaggaacaatgcgtctgggatcaaggaggacttacttcaaggttcctgactgcaaatctgccaagttgtatggtgatgcaacctttgttgatgaacggcatcggcatagatatgaggtcaatcctgatatgatatcacaacttgaagcagctggtctatcatttgttggcagagatgaaagtggtaggcggatggagattgaagaactaccaagtcattcatattttattg

SEQ ID NO: 32534 - DNA, 286 bp, Gossypium hirsutum
  Clone ID: LIB3149-004-P1-K1-H9
gccactcactctgctacctttgatataactggcttggtgctgtcggccttattgcggtatgccttgcactacagcttcatgtgtaatgttgccccatgttaagaaggttttctggaccttttttgttatgtttggtatatgcggagatccattgaaccttgtgggatatacggtggatattaataaatttacaacgactgacttggaagacattggtgtgcggctaagagtagctctttcataaacttataaaagaataataatataagttgctttgaatttgaat

SEQ ID NO: 32535 - DNA, 325 bp, Gossypium hirsutum
  Clone ID: LIB3149-005-Q1-K2-A2
gagcaaggttggagttcaccactacaatggaaacaacgtagacttgggcactgcttgcgggaaatactttagagtgtgctggctcagcattattgaccctggtgactctgatattataaagagcatgcccggcgatcactaagctatggggggataacttcctaggtgctgatttagtttcaatttttggatgtctaaaaacattgcagatgttaaagacaaacttattctgaaattcataactttctttgtagcgtttgtgggacagagatggtattggcccatgtattaatgaatttttggagtggatttagcttaaaaatct

SEQ ID NO: 32536 - DNA, 132 bp, Gossypium hirsutum
  Clone ID: LIB3149-005-Q1-K2-A4
tatctatgtcgcgagtgtactctacaatttattcaacctggcctacgccttccttcaagggcacttttacagcttggacaggggctacatccattctactcttcaaacgtttcaaaacctaatcgtaccttc

SEQ ID NO: 32537 - DNA, 366 bp, Gossypium hirsutum
  Clone ID: LIB3149-005-Q1-K2-A6
aaatggcattacgacaaagtcaagcaccgatgatgcaactaaatcggttgggtaccgacgaaacggtagcagacgcaaaaacaagcctcgacgggctgctgaggctgttgtcgagtgcaagtaatgcttgtgagatcatgtatggattgagatgtttcttgttgttacatggtatttgttttttggggttccaaggattccattttgataagtttgcagtacatgcttgtaatattccatggtgtcatcacaaattttaaaaagaaaactagtgattttttttttctctgagaaaatcttgttattcaaatgaaaaaattgttctctgcaacatttggtagggaccctggttttatatctatcttg

SEQ ID NO: 32538 - DNA, 421 bp, Gossypium hirsutum
  Clone ID: LIB3149-005-Q1-K2-B1
gagacaaagtcaggtggtgttaccgcatcgaaggagtcaaccatctccagaagtgccggcacctcgttagccagtaccttgacgccacccgcggcattggctggggcaaggatggccgccatccgtccctccacggtccgaaggttgaggaggttgagtcagaatgagtggctgcattcagctaaagaagggactgagtttggcatgcagaagtgagggacctgaataactgctcaatgatatggctgttattgctgtttttattgtaagagtgtttagaatccaaaatcttgctatccataaccgtacatcaggtaatgaaataagtttgtcgtcatttccctgttggattgctgatgtgataagatttagaagacaatacatattttttctgctatatttgagtgactattagaatttg

SEQ ID NO: 32539 - DNA, 95 bp, Gossypium hirsutum
  Clone ID: LIB3149-005-Q1-K2-B2
gaggcatgctcttgagctgtcgcatattggtgcgcaggaagcacatctatccatgtagcggctagcataggatctattgagtagcatcccacgtt

SEQ ID NO: 32540 - DNA, 295 bp, Gossypium hirsutum
  Clone ID: LIB3149-005-Q1-K2-B3
gacacaaactaaaatgctatggaagaactgttcctcgatcaaatgagatacagattcagaggggtgaacaccaactagcattgtcattaaaaatgcattatgctgaaagtacgatagatatttcaatatcgttaatgtacccactttgataggaaagaaagcaaaagagtaatattctaacggctgaaattcgtgcatataatcagatcaatgtatgctatatgtgctttgtcgagaaattatattagagtagttcctttcaattttgcttaacttttcttattaccaaacttag

SEQ ID NO: 32541 - DNA, 340 bp, Gossypium hirsutum
  Clone ID: LIB3149-005-Q1-K2-B4
aaataagttggctaaatggactgctcaagcgattttagccagtgctgatttgatgaaagtgggatatgtgacaagagtgcatcctagggatcattttaaccatgtgatattaggtgttgttgggtataaaccaagagattttgcttcccaaattaatctgaatacttcgaatatgtgggggatcgtcaagtctattgtagacttgtgtatgaagttgaatgaagggaaatatgtgcttgtgaaggatccatctaagcctcaagttaagatttatgaagttccagctgatgcttttgagaatgaatatgttgaagaaccattgccagaagaagaacaggtt

SEQ ID NO: 32542 - DNA, 414 bp, Gossypium hirsutum
  Clone ID: LIB3149-005-Q1-K2-B5
ggagattaccaaagttgggttcaagggaaaacattcaccgtaagcgacacacttgtgtttacctacggtggcaggcactcggtggaggaagtatccaagagcgactacgataattgcaacaccggcaatgctattaatcctacggcgatgggaacactgtcatcacactgtccaatccaggggcaatgtatttcatatgccccaccataggtcactgtgctggtggcatgaagctagccatcaatgttgtagcagctagtggcaactcaccctgcaccccctctactgcgtctggttccaccactccttccgggactccccccagtggtggtacaacaacttctcccccgtcaacacctagcggagctccgagcaccgagaattatggttttatggtagccttgttgggagccg

SEQ ID NO: 32543 - DNA, 409 bp, Gossypium hirsutum
  Clone ID: LIB3149-005-Q1-K2-B6
gaaaatggaagtttcatctttacgccattggaaggttatcccaatcctgcttatgacccttcaattcactactaacatggtcttgagcttaattgatgcaccatttgacaaccaaagaaacattgagtacatcaaatcttcatgcagctccacaacttatcccagactgtgctatcgctcactctcaatctacgcaaacaaaatcgacaccagccccagattgttagtggatactgccctcaatgttaccctcaaggccagcaaatcaacttcaaggttgatggtgaagatctctagaatccacggtttgaggcctatggtagctgctgccatggcagattgcattgaggtgatcggggactctgttgatgagctccaacagtctatagaggaacttggtcacgttagc

SEQ ID NO: 32544 - DNA, 147 bp, Gossypium hirsutum
  Clone ID: LIB3149-005-Q1-K2-B7
taaaataccaaaaggatcgtccctcctttacccggcaccaacacctttacacaggcgtcgtcaatcaccatagaggggcattctcacctcaaattctacccaccataacacatattttaaccgttttcatactccacctaagaactg

SEQ ID NO: 32545 - DNA, 362 bp, Gossypium hirsutum
  Clone ID: LIB3149-005-Q1-K2-B8
agaacccacgggtttaatatgaggctttcagaagggaaacaaattctattgctggttatccgaagactgctgcacggccaccgcctaaggtgccatcaggtacaaccaactcttatgcttttactcaaaactactgaaccggtaggtatgcatgcctgtttgttacaccatttagctgatgccggattttttcttaaccctcctgttttgtacagctaaaccagggagaatcgttggatctgtcgtaccatacgagaatgggaaaaacactaaagatggtttcgattctaaaatcttttacagacacgcaatacttttcttcgcagaacatatccccccattgttttttccgaaccaccacc

SEQ ID NO: 32546 - DNA, 404 bp, Gossypium hirsutum
  Clone ID: LIB3149-005-Q1-K2-C1
gtggctcgcaagaacggaacgcgtggacccgttctgactggcccaactggataacaaagccttggcctgctacatggatgtgaatgcgatcataaatgggttgcttatgtacacatatgtttactgttgtagatattgtgcctaggactcatttcgacggcatgttcaagcacttgggtacctgcgttctctacaacaaaaaatatcaagctgagatagttgaagaagtaccatacttgaactacttctcgctgtttggattcttgccgatgcatatgaaccccatgtgtgccgtgattagaagctctacaatgaaagttaaatatggagcagattatacagatgggtgggtgatgtttggcatgagattatctggaatgttaatccctggaatatgaaacaat

SEQ ID NO: 32547 - DNA, 293 bp, Gossypium hirsutum
  Clone ID: LIB3149-005-Q1-K2-C2
gtcgatcccgagaactatataaatcaatcttttcatgaacctgccaatcggctgccacgggcatcacctctatgatcaggggattgccatacccaatcaactactaggtattttaaatgttatgcagtcgggatttcaagtttgcgaatatcttatcaatacgtaactgctattacgactgttctaccctttcttagtctgacattatcatcacttaaatctgcccacacttgaatgattggttgtatctgtgaaagattatacttgaaaaatatgctatgggtctctttttt

SEQ ID NO: 32548 - DNA, 415 bp, Gossypium hirsutum
  Clone ID: LIB3149-005-Q1-K2-C3
gcagaaaatatcacaaatcttcttctccttctcagaaatcttagtatcatcactatgggctcaaatcccaaggtcttctttgacatgacgatcggtggtcagcccgctggtcggattgtgatggagcttttcgcagattgcactcctcgcactgcggagaacttccgtgccctctgtactggcgagaaaggcgtcggccgcagcggtaagcccctccactacaaaagctcttctttccatcgtgtgatccctaactttatgtgccaaggaggtgacttcaccgccggatacggttccggaggtgaatccatctacggatcaaagttcgctgacgagaacttcatcaagaagcacactggtcccggtattctctcaatggctaacgctggaccagggactaacggatctcagttct

SEQ ID NO: 32549 - DNA, 247 bp, Gossypium hirsutum
  Clone ID: LIB3149-005-Q1-K2-D1
atccgtctcaaatcacatattgtcgcctttttggtctcttcaatcttactctctctaaggatcatcttcatctcaaagagggctaactatccaaaccatcccatttacttttgtgtctcatggctcaaaatttatgctttcacacacacgttttcatttaacatcaatgcaaattctgaatacacttcttaatcattatacccaagcctatttccttaaacgaaattaaaacgtttcattttaccac

SEQ ID NO: 32550 - DNA, 320 bp, Gossypium hirsutum
  Clone ID: LIB3149-005-Q1-K2-D2
gtgcagctcaaatcacatactagcgtcattttgatcctgtcactatcacaactgcaaaggagcctctgcatataaaaacggttatgctccacaactgaaagcgctttagttatgtctctctttgacgacaacaataatttgatgacacacaccactgaatttttttgcagtacacattatgaaccctttctgtatcatatacacaaactataacctaaatcaatctaaatagtgctatatcgcatctatcaattgaatgagatatccagtcctacacataccgatacaactaaacatttgtcttatattcccaaaaacac

SEQ ID NO: 32551 - DNA, 357 bp, Gossypium hirsutum
  Clone ID: LIB3149-005-Q1-K2-D4
gatatatatgatctcaaatgagatgtctctttcttccattctcgccgcgtactctctagaagatacccaatcctgagactgctaaaggaaacgaatttcgaaccctgttcaccatgagagctaagtggaagaagaagcgtatgaggcgcttgaagaggaagagaagaaagatgaggcaaagatctatgtagcctaatgttgcttgatgggtacttttttttttgttaaaggatttgagatttatctttataatttgtatgggttacctctgtatttctgtagaacccttttttcatctacatgaacaatgtcatggaattttctttttagaactaaatgcttatctgattcgatgtt

SEQ ID NO: 32552 - DNA, 410 bp, Gossypium hirsutum
  Clone ID: LIB3149-005-Q1-K2-E1
agcatataaagatcttgggaaaatgttgctaaaatatccatggatactttcaacaagtagtcaagaaaattatgagcagatccttttgttttttgaggaagaaaagataccaaaaacaagtgttgaccgggcaattagaagctggcctcatttattgggttgttctacaagcaagctaaagttaatggtggatcaatttggtgaattacgtattagaaacaagaaatttggccgggttattgccaaaagtccccagctgctattaaagaaacctcaagaatttctccaggtggttctattttttgaagaacttggtcttgctcaggaaactgtggggaagttagtttctcgctgtccagaagtctttgctgccaacatcgatacaactttgaagaaaaaggttgagcttc

SEQ ID NO: 32553 - DNA, 169 bp, Gossypium hirsutum
  Clone ID: LIB3149-005-Q1-K2-E3
aacatatacataacttttggatctgatcttcttattcccaatccctcttccaaccatgaggctccataccatataactggaccatatatcttatctaacacaatcacatattcaataccgtaaaggatctctgctctccgtcctaaacttatttatcgtttgctcttct

SEQ ID NO: 32554 - DNA, 415 bp, Gossypium hirsutum
  Clone ID: LIB3149-005-Q1-K2-E4
cccacgcgtccgggagagttcgtcgtgaatacaaggctaacaagatctcagaggatgattacgttaaagccattaaagaggaaattaagaaagttgttgaccttcaagaagagcttgacattgatgtcctggttcatggagagcctgagagaaatgatatggttgagtactttggtgagcaattatctggttttgctttcactgttaacggatgggttcaatcttatgggtctcgctgcgtcaagccaccaatcatctacggtgatgttagccgccccaaaccaatgaccgttttctggtcatctactgcccaaagtatgactaaacgcccaatgaagggaatgcttactggccctgtcaccattctcaactggtcctttgtcagaaatgatcaaccgagattcgaaacttgcta

SEQ ID NO: 32555 - DNA, 271 bp, Gossypium hirsutum
  Clone ID: LIB3149-005-Q1-K2-E8
cccacgcgtccgcccacgcgtccgcccacgcgtccgcccacgcgtccgattttggtgcaataatttcacaaatcgggcaaatcaagtctacttctaatatgggggttcctctcggccccggcaagttctacggcagcagtcttcctcggccccgtatctacaacgaaaccagggtcaactccgaacgcgtaaatcctccggttccagttcttgatccgctgctctcttgggccaatgaagcccactggtccatgggtggtcttaatttcaa

SEQ ID NO: 32556 - DNA, 52 bp, Gossypium hirsutum
  Clone ID: LIB3149-005-Q1-K2-F1
ggcctggcggtggcccgggccggcttggcgggttactcgcctgtggggcagg

SEQ ID NO: 32557 - DNA, 440 bp, Gossypium hirsutum
  Clone ID: LIB3149-005-Q1-K2-F10
tctggaacatgtattatatagtgttctttgaggaccacataccaatcagagtgttcaggaactgctttgatttgggagtgaggttcccattcaaccaaccaatgaagatatactcagcttatggaacgccgatgactgggccacaaggggtggtctcgaaaagaccgactggtccaaagccccattcataaccgcagactgcgttgggtccgcaacatgttcactatttacaactattgcagcgattgggagaggtaccccacaatgtctcccgagtgcaagaaatacagatacgcttgagtcatttccatcaccaccgagtccatattccccccttatattcttcactaccatatgaaatccgtcattgtcctttagattcaattgcttgctggccttcacttattttccacatcaatttcattatttagtattttact

SEQ ID NO: 32558 - DNA, 286 bp, Gossypium hirsutum
  Clone ID: LIB3149-005-Q1-K2-F2
gccacatgcagcgtgccccgtcactaggttcttggggcgttactctactacgttttcagttacaggcccttcacctgccggcccaacctaccctaccgaggactcagaggattcacctaccaagacaccagtgcctgttgcagaatctcctaccacccccaaagcaaagccgtccgcatgcctaccattggcccctgcttattcacaccttctctcctcctgccaggagaccattaccgccggcacacactgtactaggggcgggcagtcattgataactaccaca

SEQ ID NO: 32559 - DNA, 70 bp, Gossypium hirsutum
  Clone ID: LIB3149-005-Q1-K2-F3
gacacattgaacattccccttatgcctgttcttgttccgatacaatacctccctttcagggacaggccct

SEQ ID NO: 32560 - DNA, 410 bp, Gossypium hirsutum
  Clone ID: LIB3149-005-Q1-K2-F4
cttcactctatttcggtccatatagcttctgattatctgattgacgaagctacaaacttgtggggccacaatcttgaaataatgtattatcgggttttacaatatccaaatcgtgttgaaaacctgtacttcacattcctctttgttctccgagctgtgacaaagacagctgactacttggaacaagctgaatatgatacaggtaatccaactgaggacataaaaacgcagtccctaatgaagcagctactttatgatccaaaactgcaagctgcatgcccacttccatttgatgaagccaaattgtggaaaggacgaacaggaccagaactgaaacagaaaatacaagcacaattcaaaaatatcagtgcggtgatggactgtgttgggtgtgaaaaatgtcgactttg

SEQ ID NO: 32561 - DNA, 104 bp, Gossypium hirsutum
  Clone ID: LIB3149-005-Q1-K2-F5
gcacatgcagctggccccgtatatcagttcttgggccgctactcttccctcgggtcatttacagacacaagagaggccggccaatcctaccctaccgacgactt

SEQ ID NO: 32562 - DNA, 403 bp, Gossypium hirsutum
  Clone ID: LIB3149-005-Q1-K2-F7
cgaggaactgaagttggagaaagaaagcttggcgatggatctttctcgatgtaccgaagacctggagataaccaaggctaaattacacgaaaccgaattgcttctaacagaagctaaatctcaattggcttctgctcagaaatcaaacagcttggctgagacacagcttaagtgcatggcagagtcgtatagatcactcgaaacgcatgcagaggagttagcgactgagctgaacattttccgggtaaaaaccgaaacttttgaaaatgagcttcaagatgaaaagaaaggtcatcatgatgctttagctagatgtaaagaacttgaagagcatttgcaaagcaaggaaatctgctcggtttgttcttcagcagccaatgttgaccgcacgagcaagcaggag

SEQ ID NO: 32563 - DNA, 412 bp, Gossypium hirsutum
  Clone ID: LIB3149-005-Q1-K2-F8
aacagctcaaaaaagcttccaacattttgaagaaacaaagaatcaaacatgtcgaaagaagtgagtgaagaagggatgagccgaaaggactatgtggatcctccaccggcaccgctcatcgacgtggctgagatcaagctttggtctttttacagagctctcatcgccgaattcatcgctactctccttttcctatacgtcaccatagccaccgtcatcggccacaagaaacaacacgatgcatgcgatggtgttggtcttttgggtattgcttgggcttttggtggcatgattttcattcttgtttactgcaccgccggtatctcaggtggtcacattaacccggcggtgacatttgggttgtttttggctaggaaggtgtcgcttataagggcggtggcttacatggtag

SEQ ID NO: 32564 - DNA, 402 bp, Gossypium hirsutum
  Clone ID: LIB3149-005-Q1-K2-G1
gaaaaaaaggttctaaataaagcagggatttctgatgacaagaacccttttttgtttctagttaggcagtgtagactcggtgattgaatacaggaagccagctgaggattaaagttaaattagatatcatgggaaagctactatagttaaaatcgtgagcataaggtgagtatataaaggggaaaaataggcatgtatcttgatggctcctctataagacttctgggactgtcatcttcctaaagaggtatgctaactgcatggttccattgggcacagcatatagcacagacacaccatttagctttatgtgggtaatgattatgggtagctcaacttacatgaaatactattagttaactgtattcacttacgaattgaagtctgcatttctttcatact

SEQ ID NO: 32565 - DNA, 409 bp, Gossypium hirsutum
  Clone ID: LIB3149-005-Q1-K2-G2
gcctgtaagaattggggtttctctgagttggtgaaccactggaacactctcatgagctgagggaaaccgtggagaggctgaccaaggaacactacagaccgtgcatggagcaaaggttcaaagaaatggtgggcaatgcggctcttgaggctgtccaatctgagatcaatgacatggactgggaaagctccttctttttgcgccactcgcctgaatctaacatgtgtgacagtcctgatcttgaagaagattacagacaggtgatgaaggaatttgccatggaattggagaaactcgcaaagcaacttttggaccttttgtgtgagaatctgcggtcggagcctggatacctgaaaaaagcgttgtatgggtccaaagggccaacctttggtaccaatgccagcaacta

SEQ ID NO: 32566 - DNA, 317 bp, Gossypium hirsutum
  Clone ID: LIB3149-005-Q1-K2-G3
gcataaaaggttctaaattatagctggatttctgatgacgagaacctctcataatctcagggaaggcagtgagaacttgagcaaagaacactggatgccatctgtggagcaaagtttaattaaaatgcttgggaatgctgctattgttaatatcgagtgcgtaatgtatgtctttaaatgggaaagctagtcatttttgttgatgtcgcctcaatatgacttgtgggacagtcatgttcttaaagatgattgcgaacaggttagttacgtttgccacatcaaaattgcacaatctcacatttcaactttatgagctt

SEQ ID NO: 32567 - DNA, 376 bp, Gossypium hirsutum
  Clone ID: LIB3149-005-Q1-K2-G5
gcataaaaggttctaaataaagcatggaatactgatgacaagaaccctttttagggccagtagaggcagtgttgactcgttcaaagaatacaggaggcctgctgtggagtaaatctaaattttaaatcatgggaatgctactatagttaaaatcgtgagcataatgtatgtatataaaggggaaaattaggcatgtatgttgatggcacctctattggactgtgtgggactgtcatcttcctaatgaagtatgcgaactgcatagttcccttatgcacatcaataattcacaaactcaccatttagcgttatttatttttatgtattatagatagctcaacttacattaaattctatttggtactgtttttctctt

SEQ ID NO: 32568 - DNA, 402 bp, Gossypium hirsutum
  Clone ID: LIB3149-005-Q1-K2-G6
gcaaaaaaggttctaaataaagctttgaaatctgattacaggaacccttcttggggctgtttactctgtggtgacgcgttcatatgtgactggaagccttctgaggagttaagttaaattataaatcatgggaaagctactatagttaaaatcgtgagcataatgtatgtatataaaggagaatattaggcatttttcttattgagctcctctatatgactttttttacagtcatattccttaagaagtatgctaactgcatattttcatgagtcacatcataatagtacagtcataccttttagctatattttgttttgtaaattttaattagctcttctgtatttttaatccttatatatgttatctgttttttaataattaattttatattcttatttt

SEQ ID NO: 32569 - DNA, 326 bp, Gossypium hirsutum
  Clone ID: LIB3149-005-Q1-K2-G9
aatccatcaaaaatgttgtattgatcaaccaacctttctcaagttgcatcagtttatatatcccttctgatgccatcttctttcttccctatatatcaaatttatttttctccacttaatgtgtctcatccccgctattattcaccttcaatattacttaacaaaacttttcctgattctcaaataaccaactctaatattctactttttatttccactttattccttactacatacacttgcatataaattatcaaacgcataaatcatcatttcatcccttatctcttcaacttttctcaactttttccctgaacttttttttt

SEQ ID NO: 32570 - DNA, 388 bp, Gossypium hirsutum
  Clone ID: LIB3149-005-Q1-K2-H1
gtcatttcactgttgatattatttgtgcttgatctgttgacggtgcctaggacttctggcgcttgcagtgcatcgaaaccgagatatgaataagatatctgcttaaccatggctaccaaggctaggactgtgccgacaaggaaagtcatgacgtacaggcctctttgcaggaaacaattgactattgaagttttgccttctgtgaagcccaatgtttctaacgcggaattgaaagacaagctctgtagaatgtatgaggagaaggacccatgttcgatattcgggtgcaagtccaggactcattttggaaagaggaaagctactggatttaggtagatatatgattctgactagaacgcgaagatgtctgagccgaaatacagactga

SEQ ID NO: 32571 - DNA, 324 bp, Gossypium hirsutum
  unsure (1)..(324): unsure at all n locations; Clone ID: LIB3149-005-Q1-K2-H12
gtcgagccacgcgtacgtccaattggctacagcattaaggggctgcttcttttaagtagngnngctaagggctgtcctggggcgttttgactttgtggggagccatgttctccctatctctgctgtagatgaagcccacgtccacaaagtgaaagagctggaagacctgtagcacctgaagctggacttctggcggggccctgtccgcccgggctcccccatctatattatatntatctcttatccttttttccttatttattaatattttttcaggtaatttcctctttctattcttattttaccttacctataattcatata

SEQ ID NO: 32572 - DNA, 179 bp, Gossypium hirsutum
  Clone ID: LIB3149-005-Q1-K2-H2
gccagatcattgaaaacatcatttgcaccttctatattaacggagccaaggacttctggcgattttaatatattcaaacggagatcatcaaatgacatctgctgacaataccttaccaaggctactattgtgcagacaataaaaaacctgtaatatacgacacttttgaaagaaaacaa

SEQ ID NO: 32573 - DNA, 356 bp, Gossypium hirsutum
  Clone ID: LIB3149-005-Q1-K2-H3
ggaacttgcaggcaactaccttttagatcatatgcatgattgtcaggattgacttggtggaagaaatggcttggggaagggcaatatcattttctctgccgctctttgggtccattggcattcttgcccccccccctatccccacaaatctctaccgaatctattcttaatcaacagatgtctgtgttcggtgtagagactacggatgcgaatatcgtaactccattctctcttctctttactttttaatcccgacagacccattatttataatgttatatacaagctcatttccaaacttgtgtgtattgcactttcacatagttactttgctctcactctttgattctcacttg

SEQ ID NO: 32574 - DNA, 365 bp, Gossypium hirsutum
  Clone ID: LIB3149-005-Q1-K2-H4
gaaatattctagaattgctgcctggaaaccttttgttgacaaaactccccaatcatctgctcaacttgctaaggagctggaggataaatattctgctctatctggctacaatattccttcttaaccctcctcttctccatatagttaattagttccttcataaatattctactattattggaatgtaatcccacttaataaagtgtgtgaatttgtatggtatctgttttactttcttccaactttgcatctatttagtaaatattaataaggttaaatattgctattagcccctatattctgcaaaagttgtgaatctaatctttatgttctaattcggtaatttataaacattttactttttg

SEQ ID NO: 32575 - DNA, 413 bp, Gossypium hirsutum
  Clone ID: LIB3149-005-Q1-K2-H6
cgttttcattggcactctgcatctctaatttgtttggtttttctttttggctaatcattcgctttctgtttctggcatctttatatttttctccgattcatacacagtcgaaatcttttatctttgtgatttgcaaagaaaagaaaatgaaggaaagtatgggaaaccctcttcacctcaaatctttgaaccacatctcccttgtgtgtagatcagttgaggaatccatgaacttttatcaggatattcttgggtttgctccaatcaggagacctggatcatttgactttaatggggcatggttgtttggatacggaattggaatacatctcctgcaatcggaggatccagagagtttgcccaagaaaaaggaaatcaatcccaaggataatcacatttctttccagtgtgag

SEQ ID NO: 32576 - DNA, 336 bp, Gossypium hirsutum
  Clone ID: LIB3149-006-Q1-K1-A1
acaaacttcatttttcatgcggcggaggatacgaccgaaaccatggggttggtggtaacggaggtggtggtaaaggcgatggcggttccaactccaacgatgatctatggcagcgctttggcattttgggtcttcttctaagtggatggagagacagggttgcagcagatcctcagttcccattcaaggttttaatggaagaattggtgggtgttagtgcttgtgttgttggagacatggcttcacgtcctaattttggtcttaatgagctcgacttcgttttctcaactcttgttgtgggttcaattttgaattctcttcttatgtatcttttac

SEQ ID NO: 32577 - DNA, 340 bp, Gossypium hirsutum
  Clone ID: LIB3149-006-Q1-K1-A11
gctagaagagcttgagaggggtgaaatgggaattggagatggaactgttagctatgggatggacgatgctgatgatatatacatgcagtcatggactgggactattattggccctccaaacactgttcacgaaggatgcatatatcagttgaaactgttctgtggcaaggattatccagataatccacctagtgtgaggtttcaaacccggataaacatgacctgtgtcaatcaggaaactggagtggtaggtgatgttattcttaggaccttttatgccacaatatgtactgaaagccgctaaaattgtcaggttgaacctaacctttttcccatgctt

SEQ ID NO: 32578 - DNA, 352 bp, Gossypium hirsutum
  Clone ID: LIB3149-006-Q1-K1-A2
acgcgaacagaggaagacgcataacggaaagacgatcactctcgagggcgagagctctgacacgagggagagcgtgaaagccaaaagccaagacaaggaaggcatcccgccagaccagcaacgtctcatcttcgccggaaagcaactcgaggacgggcggactttagccgattacaatatccagaaggaatcgactctgcatctgggtctacggcttcgaggggggatgcagatcttcgtcaagacttagaccgggaagaccattactttagaagtggagagctcggatacgaatgagaacgggaaagcgaagattcaggacaaagaaggaattccaccagatcagcaaagg

SEQ ID NO: 32579 - DNA, 351 bp, Gossypium hirsutum
  Clone ID: LIB3149-006-Q1-K1-A4
atactgtgaagaggagtgtgcgctcagaaattactgatgatacatatccaaacgaatagaagctcagaggtagacctggatatgagcacctgaatgatccgcttcacatcttaatcgaggccgatttgcctgctaatattgatgatacacggcttagacaggcacaggaaatcatagaggaattacttaaacctgtggatgagtcgcaagattttatcaagagacagcagttgcgggagctggcaatgctaaattcaaacttcagagaggatagtccgggtccaagcgggagtgtcttaccttttaattcaagtggaatgaaacggaccaaaaccgggcgctgagaaataa

SEQ ID NO: 32580 - DNA, 307 bp, Gossypium hirsutum
  unsure (1)..(307): unsure at all n locations; Clone ID: LIB3149-006-Q1-K1-A5
ggccgacccacgcgnccggaagcgcaagagaaagctatccaacagggaatcngcacgccgctcncggacgcgaaaacagaagcacctggangagcggacgggccaacgcacngaacncaccaaccacaanaaccagagccgcacaagcancaagggcaccacgcagcnngactccaacggagaggcggagaacnngggncgaagagctcagaagactgagctcagcaacaggttgcaatctctcaatgaaatcattcatttcataaactccagcaatgggggtcttcaaaggggacactaacttttg

SEQ ID NO: 32581 - DNA, 332 bp, Gossypium hirsutum
  Clone ID: LIB3149-006-Q1-K1-A6
gggaaactaggctcataatccagcaaagtgcgagaactcaggttaaacttgctcttatgtgccgcatactgaaagcaagggaagccggcgagttgaataccgctgccactctcactgaaatgctccgtgaaatagtaggaagagagagggaggaaagcaaagctgacatctgaatgactatgataagcttctcggtgcagctgctccaaatgttaagaaataaaagtgtgtgacaattaagcgcgtgttattaagtactgcaacttatatttcctatctacttcgtttcatgtttggtatgttaaactttgaacttatcaaaccttttttct

SEQ ID NO: 32582 - DNA, 342 bp, Gossypium hirsutum
  Clone ID: LIB3149-006-Q1-K1-A8
gagggccggagccaggcgtacccaatacagaagcatgtacgcattatatgtatgagaaaaacattattgggatggcatgacaatgttggggggcaagcgtatacggattcagtcataaaaataggttagaaagttttgtttacaaatgaagccatctagaatgatggcaaataactgcaaaaatgatgatctgatctagctagtacatttttatggagttacataagtttgcacttgtatggaaaatcttggttggttaagattgctttcgtggtctgtgtttcttgtatttcttagctgcaactgggttctatgctaaaatgacaagttaatttgcccgtc

SEQ ID NO: 32583 - DNA, 338 bp, Gossypium hirsutum
  Clone ID: LIB3149-006-Q1-K1-A9
ctccgccacccaacagatcaattcgttgagggctccccgctcttcattttctttactctcagaagccccgatcccatcttcaactccaaaaatgtcgggagaagaggttgccgttgcccaaccagaggcacccgctactcttggtgagccaatggacatcaacacagccttgcctcttgtggtgaggaagtcccaagctcatggtgggcttgctcgtggcttacatgaagctgccaaggcaattgaaaagcacaatgcacatctttgtgttttggctcgatgactgtgaccaacctgattttgttaagctggtcaaggcactctgcgctgaccataat

SEQ ID NO: 32584 - DNA, 253 bp, Gossypium hirsutum
  unsure (1)..(253): unsure at all n locations; Clone ID: LIB3149-006-Q1-K1-B2
gaaatccaaataanctgtgcctttgccttagctttagcctttttttggaacttgaagacctgaaggtgctttgtgatgaatctgaaaaaatgctgttgtcattaatctttttcagtacaaatgcttagaccccttttcccccctcgatggttgaatatggatgcttgtttagaaaaccctgtattcatccacctattgatgaaaatgacgtggaacatgcttatcgtgattcatgatgctgttcacctttttt

SEQ ID NO: 32585 - DNA, 342 bp, Gossypium hirsutum
  Clone ID: LIB3149-006-Q1-K1-B3
atgaatatcacaaatttagagagtgtgccaaagaacattgggattccatgagatcttattatcagaaggctgctactgcatattcaaagggagagttggagtatgcagcttatctttctgatcagggaaagatacagagtaaattggcacgggaagcagatgaaagggcaagccagaatatatttaaagccaggaacaaagcctttgaaaatgtgataacaattgatttgcatgggcaacatgtcaaacaagcgatgaaacttttaaaactacaccttctatttggaatacatgttccttctgttcaaactctgagggttattactggctgtggaacacatg

SEQ ID NO: 32586 - DNA, 338 bp, Gossypium hirsutum
  unsure (1)..(338): unsure at all n locations; Clone ID: LIB3149-006-Q1-K1-B8
ccggatcggaaaaacggggcgacccacgcgtacgaaaggcacgcgaggacagcanacagtacatttccagaactcaaccaggacaaaaccggggaggacatgagcgtgggggaggcagcgccaggcgatgttaacgaaggatcttttgctgtctctgcagcgaatggaaaagaaacacagaggtttgttattgaattggaccatttaacaaaccctgaattcctaagcctactcgatgaagctcgggaaggatatggatcctattaaacggggggactttctcttcctagacaggctcatgaattataggagattcttgaacacaagaaataaaacaa

SEQ ID NO: 32587 - DNA, 339 bp, Gossypium hirsutum
  unsure (1)..(339): unsure at all n locations; Clone ID: LIB3149-006-Q1-K1-C8
gatttgcaatcncaactcaccggggctcacgattggatcctccttaaaatcatggctgcggagattagcaagaagcgcaaggttgttgcggatggagtgttctacgcggagctaaatgaggttttgacaagggagcttgctgaggatggatactccggagttgaagtcagagttactcctatgcgtactgagatcatcatcagagctactcgtactcaaaatgttcttggtgagaagggtagaaggattagagagttgacttctgttgttcagaaacgattcaagtttccggagaacagtgtggagctctatgctgagaaagttaacaacaggggtctt

SEQ ID NO: 32588 - DNA, 330 bp, Gossypium hirsutum
  Clone ID: LIB3149-006-Q1-K1-D1
acatcacttgggaccaaaattatcgagtcactcgagtagatttaggtgatggtaacctgtctggacatttggtacctgagcttgggaagcttgagcatttgcagtatctggagctttacaaaaataagatccagggaaccatcccaactgaacttgggaacttgaagagcctcattagtttggacctatataacaacaacatctcagggaccattccttcttcactagggaaattgaagtctcttgtatttttacggcttaatgacaacaaattaactggaccaattcctagggaacttgccggtattttaagcctcaaagttgttgatg

SEQ ID NO: 32589 - DNA, 323 bp, Gossypium hirsutum
  Clone ID: LIB3149-006-Q1-K1-D10
agtgagctcgacactaatgctttggaaaaaagtccccggttcggagtggggcttgctctgaagccctaattaggttttttcatttttggctattcaatgatgcttttggaatttgatacgttaaaattttttttcttggagattgattaagggtggcaataaatagttccacagatgataaatattcatttctaggttctcaaaagctgtggatggatgtttgatgatactttaggcttttccatgattcaatattggaagttttgagccatttgataatgggacatttaagccttgttttgtcgagggctttcttttaattg

SEQ ID NO: 32590 - DNA, 232 bp, Gossypium hirsutum
  unsure (1)..(232): unsure at all n locations; Clone ID: LIB3149-006-Q1-K1-D12
ggggggggggagcgaaagggaaggaggagggggaagagaggaaggggaagcggangacaaagggacgaaaaagggagaaagggggggggggacaaggagggggggggagaaaagaggaggggggagggaaggagaggggggggggggggggggggggggggggggggagagggaggggggggaggggagggggagggggggggggagggggggaaggaaggggggggggggg

SEQ ID NO: 32591 - DNA, 292 bp, Gossypium hirsutum
  Clone ID: LIB3149-006-Q1-K1-D2
atgctggatcgcgtgttagtctttgatgaggggcaatgcggattgggtcgaactggttatctctgggcacacgaagcgtacggcgtattcccggatatgatgacacttgcgaagccacttgcaggaggacttccaataggtgcgactttggtaactgaaagagttgcttctggcatagcccatggggaccatggaagtacttttgcaggttcaccttttgtttgcagtgctgcaatttctgttttcaataaaattgcaaaccccagtttcttgtccagcgtctcgaagaaag

SEQ ID NO: 32592 - DNA, 350 bp, Gossypium hirsutum
  Clone ID: LIB3149-006-Q1-K1-D7
agcaaacacttcgcggggagccagtacttttattagatactcttgaagcgcgcatttagaggccgcgggctacgatctctagttcgcaacgcgccattcttgttttcccgcgcgtgatgcacttggaaatggacggctatgatttcaagatgaaagacgtgtgttacgcaacgtcggctgatccgacggttgtgggagcagtaggaatgaagtcagcggatgagaggacgaaaatcctggcggtagaaggtggggtggccatgaacaatccagctgcggcggcgataacacacgtgctgaataataagcaggagttcccgttttgtaatggggtggaggatcttttggtc

SEQ ID NO: 32593 - DNA, 103 bp, Gossypium hirsutum
  Clone ID: LIB3149-006-Q1-K1-E11
ggagcgagcaagaagggcaaaccacccgcgaaaaggagatgggaggagaggaagaggaataggtatggagggacaggaaattcaaccgcggaacgacaaaggg

SEQ ID NO: 32594 - DNA, 129 bp, Gossypium hirsutum
  Clone ID: LIB3149-006-Q1-K1-E12
aaacatataagctatgcagagcagaatgaattgcttaatttcgtgtttgcttttcttacctgagggtgatttatgaagttgactaaagaacttgtctcattccttccctcgcttgtttgtcataacatg

SEQ ID NO: 32595 - DNA, 349 bp, Gossypium hirsutum
  Clone ID: LIB3149-006-Q1-K1-E2
cgcgtccgggcattcttctgataaacaaaaactgagtgaagagtttggttgtgcttactatagcaagagaaacctatcttaatttgggcatcggtcctttggcgttttccaaaatccctagcccgatctcctgtggaggcagccatgaggaccctattttcaaccaccaaacgcctcatttcttgcactagcgccaccgccgtggccacccattcccgttccttcagcttgatacccatggtgatcgagcactcttcccgcggcgagagggcttacgacattttctctcgtctcctcaaggaaaggatcgtctgcatcaacggacccatcaacgacgacacctcccacg

SEQ ID NO: 32596 - DNA, 342 bp, Gossypium hirsutum
  Clone ID: LIB3149-006-Q1-K1-E3
ccctcatcttctaggacagatttttgtctaatattattattaataataaacgggcttggaaagagatatgtcggaaatggagaagaatgttgattggatgattcataatgatgataatagttctaatgattcgtcccctgatggtggtgcttcccacgatattctgggatctaaaagttttgcatttagagctccccaggagaatttctgtatccaggattttgatttgggtaaaatatatggtgttggttcttattcaaaggttgtgaaggcaaagaagaaggatacaggaatagtgtatgctttgaagatcatggacaaaaagttcatcaccaaggaaaa

SEQ ID NO: 32597 - DNA, 342 bp, Gossypium hirsutum
  Clone ID: LIB3149-006-Q1-K1-E7
accgtacacattcacacacacattcactgaatgggtcgagtcatccgagctcaacgtaagggtgctggttccgtcttcaaggcccacacccaccaccgcaagggtcctgctcgtttccgcagcctcgacttcggtgaacgaaatggctacctcaagggtgttgtcaccgatgtcatccacgaccctggccgtggcgctcctttggcccgtgtcgtcttccgtcaccctttccgttacaagaagcagaaggagcttttcgttgccgccgagggtatgtacactggacagttcgtctattgtgggaagaaggctactcttgtgggcggaaatgtattgcctctt

SEQ ID NO: 32598 - DNA, 344 bp, Gossypium hirsutum
  Clone ID: LIB3149-006-Q1-K1-F1
gaaaaagtgaaggaagctggactccaggataacatcaaaatacttctctgtgactatcgccagttacctaaggaacaccaatttgacagaatcatatctgtagagatggtagaacatgttggtgaagaatatattgaggagttttacagatgctgtgaccaattactgaaagaagatgggctttttgttcttcagttcatatctatcccagaagagctttccaaagaaatccagcaaacagcaggttttctaaaggaatatatattccctggaggaaccctgctttctttggataggaatttatcagccatggctgctgcaacaagattcagtgtggagcatgt

SEQ ID NO: 32599 - DNA, 355 bp, Gossypium hirsutum
  Clone ID: LIB3149-006-Q1-K1-F12
cagcaccaaatcagcatccattaccaaggatgcactgtatgtattgagtgcaggaagcggtgacttcctccagaactactatgtcaaccctctacttaaccatgcctatactccagaccagtacggctcattccttattgataccttcacaaacttcgtcaagaacctctatgggttgggagctaggaaaattggggttacctcacttccaccgttaggttgcgttccattagcaagaacattgttcggttaccacgagaaaggatgcatctccaggttcaataccgatgctcaacaattcaataaaaagctcaacgccgcagcagccaatctccagaagcagcatcctggtctt

SEQ ID NO: 32600 - DNA, 63 bp, Gossypium hirsutum
  Clone ID: LIB3149-006-Q1-K1-F5
aacctacgtactctttcatgcgacggggtattttttttataggggcgcctatattctatttat

SEQ ID NO: 32601 - DNA, 308 bp, Gossypium hirsutum
  Clone ID: LIB3149-006-Q1-K1-F6
aaaacttcttttcttgcattaagttttacctgatcatcgtgtggaaggaagtatggctgggtagtaaactagtgcgtgatcccatctacttatatatttactatactttctagcagtcctcatacatctgttatcaatacgatcatcaacctagagtcagaacctatacgatccggtacgctgggagaagcctaaccacgttaacatcactgattagaagccgagctagttgatccactatgctgggaaaagactagacacgttgagataatctgcataagctcccttcttggatttgctaccccaag

SEQ ID NO: 32602 - DNA, 345 bp, Gossypium hirsutum
  Clone ID: LIB3149-006-Q1-K1-F8
tcttcgtattgggaattcttggtacaatcttcaaatgtcgattccactggaccaaactaatcttactcttggagcagtaacggagacaagtgctacagcaaattggactatcaatgcgtcaaatataagaacagttaaggtcagtaatatttctctagctgcttctgagagggatatcaaagaattcttttctttctctggtgatattcaatatgttgaaatgcgaagggagactgaaaatgctcaagttgcttatgttaccttcaaggatacacaaggagcagatacagcaatactattgactggagccaaaatagttgatctttctgtcaatatcacacctgg

SEQ ID NO: 32603 - DNA, 298 bp, Gossypium hirsutum
  Clone ID: LIB3149-006-Q1-K1-G12
atgtgtggattatttggtggaggtaatataatcttaggaagggtgtctgtgtttgtaacgaggctgttggtgctaccacaccctttttactgccgtatttgcttacttcatgactttcaagagagaagcttgggtgacttatgctgctcttgtgactgaagttgccggggttgtcattgctagtgggggtgaaccagagtattactggggtggattcaatatgtgcttaagtgcaactgatggaagggcctttaaatatgttctttaggggatttctggtttgtgttgaaggagaaaa

SEQ ID NO: 32604 - DNA, 353 bp, Gossypium hirsutum
  Clone ID: LIB3149-006-Q1-K1-G5
gaataaacggagtgcaacaccaaaattgcatctctttttttgctttgcatgcttttgattggtttagtgacaccaattgttgggtgtggttcatgtgggaaagcaccacacaagcatcgaaagcctaatggaaagttccctaaaggtcccatcactttgcctccccttgtgaaacctccaatcaagttgccaccggttggtcctccaatagctaagccacccattgacctccctccgggtacagtccctccaattaacctccctccagggactggttcttcagtaactaaaccaccaagtgggaaaccctgcccaacaccaccaaccaaggacacttgccccattgacacact

SEQ ID NO: 32605 - DNA, 185 bp, Gossypium hirsutum
  Clone ID: LIB3149-006-Q1-K1-G6
tttccattccaccaagagtggtgatgagctgaccatctttaaggactatgtgtccagaatgaatgagggtctttaatgattcctactacatcactggctatagtataaaggccgttgagaactctcccttccttgagaatcttaagactaagcggtttgatgttcttctacatggctgatgctat

SEQ ID NO: 32606 - DNA, 274 bp, Gossypium hirsutum
  Clone ID: LIB3149-006-Q1-K1-G7
ggctaaccattttgataggcactattgcggtaagtgtgggctcacttacgtttaccagaaggctggtggggattgagtagagtccgcttctaccttcggttagtgtcctgcaaaaattgaatctatagctatttttctttacaatatgaacattagggctttgattttccgtaatcgttgaacttttttaaatttatgtatgctttattatgggatgatactttgggtatgattttggagttttgaatgatttatcaaatcagctgtttgaatc

SEQ ID NO: 32607 - DNA, 363 bp, Gossypium hirsutum
  unsure (1)..(363): unsure at all n locations; Clone ID: LIB3149-006-Q1-K1-G8
ccgggccgacggagacctgggcganctgctgaatgcgcgccatcggctggctgtcgctgctcgcgaccagcgcaccctcgggcacgagggcctggtcgatgcggcccgtgatcggcgcttcgacggtcgcgaacttcaggtcgagcttgcgtcgtgcgagcgtcgcgcgggcctgcgcgacatcggcggcagcctggtcgcgttgcgacaccgagtcgtcgtagacctgccggctgatcgcgtcggcttcgaccagcggcttgagccgcgtggtctgcaccctggcccgttcgagcgcggcttgcgcgcgttgcaacgccggcgcggccgtgtccatgtcggccttgaacggcgccgggttga

SEQ ID NO: 32608 - DNA, 195 bp, Gossypium hirsutum
  unsure (1)..(195): unsure at all n locations; Clone ID: LIB3149-006-Q1-K1-H1
cgcgacggnngggacggcggcggacgagagcgggnnagcgaacgagggcagcaaagaaaaccagagcgcgangacnngccnaagcnccgcgcaaggaaaagcagacgcgccggcgaaggagnngcgcgaaacagnggcggggaggaaagagacaaaacccaaaagggggggggagatnncgcaacaaacacaaac

SEQ ID NO: 32609 - DNA, 156 bp, Gossypium hirsutum
  unsure (1)..(156): unsure at all n locations; Clone ID: LIB3149-006-Q1-K1-H11
caaaagngacccacgccaggggaagaacatggctcgctgacttatgtaccgaggagatgttgtgcccaaagatgtgaatgcggatgtggtcaccatcaagaccaaacgcacaatccaatttgtggattggtgccctactggattatagggcggatc

SEQ ID NO: 32610 - DNA, 356 bp, Gossypium hirsutum
  unsure (1)..(356): unsure at all n locations; Clone ID: LIB3149-006-Q1-K1-H7
cgggccgaccgacgcgagcgncccggnactgactccccgaaggttgtcctataggttattgctgagtacactgtccgggcgttgcaacgtaccgtccctgctgcagttcccgctattgtgttcttgtctggtgggcaaagtgaggaggaggctacccttaaccttaatgccatgaacaagctccagaccaagaaaccatggtcactctctttctcatttggacgtgcccttcagcagagcactctcaaggcctgggctggaaaggaggaaaacgtgaagaaagcacaagatgctttccttggtaggtgcaaggctaactcggaggccaccttgggtacatacaaaggtgatgcaaa

SEQ ID NO: 32611 - DNA, 337 bp, Gossypium hirsutum
  Clone ID: LIB3149-006-Q1-K1-H8
atcaagatctgaattttcatgctacagaagaggatcctgttactaaaaagagtataaagaggatgattcttaacataaagccaaaagatatcagttcaattattgttggctctccaggtgaggatccaaagatggtagccaacttcaaagaccttctacaaaaaatttttgtgcttgatccacagaagagaatgacagttactcaggcattggctcatccattcatcacgggcaagtgaaacatgttgctgattttatgtctccagaaatgtgttgcgctagatatttgtacattatgacctaactcatatttagatatctaatcattgggaattct

SEQ ID NO: 32612 - DNA, 287 bp, Gossypium hirsutum
  Clone ID: LIB3149-007-Q1-K1-A1
ccttcccctctaaaaggaagtccactcttccgaggcacctctactacaaacaaaacaaaacctcaaaatttgtcttaaagcttttccaataccttgttcccctcctaatcttggaattggccttcggggtcccttcctataccaaaccaccacttttattttaaccattaaaattccccaaaaaaaaatttgaccatttttaccaatatgataatcctaattaaaatttgtttggaattttcacatactgcaggggggtaaatggttggatatttttatttaaaaca

SEQ ID NO: 32613 - DNA, 401 bp, Gossypium hirsutum
  Clone ID: LIB3149-007-Q1-K1-A11
ccgaaacctgaatcgaagagtgggctttcaaaatttgtccttggaacttctcttattggtggtgctattttggttgcttaccaaactggatatttagagcaatatggcgcacgccccaaggtttctattgattcaacgaaaactggttttgatgagaaagatgaaaaggatatccaagttgtttcttctcgtgatgaagaaataaacaaattgactcctcatgtggacttgcctgagcaaaaagctgcaactaatatcgatcttcctcctgagcctgaaatttcaagtgaaacccaaggtgagaaccagtcgtatgttgaagataagttgaacgagataattgaagatagcacaacatctgtaccagataaagcattacctgaatattctcagaacaactt

SEQ ID NO: 32614 - DNA, 435 bp, Gossypium hirsutum
  Clone ID: LIB3149-007-Q1-K1-A12
ttgttattttcccaccctctttcccgaaaaaatttaatctcaaaattttctagggaaagcgagggtttattacaaacacagctatatagtggagcagtaatcatgagctttcgagatctggaagccggacggccattggtgtcgaggcaaaacctgatcaacggcaagcaagacgccacgcaagcagtggcctctggcattttccagatcaacaccgcagtcaccacctttcagcggctcgtcaacaccctcggtactcctaaggatacgcctgagctccgagaaaagctgcataaaacaaggctacatattgggcaattagtgaaggacacttcggctaaacttaaacaagctagggaaacagatcacagcgcccggaattagtgccagcaagaaggtagcagatgctaaacttgcaaaagattttcaagcagt

SEQ ID NO: 32615 - DNA, 362 bp, Gossypium hirsutum
  Clone ID: LIB3149-007-Q1-K1-A4
acgcgtccggagaaaagcaaaacaccaattcaattagctaagttaagtaacaaaggcgtacgctcccaatataggggggtagatacatgaaaaacagggatttacgcaacagcagctgcgaaaggtgcaggtggaggcaaagaagagaaagggcttttcgaatggaatcttgggaacttgcagaaggaagagcagtggtatgaaactgaccctatccacaagaaagtggaagaaaagaatggcggtggcagtgggagaggaactaccaggggacgcaagaactctgtgtcaatccctcagaagaagaaggacaatggctggctttgggcgttggaggggctttgaagaaatgaaagaaacta

SEQ ID NO: 32616 - DNA, 396 bp, Gossypium hirsutum
  Clone ID: LIB3149-007-Q1-K1-A5
tgcaaagaggaaccaaactgtcatttggcaaaagcctttgacaaatgattgttatatggaacgagcacctggtacaaatccaccgctctgtcggtctgatgatgatccagatgcagtttggggtgtgccaatggaagcttgtatcactccttattccgaccatgatcagaaagccaagggaagtgggttggctccttggccagcgagatagacatctcctcctccaaggcttgctgattttggttattcaaatgaaatgtttgaaatagacacggaaacttggcgccagcgggtagagaattattggaatctcttgagtccaaagattgaggccaacactttgagaaatttgatggacatgaaagcaaacatgggatcttttgcggctgctctaaa

SEQ ID NO: 32617 - DNA, 442 bp, Gossypium hirsutum
  Clone ID: LIB3149-007-Q1-K1-A6
atgagggcttaatcatagatatattgggttatagaaatgccgagcaacgaaacttgattcgaaggacctacgctgaaacctatggagaggatctcctcaaggcactagacaaggagctctcgaatgactttgagaggctggttttgctttgggctcttgatcctgctgaacgtgatgccctttttggctaatgaagccaccaaaaggtggactttaagcaatcaggtccttatggaaatagcttgcacaaggtctgccaaccaactgcttcacgcaaggcaggcttatcatgctcgttataagaagtcgcttgaagaggatgttgcttatcacacgactggcgactttcgtaagctcctcctacctctagtgagttcatacagatatgaagggagaggaggtgaaacataaatctggcgaaaacagaggcgaagttgcttta

SEQ ID NO: 32618 - DNA, 370 bp, Gossypium hirsutum
  Clone ID: LIB3149-007-Q1-K1-B11
aaggggggagtttcaaatgttggatttgcacaggcgtggtggtggcaggcatggcatctggtgcaaaagtttggggttagcgggaacccaggtgaccttcccaaatggaacgccattactgtggtgcttatcatctgcatttacgttgccggattcgcctggtcttgaggacccctcggatggttggtgcctagtgaaattttcccattggaaatccgatcagccgcacaaagtgtgaacgtgtcggtgaacatgatcttcacattcgcggtggcacaagtgttcttatccatgctttgccacttgaaaatcgggctattcctgttcttcgccttctttggggtggtgaatgtcatctttgtgtactact

SEQ ID NO: 32619 - DNA, 435 bp, Gossypium hirsutum
  Clone ID: LIB3149-007-Q1-K1-B12
gaaggcccaggctttgagggataacagcatggctggttacatgtcaagcaagaagacaatggagatcaacccggagaaccccatcatggaagagctgagaaagagagccgatgcagagaagaatgataaatctgtgaaggaccttgttctccttctcttcgagactgctctcctcacctctggcttcagccttgatgagcctaacacctttggcaacagaatccacaggatgctgaaactcggcttgagcattgatgaggatgcaggtgaaggtgaaggtgatgctgatatgcccccattggaggatgctgatgccgaaggcagcaagatggaggaagttgattaagcctaacatgtttttataagatcagtagatttatcttacttttgaagcatctgttagcttggtttacattttggttggtgcttttgctt

SEQ ID NO: 32620 - DNA, 222 bp, Gossypium hirsutum
  unsure (1)..(222): unsure at all n locations; Clone ID: LIB3149-007-Q1-K1-B2
gaaagaaattgatgacagcgtggacgncggaagggaaaaaagggcgacgagcgccggaaagacgcgggaggacgggaagaggaccaagctacgacgcgagcagcgagggggggtcaacaaggggagcgaagcaaacacagggcgcggtacaacgcgggactggaaaaccctgcggacccaaataagcgcgtggagcacaaccacttaagcagcaggggaaaa

SEQ ID NO: 32621 - DNA, 432 bp, Gossypium hirsutum
  Clone ID: LIB3149-007-Q1-K1-B3
ggtttagatgatagttcgtttgagacatgttttattgatgaggctggaaccgtacaaaatgcgggattctaagtatgggtacatgctctatacatattgaactgtgattcatccaacccttttttcttcacacagatatgttttctgtatcttcaagattgatttcttgtggcaggatgagaaactcataatcttaatcggactagtcttttgaagggttcttaacagaatttgggttgtgtgccattaaccattcataacacagtttagactatttgaataatatgagttgtgaaccaggaacagatgctgatttgcggatcaaaacatattcacttccttctatttttggtttggggtttggaaaccctttctaataaaatcttgctgcacgactaaataaattaataattcagaaaagaagcaaaagtt

SEQ ID NO: 32622 - DNA, 198 bp, Gossypium hirsutum
  Clone ID: LIB3149-007-Q1-K1-B6
gcgaaaacagaccagcaaagggaacgacggttaggtttatctaggatcactggacaaattccaaaataatgggggggattgattgtaggggcgtggccacaacaaaggacatggttggactatttactagattcctacaagatatatttacccgagtaggcaaatagttccaagaaattattcagcatgtaattataa

SEQ ID NO: 32623 - DNA, 297 bp, Gossypium hirsutum
  Clone ID: LIB3149-007-Q1-K1-B8
gacgaaacttcaagacccgaccaacgattttactctacgccgcacttttgcctgagccagagtaaggttctttcttttgtgttattgaatggcaataatctacgagttccaagaagacgaggctaaaaagccctcgtcttcttcttcgacggcttctaaaccgctgctgtttagcgccactttggatccgtcgaaccctgttttgtttttggagaaagttttcgatttcattgggaaagagagtgattttctagtgaaagagaaacgccgattaggagatcgcggccatcgtgagag

SEQ ID NO: 32624 - DNA, 432 bp, Gossypium hirsutum
  unsure (1)..(432): unsure at all n locations; Clone ID: LIB3149-007-Q1-K1-C10
gacccacgcgagcgagcaanaaatcggcattacaagctcaattttctgaaaatttttgtgctgaacttctttggtctctttgtaccaccatgtgtggaggtgctattatctccgatttcataccgccgtcgcggtcgcgacgattgacggccgatttcttgtggcccgatctgaaaaaatccgggttgaagaaggggtcgggtaagagatactcgaagcccgtgatcgacttgggcgatgatttcgagactgactttcaggagttcaaagatgaagaatctgatatagatgattatgatgttgatgatgttttggctgatgtaaagccctttgcttttaacgctacaaagaaacctgcttctgctgtatctcatggttcgaactctgaaaatccatgcaattcaatggtaagctgagaaatgtgcgaaaaga

SEQ ID NO: 32625 - DNA, 318 bp, Gossypium hirsutum
  Clone ID: LIB3149-007-Q1-K1-C2
tacatgtgttcaagaaaggagaagcataaaaacaggggggaagggctgtagttcattgcactaagagagcttccagctctgggtagtgctacacgcattctgaataatcaattggtgggagaaggctatgtgtactgtgagacttgccgtgctgggtttgaaacccctaagactagaagcctagctgaagccatggttaggttggtatgctccgacaggaagagcggccaagttgtcttcaaaaaggagggagacaccgacaaaaccggaaaataccaaagtcgtgtattcgaggatcacttggaacagatctgtgat

SEQ ID NO: 32626 - DNA, 233 bp, Gossypium hirsutum
  Clone ID: LIB3149-007-Q1-K1-C3
tcggttcttagactagtacggaagcaaagttagtttaggagaaacaatgagtaggagttaggggatagatgtgaagttgatgaatgaggctgtttttaaaattagtaactgtggaggataagagtggagagctttacagaggaagcatggttaagtgcgaggataactggaattgatagctcgagataattaacttcactggtaaagatgggaaggtttcatagattgagcat

SEQ ID NO: 32627 - DNA, 454 bp, Gossypium hirsutum
  Clone ID: LIB3149-007-Q1-K1-D10
ccgattctgaatatccgggtcgatccactcgtacggtaattattggtagtaattgctaaaggaattaacagggaagaaatgggtattgattttactgggatgatctcctctctgtacggtaacagagaagctcgaattcttgtactgggtcttgacaatgctggcaaaactactattctctatcggcttcatatgggtgaggtagtctctacaattccaacgattgggtttaatgtagagactgtacaatacaacaacatcaagtttcaagtatgggatttaggtggtcagacaagcatcaggccatattggagatgctattttccaaatacacaagcaataatttatgttgttgattcaggtgacactgatagaattggaataaccaaggaagaattttatgccattttagaggaagatgaaacttaaaggggcaatatccctaattttttgc

SEQ ID NO: 32628 - DNA, 406 bp, Gossypium hirsutum
  Clone ID: LIB3149-007-Q1-K1-E1
tcgtatgccaaagataatgttcctgagaatgtatagaatgttggctctgtgaagcagtctggggaggaagatgccatggttgctggcaaggagaatgcttgcaatgaagctgaggagaaagagccagaatacaaggagatgactttggaagaatatgataagattgttgaggagaagaggaaagctttgcttgcccttaagactgaagaaagaaaagttgataccaaagagtttgagtccatgcaacaacttttaagtaagaagaacaactgatgacatttttaatcaaactgggtttctgaaaagggacatagcgcatggatgcctgattaaagaataaaggagtcaaaaaagttctgttagccatcaattgagttttcttgaacccatcttgaaggggaaaagg

SEQ ID NO: 32629 - DNA, 428 bp, Gossypium hirsutum
  Clone ID: LIB3149-007-Q1-K1-E11
ccgggccgacccacgcgaccggaaagagatgaggttgctaactcacatcatgtatgaccgccaatacactcataggcggcgtaacgcaggtggctttctcctactcaagcatttgaaggtggacgaaagtgagtggagtaagcaatgtcgaaatcaaccacgatttcctcaagaatatatctcccaagatcgattggaaagcgtaatccgatgctgccagaactatgggctacgacgagctttctgagcaggcacctgatccgtcggtgctagagtccgacctggacttcttgacgatatttcaccatgccctcttggagcttcatcttgaggaaggagctcttgtttgtcccgagactggcaggaagtatcccgttaataagggaatcccccaatatgcttcttgcatgaagaatgaggttaaggga

SEQ ID NO: 32630 - DNA, 182 bp, Gossypium hirsutum
  Clone ID: LIB3149-007-Q1-K1-E12
aaccgggacggaaaacccggaccgacccacgcggccgataacatcgggcaaaaaaaacaaaaagaaaaaaaaacaaaaaaaaaagaaaaaaaaaagagggaaaagggagaaagaaaagaagagaacaaaaaaaacgaaaacaaaaaagcgaaaaaaaaagggcggggagacggaaagaaaaa

SEQ ID NO: 32631 - DNA, 349 bp, Gossypium hirsutum
  Clone ID: LIB3149-007-Q1-K1-E2
acgcgtacgcagaaaggtagccaactctatcatctagaaatataatttcactaataggtgttcgacttactcaaggaagcatggaacaagttcaattcagaggaacctttctgaatttgaatttgtgtagaagttcatcatttggcaagctatgccttgggagttgaatgcataactgttccagcaactgtatcagtatctgttgctgttgttgatacattataccagctggtataacggaacatatgataccagcttcaaaagttttgtgaggaaagtgaacggtgaagataactcttcttttgttcagaattgctggacaattaatcttcaatccaactggatgcac

SEQ ID NO: 32632 - DNA, 444 bp, Gossypium hirsutum
  Clone ID: LIB3149-007-Q1-K1-E5
acccacgcgaccggaactgcagcttctggatatgcttcatctgtattctagaaatcacctgtatccaccaagagtgatcagaagaaaaatgtttccagtgctcaagcaagcaacaggatgaattctatcaaactcagagcaacttaagaaagaagccacagagaccctgcatcttatgaatggttaaagatatgaagatatgacacttattgtggacatattgatgcaagcctgaaatgcgtggagccaaggatagtcttacctgtgaaatttggttggaacatgcactgcagatcatataatcaagaagctgatccagatgccagatttactactgtatacattgtcaatatttttgagttacacctgcaattcattcctctattgtttgttttaattagtaaaaaaaaacccaatcaacatatactggatagttcttcatat

SEQ ID NO: 32633 - DNA, 373 bp, Gossypium hirsutum
  Clone ID: LIB3149-007-Q1-K1-F11
agaaagagagagaaaaagaggaaaaaaagaaaagaaagggaagaaaagggggggaagaaagagggaagagggggacaggaaaacaaagaaaaagagggagcagggaagagaagagaaaagaagaacagaagaagcgaaaaggagcgaagggggggacaagaggaagaggggaaaagaagaaaggaaggaagagaggggaaggaggaaagaaggaggaacaaaagaaagaaaggagggaaggggaaggaaggagaaagaagggaaagggagaggggaaaggaagaggggagaaaaagaagaggagaaataggggagaggaacgaaagagagagaaaagaaggaagaaagaggaaaaggagggggaagggaaaaa

SEQ ID NO: 32634 - DNA, 394 bp, Gossypium hirsutum
  Clone ID: LIB3149-007-Q1-K1-F5
ggacgacccacgcgtacgggtaatgggagcagaacgtgatactcatatagagctatcgcctgccatagatgcgaagctggaggcggatccatcacgagtgtattgaccacacacagttcatctatacggattatttggtctaatattacattcacatttcctcttttatcattcaacattacaaaaaagaagccggcacttttggttttccacataagattttcaggaaatgtaatgaaaattttaacttctatagcggaaagtgggaggcgaaaaggggtcaaataaaaagaaaaaaaaaggagggtgagaaataaaaggaaacaaagagaaaaatagggggcgggggaaggggggggctttagtgggggggggcgtgaaaatggaaaggaaa

SEQ ID NO: 32635 - DNA, 401 bp, Gossypium hirsutum
  Clone ID: LIB3149-007-Q1-K1-F6
cgcgttcggagccatacttgtaggcgattggggagggtgcttatagttactatgggaagaaaccctaaatgaacgggctgatgcaaaaggcgatgtcaggagtttcagtgccattcatgagagcaatattggacggctatgatgggttgaaaggagtgaagagattagttgatgcgggaggcagcgcgggggattgcctccgaatgattttgcagaaatattcccatgttgagggaatcaactttgatttgcctgaggtcgttgccagagcacctattatttcgggcgtgactcacgtttgggggggacatgtttgagtcaattccagcggcttgtgcaatctcatgaagtgggtgttgacaaccatgacagatgattaatgtaaggcgataatggagaac

SEQ ID NO: 32636 - DNA, 352 bp, Gossypium hirsutum
  unsure (1)..(352): unsure at all n locations; Clone ID: LIB3149-007-Q1-K1-G10
ccggnccggaanacccgggacgggccacgcgaccgggcagacnaagaacaancgggcgcccagggcagcggacaaaagaaaggcgcggaaaaggggggagctcgacgagaagaaggggacagcaacgcagatcaaaaccacccaagagggcaggacgcaaaacacaagggcccagaacagagccggggggggcaactcgacaactaaaggaagggtcatagatacgggcgacgcccactgacaaggaggaaagcaaagacaaagggcaagcgataggacgccgggggcgagcaacatgaaaattgccaaggcagggggagacagggaaaaagagcggagccccaacaaaaag

SEQ ID NO: 32637 - DNA, 237 bp, Gossypium hirsutum
  Clone ID: LIB3149-007-Q1-K1-G3
atggggtagaataatgtcaggctaagtgacgagtgaaggtcaaggggaagctacccgcaacttaagcacctaaacttgagttccatttataaggacgaaagaccggaagcgtaagctcaggatcgaggcttggttggcttcaggaagaccagcgcgccatcgtacagtttagcgcacgtgagaactatcaccgggtcactaaagataccgtacaagagaggtcgttacgctcacttt

SEQ ID NO: 32638 - DNA, 403 bp, Gossypium hirsutum
  Clone ID: LIB3149-007-Q1-K1-G4
gcgaacggcgcactctctacaactgtagaagcaaagtctgtaggctgtcgcttcgagagagagcgagggggtttaccaggagcgcagctccggagacgagcttctttctgactcattcccctacaaggaaatcgagaatgggatgctgagggaagatgagggaaagtgggttgcgcaaggagctattgaaggtgacaatggtgccaatccttcagccgaagatgctgatgaggaagaaggtgtagatgaccaatctgggaagggtgatgacattggtgacactttcaggcttcaggagcaaccccctttcgacaagaagcagtttgtcgtggtcatgaagaagttcataaagaacttgacaccgaaactggaagcggaaaaggaagagtccttcaagaaaaac

SEQ ID NO: 32639 - DNA, 426 bp, Gossypium hirsutum
  Clone ID: LIB3149-007-Q1-K1-G6
gtccaggctaacaatctgcttgaggatcaaagccagattgaatctggctccttgagcactctcgagtctggtccattagttaccttcgtaggaatatatgacggtcatggtggccctgagacgtcgcgttatatcaatgatcacctcttccagcatctaaagaggtttgccacggagcagcaatccatgtctgttgatgtcataaagaaagcatttcaagcaacagaagagggatttttctctgttgttgcaaaacagtggcctatgaagccccagattgctgctgtgggatcatgctgcctggtgggtgttgtttgtaatgggaccctctacattgctaaccttggtgactctcgtgctgtgctgggaaggcgtgtcaaggcaactggggaggttctagccatccagctgtcttcagaacataat

SEQ ID NO: 32640 - DNA, 277 bp, Gossypium hirsutum
  Clone ID: LIB3149-007-Q1-K1-H10
ccgtatgtacactcaagcacctcatggggcttttacctaaagacaggactttcccacaaagcggggttgaccacagggaaaagatggcatcagatccattggaacttggtttccatggcagccaaccatgttgttgagatccgtatgaggaagggattgaaggagcatatgaccccgctctccgattacgaggacaagctgtaagctaagcaacaaaataataattaattgaagaggttacggaacccattttatgcaatgcagttagttagcacct

SEQ ID NO: 32641 - DNA, 399 bp, Gossypium hirsutum
  Clone ID: LIB3149-007-Q1-K1-H2
ggccaaacaagtgttcatcaacgttccatggtggtacttggctttcaataggatgatcagggggttcctgactcagagaaccaagagcaagttcgtatttgcaagtccagccaaatctgctgagaccctcttcaaatatattgctccggagcaagtaccagatcaatatggtggactgagcagagaaggtgaacaagaatttagcgtggccgatgccgtcacagagggtacaatcaagccagcagcgaagcacagtgttgaattccctataactgagaattgtaatctggtttgggaactccgagtagtgggatgggaagtcaattacggagccgaattcgtgccgaccgccgaagatgggtataccgcgaacggattgaaaacaaggaaagttttttt

SEQ ID NO: 32642 - DNA, 329 bp, Gossypium hirsutum
  Clone ID: LIB3149-007-Q1-K1-H3
cgaatatcaagagtgatagtggatctctatttactaaatagaggtataaggaaagattaacaagcggggagttgtcttgaccgacaacgcaattgttgagcaggcactaggcaagttcggcaacatttgtgttgaagatcttatccatgaaataatgactgcgggaccttatttcaaggaagccaacaactttctttgaccatttaagcttaaggcaccattgggtgggctgaagaagaagaggaaccattatgtcgaaggtggagatgccggcaaccgggagaattaccataacgaatgaattttgagaatgaattaaaaaaccaaac

SEQ ID NO: 32643 - DNA, 292 bp, Gossypium hirsutum
  Clone ID: LIB3149-007-Q1-K1-H6
gaactgagcgtcgttgaatattcgggaacgtcgagaaagaaaaggaggggaaggaaattctttgtcgggggaaattggaaatgcaatggaaccactgaggaagtgaataagattgtgagtactttgaatgctggagaggtgccttctccggatgttgttgaggttgtgggtagccctccatttttgttgcttcctttgggaaaaaactcactgagacctggagttcaagtcggtggacaaaattggtgggtcaagataggaggtgcttttactggggaagatagtgcgggag

SEQ ID NO: 32644 - DNA, 173 bp, Gossypium hirsutum
  Clone ID: LIB3149-008-Q1-K1-A1
ttttggcttagatggtgatcttgtgtaagcgcacaattttgcatttaaagcccaaaagatcatgttattgttggccttctagctcggctctgctaaaggaaatttcagatgtgtttgtggcatacacaatgtaataggggtatcatattcaaaaggcatacattttggtttta

SEQ ID NO: 32645 - DNA, 382 bp, Gossypium hirsutum
  Clone ID: LIB3149-008-Q1-K1-A11
cgcgtccgaacgagcagaagctgaaattccctttgagttacaagacctttggtgaagctattccacctcaatatgcaattcaggttcttgatgaattaactggcgggaatgcaattataagtaccggtgttggccagcatcaaatgtgggctgctcaattttacaagtataagaagcctcgtcaatggttaacgtctgggggattgggtgctaggggatttggattgcctgctgctattggagctgctgttgcaaacccggaggcagttgttgtagacatcgacggtgatggaagttttatcatgaatgtgcaagagttggcgactatccgtgtggaaaatcttccgttaagatattattgttgaataatcagcattttggt

SEQ ID NO: 32646 - DNA, 260 bp, Gossypium hirsutum
  Clone ID: LIB3149-008-Q1-K1-A12
gccaaaaatgttactggtaagatgatgcttaatgcttcttacatatttccttacaacacgccgacgacaaaagaagcatattactacaggatgatattcgagagaatcttccctcaaaactcggttagattgacagtccctggaggagctagcgtggcatgcaccactgttaaagctggtgagtgggatgttgtctggaagaacaaccttgattctttagggagggctgccctgggaggccatctctttgcttacgatgc

SEQ ID NO: 32647 - DNA, 342 bp, Gossypium hirsutum
  Clone ID: LIB3149-008-Q1-K1-A3
tattttagcaagttaacaagggtcgatgatttcttatctttgggactaggcgccagtttatgcattcagccgctgctggtttataatttaaacgccgttgtctgcaacattatttgtttcccattttgctctatagtagacgcagaaggcatccttgtcctttttcctggccaacgtcttttgagtttgacttaagccaaatcattaaaaaaaacttacattattacagcacttgttgagatttgtcgaaaacccaaaataagcatattctaaatgcaccttgactttgccaatgcgttggccatccatttgatttgcttaatacaaaacaaaagctcacat

SEQ ID NO: 32648 - DNA, 162 bp, Gossypium hirsutum
  Clone ID: LIB3149-008-Q1-K1-A7
caagaactacatgtgtatgagttgaatgagagagatcgtgggagtccagcttaccttcgggtgagtcagaaatctgtgaactcactgggtgaacttgtcccttttagcaacaaaggaagccttccctttctattttcactgaattcaatttaaggaaataat

SEQ ID NO: 32649 - DNA, 422 bp, Gossypium hirsutum
  Clone ID: LIB3149-008-Q1-K1-B1
ggcttttgttcagtcattttgggttatttgttcagtttggcttgtttcgggtttgttgactagtgttgttaaattggatttaagttcgaagatctaattaaatctatggaactgagctctttctgtgcgcaagggctctattgatattacttaaagggaaaatggcagttttaggtccattttttttatgcatatgacggaggcaagtaactaagttcagatatttgataagctttctggattttagggcaaactgaagatgcgacaaggtttcatagttcgaaagaactgtggtttgccttttttttccccaatgattttggtcctgaaatgactattgagttaccgcagcttgtaatatataatatagatgcatacacgtgtgtgtgtgtgtctgtgtgtgaatgccatattcttttcct

SEQ ID NO: 32650 - DNA, 335 bp, Gossypium hirsutum
  Clone ID: LIB3149-008-Q1-K1-B10
ggaaaaactggggcggggggagcgaacgaaagaacccaagcggagactacaccaggggtaaaaccctaagctgtcaacaaaggcgaggggggagacagaggtggcgggggggggagtgcctaaaaagagaacattcaagaaatgaagcgtcagaggcggggagtaggatgctcttctagagatgaccaccgatgagcgtgacaagctcttccccgcacgtgctcggagaaggttccaaaggggtctcaagagaaagcccatggcaggaagaaagaaactccgcagggcgaaaagggagggcccaccgggagagaaaccagaaccaggcagaaccc

SEQ ID NO: 32651 - DNA, 349 bp, Gossypium hirsutum
  Clone ID: LIB3149-008-Q1-K1-B11
agaatggctcccctaagtagaaaaaacggaattttagaagtacaatcggcaaccgcattgggaagccgagacacagcagagagaactttatcttcagctctcaagagcaaagaggaaatggagaaaaaatttgctgacgcgatgaaggagatggaactgctaaaagagaaactagcaggtatagaacttgcacatgaagaagccaacaacttatttaacatagtccactcggacaatgtaagacttgaacacgatgtggctatccttaaggctggtcttgacgaatctcaaaaggagcttcactcaacgagaagaggcctttgatggagagagggccaagagcatttcc

SEQ ID NO: 32652 - DNA, 238 bp, Gossypium hirsutum
  Clone ID: LIB3149-008-Q1-K1-B5
cgaaagatgacatgctcatactctatggactgaacaagcaagggactgttggaccagtgaataccagccgtcctggaatgttcaacatgagggaaaagtacaagtgggatgcatggaaggctgttgaagggaaatcaaaggaggaagcaatgggggattatatcaccaaagtaaaacaactggttgaggctgctggaagatcatgatgtgtgtggggatgaccaatgaaaactggtgg

SEQ ID NO: 32653 - DNA, 383 bp, Gossypium hirsutum
  Clone ID: LIB3149-008-Q1-K1-B6
gaaaaccgggccgacccacgcgaacggatcacctcatctccattttgtttccttcttcaaatacccaatggccgtcactatctcaaaggtgcacaccgagtctgggcttaaagctcttaatgacttcctctctggaaaatcttacatctctgggaataagctgaccaaggatgacataaaagtttatgccgctgttctgaagaaccctggtgattctttccccaatgttagccagtggtataattctgtttcttctcaacttgccgccagcttccctggtaaagctgttggcgttgggtttggtggcaaagctgctccagctgagtctgctaaagctgaggctgctgatgatgaggacgacttggaactatttggggatgaga

SEQ ID NO: 32654 - DNA, 190 bp, Gossypium hirsutum
  Clone ID: LIB3149-008-Q1-K1-C1
gacccacgcgaccgggaaaacgcgcaaaaagaacgccgcccactcaaaacaaaacagaagagaaactaccaaggggcccaaagccgagaagaagcctgctgagaagaaaccggccgaggagaaaaagactaccgccgctgagaaatcccctgccgagaagaagccgaaggccggtaagaagcttccaaag

SEQ ID NO: 32655 - DNA, 352 bp, Gossypium hirsutum
  unsure (1)..(352): unsure at all n locations; Clone ID: LIB3149-008-Q1-K1-C11
cccggggcgacccacgcgnccgggggggaggagacgaccgcagcggagaatgtaccgggagcatccaggccaggatttcgggaggggaatgaggccacgagggagggggagttgcagagctagtgggggtacccaacaaagacgaggcattcaaaactcaaacagggaatctactgaatgaaaggacactcaagggtacaaacgtaggcaactacaaaccacgaaccgatatacccgctggcggtgagagatacatgaacaaggaacatgaaccggacaagggcatcacgcactcaaggcccttctcagagaataacaaggcataaggagacaagcttgggggggagggcca

SEQ ID NO: 32656 - DNA, 217 bp, Gossypium hirsutum
  Clone ID: LIB3149-008-Q1-K1-C2
cagcgtcgggattgcctgtataaactcccattaagcagccttacacaccggtctgttgatgagtgcgaccataaggtctcggatattgaaaggagcgacagtttcctgcatctactctgcctgaggaaccagagatagggggaatgtcatggtgggcaaaagtcatatgacagataaattttggagaccttccatgtgaacctatcaaaatctaaac

SEQ ID NO: 32657 - DNA, 340 bp, Gossypium hirsutum
  Clone ID: LIB3149-008-Q1-K1-C6
gaaatattggagatggcttgacctcctgtaaagatgaataccccatatttgataaggagggtgtgaatggcgagaacgcaggtgcgatatacaaattcctgaaggctagcataggtggagctctgggtggacttctgggggacgacatcaagtggaattttgccaagttcctggtggataaagacggacatgttgaggatcgttatgcccccactacttcccctattagcatcgagaaggatataaagaaactgcttggctgatgttttgggcttcgatacctcaggctttgagggaataaaagttaaatgtttttaccaataaaaactattacgaaggg

SEQ ID NO: 32658 - DNA, 424 bp, Gossypium hirsutum
  Clone ID: LIB3149-008-Q1-K1-C9
cgtgatttggttggtgttgcgtattcttattaggagacgaaggctatggcaactgagattgaggtggttgacggtcctaatgatgagggtgagatgttaactcgtccggtttaacttagtgaccgtttttctcagtcatatgcaaacgaacaagcagctaggtttgcaaatggaggagcttatcctccagatctaagtctcattaccaaagcttgtcataatggccagaactatgtgtttgcgcttttaactggttaccgtgaccctcctgctggtgttatgattcgtgaggggctacactatgacccatactttccaggaggagcaattgtcatgcctaaaaagcttattgatggtgctgtagagtatgaagatggcacccctgcaactgaagctcaaattgggaaagatgtggtgacatttt

SEQ ID NO: 32659 - DNA, 213 bp, Gossypium hirsutum
  Clone ID: LIB3149-008-Q1-K1-D1
caaaagagagagaagttgaagtgcaggagtacaactaaggggggatggaagaggattagatttgtatatcaccagggatacttacgtctgcgccggaagcgttggcggctgtagaaacgggaactgtccttgcgccggtgtcagaagcacgaatgatgacgggtccaaatgattggagaccgatgatatgagggagcgggtaaatggcaagtc

SEQ ID NO: 32660 - DNA, 340 bp, Gossypium hirsutum
  Clone ID: LIB3149-008-Q1-K1-D11
gatgaatgtttgattatagccagtgatgggttgtgggatgcgatatccaatgaggaagctggttaggtggctcgactgcgaatcctgctctggcacaaaaagaatggggttccatctctggtggaaagaggcataggaattgacccatcggtgcaagcggcagctgaatacctttcgatgctggccatccaaaatggtagcagagacaacatctttgtaattgttgtagacttgaaagctcaaaggaagttcaagagctaaacattatctgagtgttaaccccccccaaatccaatcattttaaaatcatagtcgatatagtacctcgcatattagagac

SEQ ID NO: 32661 - DNA, 293 bp, Gossypium hirsutum
  Clone ID: LIB3149-008-Q1-K1-D12
ggacatatataggattcagacaggttggatggtcccagatcctcaacttcgtgaagagcgggggaatttccatatcagagaaagtaattccagcgtatcgctccttcatggggaggctcgggagacagctagagagtggaaggcatgctggaaaatacattaaggatacaccagaggatttacaagactatctattggatgtgtttgaaggctcacctcttgggctgtaccatatgagaagaaagagtccataggacgcaaagtcgctcaatgcagggatggccccttcgctc

SEQ ID NO: 32662 - DNA, 376 bp, Gossypium hirsutum
  Clone ID: LIB3149-008-Q1-K1-D2
gatttgattgcaatgacatgccctatgacagatcttccacccagtaaggaaccgttggagtggaacacgagaatgaagatagcatccggttgcatctaaaggttaggagtaccttcatgataaagcaaaccctcctgttatttacagggactttaagttcttcaacatattactggaagaaggatttcacccgaagttatccgattttgggctcgcgaaacttggaccctgtggagataaaacgcatgtttacaccagggttatgggcacatatggttattgtgctcctgagtatgccatgactgggcaattgacggtgaaatctgatgtttatagttttgggttgtctttttagagctaaatactggtaggaaag

SEQ ID NO: 32663 - DNA, 322 bp, Gossypium hirsutum
  Clone ID: LIB3149-008-Q1-K1-D3
cacgggatacaacactaatccttatgccgaattcaatatcctcggagaccctatcgcaggggaggaggtgtttcattcagggataccggttactcttgcatctttagatgcaacaaacaccatccctataaccgaggagtttttcaaggcatttgaacagagccattggacttacgaagcacaatattgctataaatccttgaaaatggctcgggatacttggttagaagaccgattttatacgagctatttcatgtgggattcgttcacatcaaggggtgcagtggcgatcaagcgtaattatgggaaaaacaatggggaa

SEQ ID NO: 32664 - DNA, 363 bp, Gossypium hirsutum
  Clone ID: LIB3149-008-Q1-K1-D4
attcatagcatagcagcttagtccaactatacactccaccaccattggctgtttgtaatcatgcgaaaaagaatggtgaccgtggaagaagttcgtaaggctcaacgtgcccaaggccctgccaccgtgttggccatcggcacatcaaccccgcctaattgtgttgatcagagcacatacccggactactatttccgtatcacaaatagtgagcacaaaaccgagttgaaagagaagttcaagcgcatgtgtgaaaaatcgatgatcaagaagcgatacatgttccttacagaagagattttgaaagagaatcccaatggatgtgaatacatgggtccttcactggacgctaggcaagatttg

SEQ ID NO: 32665 - DNA, 197 bp, Gossypium hirsutum
  Clone ID: LIB3149-008-Q1-K1-D7
gtattcaaatgttgtaagtgacatggtttattttatcaatcgagcatgcattaattctggggggggaatctatgttttctatgtactcacgaatgatgcgaattttttaaatgaatccttctctattctgcactgatcatatatgctttgaaggaagaaaattgtctaaatttggaagaatctgggaaacgagaatt

SEQ ID NO: 32666 - DNA, 317 bp, Gossypium hirsutum
  Clone ID: LIB3149-008-Q1-K1-E10
gaaagaagcaggagaggaccggggagctgtaacgaaagagcagcctacgccagaggcgcgggagagctagagcggaaggaggctgccgatgacagccccgatgagaaaaccaagtgccatacatcaggaaatactgagcttaagggagagaagattattgataaagaggagtgcgaaccaagggcaaacgtctcagcgtatggcgacgacgccaatctaaaaggagacaaatcatcaacttgcgcagaagatttagaaccgagacctaacggaagggcttacgggggcgaagaagctggtcctaaaggacagaaaga

SEQ ID NO: 32667 - DNA, 292 bp, Gossypium hirsutum
  Clone ID: LIB3149-008-Q1-K1-E2
acagcagttcctggaactttttttactaccaaacaaaaagccagcagaaagctggcaagatttgttgctttcacctaaagggtcatcgtatccttttctctcactgaatgcagctcttgatcacacaaacaacaattcaaatagtatacgatcatgtcttatttaccagcaagaaaagggagacacacacaacggtacgaggataatttgaggcttgttgccgggggtattccatacagagaggagaaggatgttgaggacagcaggatcagagttcttatgatatccacac

SEQ ID NO: 32668 - DNA, 352 bp, Gossypium hirsutum
  Clone ID: LIB3149-008-Q1-K1-E4
gacaggggcggaatttaagaatacgggatcggtggaaactacgtcggcagtgaacacgaatcattacgccgatctatcagacgagaacgagaagctgaagaaggataatgagatgttgagctcggagctggcgcaagccaagaagcaatgcgacgaactggtcgcgtttttaaccgagtgcgtgaaggtggggcccgatcaaatagatcgcatcatgcggcaaggaaacggtggttccacccttgaaggcgacgatcttggccgtttctacggcgtcgatgacaactaccatgatgaaaaagggggcggcgaaaatggaaaccgaaggttgaaactgtttggggggtgggtg

SEQ ID NO: 32669 - DNA, 360 bp, Gossypium hirsutum
  Clone ID: LIB3149-008-Q1-K1-E6
aaagcaatataagtagatacttctctgatccccagtactactttcaagtgaacgatcaatatgggagaaacaaattgaagggtgttttactgccatttcttcacaggggccattggacaagaataactgagccagtaggtggcaggctttcctataaacccccaatttatgacataaacgcaccagacttatacatcccatttatggcatttggcacctatgtcgttcttgctggattgtcacttggccttcaaggaaagtttagccctgaagcacttaactggctatttgttaaggggttgtttggctggtttctgcaagtctcgctgctgaaagaaacattactattactgggcaggg

SEQ ID NO: 32670 - DNA, 333 bp, Gossypium hirsutum
  Clone ID: LIB3149-008-Q1-K1-E7
gtgatgtcccctacacacatgccaatgttattttagcttacaaggattttgggtataaacgcaccacggatttagctgctgggttgagaaaattcgtgaaatggtacgtgagttactttgggattgaatcgaaacgctcaaaagaaacccaacattttgatgaatccagttaagaacaagctttcatattttcatttccatggctgctgcccggtcctttttaattcttccttgttatttaatggttatattgatgtaaaaaagaaaaaccaaaaaaaggaaagggatcaaaattgttgttccttttgttcaatattttttttgtgttttttt

SEQ ID NO: 32671 - DNA, 351 bp, Gossypium hirsutum
  Clone ID: LIB3149-008-Q1-K1-E9
ggtgcttagagttgtgcactataccgaatacctatccaaaaaaaagggtttcctttctcttgtttggggatatacaactttacttgttgattatggttgtaggagatatattaggattaaaaaacaatgaacataggaggagaaaggagtgaagatacaaaattaagagaagagctgatcctcattcccctctacttcattagttactatatataatatcatagtgggtagaatagaagacatgagaaagagcgagaattgagaaaataaactaatgggtttttaatagaatggaaaaggagagtattttatttgtgctttatagcaccaaatgattagtttttgcctttt

SEQ ID NO: 32672 - DNA, 125 bp, Gossypium hirsutum
  Clone ID: LIB3149-008-Q1-K1-F1
cccgccaaagtccatgccagtaggtgaaaactctctgcaaatgtaataactccattcttgtgtacactacacatagtaaaagaagcaaattgccattagtgatcaaaattaacggggggggtgtt

SEQ ID NO: 32673 - DNA, 324 bp, Gossypium hirsutum
  unsure (1)..(324): unsure at all n locations; Clone ID: LIB3149-008-Q1-K1-F12
ccgggcggaaacccgggacgcccacgcgacgaaaaaagacaggganancaaaaagggggcagaagccgaggagaagacagcaggaggggggatgcagacagaggcaagcaaagaaaaaccttccatcggcacggggatagcagacggaccaggaacataggatgaggaaggaaaaaggaagccacaaactgccgcaccagggaagacagagacataaaccaaggatgcagggaatgacaacaaagggaaggagggaacaagtgaaaatgctcatagagcaacggacggaaaggaagggcaaccctagaagaccgagaaaacaaa

SEQ ID NO: 32674 - DNA, 371 bp, Gossypium hirsutum
  unsure (1)..(371): unsure at all n locations; Clone ID: LIB3149-008-Q1-K1-F3
ggaaaaagaaagaggaaaggaagaaaatggggaaatcaactcctgtgaaacaagcggcggtggttttgggagcgctagctttcgggtggatggctatagagatggcgtttaaacctttactggacaaggctcgctccgccatggacaactccgaccctgatcgggagcccgacgacatcgactccgctcgcaaggacgactccgactccgactccgatcggaagcctatctcttatgctgatgccgtcgccaagaacatagcgggtgcaagttaggggcgagattcttgtgtttggtccagtccaagtaatcatgaaagtagggttcctttttatgataaatggaattatggggttatcttattntagatt

SEQ ID NO: 32675 - DNA, 269 bp, Gossypium hirsutum
  Clone ID: LIB3149-008-Q1-K1-F5
cggcaaggaaaccatcaacatccaagagcaatattttgaagatgggaggcaccaagaagttggcgataaaagccgtatgcagagcgatgctctataccagtatatgacggagaatagtgaatatccaagggagtctgaacccatgaaagagcacaaagagttgaccgttaagcatacatggaaccttatgactacataatctgatgaaggacaattgttgaacatgcttcataagctgatcatgtgcgaagaataccatggaaaattgg

SEQ ID NO: 32676 - DNA, 381 bp, Gossypium hirsutum
  Clone ID: LIB3149-008-Q1-K1-F6
gaggacaagcatgggccgagtttgatgaaattgacttccgctagtaacgccttccgtcagatgcggaacttcccatagtatgatagacctatgcggatacaatatgcgaagacaaagtcagattgtatcgccaaaaacgatggaagctttgttcccagagaaaagaagaagaagcaagaagaaaaagctgaaaggaagcgtcgtgcagaggaagcacagcaatctgcaatgccgaatggcacaggttttcaaaataatggtgggccaaaggctcctctccatcatggaaacctgaatgctgagcaggccgcaccaaacaatattctgtacatacagaatttgcctcacgagacaacaagcatgatgccgcagctggttttc

SEQ ID NO: 32677 - DNA, 275 bp, Gossypium hirsutum
  Clone ID: LIB3149-008-Q1-K1-F8
gcaaagacatgggtccacagagacgaaatgttatgtttgactaggactggcaccaacaggttatcactgacgaaaggactcagtgacccgcaatcactaactaatactaatctaatacaactaatactaatgtggtcctaagaaaaaaattgtcgaaaactgtaatactaacttagaatgaaggacacatgaatataggctgatataataaaaagaacagtacatgctgtatacttgccccggaagcactgctacagaatgctgtacgcaattga

SEQ ID NO: 32678 - DNA, 225 bp, Gossypium hirsutum
  Clone ID: LIB3149-008-Q1-K1-F9
ggaaaaaccggggcgaccgacgcgaccgagcaaaggaagagggggagcgacagcgggaggaagaaagagcgacaagccacaacgagggaggagaaaagggggggggggggaaagccacgcgcaggcgagcaaagcaaggaacccaagggaaacggagggagagggagaggaacgagcagcgccaagcgaaagggagacaagagccacacaagcgcaggaaggaac

SEQ ID NO: 32679 - DNA, 323 bp, Gossypium hirsutum
  unsure (1)..(323): unsure at all n locations; Clone ID: LIB3149-008-Q1-K1-G1
accgcacgcgacacgggaaaaaaaggaaaccagaaggggccaaggaggaaaacagcaggagcnagctgcagaacaagaagctcagcacaatggcaatactgccagaaatgccaagaaggctaggctgaaacaagccaaggaagaggctgaaaaggagattgcagaatatcgagctcaagtggagaaggagtttcagaggaaacttgccgagagcagcggggattcaggtgctaatgtgaaacgccttgagaaagagactgaagcaaagattgaccacctgaaaaatgaggctgcaagaatataagatgatggtggcaaaatgc

SEQ ID NO: 32680 - DNA, 411 bp, Gossypium hirsutum
  Clone ID: LIB3149-008-Q1-K1-G12
ggcttctctaatccttgttctcgtcgctgtttgtgctcttatgggttcagccgtagctgcggaagccccagcaccgagtcccacctcaggaaccgcctccatctccccctcattcgtctctgttttctttgccgctgtcacggctctgcttttcggctctactctcaggatctgaagggtgttggctattgatggtgtagagagggtgtttgatttctcatttatatagatttaatttttgggaggggtgaattttatatggagttttagtatatctaggagtccctatatatataaatatgcgagagtcgagagaggtagttttgttatctaccgcacagattattcatggtggaagaatgttggacttatttgtttcagtttttatatggggtgaattcatttgcgatt

SEQ ID NO: 32681 - DNA, 237 bp, Gossypium hirsutum
  Clone ID: LIB3149-008-Q1-K1-G4
aaaaaaaaaaaaagaaggagaaaaaaagggggggggaaacaaaaaagaggggggggaaaaaaaaaaaaaaaagaagaaaggaaaaaaaaagaagaagaaaggggggggggaggaaaggagagaaaagggaggggaaaaaaggaaggaaggggggaaaaggagagggagggggaagaaaaagaaaaaaagggggggggaggaaaaaaaaaggaggagaggggaaaaaaggagggggga

SEQ ID NO: 32682 - DNA, 408 bp, Gossypium hirsutum
  Clone ID: LIB3149-008-Q1-K1-G5
ccgaccgacgcgtacgagttggggaaaaagatgatgatttttcgattatttatgctgacattgaagggccagctgggactccatatgaaaatggtgttttccgtatgaagttgttactgtctcatgatttccctcattctcctccgaaaggctactttctgaccaagatttttcatccaaatattgcacccaatggggaaatttgtgtaaacacactaaaaaaggattggaatccaagtcttggattacgacatgtactcatcatagttaggtgtttattgattgagccatatccagaatctgcactaaatgaacaggctggcaagatgctgcttgaaaattatgacgagtatgcccggcatgccaggctttatactggaattcatgcgaaaacaaaaccgaagttga

SEQ ID NO: 32683 - DNA, 216 bp, Gossypium hirsutum
  Clone ID: LIB3149-008-Q1-K1-H11
gagcagaggaattaagaagggtttgttagccgatgaatcgagcgcatttttggggggtatctttggatggtgtgtggatcaaaaatagtatcatggaggggcaatgttggcagtcttaattataccattaaagtaaataaggttgttgaagaaggattaacaaggggggaagggacaataaattgtatagttatttataatctatttattttaagg

SEQ ID NO: 32684 - DNA, 412 bp, Gossypium hirsutum
  unsure (1)..(412): unsure at all n locations; Clone ID: LIB3149-008-Q1-K1-H5
gaccgacgcgnccgctagcgcagaggatgaggtaatcgccgcatgctttcatcctttccctggaggaggtcttgtgggtggaaccaaggaagggagactgagagtgcttcattacgatggtgcttgagacaccaatcacaacacatcaaattacttctctgtagaaaacacggccagagttgaatagcaagagtaaggtttaagttattcttccttcttgtggaatgccaaatccgatgaccatttttcagaagaaaacatggctgtcatagaatagcaaggtcgtccttattgtggtattcaggatctgattaaccattttggaattaaaatgccactatgcactgatattggtggattggaacaacagagtacccattttattcagatgctggggggggttttaactatt

SEQ ID NO: 32685 - DNA, 200 bp, Gossypium hirsutum
  Clone ID: LIB3149-008-Q1-K1-H7
aaaaggcagctaatcggagctctaacattgttggggggaactggaaacaccgagcaactaagctggaaacaggctgttattgcagcctcttctggaatggtcagccaacaaaatattttgcgtgtgctctttgatgtcaggtgaagcaatcagggtttggatcgctcataattcgatacggcattttcatttgattaaat

SEQ ID NO: 32686 - DNA, 383 bp, Gossypium hirsutum
  Clone ID: LIB3149-013-Q1-K1-A1
tctcgtcttctcctgtatgggagctgcatatgggacggctaagagtggtgttggtgtggcttcaatgggtgtgatgaggcctgaattggtgatgaaatctattgtaccagttgttatggctggtgttttgggtatttatggcttgattatcgctgtcattattagtactgggatcaatcctaaggccaaatcgtattaccttttcgatggttacgcccatctttcttctggtcttgcttgtggccttgctgggctttctgctggaatggcaattggaattgtcggcgatgctggtgtcagagctaacgcacagcagccaaagctttttgttggaatgatccttatcctcatctttgctgaagctttggctctttatggtctta

SEQ ID NO: 32687 - DNA, 355 bp, Gossypium hirsutum
  Clone ID: LIB3149-013-Q1-K1-A10
ggcagccgtggctccaaaaccagcacctgctccgcctttttctggtgcaaggccttctgctcctgtcaaattctcaaatgatactgagaggcttcaacatattaatagcatcaggaaatctcctgttggagctcagatgaaacgtgttatcgacattctttttcagacaaggcaagctttcacaccggaacagatcaatgaagcatgttatgtcgatgtgaatggcaatagagatgtttttgagggcttgaggaaaaatccaaaagtgtactatgatggaaagcgcttctcgtacaaggctaagcatgatgtaaaaaacaagaatgaacttcttgttttgaattcgaaatttata

SEQ ID NO: 32688 - DNA, 278 bp, Gossypium hirsutum
  Clone ID: LIB3149-013-Q1-K1-A11
accgtactctataacacagaatatattcatttgtttatgaaaatatctatggcgccttggaaaggattcaacactagacagtaacaaatgcactatctgttttacgtgaagcaatacatgaagtaactgcggatctaacgataaaagcaagacatggtgagcaatctgctgcatttgtagcagatgcctatgattaatatctcatctaaggctgtaattgcatgcttataatttcatacatattatgcgactgattgatgatcattggactttttgtt

SEQ ID NO: 32689 - DNA, 389 bp, Gossypium hirsutum
  Clone ID: LIB3149-013-Q1-K1-A4
cggaatcgagagctccaagtgggccatttttggtaagcataactggcgatgcgggatgaaccggaagccgggttacggtgcccaactgcgcgctaacctagaacccacaaagggtgttggtcgattaagacagcaggacggtggtcatggaagtcgaaatccgccaaggagagcgagtcaggctctatgtaagaggaaccatcttgggttacaagagatcaaagtcgaaccagtacccaaacacttcgttgatccagattgagggagttaacaccaaggaggaagtagcttggtatgctggcaagcgtatggcttatatctacaaggccaaagtgaagaagaatggctcacactatcgctgcatttggggaaaagttactagatctcat

SEQ ID NO: 32690 - DNA, 370 bp, Gossypium hirsutum
  Clone ID: LIB3149-013-Q1-K1-A8
aaggactggaagggcaggtgcaactggattggcttatacattcttcgtcgatcaggattcgaagcatgcttcagatctcatcaaagttctggaaggagcaaaccagctggtgcccgctgaacttcgtgatatggcttcacgtggtggtttgatgggaaggcctaggcgttgggctccaagttctggtggctttggtaggggacgtggtggacgtactgatttgggctatggtggctgggacagtggaaggggtggtcgtggaatttctacatcctctacctggcttgagaaaagcggcggaagacgtggaaatgatcatgagtctcgcgataggtacaatcgtggtttccatggtagtaatgataggaga

SEQ ID NO: 32691 - DNA, 381 bp, Gossypium hirsutum
  Clone ID: LIB3149-013-Q1-K1-B11
gtttctggcaagtttggatggtcagctaacatggaaaggttgatgaaagcacaagcgcttggagatacagcaagtttggagttcatgaggggaagaaggatcctggagattaatccagatcatccaattattaaagacttgaatgctgcttgcaagaatgcgcctgaaagcagtgaagccaagagagcagttgacttgttgtatgatacagcattgatctccagtggtttttctcccgacagccctgccgagttaggtaacaagatatatgagatgatggcaatggcacttggaggaagatggggtagatatgaggacgatgatgaagtggaagcatcagaagttagtgctgctgaaactgatacgagtgccagtgaagct

SEQ ID NO: 32692 - DNA, 144 bp, Gossypium hirsutum
  Clone ID: LIB3149-013-Q1-K1-B12
gaggatcttgaaagtggtttcacctcagatgttgaatccaagtacaagaagaaggtgaactgtaggccgaacgatttagcttcttcaagctaaaggaggaacatttatgagccatcaataagaaaggataagaaggattggaga

SEQ ID NO: 32693 - DNA, 359 bp, Gossypium hirsutum
  Clone ID: LIB3149-013-Q1-K1-B4
ccttcgcgcccccccaacatgggaaggtcctctacggactgggaaaagacattaatctccagaaatcagtatcagctggcaaattcaagggatattccatctcaatcagctcctacttgaatagcatggaatctggaacagcctagactgtggtggcagaatgagacccacagtctccattatcgatactgaaaacatcagttgtacagatttgggagagtatggtgttgtaataattccagactttgttctatcaattgatgattatcttcaaattctcacgaggattgcacggcacacagtcaatggtgtattgcatagctttttaaacttaagatgattcgcagcattcctgcccg

SEQ ID NO: 32694 - DNA, 346 bp, Gossypium hirsutum
  Clone ID: LIB3149-013-Q1-K1-B7
cctacttcgaaaattgtatatgacgagtattatcacgagcggtttccacctggtgatcccagcaagcgtgcttttgcttatttcgtcttgtctggtggcaggtttgtttatgcctctttaatccgccttctgatcctcaagtttgttctaagcatgtctgccagcaaagacgttcttgcactcgcttcccttgaggttgacctttctagcatagagccatggagcactgttactgtcaagtggagagggaagcctgtttttatcagacgtagaactgaagaggacatcaagacggctaacagcgttgaccttgcatcacttcgcgacccccatgaagatgcagtca

SEQ ID NO: 32695 - DNA, 379 bp, Gossypium hirsutum
  unsure (1)..(379): unsure at all n locations; Clone ID: LIB3149-013-Q1-K1-B9
agggaaacagagagcaagagaaaatgaagaccatactctcatcagagaccatggatatccccgatggggtcaatatcaaagtgaaggctaaaatgatcgaggttgaaggtcccaggggtaagctcactcgttacttcaagcacctaaacctttatttacacctcaccaaggacgaggagaccggcaagcgtaagctcaagatcgaggcctggttcggtaccaggaagaccagcgctgccatccgtaccgccctcagccacatcgagaatctcatcaccggtgtcaccaaaggttaccggtacaagatgaggttcgtctacgctcactttccgatcaacgcctncatcactagcngcaacaagtccatcgagatccgtaa

SEQ ID NO: 32696 - DNA, 335 bp, Gossypium hirsutum
  Clone ID: LIB3149-013-Q1-K1-C1
ggagagtactggggagctgtaatgaaagatcagcctatgcctgaggcactccaagagcttgttcggattgaggctgccgttgccaaccccgatgagaaaaccaagtgccatacatcaggtaacattgagcttaaggaagagaagattattgttaatgaggagttcgaaccaaggccaaacatttcagcttacggtgatgacgctaatctaaaaggagataaatcatcatcttttgcagaagattttgaaccgagacctaacatttcggcttacgggggcgatgatgctggtcttaaaggacagaaagaatcattcactaaagatttcgatccaca

SEQ ID NO: 32697 - DNA, 346 bp, Gossypium hirsutum
  Clone ID: LIB3149-013-Q1-K1-C10
tacagattcaaaaagaaataatggtagaagttgcaatggccactcttacagtgcccacgagagttccttcagtgtctgaagattgtgaacaactaagaaaagccttttcaggatggggaactaatgagggcttaatcatagatatattgggtcacagaaatgcggagcaacgaaacttgattcgaaaaacctacgctgaaacctatggagaggatctcctcaaggcactagacaaggaactctcgaatgactttgagaggctggttctgctttgggctcttgatcctgctgaacgtgatgcccttttggcttatgaagccaccaaaaagtggacttcaagcaatca

SEQ ID NO: 32698 - DNA, 385 bp, Gossypium hirsutum
  Clone ID: LIB3149-013-Q1-K1-C11
catctataaatcgggcattggaaccccaaaataaaaaacagcttccttctgccttgggactgatagagagcatttctaataatgtctggcgaataggaagaaaacgcagctgagctcaaaattggagaagagtttttgaaggccaaatgtttgatgaattgcgaagtggctctaattcttgagcataagtatgagcagcttcagcaaatgtctgacgatcccatgaactaagtttcccacgtattcgagaagtcaccgcactatgtaaaacgccttaaccggcataaaaatccagatgctgtcagacaagttccagaaatcttgagtagatatcagttagctgaattcgagctatgtgttcttggcaacctgtgtcctgaaactg

SEQ ID NO: 32699 - DNA, 261 bp, Gossypium hirsutum
  Clone ID: LIB3149-013-Q1-K1-C12
gatttagataacgaggactcgatcctgaatgtaaaaactgacgctcgcatgcgtccggagtcttatgtttactacatgataatccatattaactataatgacaagcttgctgacacgcttgtattcgacgagaaggtgaatgtcgaaacgtacatgaattaagacctatcgttgctatatgacgcatcagtatgcccaaatggagcattttgcggacgatctcatggactttgttgctgactgcatccctattatcacagc

SEQ ID NO: 32700 - DNA, 202 bp, Gossypium hirsutum
  unsure (1)..(202): unsure at all n locations; Clone ID: LIB3149-013-Q1-K1-C2
gggaatgggaggacatggtggatgatattgttggccgggaagttatggngggttttcaggggggattcaagggccgcctggtcctatgggtcatcctcatcccttgaattcatcaagagttggagtgggcgctttgagtggaaatggcggtgttgctgcttggggttattccggactttgtgggccgtatggtgggtattgt

SEQ ID NO: 32701 - DNA, 183 bp, Gossypium hirsutum
  Clone ID: LIB3149-013-Q1-K1-C3
tttgggaaagatttggaagacttttacgtcccgggttggcgttttatgtatttggaacactcaacctctggtcatcatatgaaagggaaccgcagagtctctgtgacaacaagaagtaattatcgagatatcaagtaccgacctgatttttttcgggaaatgcttctagacaagatcggattc

SEQ ID NO: 32702 - DNA, 192 bp, Gossypium hirsutum
  Clone ID: LIB3149-013-Q1-K1-C5
cggggtggaccaagccgtccggggaaagactgattacagggctaggattctcttaaccattcaagacaggaacaaatacagcgcgcctagataccgattcgttgttcgatttatcaacaaagatatcactgcacaaataatttctgctaatattactggtgatatgattcttgcctcggcttactcgcatga

SEQ ID NO: 32703 - DNA, 378 bp, Gossypium hirsutum
  Clone ID: LIB3149-013-Q1-K1-C8
gggaatgggaggacatggtggaggatatggtgggccgggaagttatggtgggttttcaggtgggatgcaagggccgcctggtcctatgggtcatcctcatcccttgaattcatcaggagttggagtgggcgctttgagtggaaatggcggtgttgctgctgggggttattctggacttggtgggccgtatggtgggtatggtggacaaggttcaactggctatggtggaccaggatcagctggctatggcggaccaggttcaactgtttatggtgggttgactggtgctggtgcggggggtgggttgggtgctgcaagtggagggtcttcattgtatagaatgccgccgaattcagctgggatgccaactggtggtta

SEQ ID NO: 32704 - DNA, 376 bp, Gossypium hirsutum
  Clone ID: LIB3149-013-Q1-K1-C9
tacagattcaaaaagaaataaaggtagaagtagcaatggccactcttacagtgcccacgacagttccttcagtgtctgaagattgtgaacaactaagaaaagccttttcaggatggggaactaatgagggcttaatcatagatatattgggtcacagaaatgcggagcaacgaaacttgattcgaaaaacctacgctgaaacctatggagaggatctcctcaaggcactagacaaggaactctcgaatgactttgagaggctggttctgctttgggctcttgatcctgctgaacgtgatgcccttttggctaatgaagccaccaaaaggtggacttcaagcaatcaagtccttatggaaatagcctgcacaaggtc

SEQ ID NO: 32705 - DNA, 282 bp, Gossypium hirsutum
  Clone ID: LIB3149-013-Q1-K1-D1
aaagctaatgtagactatgagaagattgtgcgtgacacgtgccgcaacattggatttgtttctgatgatgtgggtcttgatgctgacaactgcaaggtcctggtcaatattgagcagcagagccctgatattgcccagggtgtccatggccactttaccaagcgcccagaagatattggagctggtgaccagggccatatgtttggttatgccactgatgaaaccccaaaattcatgcctctcatccatgtccttgcaactaagcttggggcacgtcttact

SEQ ID NO: 32706 - DNA, 369 bp, Gossypium hirsutum
  Clone ID: LIB3149-013-Q1-K1-D10
cgtctataaaaatcatacgaaataagcaaaccggacagtctgaagggtacggattcgtggagtttagctctcgagcaacggctgaaaaggttttacagagctgtaatggttctctgatgccaaatacagagcagcctttccatctgaactgggcctcgttcggtgtgaacgaaagacgatctgatgctggctctgatctgtctatattcgtaggagatttggctgccgatgtaactgatacggtgttgcatgaaaccttttctagtaaatttcaatcggtcaaaggagcaaaagttgttatcgattcgaataccggtcgttcgaaaggttatggtttcgttcgattcggtgatgaaaatgaaaggtcga

SEQ ID NO: 32707 - DNA, 389 bp, Gossypium hirsutum
  Clone ID: LIB3149-013-Q1-K1-D3
gcggcacttgcagtgggcatttcatgtgctggcacaggattgagtgaggcgatatcattgctagaacccttaacatcagatgttgttgattttgttcgccaaggtgccctcattgcaatggctatggtcatggtccagaccaatgaagccagtgattctcgtgtcggaacattcaggcgacaattagaaaagataattcttgataaacatgaagacacaatgagcaagatgggagcaatcctagcctctgggatccttgatgctggtgggaggaatgtaaccataagattgctttccaagacaaagcatgacaaagtcaccgcagttgttggtcttgcagtttttagccaattttggtattggtatcctctcatttattttgtaagctt

SEQ ID NO: 32708 - DNA, 249 bp, Gossypium hirsutum
  Clone ID: LIB3149-013-Q1-K1-D4
gttgcactggaactgggcatttgatgtgctgtcgctacatttagtgaagatgtaccactgcttgcacccttaacatcatatgatgcatattgtgaacgccaaggagacctcattgcgatggctattgtcattggacacaccaatcataacagagagtgtattgatcgtacattcaagcgaccatgatgcattatcattattggtacacatgaacacatcgctgccaagatgggtacaatggctgaacat

SEQ ID NO: 32709 - DNA, 268 bp, Gossypium hirsutum
  Clone ID: LIB3149-064-Q1-K1-H7
tggataggttcttgaccttagtgcgttttttattgctgctagtgctgcagaagaagggtgggccttaatcatggtatgggccaatgtttattcttgtttaagcttcttaacagtgttgaatgttgctggtgggatttatgtctattacaccatgtttttttttactactcaagacactatatttaatgatttgatgatatttaaacgtttgttggagctctgtgtttttagatgaaatacatgaaaacgtctttgttaagcctatttt

SEQ ID NO: 32710 - DNA, 136 bp, Gossypium hirsutum
  Clone ID: LIB3149-001-P1-K1-A10
gggacgacccacgcgtgcgctttggtatataatgaattgccttcaatttttcagaaaggcacgaaatttggtagtgtaggtttgatgagcctaatgaaaatgtcagtactggctgtggctgtggactgactatatt

SEQ ID NO: 32711 - DNA, 84 bp, Gossypium hirsutum
  Clone ID: LIB3149-001-P1-K1-A12
gtttttctttccatttacttcttatgtttggatgctgacatctggaattttgaagatatcaggtgaatatgcttgaatttttgc

SEQ ID NO: 32712 - DNA, 226 bp, Gossypium hirsutum
  Clone ID: LIB3149-001-P1-K1-B10
gtaggtttcctacaggtaactaaggagtaggttggccatttttcatttttcctgttgttcggagaattttgcaagtgttgagaaagtaaactgaaagttttgtcagagatttgaagctttttacaagcaaaaaataaaaaataaaaaaaaaacacaaataataaaaaacaaaaaaaaaaaaaaaaaaaaaaaaaaagaaaaaaaaaaaaaaacaaaaatataaata

SEQ ID NO: 32713 - DNA, 83 bp, Gossypium hirsutum
  Clone ID: LIB3149-001-P1-K1-D9
actagttcgatcccccggtttgcatgaattcgccgcctgcatgctacgtgagaacgcttatatagtgtcgcgtaaattcaatt

SEQ ID NO: 32714 - DNA, 212 bp, Gossypium hirsutum
  Clone ID: LIB3149-001-P1-K1-E2
cggacgcgtgggttgaaccaactgataccattgatcgtatcaaggaacgggtcgaagagaaagaaggaattcctccagttcagcaaaggcttatatacgccgggaagcaacttgcagatgacaagacagcgcgggactacaatattgagggtggctctgtgctgcatcttgtgcttgcactgcggggtggccgtctctagatggtgcaatat

SEQ ID NO: 32715 - DNA, 347 bp, Gossypium hirsutum
  Clone ID: LIB3149-001-P1-K1-F10
gatccacgcgtccgcgtgatagatcagctcgttaacaagcttcatactgctataattactgaacatggtgtaacaagttcccggccatattcattgaagacgtactgggaattctctgcttttgagaaccctgcacagggtgctataggatcatggtagctgtagcaaactttttatcccttctggaatcttctatgcaatcatatgaaatgaacattaaacatatatggaagacaacttgattcatgttttatgtctggttgaaacttattgagtttgaggctgattgtcatttgatttaatgcgacagcgtatgctttacttaaaaaatcttaatatacctatct

SEQ ID NO: 32716 - DNA, 319 bp, Gossypium hirsutum
  Clone ID: LIB3149-001-P1-K1-G10
gcgatgggggatcgagaacatgctagagaccaacatctagtgcgtacatgttgtgccttccaatgacgaatcatatagtattaaggaacgagtgtagtgatacttttagttgcttctcttagcattttcaaacctttttaaagattttgtttaaaatgttgtaaggattgcttttattttgtttggaggttttcattgagccctatgctcttatgatatcttggtttggttgttacattagaagatattttacttaaataaaaaaatttatagtattaacttagtgacttttatttccttgacaaaatgcaatttttgc

SEQ ID NO: 32717 - DNA, 421 bp, Gossypium hirsutum
  Clone ID: LIB3149-001-P1-K1-H11
gcgacgaatgctacataacaaaatgatcctcaggttggacgaacactcgttacctacatatgcaggggtgggctcacgcatcatgtggcagggcttgctatatcaattaaaattgatacagtatagacacttgaagttgaaacgttaacgaaaccaccatagtcggctcatatttacccacttattgcataatgaaaactctattgcacgatggccaaaatgacttatttactggttacatctatagtcaatctcttggcatgctctaataatgctttaaagaattgatagattataaaccgttttatgaaacatatacggagtataaacgtaagcctgatgcaaatgttatctggactctctttaatgtacttacatggtgtcttgtgaaatagaatattaaaacatggtttgtcgctct

SEQ ID NO: 32718 - DNA, 385 bp, Gossypium hirsutum
  Clone ID: LIB3149-001-P1-K1-H9
ggaaatgttactcttaaaaccgtacataaaatcggacaaactggagttacctacatatccaggggtgcactcacgcattctgtgacagcacttgatatatcactcaaaattgatacgggattggcacttgaagttggaaggcgaacgaaacgggcatagtcggttcatctttacgcccttattgaataaggaaaactcttctccaccccccccaaaaggaattatttacggattacatcattagtttttctcttcccatgctctaataatggtttaaagaattgatagatgataaaccgctttatgaaagatatagggagtataaatgtatgcatgatgctaatgttatttggactcttcttaatgtacttacatggtgtcttgt

SEQ ID NO: 32719 - DNA, 98 bp, Gossypium hirsutum
  Clone ID: LIB3149-002-P1-K1-E11
attttcctggtcctaaacaatcgttaaaacctaggttaaataataataagggatggtaaacctgtgaaaggaaattgccctgccatcaaaaaataaaa

SEQ ID NO: 32720 - DNA, 220 bp, Gossypium hirsutum
  unsure (1)..(220): unsure at all n locations; Clone ID: LIB3149-002-P1-K2-A10
cgggnccgacccacgccgtccgtgaggggcnntttctttttcttttaatggcgttgggtttttctggctttgggcgtnnttgatattnntagtattgagagcttcgcgtttnntgggtccannggcggtgcaacatgnnctgatggaaannnactatagcgttttccaatttttgaagtggggtatggatggtnnatgtatgcatnnngtgtgcatgcnn

SEQ ID NO: 32721 - DNA, 68 bp, Gossypium hirsutum
  Clone ID: LIB3149-002-P1-K2-B3
tctcttttttacctttatatttgctatcttcttatttccctttctctatattttttattcttctttta

SEQ ID NO: 32722 - DNA, 452 bp, Gossypium hirsutum
  Clone ID: LIB3149-002-P1-K2-B5
aaaatctaccattactacatatacctaatatttcaccgcgaataactcaaatctccaggagcgttcctatttcatctaagccccgacaatcaacaactaactaaattcaactaaaataaatacacaattccctaagctcactgtgattaaagattctcttactaactattgtatttcaaccttataataatacttatagagctttatcagttactttgtctgttaaaaatattgccttctaatgtttatctattttttcttattttagcctaataattttatattttatatttatttattttttttttcttaattttatttacttgatatttttatttatatttattttattttatatattttccaaatattttttattctctttatattatactctcttatttcttacttctacttcttttactttatcttcctttttaattttaaatttt

SEQ ID NO: 32723 - DNA, 115 bp, Gossypium hirsutum
  Clone ID: LIB3149-002-P1-K2-E6
gattacacgtgtacagtaaaatcatgaattctgcttgttcttaacgattgattaagacttggatgaataataataatggatggtaaaaatgttgagaggaaattgacctgacatc

SEQ ID NO: 32724 - DNA, 382 bp, Gossypium hirsutum
  unsure (1)..(382): unsure at all n locations; Clone ID: LIB3149-002-P1-K2-E8
gaagcatcanaattaccatcttcaaactccacagagaaccttgtcgagtgggtgcaaaataggcacgattacagcaacatttccagcatcattgatccgaggttgggcagtagcttcacagctgaaggcatggaggaattcataaggttaaccgtccgatgtttggaaccatcgagtgagaggagaccgaccatgagctatgttgtagcggaacttgatcggatactcgataaagagatgagcttgacgacggtgatgggggaaggaagcccaactgtgacccttggaagccagctttttagagcaacaaaatagaaaaaggaaaaaaaagaaaaccttgtagcctgcagcattcaaataccgggagtgacatgcgtgtgat

SEQ ID NO: 32725 - DNA, 333 bp, Gossypium hirsutum
  Clone ID: LIB3149-002-P1-K2-F5
gcgaaacgagactcctttaactgatgttcttgtttccttgttggatgaagtacatcaagagctggtttcatttatatcacagtttaccaatgtatacaagggaaaagagcatgctgagctcgagttcagtattggacctattcctgtgaatgatgggataggtaaagaaatcatcactcaaattacaacaactatgaggaccaacaaaacgttctatacagattctaatggacgtgacttcattaaacggattcgagattttatgaaagacttggaccttcaagttaaccaaccaattgctgtaaattactacccggttaaccttggaatcta

SEQ ID NO: 32726 - DNA, 347 bp, Gossypium hirsutum
  Clone ID: LIB3149-002-P1-K2-G8
gcggaaaaaaacagtggaattaagggtatggcatttgagaaagatctcaaccttgatgccaccgagctccggctaggcttaccgggaacctccgacgagtcaactaagaaccaaacgccggcaactcttcggagcaacaacaaaagagccttgcctgaagaatctatgtctagtaatgccacagcttccaaaaactgtgaccaagaaactgctccactccccaaggcacaagtgatagggtggccaccgatcagatcttacagaaaaaacaacttgcaacctaagaaagtgagggtgaaattagtgggaattatgtgaaagtgagcatgggatgggctcttatctta

SEQ ID NO: 32727 - DNA, 402 bp, Gossypium hirsutum
  Clone ID: LIB3149-002-P1-K2-H10
gcggggagctggttttggtcatccagatgaatcttcttatgcatacaccatcccatatgatcatgaaagggatcacccttatccttatgcgccagaacgtggcaaaggatcggggaaagcggttgtggggtggcttaagttaaaagctgctttaaggtggggaatatttataagaaagaaagctgctgaaagaagagctcagcttgttgagcttgattaactgttctgatgcttaaaaaaacgtattttaacatcattatctattagctggttgacaaaggattggtgcctcagcaatcattaaccttcatttggcaacattgttgaaaaattccaagttctgttatcttttgccatatttggataaggcataattcatcagaagaatgcttgttatataac

SEQ ID NO: 32728 - DNA, 274 bp, Gossypium hirsutum
  Clone ID: LIB3149-002-P1-K2-H3
gcggaagcccttggagatgccatgcaagcacaggtaatatccccggagtggcccgcagcgttctagctccaagcagctgctctgtttagccttgggatggacaatgatgccaacgaaaccctaaaagatggtacaaacttggaagccaaaaatcatagaaactgaaactgtataaaatatccttatatcttcctgtcttatgtcactcttttgcatttttttttgccgatttggttaaagattggagcaatgtaattgagattatttgcttgtt

SEQ ID NO: 32729 - DNA, 282 bp, Gossypium hirsutum
  Clone ID: LIB3149-002-P1-K2-H4
cagcagatgagtactttgagaaacatcccgaactgaaaaagaaattcgatgatgagagccggaatgacaattggggctattgacatgtttggtaatataagggtcaggctataaaacagtcccaaccagtatttctgagttggtcttattatttcttttgttgttttaaccccaaatgatgattaccgaaactctgttttttgtggtaatttcatcgggaactaataatattataattcacttgagaaccaaagtggatattgcaagacatgcttttcattt

SEQ ID NO: 32730 - DNA, 453 bp, Gossypium hirsutum
  Clone ID: LIB3149-002-P1-K2-H9
acgatgggttttggagcataattgttttgtttcttctccttctgttttatcattaccaataggagaattagtctgtacccccacagaaaaaaaaaaaaaaaaaaaaaaaaaaaaaaaaaaaaaaaaaaaaaaaaaaaaaaaaaaaaaaaaaaaaaaaaaaaaaaaaaaaaaaaaaaaaaaaaaaaaaaaaaaaaaaaaaaaaaaaaaaaaaaaaaaataaataaaaaaaataaaaaaatttgggggggggccttttaaaagaaacaaaattatttaccccgggaaataaaaaaaaaaaatttctttaaaaggggaaaaaaaaaaaaataaagggccggttttataaaaaattctaattaaaaaaaaaatgggtatccaaaataaaagcccttaaaaaaaatactttttttcaaagttggtaaaaaaaaaaaaaggccgaaaaaaatatttttt

SEQ ID NO: 32731 - DNA, 325 bp, Gossypium hirsutum
  Clone ID: LIB3149-003-P1-K1-A1
acggttgggtcacttggtgcaccacttttgttggacaactgcggagggagtgaaagctgaagaaattgacttgcttgaaaaccctggactggttgcttatatgcggactccattgcaagctattgccactcctaggctgccttctcatctgtacaaacgtgtggctgcggatatctaagttttttccctaaacttctaattcttattgctcttagcattagattttgaattctgaacttttttttttttacaagttctgttgtattatcaattatgtctcatgtgatttgtgatcggtcgcgtgaaagaagaccaaataaaaacg

SEQ ID NO: 32732 - DNA, 321 bp, Gossypium hirsutum
  Clone ID: LIB3149-003-P1-K1-A4
gatttggaaagaaaggttgtgaattggagagatgatgatgacaacactgtgttgcacattgcaggtacaaagcaacagcatgaggcagtacaactgttgttggattccttttatgggttagatgcaaacgctaagaactcggaaggcttgacagcttgagaaatcatagaaagggttgaaagacaggggttgaacatgagtggcgccgaagacgatgattccaccaccgtctagattgagcgcattaagaaaagaaccagtaggtctgaaagagcattaataaagttgatttctgcaaagaatgggttgtttgagaacatg

SEQ ID NO: 32733 - DNA, 454 bp, Gossypium hirsutum
  Clone ID: LIB3149-003-P1-K1-B1
cgtttttacttaactcggtctctgctaaaagtcaacttttgatagtactgttgttgtaggtgcacttccatatttcaactctgtttcctaagcagcagccagctctgatgttccaaagttctcagcatatatcgccacaaggaataccgaaaaagtcacctcttctagcagaatatccatggagtccgagatgggaagcatcacaaatggcagagcggatattgtgagtttcattagtcttagtagattctcaatcattttcagtgtgttttattaacatgtattgatttcttcagcgatttcttggcggatgagtctctgaacttcaaacggttctgtaatgagtctcaacctcaacactagaacgataaagggatgctgaagtttggtatgggttatgttttattcattcaagttgtctaaaaaatgcttaatgggacatttggtagttttc

SEQ ID NO: 32734 - DNA, 87 bp, Gossypium hirsutum
  Clone ID: LIB3149-003-P1-K1-B4
aaaaaaaaaaaaaaaaaaaaaaaaaaaataaaaaaaaaaataaaaaaaaaaaaaaaaaaaaagggagggaaaaaaaaaaaaggaggg

SEQ ID NO: 32735 - DNA, 79 bp, Gossypium hirsutum
  unsure (1)..(79): unsure at all n locations; Clone ID: LIB3149-003-P1-K1-B5
naaaaaaaaaaaaaaaaaaaaaaaaaataattttaaatttaaaaaaaaaaaaaaaaaataaaggggggaaaaataaaaa

SEQ ID NO: 32736 - DNA, 418 bp, Gossypium hirsutum
  Clone ID: LIB3149-003-P1-K1-C6
ggttagcatattggaattttatttaggtaggttccctttcgcggttggtagacaaggggattgggccagtctcatgtgcgcgatttgtatgtctcagccaccggaggccccacccactgctttcaatgaatttaggcattttatatcatgttgtttgcagagggatccagccaggaggtggtcggcggcttacatgcggcagtatgcttttattgtgagaggacaaccacatcagaggtgatcataaccttcatcagttattaccacctccacctcctctttcttcttagctttctatttctttttatttggtttgggattaggggaaaaaatcttttgtaagttttgatataatgagggtctggcgggagttgggtgcaatggctttccttcttctttttttttttcccttcaatgt

SEQ ID NO: 32737 - DNA, 451 bp, Gossypium hirsutum
  Clone ID: LIB3149-003-P1-K1-D1
ccataattgaatcaatgctccaaactagaggaatgttatggtaaaacttcgtttgaaacgatgtggtagaaagcaacgtgcgacttgaaggacatgatcagctgtggatgtcaaaacccaccactttccgttatgtagaaatgaaggtgctttttgctcgacatcctttgttctattataatccgtctttttgttgggttgtaatgtaaatagtacaggatggagctcgaagagaaacatccatttttcaggggcaaggatctagggttagttaatggaaatcaataagttggaacaacttcgtaagtctatttgtgatatagaaatcgaaaggatccgattcaaactattttcaaatcaaaaagaaaagttgttggaattggtaaaactctttcgatcaaaagtgtatcatgcgggaattaatcgttcatatgattctttgatagaaaaa

SEQ ID NO: 32738 - DNA, 362 bp, Gossypium hirsutum
  unsure (1)..(362): unsure at all n locations; Clone ID: LIB3149-003-P1-K1-D11
tagagcttctgatgattttcaagaaattgtttctgaagaaagaacttttanaagaaagggtaacatggatgcaccggtggggaacaagatttgtgaactttatgacctctatgttgatggattagatgaagatgctggtccgcacatcagaaagttttatgtagagcttgcacagctctggccagatggtatgatgaacaaccatgagattaaacatgcaatttgtagggcgaaagaaaggctgagagcaagatacaatagacgcaaggatcaagagaaaatgaggagggaaaagatgttgacactaggaccggaggagagtgttcgagtggactcttgcttaagtgcacaatcgcagcaca

SEQ ID NO: 32739 - DNA, 317 bp, Gossypium hirsutum
  Clone ID: LIB3149-003-P1-K1-D6
ctcttacgagacacacaactcacgtgtatccaaattcatggacagctatattggtgtccctggacaaccagcgtatgtggaacatgaggtctgcatcatgggaaaggcaatatctggggcaacaattttatctgagagtctggaatcctgttcggagtcttgctaacgaatacgacattccttctaatgtcttactctgcggtaaagcagttgggcgccacccttagccagccagtatggccctaatggctattatctgttaccagtcatcagagtttgactgctgataaaatagattgagagagaagaaattggat

SEQ ID NO: 32740 - DNA, 371 bp, Gossypium hirsutum
  Clone ID: LIB3149-003-P1-K1-D7
acgcttccatccttctatctttattttctcgcctgtgacgagaagccgacgctaccatggttcgggtcagtttctaccgggggtatgggaagacctttaagaagccacgacgtccgtatgagaaggaacgattggatgcttagttgaggcttgtaagagagtatgggctccgatgtaagagggagctgtggagggttcagtatgctttgagccgcatccgtaatgctgctagggaccttctcactcttgatgagaagaaccctcgtcgtatttttgaaggtgaagcccttcttcgtaggatgaacagatatggacttttggatgagagccagaacaagctcgattatgtgttggctttgacttgtgaaaac

SEQ ID NO: 32741 - DNA, 60 bp, Gossypium hirsutum
  Clone ID: LIB3149-003-P1-K1-E11
gtttttttttattttttttattttaatatatctggatacgagaaaaacaccattgctgtt

SEQ ID NO: 32742 - DNA, 396 bp, Gossypium hirsutum
  Clone ID: LIB3149-003-P1-K1-E9
acggctgtctgcctggaagataagctgaaggagctgcaacataaactagatttgttgaacaaagagcaacctcaggaacatgatgaactttgaggaacccagatagaagattcagacatggttagaggctgttgacttcataacaaatctatcattagaacacgtatcaatttgatcctagttatgaagcgaagtagaatgtggcctttttgagctagtagagaagattttcaagcgatatctgaaatctgaggtagcctcctgaaaatttttttcgtagggaagtatgcttcacattaaaatcacatagatgaagtgaggtacgggtatatttgttaggttgagctgaactgactatggtgaaaataaactggtcctcaatacttctttgaattt

SEQ ID NO: 32743 - DNA, 413 bp, Gossypium hirsutum
  Clone ID: LIB3149-003-P1-K1-F10
gatggaattattgatgacagctgttggagcagcgaagaattttgcagagaaaataagctatggcttgcattgggtgagaccaaggcagacaaggtagcttggatgaaagcaaaggagctaaaagtaaacctggttactgtctgccctggtcttctcatggctcccacttttccaaattctcatatacaaacttctataccataccttaaaggtgggcagatgatgttgcaacaaggttgcttagcaattgcagaggtgggaaaagtggccaaagctcatgttagtgtgtatgaaagcatgaattatggagcaaggtggaccggacttatgcttttgatgggagttgtgagaagacaacaagagggcattgagcttgaaaaggggttaaaaatgacaaggtttttgttgggaga

SEQ ID NO: 32744 - DNA, 366 bp, Gossypium hirsutum
  Clone ID: LIB3149-003-P1-K1-F4
gtgagctcttaccaatggctttcaaagctctgctgctgttactattggccacttttctgctggtctcaacaacaggtgcgtgcaatgaagtgggagagaagactgagattaagtatgctgctcctgttccagtgaaggcaccaccaactaaagcaccaactcccccatataagcccccagttcctacaccttcagttaagccaccaacaacttcagcaccgccttacaagccaccaagtccaccattgccgcctgttaggacaaaaaaggattgcatcccattatgtggacaaaggtgcaaattacactcaaggactaacctatgcttgagagcttgcatgacatgctgtgacagatgcaaatgtg

SEQ ID NO: 32745 - DNA, 256 bp, Gossypium hirsutum
  Clone ID: LIB3149-003-P1-K1-F5
cgttcctgggtttggagcctgatgagacaacaactgagttgagtggaagtgctgagcctgactcagtggacctttggatgcttgatgaccttgtgacacatcatcaacaacagcctcagctcttttattagaaattaaaaagttttaattagggtaatgttatgtttgatatgattatgcttaagactttaatgtttgtattaatgaagggtaaatagttgtgacaataaaaagattggccacccagttttaattt

SEQ ID NO: 32746 - DNA, 332 bp, Gossypium hirsutum
  Clone ID: LIB3149-003-P1-K1-F8
cccaccaccgcaagggtcccgcccgttttcgcagcctcgactttggtgaacgaaacggctacctcaaaggcgtcgtcaccgatgttattcacgacccacgccgcggtgcgcccttagctcgcgtcgtgttccgtcacccgttccgttacaagaagcagaaggaactgttcgtcgctgctgagggtatgtacaccggacagttcgtgtactgtggtaagaaggccacccttatggtcggaaacgtgttgcctcttagatctatacccgaaggagctgtcgtttgcaacgtggaacaccacgttggtgatcgagggcgtttcgctagggcttct

SEQ ID NO: 32747 - DNA, 194 bp, Gossypium hirsutum
  Clone ID: LIB3149-003-P1-K1-G10
gaaagtagcacacttccttgttaatgctggaatagtgaagaaagagcaaatcaagattcatggtttttgagtggttttagggatgtcatgtcttttgattttaatacctctggtctgtgggaagaaccctaatggaatatgatgttggagtttcagtttcatttataataaataatggtcatttatttgctttc

SEQ ID NO: 32748 - DNA, 397 bp, Gossypium hirsutum
  Clone ID: LIB3149-003-P1-K1-G6
tcgagacaaagaagtccccctcaccaacagcaaatgaaagcgatcagtgagtactaggacatgtttgagggttgagaaggtccagagtcgtcgtccagcgttgctcagtatgggtgtctgaaagtcagtcttgtcgtcctcatgttgctgcggttatcgagttactctaccttctcatgatcagtgttcagttgtattaatgctatggtatttccggtctttatggatcatagatgcatcattgtgtcagccatctaatctggaaaagattttaatgttgattctggttttatctattacttaggttttgtactttggaatcaactcatctattctagtgacaatgttactatggacttagatatgttgctacacttgccaaggggggaaaaaatac

SEQ ID NO: 32749 - DNA, 197 bp, Gossypium hirsutum
  Clone ID: LIB3149-003-P1-K1-G9
aaaaaaagaaagaaaggaaacagaaaaagaaaactgtaacccgctcttaacttcttcgcatgcagtcggagctccggctcccttaacggagccctgtttgattgtccaattttcaaactcttttagatctctgtccttttatctttttagatctcaactaaacccaacaataaaatattcaacgaataatataaaat

SEQ ID NO: 32750 - DNA, 250 bp, Gossypium hirsutum
  Clone ID: LIB3149-004-P1-K1-A1
ttggaagaaggtgtccgagattacaatctgaagttggccaaattaaagaagaaacaacggctagagtaattgctgcttatcgttatttcgttcaagtaatagcagtcaagaatcttttattggttaactggaatgttgatgaactgctagtaatgtatgcttttgtgtgagcgcttgtgtttgaatcaggagaatgttaagaactcatgtagtttgatgcttttggtatttaaaagttgttttgtgtgtg

SEQ ID NO: 32751 - DNA, 409 bp, Gossypium hirsutum
  Clone ID: LIB3149-004-P1-K1-B1
tcgcagcacttcagtagaggaagtctcaaacattgagaaggttttgaagcaagcagtgttttgtaaatccttgggtttgctatttacgaactgtttcctactggatcaaaaagctgtgcgcaatcctgaaacaccaaagttggaaatgccatttgagcaaatgttcactgtactaaaagattatcatcaggcacccccagaaagtaaaagaagaattaagatgcgtacatgcgtccctggaagtgaaattccggaatggtttgatttcaaaagcttaggatcttccataaacatccaattgccttcagactggtgctctaataataactggataaactttccatgtttcgttgcttccgccgttgcttcattcccagactcttataatggtatggaatttggcattaac

SEQ ID NO: 32752 - DNA, 87 bp, Gossypium hirsutum
  Clone ID: LIB3149-004-P1-K1-B12
acggtttctctttccatttacttcttatgcttggatgctgacatctggaattttgaagatatgacttgaatatgcttgaatttttgc

SEQ ID NO: 32753 - DNA, 241 bp, Gossypium hirsutum
  Clone ID: LIB3149-004-P1-K1-C11
taacttacacctgcattatagtgtaaactaaatttattgcattacccaaagttaaacaactgggcgactgttaacaccgtggcgactgccaacataatggcgtggcataacataatcgtcttgcaagatatcggattatcgaaaagtgccgtactgatcgacatgtccaaaaatagcgcactctgaatcacgaatgcaacgtgcactgtaaatgcgaattaagctctttcggtgcattaag

SEQ ID NO: 32754 - DNA, 292 bp, Gossypium hirsutum
  Clone ID: LIB3149-004-P1-K1-C6
tcggattattcgaggacaagcaacaaataactaagaacatccatctctcccacctttggaggaatacatgagaagtgccactaatcgaagacaggccctactcagtgttgcagagcagagaaaccaaaacccaagccctcgtatgaagaaacctccattagatttgtcgtctttgcaatctacagcactttaggtgattacatttgtagagagacaaaggacttttgcggagaaagagagatttttcatttaatataataatcagtacattacatagatatagtaaaaaata

SEQ ID NO: 32755 - DNA, 404 bp, Gossypium hirsutum
  Clone ID: LIB3149-004-P1-K1-D1
gaatccatccatcaaccggcagacgccgccaactacgtgcaacccaatggcacgtggtgccgccgacggagcgcagatagccctgctggaagctctgaccattacgaccgctcacggcgacgaagttgtcattcgggaaatacagcggggccggagcattatgcgcctgcggatagagcgcctggaagtcctagcctacgcaagtgacaaacggcatgctgcgccagctctcgaccgactgcccgcgctcgatgcgcatgccggattcgaggatcagcaccgaatggacctggctgaccaactggtcggagatcaagccgccaactacgccggaccctacgatcacgacgtcggtagacacgtagccggtggattcaaatacgggagatctcatgggaatcaga

SEQ ID NO: 32756 - DNA, 283 bp, Gossypium hirsutum
  Clone ID: LIB3149-004-P1-K1-D4
tcggtgctgctgtctttgcagtttatcggttattcctttcaatcctcagccatggctgaagagacggagaaagcatttctcaaacaacccaaggtgtgtttaagctctaaaaaaactgggaaaggaatagagacctgtaaagggcgataatcgcttcttgaaaagccattgcttaggctttatgacacccagagaggccattgaaggaacatatattgatgagatatgcccatttactggcactgcttctattagaggccgtattcttgccggtacttgtcat

SEQ ID NO: 32757 - DNA, 378 bp, Gossypium hirsutum
  Clone ID: LIB3149-004-P1-K1-D9
catgttgatggggataacaaagtcaaatggcagacatcttggttttattttagacccttagtctacagattgctgtgggaacctaagagcatcgacagtgaagcaaagggagtgagtgcattatgagaaatccagtaaggtctagattgaccagggccctaagagaacagttcagagggaagttggatctctcttcgccgctctaggttgccattggagcccaatgtagaaaggtatgggtgaagtcgcagaggagtgaaccaatggtcatgcggttatgggactttgatatattctttattccctctttaaggggctcattgaagtgcatgattccagtaattttctggtaaaaaaaaaaaaaaaaaaaaccaaaaa

SEQ ID NO: 32758 - DNA, 254 bp, Gossypium hirsutum
  Clone ID: LIB3149-004-P1-K1-F3
gcgcttaatgcagacatgactacctcacggtgcgtggatgaatcaagttacttgcagtcaggtgaaatggcgcaccacggaaccccttcgactggaccctttggtacggatcacaagtgggagtacctacgggcgctcattggatattgccaaggatagcagctataatgagctgcgtcgtgagcttgctcgaatgtttggtctggaaggccacctagaggaccctaaaagatcaggctggcaactagtatttg

SEQ ID NO: 32759 - DNA, 52 bp, Gossypium hirsutum
  Clone ID: LIB3149-004-P1-K1-F4
cacatcataaatccactatagggtcacctacatccaattgactggccaaacc

SEQ ID NO: 32760 - DNA, 342 bp, Gossypium hirsutum
  Clone ID: LIB3149-004-P1-K1-G3
catttgagaagtacgcgagccatgaactcagtcaagttgcaatgattacacccttgggtaggcttccttgaacttgattttagttgaatgagttcaattttagcatgtaagtaaatataaaagtgaaatgtcatatataacacacaaaatagtccggaagctttcatgtcaattggagttgtggtgttgtagttgtaagcgtgttgattgtattggaggtattgtttcctccttttgagtttgagattgatgacttaatgtaatgatggatcatgggttcgtacttgatcgccttcttgacttagctccaaaaaaaaaaaaaaaaaaaaaaaaaaatataaa

SEQ ID NO: 32761 - DNA, 363 bp, Gossypium hirsutum
  Clone ID: LIB3149-005-Q1-K2-B9
tcgctccgactccatcttctctaagcgttttcttaagtacttgactaagatctacttgaagaagcacaatgttcgggattaggttccactgatttcttccaacaaggatcggaccgtttacgagctccgatacttcaacattgctgagaatgagggtgaagaggaagagtgaataccgattcagctttttctctattcatcacccctttgtttggtttatttgttatgaggaacctacattatcaatctcaagtgtcgaatctttggacttgattaggcttgtttttgaaccctaaactgttttcaatgaatatttggttgctcatagtattaaataattttgaaagaatttctttattaatt

SEQ ID NO: 32762 - DNA, 95 bp, Gossypium hirsutum
  Clone ID: LIB3149-005-Q1-K2-C6
gaaatttccatccggtaaaaaatataaattaattcattatgaatcaaaatcaaaggaacgaaaaaaaatacaatattgaattaaaaatacaaatt

SEQ ID NO: 32763 - DNA, 97 bp, Gossypium hirsutum
  Clone ID: LIB3149-005-Q1-K2-E2
accacaccttcggacctatacatatatcataataatatgctcttaatatgcacaaaagctcccctttatagggtgccaaagcggtattttgtgtcat

SEQ ID NO: 32764 - DNA, 125 bp, Gossypium hirsutum
  Clone ID: LIB3149-005-Q1-K2-E7
gtctcgctctctatcggcactttattctgctgccgttatgatggttactctcattgtatacctgctacacttgccatgtctcctatcgccctcttcctttcacttttctttcttttccttttata

SEQ ID NO: 32765 - DNA, 239 bp, Gossypium hirsutum
  Clone ID: LIB3149-005-Q1-K2-F6
agcgctccggactctatcaaaattcaaacatccctgctccaaatgatgtccccattggcctttcatcacgcgagcgagggcatacgtcatacaaagggcccacacatatcacccttcccattgtctattttctcttcatttcataagacatatgtatgctattccctctaaagaatgatagaagatataacaaagtcctcttatttctcaatcccctataaaagcccctccattttttc

SEQ ID NO: 32766 - DNA, 321 bp, Gossypium hirsutum
  Clone ID: LIB3149-005-Q1-K2-G8
ggagaaaccagagtcggattagaagcaaatgggacatcttgcaactcattgcggttttgtttatcgggtttgctgatgaacaaatcatggaaagaataaaaataataatgtagtaagtgtaattttttgtggtttattgttaagagaacaagcctctttgcttttggtatcaattactgggaagttttgaacctttcaccttcagtttgaactgttgtctcatttctacttgagtttatgaattcatgcattcataaaaaaaaaaaaaaaaaaaaaaaaaaaaaaaaaaaataataaaaaaaaaaaaaaaaaaaaaaatat

SEQ ID NO: 32767 - DNA, 297 bp, Gossypium hirsutum
  Clone ID: LIB3149-006-Q1-K1-B1
aaaaagactcacgacgtcaatcctcttttgttacgagctttcctcaaccagaagggaggctggtccgacaagagaaaaatggaggagcagaagcctaaggaacagagacccaaagcaaatgagaataagcctgtcatgacagagtaacagctgcttttgtttagtatgcatggcaagttggtggatggttgttcttagaactctgatatgttcaagattgaaaatgcttgttgatgtattcaaatactgccataacggtttttctttgagatggaatgatattcaactttgtggatg

SEQ ID NO: 32768 - DNA, 273 bp, Gossypium hirsutum
  unsure (1)..(273): unsure at all n locations; Clone ID: LIB3149-006-Q1-K1-B11
gaaaaaccgggccgacccacgcgaccgggaaaacnaggcaccccgggggacacgggtgccgaagccccccacccggcaaccgaagacgcgaggcanaacaccggagaaacgcgcgagacggcngggggagcccccacaagactggaggaagacccgaaaggcgaaaaccacacgaacagcaacaacggaaaaggccagcaaaagaaccgcacgaggcccgacaaaaaaccaaacggaacgcaagacgcggggcaaaaggaaccgacaccggcc

SEQ ID NO: 32769 - DNA, 131 bp, Gossypium hirsutum
  unsure (1)..(131): unsure at all n locations; Clone ID: LIB3149-006-Q1-K1-C1
antcactngnctgctctttcttgaaattttctttgtgaattggatgcttgatgtatttgcagatgagttgcattttctatcattattaaaactagttacgtgattgcctcatncnaaaaaaaaaaataaaa

SEQ ID NO: 32770 - DNA, 344 bp, Gossypium hirsutum
  Clone ID: LIB3149-006-Q1-K1-C2
aaagaaaagaacgcgcaaaggattggcaacaatgggtctctcaaaggcttctctaatccttgggggggtcgctgtttgagctcttatgggttcagccgtagctgctgaagccccagcaccgagtcccacctcaggaaccgcctccatctccccctcattcgtctctggtttctttgccgctgacacggctctgcttttcggctctactctcaggatctgaagggtgttggctattgatggtgtagagagggtgtttgatttctcatttatatagatttaatttttgggaggggggaattttatatggagttttagtatatctaggagtccctatatatataaat

SEQ ID NO: 32771 - DNA, 54 bp, Gossypium hirsutum
  Clone ID: LIB3149-006-Q1-K1-D6
tctgagagatcgaatttgacacttactttttaattgccatacgaaatgcctcta

SEQ ID NO: 32772 - DNA, 197 bp, Gossypium hirsutum
  unsure (1)..(197): unsure at all n locations; Clone ID: LIB3149-006-Q1-K1-E10
ggccgacccacgcgaccgctgatccctagcncctagggctagnaaacttgactgaaacaagtaatgctaggagtggatggagggatattacagcgatggggggacaattttgaaatttaacacttatgattggattgctatggtatgttgatagaggtggtgagtcgtttaaaaaaaaaaaaaaaaaacagaacgag

SEQ ID NO: 32773 - DNA, 139 bp, Gossypium hirsutum
  Clone ID: LIB3149-006-Q1-K1-E5
aacggacaggcggaaaaacccgcagagcgtaagcataacaacaagcggaggaaaaaaagggagggggaaaaaaaaaaaagaagggggggaaaaaaaaaaaaaaaaaaaaaggaaaaaaaacaaaaaagggggggcggca

SEQ ID NO: 32774 - DNA, 351 bp, Gossypium hirsutum
  Clone ID: LIB3149-006-Q1-K1-E6
tcgaaaagttttacatttaagaaaggcgataggtgttaagtttgtaggtactacttcaccttcgggattttcctctctacagcctgctttgaggggaccggcaattggttttcggggaaaagttctccttgcttttgaagaaaatggttcatcaaaaattggggtcagatttgacagatctattccagagggaaatgaccttggtgggctttgtgaagtagaccacggtttcttctgtgctgctagttcactccgtttggaaccttctggaggtgatgatgttgacaagttagctgttaatgaactttttgaggctgcagcgaatgaaagcaagtgtagtcccttaatatt

SEQ ID NO: 32775 - DNA, 204 bp, Gossypium hirsutum
  Clone ID: LIB3149-006-Q1-K1-F10
acaggaaatgtatcagattgtgttatataattaatatatattcaccgtactactgaaaaaaaaaaaaaaaaaaaaaaaaaaaaaaaaaaaaaaaaaaaaaaaaaaaaaaaaaaaaaaaaaaaaaaaaaaaaaaaaaaaaaaaaaaaaaaaaaaaaaaaaaaaaaaaaaaaaaaaaaaaaatggggggggccttttaaaagaatc

SEQ ID NO: 32776 - DNA, 352 bp, Gossypium hirsutum
  unsure (1)..(352): unsure at all n locations; Clone ID: LIB3149-006-Q1-K1-F11
tcgntattttttccatccttggcttcttctttcattatttcaaagatgtatacatcaaggaagaagatgcgcatagataaggatgctgaaccaacagaatttgaggagtctattgcgcaggcattcttcgatttggagaataccaatcaagatctgaaaagtgaccttaaagatctctatattaattcagcagtccaaattgatgtttctgggagccggaaagctgttgctatccatgtcccgtatagattgaggaaagctttccgcaaggttcatgttaagcttgtgagggaacttgaaaagaagttcagtggcaaggatgtgattcttattgccaccaggaggatattaa

SEQ ID NO: 32777 - DNA, 278 bp, Gossypium hirsutum
  unsure (1)..(278): unsure at all n locations; Clone ID: LIB3149-006-Q1-K1-F7
gcgggaaaaacactggctangatgnccatttttttatattgaaggtcagcttttatgacaggaggttttcttcgttgaatgtaaagcacgagcattcgatccgggacaaatactcggatcaggaagataacacgcgagcttcgtgaggttcagacgcctgaaacaggtggtgaaaggaaaagaacaacgggggaactgcaccattgtcctgatgccacaagaagcgcgcgatgccaacggcgatgatcggcagtggaccgagacagagggaagggtta

SEQ ID NO: 32778 - DNA, 345 bp, Gossypium hirsutum
  unsure (1)..(345): unsure at all n locations; Clone ID: LIB3149-006-Q1-K1-G1
cagaaangaaaaggacaacaganggcncngctgaaacagctngggctggagctgcataagaggcgggatnatatatgctttggagtcatgtgagaagctgcccattgtgatattgagagctgagcttgaccatttggcttccctagcagttttaaaacagttaaatgacatcttaagtgcaaggtgcatatttggctttctattctagtgttttggattctctggcggttgaattgaaagcatcaaaggactactctaagttatatgcaggcattgcaatacttatgtattaaattacatattgaatcaatgtttatgtattaaatttaaattcattaattttta

SEQ ID NO: 32779 - DNA, 230 bp, Gossypium hirsutum
  Clone ID: LIB3149-006-Q1-K1-G10
tcgaagagctcaccatttctattattcaggcttttatttattttaatctcataaactctcagggtaaggggtagagtaacatttattggttgcgagtatttcgtaacatctgttgagaggaatgatggactttgctttgttaatggggctggctaattattgtggagttctgatatttcatgtaatacgaacatatactgatttcttgtgtggatgaacggtttacaacc

SEQ ID NO: 32780 - DNA, 298 bp, Gossypium hirsutum
  Clone ID: LIB3149-006-Q1-K1-H5
tctaactcataccataccctatcgccattatttattgttgaaaatcttgagcacaatgggcacgggtgaactcgtctgtgcttacgccgcgttgattctccatgacgatggaatctcaatcaccgccgagaagattgctacattggtgaaggcagcgaacttgagcgttgaatcttactggccaagccttttcgccaagctccttgagaaagtcaacgtcgatgatctcatcaccagcgttggctccggtggtggggctgcccctgttgccgttgctgctgcttctggtgcaactggc

SEQ ID NO: 32781 - DNA, 415 bp, Gossypium hirsutum
  Clone ID: LIB3149-007-Q1-K1-A7
tcttcttctatgatcttcagttattgcaccaacaatggctcagcctcgttcacctttttgtgaagggaaatgcaaagggaggtgcaataaagcggcggtttgggatcggtgcttcaaatattgcggcatatgttgcgaggagtgtcaatgcgtttcgtccggtacttacgggaacaaacacgagtgtccttgctacagagataaggtgaacaacaagggcaaacccaaatgcccttgaaaatgaaatatattcgagttcgggatgtaatcaatcttaaagatcgaggacgaagaggccatatatatatatatatatgcatgttgatgatgatgttattataaaaataaacttgttttgtagctgttatttacttttggtatttgtgttggtagtgtataataatattttcctaat

SEQ ID NO: 32782 - DNA, 398 bp, Gossypium hirsutum
  Clone ID: LIB3149-007-Q1-K1-B10
ggcatactccgcagtgaacaggggatgggtccgacatcagctccaacgacggccacaggggggtcggcggacacggctccggcggcgggaaaggcgccatcaagtgggtcggggaagtggtgcgtggctaaatcaaacgccagcgatgcggcgttgcaagcgaacatagattacgtgtgcagcagcggagtggattgtaagccgatccaatcggctggggcctgctttaaccccaataatgtgagggcacatgcatcgtacgcaatgaatgcgtactatcaagccaatgggcggcatgatttcaactgcgaattcaatcgtacgggtgtgatcacctctaccgagccaagtcatgcagcttggaactattcagggaatcaagggccaggggtaaaaat

SEQ ID NO: 32783 - DNA, 146 bp, Gossypium hirsutum
  Clone ID: LIB3149-007-Q1-K1-B7
gacaatttttattttgctgtacccatggggcacttttctctgtgtcaggttgttggtaacaaatttgatgaacccattttagtgatgttttttttttctttttcacatattaagtgtttgaagttctcatttgagaagatatttcg

SEQ ID NO: 32784 - DNA, 411 bp, Gossypium hirsutum
  Clone ID: LIB3149-007-Q1-K1-C11
atacaaactaccacatggatctaatagctgggctagcaaacatgagggccaggaactacagggttcctgaggtggataagctgaaagccaagtatattgctgggagaatcatcccagcaagtgctaccaccacagccatggccaccggtcatggctgcctagagcattacaaggctcttgatggaggccacaaggtagaggactaccgcaacacttttgcaaaccttgcactgcctctgatctccatggctgagccagttctacccaaagtcatcaaacacggtgacatgagctggaccggttgggaccgaaggagcccgagagacaacccaactttgagagaactcaatacaaaggcttgaaaggataagggcttcgaatgcctacagcatattctacggaaggggcttg

SEQ ID NO: 32785 - DNA, 378 bp, Gossypium hirsutum
  Clone ID: LIB3149-007-Q1-K1-D1
acgtgatgatgttggacaagcaaggcaattgatttggtataagttcagggacttttggattataaggagaattagacatgtggttgctccttcagaagtgaaaaagtgtgctttagatgctagaaaagaaaatttacgatgaggaatgtctgaagattgattacagcgaaaagtatactttgaataagcagttattcgaatcaatatcaaagtctctcaatgaagctgaaacgaataaagagattgatgacatggatgcaaagtatactctgaataagctgttatctaggttcaacataatctgcaccatctacaatttatgttttttggattcattcggttggaggtgttgagtagtatatgtatgatgcatttagt

SEQ ID NO: 32786 - DNA, 344 bp, Gossypium hirsutum
  Clone ID: LIB3149-007-Q1-K1-E6
acggcataacatgcacctgaaggctagaacaaaatttatctgttctactcgtagtgaatgggcaacaattaggggggagtgtagcatacgtgaataatgcaaatgcactggacaatctacattgtataaaatgtgatcgtttacaagatattggagattgtactagattgagttactcacatgaaggaaacctgtagatattgcacaaccatcaggacaggaaaaccttgttactagggcgaggtcaatcctaagagacacggatcggcgtggaagagctttctgaaccagggctcggaggggaggacccgaaagaagatttcatacgagtttgcacaattgct

SEQ ID NO: 32787 - DNA, 323 bp, Gossypium hirsutum
  Clone ID: LIB3149-007-Q1-K1-F8
accaggcaagaccagcgagagaacctgcagagctccaaggggacaaaaggagcaaaacaatgacggggctacatgaagcatgtgagaaatggggctaccttcagggggatagccagggaggagataagaagtaaatggagaaagcgaaggagaaggtgaatggagactatgacgagaaccagaaggaaaaggggtatgaaccagagaggaccaaaaggaggaacaagaaggagaaaagctacgacatggagagggaaaggacattcgtcattaggcaccggccaaaagcgaacaaaaagcaaaacccaaacgaaacgaagcaa

SEQ ID NO: 32788 - DNA, 236 bp, Gossypium hirsutum
  Clone ID: LIB3149-007-Q1-K1-F9
caaatatgaaaaaatggaaaccaggcatagcctaaagaaacgggaggggagataagaaggggggatgccagagggggggcagagctggaacgaaccatgggaggagatacaacagatgagggtgaggagaacaaatatgcaagggaagaggttggcaggaacaacaaaggaatgctgaccaaaaagggacgggacacatgaggacgaaaggcgcaattgaacgcactaacaaaggc

SEQ ID NO: 32789 - DNA, 417 bp, Gossypium hirsutum
  Clone ID: LIB3149-007-Q1-K1-G2
gccactgttaaatttcataacccaggtgtttatgatgatcccacctgtggtccattgttggatgcggatgctattaaggagcttgtccgtcccagagctaccagatataatctggtgaagaacaatggctttgaagagggtcctcatcgcctagtcaactccaccaatggtgtcttgctcccccctcggcaagaggatttcacattcccactcccgggctggatcattgaatcacttaaagccgtaaaattcatcgatgcaaagcacttcaacgtcccggcgggacactccgcagtcgagctggttgccgggagagaaagtgccatcgcccagatcctcaggaccatcctcaacaaatcatacaacatgacgttcatcatcggggacgcttcgcacggttgcaacggagaaatgatg

SEQ ID NO: 32790 - DNA, 313 bp, Gossypium hirsutum
  unsure (1)..(313): unsure at all n locations; Clone ID: LIB3149-007-Q1-K1-G5
acgaccacgcgtncgaggagaccttgcttcagctgagagtcttgacacattcacactaatttaggcaaatattcttgagcatcaacctgactgcccgcctgatgttgttgagaagcttgtttcactgcgggaaggcatcccacgcaaagatgcaaaggaggtggtgcaagaatgcaaagaaatctacgagaactcacttgttggtgggaagcctccaaggacaggatttgtgtttccaagggtcaaatgtttgacggcaactaaaggttatatatggcgtaaactcacttaaacattcccacttacccttctt

SEQ ID NO: 32791 - DNA, 354 bp, Gossypium hirsutum
  Clone ID: LIB3149-008-Q1-K1-B8
ggctagatctatgaagaatccaacggtgatttgaagattttctatggagaatgtgatgcgtgatgctcgtgacttataccgagcacgccacgaggaagaccgctaccgctatggatgatgtttatgccttgaaaaggcagggcaggactctctatggatttggaggttaagtttaggatcaagtcttaagaacgtaactgtaatgcctttagacctcgacttgagatctataacgtgctgaacatgttgtggtactctgagtgatgtgttaacgatttgcaaacctaaaaatgatcgcttaattcacatactgcaaagctttctttgggcaaaaaaaaaaaacaaagggcggcc

SEQ ID NO: 32792 - DNA, 127 bp, Gossypium hirsutum
  Clone ID: LIB3149-008-Q1-K1-C7
ggtgttggcgcttgggatacaaattgtatgactggctgtagcaatggctggcctgatcttgctatttacactacaagtttaagctttcactagaaattaatagattttaccactttcactttgttct

SEQ ID NO: 32793 - DNA, 302 bp, Gossypium hirsutum
  Clone ID: LIB3149-008-Q1-K1-F11
cctatgctccccatcattcttaagctatcttgcattgttttacgcatttaatgaaggtgggtagtgtgaacaagttccacagcagtacctcatgcaataaatgtagcaacaaaagaagaagaagaaaattgttaaaattaagagaggaatcgttaatttattatttatatgttttgttaattactttatgatatgaatgtgtgaatttctaattttctgttgcaataaataacagtacattaactattttttttttatttatattgataatattttttaaattatacataaattataaaatt

SEQ ID NO: 32794 - DNA, 423 bp, Gossypium hirsutum
  Clone ID: LIB3149-008-Q1-K1-F4
aacgtccaagcgaccggacattagatgggagacataatatatacatagtactcttcagtggagcgggagaggataccaattctaggatgggtaatccagcaaccatacatcagatcgtaattggagcggtaaataagcaggagggtgcctgtctaaccatgccatatatcagagaaatggaaataggggggggtcttatgaacaaacaggcacaggtcacagcgatggaacgaatggcgggaattatataaaaaacaggctatgcaaaggggggaaacatgctcgcaagaaatgaagttatgtagtactacgccaaatctgataaacaaacttttgatactgggaaaataaggttggtcgagggaacatgagaaatgatgaaatgaaaacgaatgggagaaactggggaggccaagggaaaaa

SEQ ID NO: 32795 - DNA, 107 bp, Gossypium hirsutum
  Clone ID: LIB3149-008-Q1-K1-G6
gaaagaaacaatattacgcaaaaatagtttttgaatctatgcgcattatggctatgttgggaatgtgcttcataggttgtaggattttgtactctttcggtttgttt

SEQ ID NO: 32796 - DNA, 203 bp, Gossypium hirsutum
  Clone ID: LIB3149-008-Q1-K1-G7
gttgaaaccaaaacaactgatttggtaagaagtaaaaaaaaaaaatttggacgtcttctgttccttttgtatgttgtaacgtgaaagggttgaatttgaattgaatgtatctatctaatgggccctctaagcaacacatagagttggtcttatcagtatatgttacggttctatctgcgctcataaaaaatttatatatatat

SEQ ID NO: 32797 - DNA, 120 bp, Gossypium hirsutum
  Clone ID: LIB3149-008-Q1-K1-H3
ataatatgacctcaaaatgggcaaaattgaatgtattgggagctgagaatcttcatttcagggcaattaagtattcacgtgttacgccgtacaaataaacagataaggtaataaaaagaa

SEQ ID NO: 32798 - DNA, 383 bp, Gossypium hirsutum
  Clone ID: LIB3149-013-Q1-K1-A2
acgggtgactcttaagaggtctcaccgaggctattaacactgacgggagtgtatgggttctggaagcacgtttccaaccttgaccgtcgcgagagccgccgttacctggagatgttttatgctcttaagtaccgcaagctggctgaatcggttcctctggcagaggagtaaaacaaaggaagaggcgggttttccctggaggatttttctgagttcttcacaataaaataataataatcttttgttgttttcatatttatggtcggacaagaaaaagcctcttttgtatctcttttcctttttttttctttttttttgttgttttatttttcccggcattgttagaacatggagggggtactgcgcccctggattccaacaaa

SEQ ID NO: 32799 - DNA, 395 bp, Gossypium hirsutum
  Clone ID: LIB3149-013-Q1-K1-A7
gacgccaggcagaaatacacactggtcaaaaggacccaccgaggctatggtgaccaacgtgtgtgccatgctacttcatggattccggggtatagtccctcagctgcaatatctgaaatacaaccttccccatgtacaacatcctccgaagaaattacaacatcgcgatttccagatatgagtgcacttgttggagcacaaaagccagcatccatgtccattccgcagacagatataagtatgcctgaggcttctgaaatgccggaaatggtccaagaaagcattgttgatataccagcagaaaattacgtggaatctgaaactgggaatggtggatttattgatccctctacattagttgtaaatggttcaattcccttccaacttgatgacct

SEQ ID NO: 32800 - DNA, 386 bp, Gossypium hirsutum
  Clone ID: LIB3149-013-Q1-K1-A9
gcgcacttcttggtgttcttcaatcgactaagacttcaaccatagttggctgtacataataatcgagcatgtttattatttggttcggatagcttgggttcaacatgatatttgtcaccctatagtatagcagcaaaaagaatggcagagattttgggatacatatggacaccattggagtttctccagattcagcaacaacaaaaagaaaggtatttgagcagcctaggttcttgaaaattcctttcctatgtagtaagtttgcatcaaatacccaaatttagagccctatctgaatcatcgtagccagccatagttatagctttgagttgctgtaaattctactattactataagtggagttgaaatgctgaaaggcttgtcga

SEQ ID NO: 32801 - DNA, 51 bp, Gossypium hirsutum
  unsure (1)..(51): unsure at all n locations; Clone ID: LIB3149-013-Q1-K1-B1
accggngcggagtcccaggcgtgaccccacgcgtccggttctagatcgcga

SEQ ID NO: 32802 - DNA, 385 bp, Gossypium hirsutum
  unsure (1)..(385): unsure at all n locations; Clone ID: LIB3149-013-Q1-K1-C4
gtgttactgaacctggggattttttagactaaagctgttccaagctgtctgactcagtctccactttagcctttgatcaattcaagcttgttcagatatgaacaagctattaagatcgatgacagcttttggctcctatacgaacagcagtcacttaagacattgcttagtgtttcttttggtgtgtggatttttcagacaattgctgcttcttcataaatgtacgccattgtgctcttttatcnnttttttcgggaaatgcttctagacaagatcggattcaaaaaggttgaagttgtcacttcatatttgtcgggaactataactgggtttaatagaccgatccttgcatactacaaatgaccaattttgatagtttgatttt

SEQ ID NO: 32803 - DNA, 156 bp, Gossypium hirsutum
  Clone ID: LIB3149-013-Q1-K1-C6
gaaggatttggtggtgtttgatgatatattttatttccagttccccctttctgatgtgcctatggaatcttcatgaatattaatggattaaaaaaatatggaaataggactataattgattccagaaaaataaatggaaataaaaaaaaatgcaat

SEQ ID NO: 32804 - DNA, 65 bp, Gossypium hirsutum
  Clone ID: LIB3149-013-Q1-K1-D12
gaggtgatagactgcatatcgagtcacgtaaaggcaatacactggccgcgcggttacaccgtaaa

SEQ ID NO: 32805 - DNA, 292 bp, Gossypium hirsutum
  Clone ID: LIB3149-013-Q1-K1-D2
aatcgccatttaactgctgccgaacgaggttatggcatttcgattgactcacctactggtgcattccgaagacctgctggagctgcggatggatcggatcaaaccatatccaacgcactggcactcctagctggctgaacatctcctggacttactccagaccgtggcctccaagtaaaagttagtaattctacaatgctttctgtttacagactcagggatctcagccatatatcggcccatctacctgctgatgtacaacgtatctacctcacagatggaagctttcgaa

SEQ ID NO: 32806 - DNA, 264 bp, Gossypium hirsutum
  Clone ID: LIB3149-013-Q1-K1-D5
cgaccacgcgtccggttgtactgcaactgggcatttgacgtgctctgtctacttttagtgaagatgaaccactgggtgcactgggaacttcatatgaggcatattgtgaacgccaaggagatcttatagaagtcactattgtgactggagacaccaatcataacagaaagtgtattaatcgtacaggaaatctaccttgttgcattatcatgattagaccacatgaaccatgcttgcactaatttgttacattggctgaacatg

SEQ ID NO: 32807 - DNA, 394 bp, Gossypium hirsutum
  Clone ID: LIB3149-013-Q1-K1-D6
accccgcgtaagatattgccaagccccaccattatttttcttttgctttccctactaagcattgtttgcgaggccagatctccaactgctgcaagatcaggtgcctaaaatttcatcaaggcttcatgtagtgccaccaaatatccatcactttgcatccaatctctcgcagcttttgccccttcaatccagcggagcccacgccaactggctcatactgccctttcggtgagcctagagagggcaaagtccacccaggcattcgtctccaaaatgaagaaattcaagggacttaagaggagggaatatgaagcaatcaaagattgcattgaggagatgagcgagagcgtggacaggctgagcaaatcagtgcaagagctcaagtacatgggtc

SEQ ID NO: 32808 - DNA, 380 bp, Gossypium hirsutum
  Clone ID: LIB3149-013-Q1-K1-D7
gaaacagtcctggcatttgctgacatgattaagaagaaaatcgccatgccggctgagttcatctatgatggcagagattataacttatttgaccactactcagctgttgcccaaagaatcggggtttacactgctaaggactatgttgatatagtagagcacctggtggatcgatggaaggtgaaggagctagctgggctttcagccgaggggcgtaaagctcatgactacttgtgttcacttccttcgagaattagaaggttagaggagagagcgcaagaaaaggccaaggaagcacccagtgtcccattcagttggatatttgatagagaagtgaaactttaggtcatgaaatacagttaagactcctgcaatgcatt

SEQ ID NO: 32809 - DNA, 377 bp, Gossypium hirsutum
  Clone ID: LIB3149-013-Q1-K1-D8
ggaaaagacatcaatgcattggagcagcacatacagaacctgctgagtccatccactccatttttcttcaacactctttatgacccataccgatccggtgctgacttcgttcgtggctaccctttcagcctccgtgaaggtgttcccactgctgtctcacacggtctctggctcaacatcccggattatgatgctcccacacagcttgtcaagccactcgagaggaacaccaggtatgttgacgctataatgacgattccgaagggaaccttgttccccatgtgcggaatgaatctggcatttaaccgagaattgatcggccctgcaatgtactttggactcatgggagatggtcaaccaattggacgatacgatga

SEQ ID NO: 32810 - DNA, 379 bp, Gossypium hirsutum
  Clone ID: LIB3149-013-Q1-K1-D9
agggccgacgacgcgtccgggaaaagacatcaatgcttttttcagctttttctgaacctgctgagtccgggccactccagtgttcttcaacactctttatgacccataccgatccggtgctgacttcgcttcgtggctaccctttcaacctccgtgaaggcgttcccactgctgtctcacacggtctctggctcaacatcccggattatgatgctcccacacaacttgtcaagccactctagaggaacaccatgtatgtcgacgctataatgactattccgaaaggaaccttgttccccatgtgcggaatgaatctggcatttaaccgataattgatcgacccttcaatgtactttggactcatgggagatggtcaacc

SEQ ID NO: 32811 - DNA, 382 bp, Gossypium hirsutum
  Clone ID: LIB3149-013-Q1-K1-E1
attaattaccctccactttcggataatacccacagtgcacctcaccatcatcaccgtcatagctttctttcaacttcacttttctccggttcttccctcgttggtggtgcggcgtgggagaaacaagtccgtcactcttcgactccacgtagggttaatgggttttctgttttggtcaccggcgccgctgggttcatcggttctcactgttcacttgctttgaaaaaacgcggcgatggggttttgggattggataattttaacgattattacgatccttcgttgaaaagggcgaggcagaatctgttaagcaaacaccaaattttcatcgtcgaaggggatttgaacgacggcccgttgttgacgaagctgttcgacgtcg

SEQ ID NO: 32812 - DNA, 378 bp, Gossypium hirsutum
  Clone ID: LIB3149-013-Q1-K1-E11
gaaattgcaagatattctccctggaatcatcaaccagttgggacctgataacttggacaacttgaggaaattggcagagcaattccagaagcaggcacctgctgccggttctggtgacggtaccggtgcagccactactcaggaagaggacgatgaggaggtaccagatcttgtacctggcgagacctttgaagctgcagcagaaggccaagctgctaaatagagtttttatctttaattttcttttgttatatgtttttgatgaatttaactatttgtttctttttccaaaatttctctatctgtggtttttgtttgctctaccttgtactcttaatggtttggttcaaggtaagccttctagaattcctattatta

SEQ ID NO: 32813 - DNA, 353 bp, Gossypium hirsutum
  Clone ID: LIB3149-013-Q1-K1-E12
ggcaagagttcaatgaatttgtcgtcgattgtggtccaacggcgaaagagctgacgccaaagttcaacgtcttatgaaagactgcgtcgtatcacacaggggtgcaagtgcctgaatttgatatcatgtatgttgatgctgctgctgtgacctttaaaggtgtggggagtattctctgtacctccgtcagcaccgataagagcttatcttgtggcattgcaccaactcgttcttacttccattgtttatgacttatacaattacgacacggaaaagaaagaattaggtcttctgtctacaaagcatccactgaacttgacgctgttaggggcattgctgttcttcattggcgt

SEQ ID NO: 32814 - DNA, 314 bp, Gossypium hirsutum
  unsure (1)..(314): unsure at all n locations; Clone ID: LIB3149-013-Q1-K1-E2
cttcgacattgatgaattcagctgccgcccttcctgccgcacttatgatgtacttgcttgccaaattaatctcacccttgtcattgtaattttgcttgtaagttgtggtggctttttggtttagaatgttgcttattttttgacctgtcccgcctctttgttcgttctatgtaactttgttcaagactgtatttacattttccgggtgggttctcaaaactcactagtgaagctaatttgcttgattgatcatggcagttttcgncctttacaatccttcgttgaaaagggcgaggcaaaaatctgttaatcgg

SEQ ID NO: 32815 - DNA, 349 bp, Gossypium hirsutum
  Clone ID: LIB3149-013-Q1-K1-E3
gacatgtttgagatgtattcagtaacttccaccggtctgtctcctgaaattgcatacttccatactaaggattattttgagagtggtcttgatggcggaaataagagttcagaatatgtaaatgacataataatcaaacatgcagaccgtcacaatctattgcgtccagaaactgttgaatccctgttcgtattatatcgaatcactcaggatccaaaatatcgagaatggggttggcatatctttgagtcatttgagaaatacacaaaggtagaatccggcggatactcttctttagatgatgtcaccacagttccttcttcaaaaagagacaagatggagacatttt

SEQ ID NO: 32816 - DNA, 358 bp, Gossypium hirsutum
  Clone ID: LIB3149-013-Q1-K1-E5
gagagctcagatacaattgataacgtgaaggccaagattcaggacaaggagggtatcccacctgaccagcagaggttgatttttgctggaaagcaactcgaggatgggaggacgcttgcggattatagcatccaaaaggagtcaaccctgcacttggttctgcgccttcgaggagggatgcagatattcgttaagaccttgactggtaaaaccataacactggatgtcgagagctcggacaccattgacaatgttaaagcgaagattcacgacaaggagggaattcctccagaccagcagaggttgatttttgctggaaagcagcttgaggatgggaggacactcgcggactataaca

SEQ ID NO: 32817 - DNA, 161 bp, Gossypium hirsutum
  unsure (1)..(161): unsure at all n locations; Clone ID: LIB3149-013-Q1-K1-E6
gaaattgcaagatattctccctgttcnttttttgtacaacagccccngaaacgagttcggggattttttaattgaaaaacaattccaaaatcaagcacctgctgccggtcctgaatttgatatcaagcatgcagttgctgctgcggttacccttaaaggtg

SEQ ID NO: 32818 - DNA, 146 bp, Gossypium hirsutum
  Clone ID: LIB3149-013-Q1-K1-E7
gccgcacagctgacatggttactctagattttaaagagaccctccgaactggcttgcaggccgtgaatagtcgaatagttctacaaaggtgcctactatgcatcaggcacaataacttggacttggttgcaagcttaagcgtatga

SEQ ID NO: 32819 - DNA, 361 bp, Gossypium hirsutum
  Clone ID: LIB3149-013-Q1-K1-E8
gctcttgcacacattgcaagacgggcattttttaagagacccttctgcgatgactttttaaggtttcgttttgagaagtttgaagttggtatctggtcttcatgaaacatgagaaccttggaatgagtcgtcgattttctgatcggagacatgaaacaaaatttgcttttttgctgggtaattataacttgttttcttttgctttctgttaaacttgcttagctgcacaagttttcgactttcggtgtgcgtctgtaccctgtatgttttcaagtcatctttgtttacatgtgaaattaaactagaagagttccaacgttcgaccatttgctctatgcgcaatgacttatcatgattcata

SEQ ID NO: 32820 - DNA, 383 bp, Gossypium hirsutum
  Clone ID: LIB3149-013-Q1-K1-E9
gagggctgcaacatcaggacaagctttcccacaatgtgtgtttgatcactgggatatgatgtcatcagacccattggaacctggctctcaggcagcagcccatgtcgccgaaatccgcaagaggaaaggattgaaggaacagatgaccccactttctgagttcgaggacaaactgtaagctaagagagagtaactgtgattgtgcggcataacctttgctgcaatttagttttgttttctgtctggttatattttgttagcatggatgctttttcacccatatgtactttcgtttttagacgcttgtgttttgatgatgatcatgatgtactacaatcgacattgcgttgaacttttttatacatctcttatcttcatatgcc

SEQ ID NO: 32821 - DNA, 378 bp, Gossypium hirsutum
  Clone ID: LIB3149-013-Q1-K1-F1
ccaagtttgtgattccagatcttactcgcaaagcacctttggcttattatgacataagggataggttgaaagaccttttgaagaacagccctgaggcgaaagttatagtgacgggccacagtttgggcggcgccttggctgctcttttcccggcgattttgttttaccacgacgaacagttggtgcttgagagaatggaaggcgtttacacgttcgggcagcccagagttggtgacgaagcctttgccggctacatggagaagaatttgaacaaaaatgggatccagttttacagatatgtttactgtaatgatatagttcctagggttcctttcgacggcatgttcaagcactttggtacctgcgtttactacaaca

SEQ ID NO: 32822 - DNA, 386 bp, Gossypium hirsutum
  Clone ID: LIB3149-013-Q1-K1-F10
gcaacccccatgattagcattgtgaaggacatagtgaataacatcagggccatggaagaagaggaagaagaagagaaaagttgtggtatagagaaaggaaacggggttaataaaacgaattccacatcaccaaattcaaaaaggaaagaaaacttcaagacaaggagggcatacttttattgggtgacgagggaacaaggttccttcgattggttcaaagggataatgaatgaagtggctgaaatggaccataaccatgtaatcgagcttcataattactgcacaagtgtgtatgaagaaggcgatgctcgctcagctctcattactatgcttcaatcactcaatcatgctaaaaatggggtcgacatcgtctctggtacgagagt

SEQ ID NO: 32823 - DNA, 325 bp, Gossypium hirsutum
  unsure (1)..(325): unsure at all n locations; Clone ID: LIB3149-013-Q1-K1-F11
gccggcacttatgaagagcttcggacgaatcaatggcgagaatcaaggtccatgtgttgagacagaaatcaaaaactgagctcttggctcaactgaatgatctcaaagctgaactcgctcttattcgtattgccaaagctaccggtggatcacctaacaagctttccaagataaaggtggtgaggtcgtcaattgctcacgtgttgacagtgatctcacataaacagaaagctgcactcacggtggcatataacaataagaacttcttgccccttgatctcnctccaaagaacaccagaaccatcaagagaaggcttaccaagca

SEQ ID NO: 32824 - DNA, 386 bp, Gossypium hirsutum
  Clone ID: LIB3149-013-Q1-K1-F12
cttgaacgcgacttaccataaaacagaggtgttcgggctagacatccccaccgagatcgagggagtgccttccgaaatcttgcatccagagaacacctgggctgataagaaggcatacaaggaaaccctgttgaaattggctgggctattcaagaagaactttgagaccttcactaattacaagattgggaaagacaacaagttgacagaggaaatcctggcagctggtccaaacttctaatttttggagcaatgaaaaaacaaagggaagaagaagaaactattatggtttttcacagatttgcagaaaagtgaatgaatttgatagaataagagtgtgtgtttgttggtaaattataaaagaggaagtagtcctttaattgggt

SEQ ID NO: 32825 - DNA, 338 bp, Gossypium hirsutum
  Clone ID: LIB3149-013-Q1-K1-F2
aaaccagggtgttacccagctgaaattccaacgtagcaaacgatcagttgcagaggaacgagctggccggaagcttggtggtcttagggtcgtgaactcttattggatcaatgaggattcaacttacaaatactttgaagtcatcttagtcgatcctgcccacaacgctatccgcaatgacccaagaatcaactggatctgcaatccggttcacaagcacagggaactccgaggactgacctctgctggcaagaaatacaggggtcttcgtggcaaggggcacttgcaccacaaggctcgaccttcaaggagggcaacctggaagagatacaacacac

SEQ ID NO: 32826 - DNA, 377 bp, Gossypium hirsutum
  Clone ID: LIB3149-013-Q1-K1-F3
ctttcagaaaggaccagaagaacttccgtccatgtattgtatcaaattaggttatatgtgcataagttatcctaatgtctttcgaatcgtaggaatattttattcgccacatggatggctgcacacttgatactgaaggagagaaagaaagggttgttaaatgtctcgaagccgccattcatagaagagtgagtgagggtttaagcctggagctttgcgcaaaggacagagttgggttgttgtccgaagtaacaaggattctccgagagaacggattgtccgttagaagggcaggggtgtcaacagttggggagaaagcagtgaatgttttctatgttagagatgcttacggtaatcctgtagatgcaaagacaatc

SEQ ID NO: 32827 - DNA, 383 bp, Gossypium hirsutum
  Clone ID: LIB3149-013-Q1-K1-F5
ccgatggctggattttggcggctatgagaataagatgaataaaactgctaaagcgttggatgaaatttccgggggatggctagatgaccacagaaagggtggacattgggatgaaaataaaaaggagaaggatttcatggatgtaatgaactctgttcttaaaggtgcaagtcttgcaggttatgatgctgacaccatcaacaaagccacttccctgaatatgattttagcaggcagtgacaccacaacagttactttaatatggggtctttccctaatgttaaacaaacctcatgtactcaaaaaggctcaagaagaactagacacccatattggcagggataggtttgtgaatgaaacagacattggaaaattggtgtaca

SEQ ID NO: 32828 - DNA, 335 bp, Gossypium hirsutum
  Clone ID: LIB3149-013-Q1-K1-F6
ttttgtctaaggttaaacggtagtataattaaatgattataacagagaaagcgtgggagggaattggggaaggatggctagatgaccacataaagggtggacattgggatgaaaataaaatggagaaggatttcatggatgtaatgaactctgttcttaaaggtgcaagtcttgcatgttatgatgctgacaccatcaacaaagccacttccctgaatattattttagcaggcagtgacaccacaacagttactttaatatggggtctttccctaatgttaaacaaaccttatgtactcaaaaaggctcaaaaaaaactagacacccatattggc

SEQ ID NO: 32829 - DNA, 105 bp, Gossypium hirsutum
  Clone ID: LIB3149-013-Q1-K1-F7
agaaaccatcaaaaattggaggtttcctattcctattaattctgcttttgcctgccagaggagaaacaaaagagtttagatatagagagtttatgtcaattgctg

SEQ ID NO: 32830 - DNA, 188 bp, Gossypium hirsutum
  unsure (1)..(188): unsure at all n locations; Clone ID: LIB3149-013-Q1-K1-F8
gccgatataccatcaaaaaattttgatttcnctctttgtatagtctcaaattacgggacatgtgggtaacttatcctaatgtctttcgaatccgtagaatattttattcgccacatggatggctgcacacttgataccgaaggagagaaagaaagggttgttaaatgtctcgaagccgccattcatag

SEQ ID NO: 32831 - DNA, 321 bp, Gossypium hirsutum
  Clone ID: LIB3149-013-Q1-K1-F9
ctttcataaagaccagacgaacttgcgtctttgtattggatcaaattagggtatatgtgcataagctatcctaatgtctttcgaatcgcaagaatatcttattcgccacatggatggctgcacactcgatactcaaggagagaaagaaagggccgctaaatgtctcgaaaccgccactcatataataacgagtgaggggttaagcctggagctttgcgcaaaggacataggtggactgctgtccgaattaacaaggattctccgagagaacggattgtccgttacaacggcaggggtgtcaacagttgaggagaaagcagt

SEQ ID NO: 32832 - DNA, 344 bp, Gossypium hirsutum
  Clone ID: LIB3149-013-Q1-K1-G1
ggaaactctgctggcacagtcactgcctattatgatcaacatgggatgaaattgatttcgagttcctcgggaatttaagtggcgacccttacattcttcacacaaacgtgttcagtcaaggcaagggtaacagagaacaacagttttatctctggtttgacccaactgcagatttccatacttattcaatcctttggaacccccaacgtataatcttctctgttgacggtacacccattagagagttcaaaaacatggaatcacttggtgtcccatttcctaagaaccagccgatgagaatttactctagcttgtggaatgccgatgattgggccacaaggggt

SEQ ID NO: 32833 - DNA, 380 bp, Gossypium hirsutum
  Clone ID: LIB3149-013-Q1-K1-G10
gccgtctaatacaaccgttgttgctagctgtcacgtggtttgcaatattacacggcccaagaacgcaagcccaaagtgctgcgtatccttttctgcatacttcaatgaatcagttgtcccatgcccgacttgtgcctgtgggtgccctcgcaactcagccaacacttgtagagcaaatgctacagctgttcttgttccacctgaggcacttcttgttccatttgagaaccgaactgctataaccagagcttgggctgatcttaaacactttacggtgccaaatccaatgccgtgtggtgacaattgttgagtcagcataaactggcatctatattcagacttctatcgacgattgagtgctaggatcacaatattcaact

SEQ ID NO: 32834 - DNA, 372 bp, Gossypium hirsutum
  Clone ID: LIB3149-013-Q1-K1-G11
gcatgttcccaggcattgtctttgccatcttctttgtcttaaatgcaattatatggggccagaagtcttctggggccgtgccttttgggacaatgtttgctctggtcctcatgtggttcggaatttcagttccacttgtttttgtgggtggttatgttgggttcaagaagccagcaattgaggatcctgtgaagacgaacaaaatcccaaggcagatcccagagcaagcttggtatatgaacccgactttttctattctgatcggaggaattcttccattcggagctgttttcatcgagctgttcttcattctcacctcaatctggctgaaccagttctactacatctttttcctgttcttggtattcatta

SEQ ID NO: 32835 - DNA, 70 bp, Gossypium hirsutum
  Clone ID: LIB3149-013-Q1-K1-G3
aggatttttatttcttaaaaaaaaaatccatagggcccttacctctctaggcactaaaactatttgtgtg

SEQ ID NO: 32836 - DNA, 393 bp, Gossypium hirsutum
  Clone ID: LIB3149-013-Q1-K1-G5
gataccgttacaagatgaggttcgtctactctcactttcctattaatgcctccatcactaatggcaacaagtcgatcgagatccgtaacttccttggcgagaagaaggtccgtaaggtggatatgttggaaggtgtttccattgttcgatccgagaaggttaaggatgagattgttttggatggtaatgacatcgaacttgtatcccgatctgcagctttgataaaccagaaatgccatgtgaagaacaaggatattagaaagttccttgatggtatctatgttagtgagaagggaagggtcgccgaagaagaatgaatactatctccctgaatcatagttatagtgctgctttatttttttgtcgtagtaatattttgggactccgtttttt

SEQ ID NO: 32837 - DNA, 126 bp, Gossypium hirsutum
  Clone ID: LIB3149-013-Q1-K1-G7
gactagagtttgggttaagatgaaatgaagtttcctgcttttatttgcctgaaaaaaaaaaagaaataaaataaaaaaaaaaaaaaaaaaaaaaaaagaaagaaaaaaagaaaaaaacccgaatat

SEQ ID NO: 32838 - DNA, 371 bp, Gossypium hirsutum
  Clone ID: LIB3149-013-Q1-K1-G8
gcagaatggacaaaggattactttcccaggttaagctgatgaagcgcccgatacggttactggggacattgtattcgtcctgcaacagaaagatcatcctaaatttaaacgaaagggtgatgacttatttgtagagcatacattggcacttactgaggccctttgtggctttcagttcatactgactcacttagatggcagacaacttctcattaaaacccaacctggggaagtcgttaagcctgatcaattcaaagcaataaacgatgaaggaatgccgatttatcagaggccatttatgagaggtaaacttttcattcacttcactgttgacttccctgactcgttgaccccagaccaatgcaaggcac

SEQ ID NO: 32839 - DNA, 331 bp, Gossypium hirsutum
  Clone ID: LIB3149-013-Q1-K1-G9
caggcttgttcctcgctacaggaaggatagatgcctcgggttacatttgttgtggttcaaaagaggcatcatactcgcttattccctaccgatcgcaacaaaactgataggagtggcaatatattaccaggggacgagcaagtccacacattaccacgttttgtttgatgaaaatggcttcactgctgacatcttgcaagtgctcacaaacagtttatgttacacgtatgtgtttactcctttctctataatcctgatatggggtgaataaataatgctttagatcagcactaggaattatatagtaataattttactttgtggacaggta

SEQ ID NO: 32840 - DNA, 82 bp, Gossypium hirsutum
  Clone ID: LIB3149-013-Q1-K1-H1
gtgttattcatggtatcttgttatgtttgctttactttatatggagtagtttgaacttacaagactgtaatggaattttgtt

SEQ ID NO: 32841 - DNA, 370 bp, Gossypium hirsutum
  Clone ID: LIB3149-013-Q1-K1-H3
cgggaacatctgctgagaaagtatcaaccgataagtaccgatactacggggttctcgctggtgttgcaacccttggtgctgctgtgggatggtatctcaactctaaagacaagaagcaagaggcctgaaatgggggttaatgcgattggattctctaggtggaacatggcatgaatggtttaccccaatgccctgttcgtgtgcaaagtaactgaaaaataaaacaaactttgtaaagcagcttatcatgttttctgataacgtctgtgtttgaatcagtagtgttcttatgtacctcgatgccaatcatggttttctgcattgtcttttaaagaatctttgatgccaacctgatgtttttttcttttct

SEQ ID NO: 32842 - DNA, 138 bp, Gossypium hirsutum
  Clone ID: LIB3149-013-Q1-K1-H4
aaccgggtgagttccaggcgtgcgaaaattagagataattttttctccaaatttacctcgccttgttttcggaaatggtggcggtgtgattggcctgtatgtacacatgtagtgtaatgtcataggtcatgacaggga

SEQ ID NO: 32843 - DNA, 414 bp, Gossypium hirsutum
  Clone ID: LIB3149-013-Q1-K1-H5
taccgggttggaacacgcgtccggatgccttttgtcaaacgggcaccgaatgtttgtttcaagtttccaattggaagtgtgagtgtttctggcgataagtttgtgggttgtccaatgccttgtggtgttcagatcacaaggatggaacacatcaatgtgctttcaagcaatgttgaatacctagcatcaagggatgctacgatcatgggaagtcggaatggtcatgctcctcttttcctttggtatactctcaatagaaaaggttataaaggatttcaaaaagatgttcagaaatgcctcagaaatgctcactacttgaaagaccgactgcacgaggctgggatcagtgctatgctaaatgaactcagcagtacggttgtgtttgagcggccccgggatgaggagtttgttcgt

SEQ ID NO: 32844 - DNA, 376 bp, Gossypium hirsutum
  unsure (1)..(376): unsure at all n locations; Clone ID: LIB3149-013-Q1-K1-H9
gctttatttgttgatacataggcttacacggttgaattggaatctctggtgacacaattggaagaagaaaaagcccggttgctgagagaagaggctgagctgaacaaggcgaggtttaagcagctgatggagaacctggtcccggttgtggagaaacgaagaccacctcgagttcttcggcgagttcattctatgcaatggtaaatatagtagttcatcttcttttttctttaatgtagatgacaaggagaaacaaaaagctttgataaaaggaagtggtagaaccaattaaaaggagtggngaagtaggaagtttgttgaagcatttgggactttgttttttggcatagaatcccattacagttgaacttatata

SEQ ID NO: 32845 - DNA, 70 bp, Gossypium hirsutum
  Clone ID: LIB3149-014-Q1-K1-A10
gttggaaactcggagactcagtgtccgggtcaatgtgcttggccttttcatcaacctatttacggtccac

SEQ ID NO: 32846 - DNA, 205 bp, Gossypium hirsutum
  Clone ID: LIB3149-014-Q1-K1-A2
gcttcatctcatggttagctatttaatcaactgtacagggaaatttagtcattatttacggtagcaattgtatttatggattgtgagaaactacttctgttttcctggtaaatgtaaaatatatatgtggtccaaagaagggaatggagatgtgtgtgtgtgtgtgtgtgatcttgggggcttaatgaaaatgaacggagtgatc

SEQ ID NO: 32847 - DNA, 138 bp, Gossypium hirsutum
  Clone ID: LIB3149-014-Q1-K1-B1
actcttaatccatatcttttctacttcttataactatcaccgactgcacttcctttacgggggcgagtcttttctcatacctcgatatgaaagctatcgcactagaaaaataccattatgtcctctacttcattgttc

SEQ ID NO: 32848 - DNA, 356 bp, Gossypium hirsutum
  unsure (1)..(356): unsure at all n locations; Clone ID: LIB3149-014-Q1-K1-B10
tgaacatgcttcaccttgttgaaccttatgtgacttatggatacccgaatctcaagagtgttagggaactcgtttacaaaagaggttttggaaagttgaacaagcagcgagttgccttgaccgacaacgcaattgttgagcaggcactaggcaagttcggcatcnattgtgttgaagatctcatccacgagataatgactgtgggacctcatttcaaggaagccaacaacttcctttggccatttaagctcaagggcaccatgggtggtctgaagaagaagaggaaccattacgtcgaaggtggagatgccggcaaccgtgagaattacatcaacgaagtaattaggagaatgaat

SEQ ID NO: 32849 - DNA, 390 bp, Gossypium hirsutum
  unsure (1)..(390): unsure at all n locations; Clone ID: LIB3149-014-Q1-K1-B3
ttattatcaaggtccnccagtgatggcaccaccgcaatatgcagctccaccacctaggagagatcccggtttccttgagggctggtatggtgccaatattttgaatgaatgttannattattctttaatgtgtaannattaattaattatatantttatttttggcagtcttgcagctnntatgtngctgtgtcttattgatgaatgtngctgtgatccatcccatcatcttatcagctgagaataacanaaatatctctgtatctactattatatnggatgctagggttaatctagagataatcttttaccactataatatattataataggatatggttgttggtttgggtgaaactgtgcttagtttgttctcatctgattctacat

SEQ ID NO: 32850 - DNA, 91 bp, Gossypium hirsutum
  Clone ID: LIB3149-014-Q1-K1-C10
agataacaccagagagtatccaagatagcgaagttccttgataaaaagcttttttttccatcatcttcaacctttttctcttccatttttt

SEQ ID NO: 32851 - DNA, 350 bp, Gossypium hirsutum
  unsure (1)..(350): unsure at all n locations; Clone ID: LIB3149-014-Q1-K1-D1
aaagccaagcatgggaggaaagggatgaagaacatggcggaaagcttcaaaagattgaaatctgaaatggaagaaataagcgaggaacanaagaatatcanggaagggcaaaggcaagttaaagaaaaattcggaatcatcgaatccgagtgcgaggaattgaagagggaaactaggctcataatccagcatagtgcgagaactcatgttaaactngctcttatgttccgcatcctgaaagcaagggaagccgtcgagttgaataccgctgccactctcactgaaatgctccgtgaaatagtaggaagagagagggaggaaagcaaagctgacatctgaatgactatgat

SEQ ID NO: 32852 - DNA, 375 bp, Gossypium hirsutum
  unsure (1)..(375): unsure at all n locations; Clone ID: LIB3149-014-Q1-K1-D11
agaggagaacccgttcttccttcgccagctcgtgtctcgggaaattaggaaattcatatgatgaaatacctgtagcaagtgattggtcagggattctttctgagaggcctgtcggttcaaaagatgacaaatggcaagttttagaggattgtcaggatccttttgcttttgatgaagaggaattcgtgccttcaaagtgggacttactctctgggagtaaaaaaacatcccanactaaaaagcatcggaaacttgggccaagaaatagagaaatccaaattgagcatcaatgtcatacaataagccaaaaggaattnactagtgagggaaattgtctgagaaaatctaccaatgaagaatataatcattctaatg

SEQ ID NO: 32853 - DNA, 361 bp, Gossypium hirsutum
  unsure (1)..(361): unsure at all n locations; Clone ID: LIB3149-014-Q1-K1-D12
ccacgcgtccggctaccttcgtggagagtgtgatgggttctcaatgtccaaaagagctcgaaccagctgatccgagaacaaaagtggatcttcacctctntagacgggatgaaaactattccgaaccaaatagacgccaaagtgtgtttcaaggtgttggaagaaccctangaagtagcagcccgagccctactccctctgagtcaactgctgcagccggtaatatcatcactgcaccagcgccatcaatgggcctggttgtggatacatcatngccaacaacctctattcagctgaggttatcggatggtacgcgcatgatctcacgattcaatcaccatcatacgatcagagacattcg

SEQ ID NO: 32854 - DNA, 201 bp, Gossypium hirsutum
  unsure (1)..(201): unsure at all n locations; Clone ID: LIB3149-014-Q1-K1-D2
ttcccggtctancacgcgtccgtgggaccctaactatcttcctcaccgtttcacctcaactcttacaactgctttctgaagcgctccagccctggttgagtttagttnttaagtgaaggaacactctgtgaaatggcagattgggctcctgtacttgttgnggtggtgctatttgtgttgctatcaccaggacttctgttt

SEQ ID NO: 32855 - DNA, 197 bp, Gossypium hirsutum
  Clone ID: LIB3149-014-Q1-K1-D3
gctacaaagacctttaccttccttgatgaaggaattaaaattactgccactcaaatcaagtggaaagaggacatgggcttgccaaatggagttaatcatgagaagaaaggaaacaaggcgacaattgccgaagaaagcttcttttcctggtttgctgatgctcagcagaaagatgacatggatgaaattcatgatga

SEQ ID NO: 32856 - DNA, 165 bp, Gossypium hirsutum
  unsure (1)..(165): unsure at all n locations; Clone ID: LIB3149-014-Q1-K1-D4
gcatcctactgcaaaatgagatctgatgcgaccttattatagtcaacagctttgaatcttaagatgctctcaactggtagttggaccaagtttagatccttgattggctattaatatatacataaatatgcttcgagctattgcgtttnanaaaaaaaaaanaaa

SEQ ID NO: 32857 - DNA, 234 bp, Gossypium hirsutum
  unsure (1)..(234): unsure at all n locations; Clone ID: LIB3149-014-Q1-K1-E10
atcgagttagactcattntattaagtccattgatggaagtgttacttgccttatcttctttgttcgcttcattgatattgtacctggtggatggtggtgatttgtgtatagtgcaaggtgtgcatgcaaacattcatctgtactacaacagaagtgaaatgccgggagcatgccgaggcgaagcattctaaatccgacctatacacatgttttcctcaccttaaaaagatcaca

SEQ ID NO: 32858 - DNA, 350 bp, Gossypium hirsutum
  unsure (1)..(350): unsure at all n locations; Clone ID: LIB3149-014-Q1-K1-E2
cacgcgtccggaacggaagtggcatcctaaatcatntaaggccgaagatattacattgaagttcctcaagaaccttacaaccattgacgacatagtccatttcacaagtgatgaaaagaggatgcttacaggaccatgcctgtggaatggaataaagagaccttgttatntattcgcaagaaagtttatccagaaacattgagaggtgatgtctattctctaatatacncactatctgtgtagcttccctttcccttgctttcctaggctggataatgtattatcttgatttgtggatcagatcacaagcggactagatcaatgcattcaacaggattaaaattttgatt

SEQ ID NO: 32859 - DNA, 371 bp, Gossypium hirsutum
  Clone ID: LIB3149-014-Q1-K1-E4
cattcctgcttatggaggtatagttgcttgggaaggagatggatctccattcgccgaatctgatgatagcatcactcatcatattgtggacagaccaacccatggacatgtatatctttcaagagaatatgttcaacctcagtgggtttatgactgtataaatgcacggatcatcttgccaactgagccatatatggttgggagggacccacctacacatctgtcgccttttgatgattatgaggctgaaggttatgttcctgattattccaagaccataagacaactacaggctgctgcaaaaagtgatattcaaccattgtctgtcaccggaaatgatgagtaggataactctcaaaatatgttggcat

SEQ ID NO: 32860 - DNA, 310 bp, Gossypium hirsutum
  unsure (1)..(310): unsure at all n locations; Clone ID: LIB3149-014-Q1-K1-E6
gtataagagcagttgtttgtgtgaagagaagatgnaaaagcttcatttttgtgatgggaaattgtagagagatccttcacccatacttttccctgttttgattaaaggttaggtgttgtgtaaagctatgttactttttcccttgttttgatgcacagtttgctactgattttcccttgaagcaactcatcgactttatgtattggattgaagtaattattgactactattgaaaaaaaaaggcgcgtctaaataactctcctctcacttattttagataatatatgcgttacgtatgaactgtcatatc

SEQ ID NO: 32861 - DNA, 87 bp, Gossypium hirsutum
  unsure (1)..(87): unsure at all n locations; Clone ID: LIB3149-014-Q1-K1-E8
ttgagttgtgtccatggagctccaatgatgcatanaatattgaacctgagaagagccatagaggtcactaacttttggatgagtctc

SEQ ID NO: 32862 - DNA, 249 bp, Gossypium hirsutum
  unsure (1)..(249): unsure at all n locations; Clone ID: LIB3149-014-Q1-K1-E9
ataaaactgttggttctaggagagggatggtttgatctcatcctccatactacggagactaattatttttgtaatagttagatcataaatgaaatttcatttgaagatcaatcccccccttctgtagcagttaaaaataaggagcagatgcagatggtgacgatactgcttactttaccttgttaagcaagctttttaatgtaatattgagaacttttgttcggctttctttaaggcaaaaaanatnaa

SEQ ID NO: 32863 - DNA, 97 bp, Gossypium hirsutum
  Clone ID: LIB3149-014-Q1-K1-F10
tgttccatcttcactagtaaacctgaattcaatttcaaatggattgggccacaaggaagtgacgctggtattgtcaatgtgaacataccaaccaatg

SEQ ID NO: 32864 - DNA, 360 bp, Gossypium hirsutum
  unsure (1)..(360): unsure at all n locations; Clone ID: LIB3149-014-Q1-K1-F6
gaggaatatcatgggtgccaaagttctcttcttcnttagcttgctttccttntcagctgtgtcggcatttgcacaggatgaggaagaccaaggtcttgttatgaacttgtacaaggattcttgtcctcaggctgaagacattatcaaggagcaagttaagctactgtacaagcgacacataaacactgctttttcttggctgagaaacattttccatgactgtgctgtccagtcatgtgatgcttcactgctgctggactccacaagaaggagcttgtctgagaaggagacatgacaggagcttggcctaaggaatttcatgtacattgagaccatcaaagaagctgtagaaagggaatg

SEQ ID NO: 32865 - DNA, 211 bp, Gossypium hirsutum
  unsure (1)..(211): unsure at all n locations; Clone ID: LIB3149-014-Q1-K1-F8
atcaactctacctctcttacctaactctntaatttccnnctccaaatttcttggttttcattgcttntaatcaaatccccgaaaattattgcttctctagaacttacagaatgagcagaaaagggcactccaataacaagttggtgagattcatcacaattcctttcagagccttgggcaaagctagggatctntatgttaaaagcatgac

SEQ ID NO: 32866 - DNA, 117 bp, Gossypium hirsutum
  unsure (1)..(117): unsure at all n locations; Clone ID: LIB3149-014-Q1-K1-F9
gcttgtatgataaaaatggagaagaaaactggaatcaaaagagatcaccgattnttaggattctgtcaatacttgttgatgttctgtanaattagcggagtgaagatcaatggtgtg

SEQ ID NO: 32867 - DNA, 58 bp, Gossypium hirsutum
  Clone ID: LIB3149-014-Q1-K1-G10
ccgtctccacctcgacgtcttggcttacttctctatgcgaactcttactctatgcctg

SEQ ID NO: 32868 - DNA, 250 bp, Gossypium hirsutum
  unsure (1)..(250): unsure at all n locations; Clone ID: LIB3149-014-Q1-K1-G11
aaggaggagaaatccatggctggcccgttctttctatatttttataacaatggtgaataacccanacagagaacgaaatgatgcatagaaggctaaagggattcggaggaagaaagaagtcacctctgccattngattgctnntttgttttctctatgcgtatatntcgtttgtccaaaatacaatgatntttttgaggcctttatagctgaaaagaaagaaaataaaaatacaattttcattcctttct

SEQ ID NO: 32869 - DNA, 188 bp, Gossypium hirsutum
  Clone ID: LIB3149-014-Q1-K1-G12
tcgaccctctcactgagttccttcaattatggaccactgcctgttgcctacaaaatgctctcggtattcctatggctgctgctgacgttgcatcagttcaaactgcacttcatgaggagacaactgtagaatcagtgaaggatcatgaagctacaacagctgaagtaatcgccgaagctcctgcagcg

SEQ ID NO: 32870 - DNA, 57 bp, Gossypium hirsutum
  unsure (1)..(57): unsure at all n locations; Clone ID: LIB3149-014-Q1-K1-G5
ctttctatatntttataacaatggtgaataacccaaacagagaacgaaatgatgcat

SEQ ID NO: 32871 - DNA, 271 bp, Gossypium hirsutum
  unsure (1)..(271): unsure at all n locations; Clone ID: LIB3149-014-Q1-K1-G9
ctcaaccagcattntataaccaagagtacagaaccaggaatattagtggtcttggaaattattctgttggccaaggaacttttactgattctgcaatgggtaatatcaataatttgcaacagttaaccagtctgaaaattcatgtgaatagtggtggtgatcttggtggtgatattggaatgaagactggaacatgccagccactaaaacagttaaactcagaaaatnttggaactcgtggagctggaatcaagattaggacccgtggatc

SEQ ID NO: 32872 - DNA, 298 bp, Gossypium hirsutum
  Clone ID: LIB3149-014-Q1-K1-H10
tcacgcgtgcgccacgcgtccgctatgtagttaccctatctgttccagctgtagttgcagtccatgtcgcggcatatccagttcaatactcctaccgtaaagatgaacaatgaaaggctcatgaaaatggctggtgcagtccgcactgatgggaagggtagcatgagaaggaagaagaaggctgtccacaagacaaccaccaccgacgacagacgattgcagagcacccttaagagaataggagtgaatgctattcctgcaattgaggaagtcaacgtattcaaggatgatgttgtta

SEQ ID NO: 32873 - DNA, 203 bp, Gossypium hirsutum
  unsure (1)..(203): unsure at all n locations; Clone ID: LIB3149-014-Q1-K1-H11
atctactaacatcagctgaaacattgctaaaatacttttacgagaaggttntatcgataacgtaaggaaacatcgggaacgcaacagatattttttggttntaaccctacgacatagacggaatagaaaaggaccacatagaacntatttaaanttacgacggatcagtcgaccaggtctacgaatctattctaactatcaac

SEQ ID NO: 32874 - DNA, 212 bp, Gossypium hirsutum
  unsure (1)..(212): unsure at all n locations; Clone ID: LIB3149-014-Q1-K1-H7
atgacacttgaccagtactacagtcgcgaatcgtgaaagcaacaagctgagctggtaaagcatttgtcattgctgcatggccttaacccagtaatccgtcttggtgaatggcttcatagcggtgtgctacattngtttcattntcctttcagatacagttccaatcaagttcatgctctgtgattataattatttagctgtgagtatttctt

SEQ ID NO: 32875 - DNA, 193 bp, Gossypium hirsutum
  unsure (1)..(193): unsure at all n locations; Clone ID: LIB3149-014-Q1-K1-H8
gtaatggctaccaagcagccaaatactggcctctntgtgggactgaacaagggccatgttgtaaccaagaaggagttggctccacgtccctctaatcggaaaggaaaaactagcaaaagagtccattttgtgaggaacttgattagggaaattgctggttttgcaccatatgagaagaggattactgaacttc

SEQ ID NO: 32876 - DNA, 396 bp, Gossypium hirsutum
  Clone ID: LIB3149-015-Q1-K1-A1
gtgattttctggtgtcgtgaggtattaggagagtcggggatcacaatttataaagacagggctatttccgtcgtctatagagcatgacactgacactcttctaatcaaatgagacctcatcaacaagtccacggggctatttccatggtctaaagagcgtgatactcttgtaatcaaatgagacatcatcagcaagctcacttcaatcaagcatgatgaaccataattactttgaatgtaacacccctccctgtgattggtattttatcattttgttcaatatttttttatagttattgagagtcttttctgtctcgatgacaatccggttttcggtcagaatctaggattggctctatgcttcttgctaaagctgatttccttgctagagttcat

SEQ ID NO: 32877 - DNA, 420 bp, Gossypium hirsutum
  Clone ID: LIB3149-015-Q1-K1-A10
ctattcttcacaaaaaagaaaagaaaaaatacagtgaaaatggcaacccttaaggttccagctcatgtacctgccccttctgaggatgctgagcaacttcgtaaagcttttgaaggatggggtacaaatgagcaattgattatcgacatattggctcacaggaatgcagctcagcgcaatttgattcgtaaaacttatcgtgaagcttatggggaagatctccttaagtctttggatgaggaactttcaagtgactttgagcgagctgtggtgctgtttactttggaccctgcagagcgtgatgcatttctggctcatgaagctacaaagaggttcacatcaagccattgggttctcatggaaattgcttgcactaggtcttcacatgaactgttcaatgtgaggaaggcgtatcacgat

SEQ ID NO: 32878 - DNA, 384 bp, Gossypium hirsutum
  Clone ID: LIB3149-015-Q1-K1-A2
tatctaagcctataaacaaaaacccaagtcaacaaaacccagaaatgaattaaagttttttttttcaatagcttttgtccgatttaatataaaaacgtaaaaggaatgatttatttcaatgtgggttattgtttatattataagatgtttgatagctgaaagttgatttttgggtgactaggacgtggagggtcagctggaaacaagttcaggatgtcactgggtttaccagtggcagccacagtgaactgtgctgataacactggtgctaagaacctttatatcatctcggtgaaaggaatcaagggccgtctcaaccggttgccctctgcttgtgttggagatatggtgatggctaccgtcaagaaagggaagcctgatctc

SEQ ID NO: 32879 - DNA, 361 bp, Gossypium hirsutum
  unsure (1)..(361): unsure at all n locations; Clone ID: LIB3149-015-Q1-K1-A3
gattgtgcaaggagcgctaaagccacttgagttgaatctggtacctgtaccatagtggaaagaaataaagaaatagtagtggagggggctgtttttctgaggcctcatcttgctttagcagccgaatgaataactcgatccgctatttgctgttttgattcattcttgattttgtatctatcatcattggtcaattttccaactgtctttgaggtgagtgttgggcatttatttgtttcacaatagggagagaatgggctgttgtatcttcttctgctcgagatatggggggctcccagtcgtctcgaatgcactggctttcaattattatttattttaattttgggtggggaaaaannaa

SEQ ID NO: 32880 - DNA, 409 bp, Gossypium hirsutum
  Clone ID: LIB3149-015-Q1-K1-A4
agagaaagactggaccgatgtcgagttcttatcatcaacagagccaccaacttgggggtgccctgcatgcaagacgttggctgagaaggcatcttggaaatctgctgaagaaaacaacatcgatctcattacagttatcccttctctcatgactggcccttccctcaccccagttgtgcccagcagcataggccttgctacatgtttgatttcaggcgatgaattcctcataaatgctttgaaaggaatgcagatgctgtcatggtctatctctatcacacatgtggaagacgtatgccgagcccatgtttttctggctgaaaaagaatctgcatcgggtcgatatatatgcagtgctgtcaataccagtgtgccagaactagcttagttcctcaacgaaagataccct

SEQ ID NO: 32881 - DNA, 402 bp, Gossypium hirsutum
  Clone ID: LIB3149-015-Q1-K1-A6
atttgatatcaagtatgtagttgctgctgctgtagcctttaaaggtgttgggagtattctctttacctttggcagcaccggcggagcttatcttctggttttgcaccaactcgttcttactcccattgtttatgacttctacaattacgacacggaaaagaaagaatttggtcttctttttacaaagttttcacagaacttgacgctgttaggggcattgctgttcttcattggcatgaagaactcaatccccacaagacaactgaagaaaaaggctccgaaaaccaaaacagtttgaagacgtaacacatccggttaaaaccgaagagggtctggtttttctcgttcgatcttaatttgtatacctcggtgtaactagatctgtttctgtatgcttgtacc

SEQ ID NO: 32882 - DNA, 402 bp, Gossypium hirsutum
  Clone ID: LIB3149-015-Q1-K1-A7
gtaccggaggtgaatccatctatggagccaagttcgcggacgagaacttcatcaagaagcgacacgggacctggcatgcttgtgcatggcgaacgctggacccggaacaaacggatctcaattcttcatctgcacgaccaagacggagtggctggacggaaagcacgtggtgttcggacaggtagttgaaggcatggatgtggttaaagcgattgagaaggtggggtctagcggtgggaggacttccaagcctgttgttattgctgactgtggacagctttgaaaaagggcttattgaattgtgtttccttcataatatctggtctttttaggctccttttttttatgctatgctgcttctatggctactgggttttggtgttttttaagaagttgcttgat

SEQ ID NO: 32883 - DNA, 222 bp, Gossypium hirsutum
  Clone ID: LIB3149-015-Q1-K1-A9
aaactggactgtttacaacccaaaattaatctaatcatcagcccaaatacccgcagcccgagcacaaagaatcagaggcccgagccttagctactgctggccgccgctcctgcctctgcctagctccagcgccgcacgagccactccccacgcacgtagcagtactcacaccagggaccacgccgtacgcacgcccgcgcacatgcgaacctgctggagatc

SEQ ID NO: 32884 - DNA, 325 bp, Gossypium hirsutum
  Clone ID: LIB3149-015-Q1-K1-B10
caaccagtcaaatccatcactgttaaatgatcttccagcccagggtgtaactgaaatggtgaagcaccacgggaattggttgatgtcgcttcggtttttaacatcaagtctctgacctcctgaatggcaagtggtgggattctctgattatgacgcatgtttctttttttaatttggttcttctgtctgcatatttttatctccctcatttcccccattctctccctctatcccccatctgccttcctcttccatgatggaggtgcaagtttatgtattatgacataagggatttcgtttataaaaacatttctttggatttact

SEQ ID NO: 32885 - DNA, 384 bp, Gossypium hirsutum
  Clone ID: LIB3149-015-Q1-K1-B2
atcagatgcaggccaatggaaccttgttgttccctgctattaatgtcaatgactctgtcaccaagagcaagttcgataacttgtatggatgccgtcactctcttcccgatgggttgatgagagctaccgatgtcatgattgctggtaaggtcgctgttgtctgtggttatggtgatgtcggcaagggttgtgctgctgccttgaagcaagccggtgctcgcgtcattgtcaccgagattgatcccatctgtgcccttcaggctctcatggaaggacttcaagttttgacccttgaggatgttgtctccgaggctgatatctttgtcaccacgactggtaacaaggacatcatcatggttaaccacatgaggaagatgaagaaca

SEQ ID NO: 32886 - DNA, 415 bp, Gossypium hirsutum
  Clone ID: LIB3149-015-Q1-K1-B3
gcgaccctctttttcctctaccaggtgattttagctttgtgttagttcctttaagcaatgcgccaagatgcagaacgaagagggtcaaaacatggatctttacatccccaggaagtgttccgccactaacaggctcatcacctctaaggatcatgcttccgtccaaatcaacgtgggacacttggatgagcttggcagatacactggcacattctccacttttgctctttgtggatttgtccgtgcccagggtgatgctgacagtgctcttgacaggctttggcagaagaagaaagctgaagtccgacagcagtagttggatacctttttaccctagtctatctccgagcttgggaaagaaaaatctcatggcagcgactattatgttctaggttttttcaggttaaactatgtc

SEQ ID NO: 32887 - DNA, 420 bp, Gossypium hirsutum
  Clone ID: LIB3149-015-Q1-K1-B5
aaacacttctccagtgaccaaaaaagcttcattgtctcttctatcgaaaaccccatggctgctcttaagctagtttgtgctctagtgttgtgcatgttggtggttgagcccattgccacaaccaccataacatgcggcgatgtgacaagcaaagtggccggttgcttatcatacttgcagaacggagggaacgtgccgaaggcttgctgcgacgggatccggtccctgaacaacatggctcgaaccacccctgaccgccaaaccgtgtgtgggtgcttgcaagctgccgctaaggctgtcaaaattaaaggcaacttggctgagaccctcccagccaaatgtagtgtcaacatcccttacaagatcagcacttccactaactgcaaaaatgtgaagtgagatggatgaagagagggtttt

SEQ ID NO: 32888 - DNA, 417 bp, Gossypium hirsutum
  Clone ID: LIB3149-015-Q1-K1-B6
gagagagggagggaggaaaagatgcagatattcgtgaaaaccctaaccggcaagaccataactctcgaggtcgagagcagcgataccattgacaacgtcaaagccaagatccaagacaaagaaggaatcccaccggaccaacaacgtctcatcttcgccggaaaacagctcgaagatggccgtaccttggctgactacaacatccagaaagaatcaacacttcatcttgttctgaggttgagaggtggaattatcgagccttctttgatggctttggctcgcaaatacaaccaagacaagatgatttgccgcaagtgttatgctcgtcttcatccaagagccgtgaactgccgcaagaagaagtgtggtcacagcaatcagttgaggccgaagaagaagatcaagtagatactgact

SEQ ID NO: 32889 - DNA, 415 bp, Gossypium hirsutum
  Clone ID: LIB3149-015-Q1-K1-B7
gttgaaactcacgtagcaaagctggaatctgagattggtgactttcagaaactgctcgtgacgcgcactcttaagctcaagaagattggaattccctgcaaacataggaagctgatactgaaatatgcccacaaatataggctgggtttgtggaggccgagagctgaaccagtgaaggtgtgataaataagttttatcctttgggagctatgctaagatggtgatgttattgtaccaaagaatggctttagggctctatttgcaatcattggtcaccttactccttgtttcaatggacatgaatttagtggtttaggttcaaaaaaggggggaaagctctatttgcaatcattggtcaccttactccttggttcaatggacatgaatttagtggtttaggttcaaaaaagggggg

SEQ ID NO: 32890 - DNA, 386 bp, Gossypium hirsutum
  Clone ID: LIB3149-015-Q1-K1-C1
gaccgattcgccagggtgtcaagagaaggcatcgtatattcttatggtaatggcacataaagcatatggagatagacaggccatgatcgaagctggcattgtttcatcattgcttgagctaacacttttgggtagtacattggctcagaagagagcttctaggatcttggaggtcctgagagtcgacaaagggaagcgagtttcagaaaacttcggtgggaacatgaatgcagctgtctcggctccaatttgcggctcttcatcatcgtcttcaacaaatctgaacggaaaggagtgcttggtggaagaagcaggcatgatgagcgaagagaaaaaagctgttaaacagttggtccaacagagtttgcaaaacaatatgaggagaa

SEQ ID NO: 32891 - DNA, 420 bp, Gossypium hirsutum
  Clone ID: LIB3149-015-Q1-K1-C10
ataaaacaaggcttgctcatgggggaattcacaaggaggttcacgaccttctcttggactatgggcttgaaattattgcagaaattcttattgaaggtctatcacgagtgaaaagatgtactgatgaaggacgagctctcatgtcattagaccttcaggttttaatcaatggcttgcaacactttgtctccttgaatgtgaagccaaagttacagatcgttgaaactttcatcaaggcttattatctccctgaaactgaatatgtacactgggcacgagctcatcctgaatacagcaagaatcaaattgtgggattgataaaccttgttgcttcaatgaaaggttggaaaagaaaagccaggtttgaagtgctagaaaagatagaataaacaggtacatagccctggaatcactacttaa

SEQ ID NO: 32892 - DNA, 411 bp, Gossypium hirsutum
  Clone ID: LIB3149-015-Q1-K1-C11
aaagcagttgtgcattagtgcaatcagtttagctatcaaaggggattttggggtcccggtcaccccatgctgtaaattttgttggagagtctgctctaggttcctgtgtgctttgcttgcgtttttgtctttattctatatagtgcggaattgccgacataccaagtccagccggcttctagctatgccaggatggccgatgagagggaaattggaagttttcaaacatacattttcgatgatcatcatggttggcatatcatatggattatggaatataaaaatggagacgggagcatttggacggtgatttcaggtgataaaatctatgaaatttttttcatatgttaaatttttattttattatgaatgtaagcatggttgttgaatcgagtcactttttgttgcagt

SEQ ID NO: 32893 - DNA, 321 bp, Gossypium hirsutum
  unsure (1)..(321): unsure at all n locations; Clone ID: LIB3149-015-Q1-K1-C12
gcaggaggtactttcacatccgnttgttattcttcaaaacttacatggacagccatgggtaggaagcttcataagaaggatgttgcccaatatgccgtgaagaatagaagacgtgcatccaataatccttactcccgatccattgttggtgcctccttagaggttatccataagaagataagtgagaaacccgaagtccgtgatgctgccagtgaagctgctctccgagaaatcatggaaagaaagaaaagaagaaagactatgaagctaaggaaaagatgaaagataataataataatgatgatgtacgagatgaatatg

SEQ ID NO: 32894 - DNA, 390 bp, Gossypium hirsutum
  Clone ID: LIB3149-015-Q1-K1-C2
gccagttcattttcaagggtcttgcaaggtcaagaattctcgaccttgagaggcacatttgctgagagtaatgattctgaaactgctgataggtcagtgatgtggccaccttcaatagatgatgagaagattgatgtagctcatggtgaaagaaaatttgggtcagagaattggatgccctctaggaggcatgaaccaacttacacagatttgctctcaggttttgggtcgaatgctgatacatcgcgcggatattatccttcctttgttgatcaaacttcagtagctggtaattcggggaaaaaaacaattactaggtcaagaagggaagcttggctcttggtccctcctgccatctggtctctcactcaagttgtctgacagtagtac

SEQ ID NO: 32895 - DNA, 415 bp, Gossypium hirsutum
  Clone ID: LIB3149-015-Q1-K1-C3
tgcagatcggctcacttaaaggcaatggaagtggccaaagaatcaggtgctttgttgtcatatgatccaaaccttcggctgccactttggccttcagccgatgaggccaggaaacagatattatccatctgggataaggccgatattatcaaggtcagcgatgttgagctagagttcctcaccggtagcaacaaaatcgacgatgaaactgctatgaaactttggcgccccaacttgacactactcttgatcaccctcggtgaaaagggtagcatgtattataccaagtacttccatgggtcagtggatgcattccatgtgaatacagtggatacaactggcgccggggactcttttgttggtgctttactatgcaagatcgtggaagacccaaccatacttgagaatgaatcga

SEQ ID NO: 32896 - DNA, 424 bp, Gossypium hirsutum
  Clone ID: LIB3149-015-Q1-K1-C5
tatgctccagtccttgactgccacacatcacacattgctgttaagtttgctgagcttttgaccaagattgacaggcgatctggtaaggagcttgagaaggaacccaagttcttgaagaatggtgatgctggtatgattaagatgattcctaccaagcccatggttgtggagaccttctctgagtacccacccctgggtcgttttgctgtgagggacatgcgtcagaccgtggctgtgggtgttatcaagagtgtcgagaagaaggacccaaccggtgccaaagtcaccaagtctgctgctaagaagaagtgaagaggccaaaaggttttagccgtgaagcagattgagtgttttatctttggttatatgtgggttgaagtttttgcctgttttatgtaggatttttaaaagttgagatgctttg

SEQ ID NO: 32897 - DNA, 412 bp, Gossypium hirsutum
  Clone ID: LIB3149-015-Q1-K1-C6
catccgttcctggcttcacgccgaggagaacaagcgacggacgcttcagaaaaacgacatcgcggcggctattactaggaacgacattttcgatttcttggtggatattgtgcccagggacgagatcaaggatgaggctggtctgggtgggatggtgggtaccactgccagtggggtgccatatttttatcctcccatgggtcagcctgctggcgctcctgctggacctggcgggatgatgattggaaggcccgccgtcgatccaaccggtggtatttatgctcagcctccttctcaggcttggcagagtgtttggcagacggcggtggctgacggtgggtcgtatgccagtggaagtagcggctgtcaggggaatcttgacggtcaaggctaagcaattcatttgtccgat

SEQ ID NO: 32898 - DNA, 110 bp, Gossypium hirsutum
  Clone ID: LIB3149-015-Q1-K1-C8
gccacgcgtacggtgaagatcaaaatgatgcatctttgttatagataaaatatcaggagggatttggatcttaagagcatgaatgcaagctatatcgaaatacgatctcc

SEQ ID NO: 32899 - DNA, 415 bp, Gossypium hirsutum
  Clone ID: LIB3149-015-Q1-K1-C9
atcgaggactaagctcgaaaaggaatatgaagaagaagttttggttctacaaaacggtcgactagaccgagatgcgggggtgaagttcgatgtgtacattaatgatgaagacgacgagacaccgactgaacctgaagattcagagttcgctgggagctttacgaatctaccgcataaccatcacaagactgggatgaagcttaacaccaacttaacattgccattaacagatttgttggaggatttgaatgttgaaggtgatgagagtattttggtgactttggtgcctaaagaaggaaagggtctggtttctattggtaacattaagatcgactacatccgagattgatgatcagttaatttgccgactcttcggtcgcttactgaaacattttgcttcgtgaatttgtttccc

SEQ ID NO: 32900 - DNA, 422 bp, Gossypium hirsutum
  Clone ID: LIB3149-015-Q1-K1-D1
gccgatctcgtcgttcagtacttgaagctttgtgaaaaataccctgtcccatggaggatgatccggtctcacgttcacaaaatgctaggagactggtttagggttcaaccgcaggttagagaggaactaaacgcgcagtccaggctaacgttagaatttctttacggtctggtggatcagttacgagaattgggtgtacgagttctacttcatcaaaaggatgatgcttcggcaaccggaaacttggccgaggtaatcggtattgattacccggaccaatgtgaattgagtcgtaggtgcttagaataggggaaaatcagacgccaatgaatttttgagctaaaaagaaagaatacccttatgattttttttatgtgtaagattataaatttacacttcttacaatttcgtcccttcattca

SEQ ID NO: 32901 - DNA, 433 bp, Gossypium hirsutum
  Clone ID: LIB3149-015-Q1-K1-D11
aaaaaaaaaaaaaaaaaaaaaaaaatttaattaaaaaaaaaaaaaaaaaaaaaaaaaaaagggcaaatctttatataaaaaatccaaggcttacaaacacatacatacaaaaaaaaaatatcttttatataaaccccctaattttttccacttcccgacttttaacactctttttgcctcccaaatccctcccctttcccaacttaatcccttctccttactttccccctttcaacatattccccactccccatttttcccaccccgttctccctacccaacagtattccaccctttattccattttgacccccccctctttttccacatttaccccaccccataatgctccttacacttaccccccccccttacatttcctataaccctttccctcaattgctttcttttttttcccttccttttttccccc

SEQ ID NO: 32902 - DNA, 421 bp, Gossypium hirsutum
  unsure (1)..(421): unsure at all n locations; Clone ID: LIB3149-015-Q1-K1-D2
gaaaaacgctgcttgcagctttgctattaaggtatgtcatcatccgataagccagaattagttgaaagggatgttaaggacaaggtggatgacaaagaagacaacagtggatttatagacaaggtcaagggtttcattcatgacattggtgagaagatcgaggaaacaatcggctttggcaagcctactgcagatgtagctgagattcacctcccttgtatcaatcttgagaaagcagaaattgtcgttgatgtcctcataaagaacccaaaccctgttccaatccccctcgtcgacattgactacctcattgaaagtgatggtagaaaactcctttcaggcttgattccagatgctggaaccatccatgctcatggtgaggagactgtcaaaataccagntactttgatatatgatgata

SEQ ID NO: 32903 - DNA, 420 bp, Gossypium hirsutum
  Clone ID: LIB3149-015-Q1-K1-D5
cctcaatccagagcccatccaattccaacccaattttccaacacgaaactccgctcccggggaaggcacgatccaagcgttcaagggtggccccatgcgattggtccacccgactcctccacctcaatccgaaatcggtggcccagaagaaaagggagaacccgaacgccaattcggagttgccagtccggaaatgtttacattgtgcggcggaaaagacgccgcaatggaggactgggccgttgggtccgaaaacattgtgtaatgcatgtggggtgaggtacaagtcgggccgattggtgccggaataccgtcccgcagcgagtccgacatttgtttcggcgaagcattcgaattctcataggaaagttttggagcttaggagacaaaaggaagtccaaagagcacagcatcaacagc

SEQ ID NO: 32904 - DNA, 379 bp, Gossypium hirsutum
  unsure (1)..(379): unsure at all n locations; Clone ID: LIB3149-015-Q1-K1-D6
tggaaataacattatctaaaactaagcgatcaattttatgctaaaatttagcttagtctagtggaagataatggaatttaaatctaatattatctctagtgctacattccttattaattcaaaaaggaaattgatgtggttcctaaaaaaaaaaaaaaaaaaaaaaaaaaaaaaaaaaaaaaaaaaaaaaaaaaaaaaaaaaaaaaaaaaaaaaaaaaaaaaaaaaaaaaaaaaaaaaaaaaaaaaaaaaaaaaaaaaaaaaaaaaaaaaaaaaaaaaaaaaaaaaaaaaanngggggggggggtttaaaaaggaacaaattttttgttccccgcggttgaaaaattaatttttttttttggggcccccaaaataaatt

SEQ ID NO: 32905 - DNA, 418 bp, Gossypium hirsutum
  Clone ID: LIB3149-015-Q1-K1-D7
atgaaaccattatttgaagatgaaaatataagactgtttcattgattatgatctcggcatcatgttgcagactggtgtaactttactcgtgatcaacttgagcaatcagacgaatttcataatgaatgctcaaaacagcatcaatctgaagttggctgcgaatgaacaaaacattagcagggacagcttcacacatagtcttaagaaaacattctcctgggtcggaaccaaagcttccgacgatgctctactccgagaagagtatcatttaacaccaaaagacggataccttagaagtcgaactatggttctaaatggcatccctttagaacttacaagcaccggagacatcccatcactaaaccccgtccgtgttaacgtgaagtctccaataaccatctcgcctttgtcaattgca

SEQ ID NO: 32906 - DNA, 396 bp, Gossypium hirsutum
  unsure (1)..(396): unsure at all n locations; Clone ID: LIB3149-015-Q1-K1-D9
cctcactttgtggacctcagacatgcaggatgatgggacagatgaaatcaaagaagctcgcaaacaagaggatgagaaacaaccgtgaagtctctaatcttcatggtagtgttttacttctctggttgtttttgtatggagaagtcgcttggtcctactatcgtcttcaattacttgtttttagtagatcaggcctcaatttatgaaccttggaagtactcctaagaatttcttagtgtttcactggttattgtttttgagtttgaagccttctagctttctaatggcagtgaagttatgtgcacacatgcttaattgttttcatgacaataatggagctgatggttgagatattttctatggttaaggtttgaaatttgttttcaaaaaanaaaa

SEQ ID NO: 32907 - DNA, 67 bp, Gossypium hirsutum
  Clone ID: LIB3149-015-Q1-K1-E1
caagtattcttgtcaaagtattttaagctgcacctttcaaacaaaacatagtctcgttttagtggtt

SEQ ID NO: 32908 - DNA, 387 bp, Gossypium hirsutum
  Clone ID: LIB3149-015-Q1-K1-E10
tccacgcgtccgaaaaaaatgtaaaataggtggaagggaagggatctaaccgaacattcggtgttctttgatttgttttatgcatttaggcgcagtaaccccatttgtcctgggacgttccatttgttggcttattatttttaggccaaaggtgtctaaagctctaaaaaaatccattctaaattgaattcttgaaggtcaaaattttaataaattaagtcatttaatccttaaagttaaaaggttaactattaaagagtaacatagctattttgaggttgttttagtaatgtaacatgttaaaattgtgtaatgtgtcgaaatatgatattttttatttaaaattattaaagatcataaaaataccaaaattaaaatatatttatt

SEQ ID NO: 32909 - DNA, 97 bp, Gossypium hirsutum
  Clone ID: LIB3149-015-Q1-K1-E11
gtttgccagctttgaatgtggaacactagggaacgtgttccatgcttgaatacttgaatgttttgggctcctgggagttgattgacatgtgtttgtg

SEQ ID NO: 32910 - DNA, 484 bp, Gossypium hirsutum
  unsure (1)..(484): unsure at all n locations; Clone ID: LIB3149-015-Q1-K1-E2
ttcccgggntcgaccccacgccccgtccgggaacaatcnnatctgaagaaagggaaatatattggttgtgtctcaagaaagaaagtgcttnntccttgggagggtatgtcgttccgnngttccattgatgagtgaagggagggtaggnaaaatggggtaccanncccaggaatcaacncnnctgatcactgnngcagtattggcccaggcannacatctgatgtaaactcgggagaaacttatatcnagaactttgagaccagtccaaatgcagatgttcttccttctaaaactaatgaatcatcttatatggtttattccatgggtcagaacttgggatctcgaaacttggaaagtaattttaacttggaaggtgtatctactccacaactggaaattaatggtctgagtagatccgactcattaggggctattggtggggttgctcataattatgagactcatcaagtttagatcttaatca

SEQ ID NO: 32911 - DNA, 418 bp, Gossypium hirsutum
  Clone ID: LIB3149-015-Q1-K1-E3
acaagattggtggtattggaactgttccattcggccgtgttgaaaccggtgtcttgaagcctggtatggttgtgacctttggcccgtctggtctgacaactgaagttaagtcagttgagatgcaccatgaagctcttacagaagcacttcccggtgataatgttgggttcaatgttaaaaacgttgctgttaaggatctcaagcgtggttttgttgcatccaactccaaggatgaccctgctaaggaggctgccaacttcacttctcaggtcatcattatgaaccaccctggacaaattggaaatggatatgccccagtccttgactgccacacgtcacacattgctgttaagtttgctgagctcttgaccaagattgacaggcgatctggtaaggagcttgagaaggaacccaagtt

SEQ ID NO: 32912 - DNA, 192 bp, Gossypium hirsutum
  Clone ID: LIB3149-015-Q1-K1-E4
ctcacaatctcttatctaaggatgcccgataggatacctagttttcttgttaaaaatatgctagatcgagttggaaaaattaataaagcaatgtaataagtcaccgatcatgttaccccagaaaagagtagtattcagacgttctggctattatctttcataaaattatatctcagctatataataagtgtc

SEQ ID NO: 32913 - DNA, 167 bp, Gossypium hirsutum
  Clone ID: LIB3149-015-Q1-K1-E8
gctgccgaggccgagaaggaagacaagaagtaaggttacccttttggggacagtgttttgttatttggcttgctaaaaagaccttaaattttgttttcattttgtcaagtgaactgagacagctttagaaaactttggtattatgacagtaatcctttttgttgagc

SEQ ID NO: 32914 - DNA, 416 bp, Gossypium hirsutum
  unsure (1)..(416): unsure at all n locations; Clone ID: LIB3149-015-Q1-K1-E9
cgatgaggaaagtttacagcgagataaaaggtatgaaattgaaggaagttcctggttacgtcaagccgatgctatctatgggttacttgaagaaatctgttcagaggggtttggacaattaccatgctaagtacattgagactgattctatcgaacctctctaccatgtctgtttcggtgggatgatcttttcttaccttgttgctcttcccaacgagcgtcgccacctcgagcacaagcagcatgctgagcaacacggtcatcattaatcccatctagctttaaagatggttcggatcgttgttgtgcccttctcagttttatccggtaacaattcgatttgcttaatgctttttggttgtaatttgtgaacaatgtangcagaggaagatgctgtcttgatcaaatgcaaaaat

SEQ ID NO: 32915 - DNA, 361 bp, Gossypium hirsutum
  unsure (1)..(361): unsure at all n locations; Clone ID: LIB3149-015-Q1-K1-F1
aaattatggggcttcaaaatgatttgcaaaagctaaaataattggtgttgggagttaatagatgcggtgcaagtttagcaattgagatctgagtttgtatttattttttatttcacaaacttttttgtagtttttgaggcttctgcttagacaattagaaatttaccccaaagactagataatgtataagctatccttgaaataaagcctgataaaaagtgttactatagccattttnaaaaaaaaaaaanaaaaaaaaaaaaaaaaaaaaaaaaaaaaaaaaaaaaaaaaaaaaaaaaaaaaaaaaaaaaaaaaaaaaaaaaaaaaaaaaaaaaaaaaaaaaaggggcggccgttttaaa

SEQ ID NO: 32916 - DNA, 285 bp, Gossypium hirsutum
  Clone ID: LIB3149-015-Q1-K1-F10
caaaagccaaggtcaaacgaaggcaaaaataaggttttccatggaaggggaagctggttgatacgaggacgttaagccaaacgtcgtcgctaaacaaagtaatggcgatgttgtcggggataatggtgttggaaatctgggatccgttggagcccctgattttctttccaagaaaaatttccagaactggtccgtggcaactcctgcatctggactgaatttcactggccctgctccatctcaactaaccatcttctatgatggacacgtttgtgtgtttgatgc

SEQ ID NO: 32917 - DNA, 357 bp, Gossypium hirsutum
  Clone ID: LIB3149-015-Q1-K1-F11
ggtggtgtgaatttgcagaacctgttaatggggaatctacacagtttcttcaggagatttgcacgcaagtataacatggtcattataagctcaattcttgagagggatataaatcatggagagactctctggaatactgctgttataattggaaatcatggcaacataataggcaagcaccgtaagaaccatattcctagagttggggacttcaatgagagcacgtattatatggaaggaaatactcggcatcctgtatttgagactgcttatgggaagattgctgttaatatatgttatggaaggcaccatcctttgaattggctagcttttggtttgaatggtgctgagatcgtt

SEQ ID NO: 32918 - DNA, 337 bp, Gossypium hirsutum
  Clone ID: LIB3149-015-Q1-K1-F12
acaacacttgcattaagtctcaaagatatcactgcaagaaaaaaaaaaaaccagacatggcttccaacactgttgcgtccgctgctcttcttcttaccttgaacttgttgttcttcactttggttagctctacctacgtgccttgcccaccaccaccaaagagccacaagcctacccacaaaagcccaccctcggcacctgaacagccaggcacttgccccaaagatgcactgaaactaggcgtttgtgctgatttgttgggctcagtgcgcgttgttgttggaccgtcgaggaccaaatgctgctctctcatttcgggtttggctgatctcgatgc

SEQ ID NO: 32919 - DNA, 327 bp, Gossypium hirsutum
  Clone ID: LIB3149-015-Q1-K1-F2
caaccagtcaaatccatcactgttaaatgatcttccagcccagggtgtaactgaaatggtgaagcaccacgggaattggttgatgtcgcttcggtttttaacatcaagtctctgacctcctgaatggcaagtggtgggattctctgattatgacgcatgtttctttttttaatttggttcttctgtctgcatatttttatctccctcatttcccccattctctccctctatcccccatctgccttcctcttccatgatggaggtgcaagtttatgtattatgacataagggatttcgtttataaaaacatttctttggatttactaa

SEQ ID NO: 32920 - DNA, 401 bp, Gossypium hirsutum
  Clone ID: LIB3149-015-Q1-K1-F4
gaagaatcaaatctatcagatccccaagatggaagatttttggaagcgagcgaaatcattcgctgaagaagcagctaagagatcgcaaaccctaacttcgcccaacaaattggccgatcttgtcgctgaaaccgccaagaagtccaaggaacttgctgtcgaagccaccaagaaagccgatgagctcaaaactgccgctctcaaacaagccgaccaaatccaaatccaatccatctctaagtccatttccgattttatccctcctcaactctcctccctctccatttcctctcccgcctctacttcttccgatcctcctcctatccccgactcggagctccgcaagttcggactcaccgatgatttgagagattttgtcaaaagctttacttcaactactt

SEQ ID NO: 32921 - DNA, 420 bp, Gossypium hirsutum
  Clone ID: LIB3149-015-Q1-K1-F5
gtcagcacaagcgatctgactatggtcttcctgaagataaattcatttttgcatgtttgaaccaattgtataaaatggatcctgaaatctttaatacttggtgtaatattcttaagcgtgtaccaaatagtgcactttggctcctcagattcccagctgctggagaaacgagactgcgagcatatgctgctgcacaaggggtacagccagagcaaataattttcacagatgttgcaatgaaacatgaacatatcaggcgcagtgctttagctgatctctgtctcgacacccctttatgcaatgcacatactactggcacggatgtgttatgggctggtttacctatggtgactctaccccttgagaaaatggctacaaggggttgctggttcactttgtctcgctactggtttgggggag

SEQ ID NO: 32922 - DNA, 287 bp, Gossypium hirsutum
  unsure (1)..(287): unsure at all n locations; Clone ID: LIB3149-015-Q1-K1-F6
ggcttttattcatggttcttatttggtttcggttctatatgatgctgagagcaagtgagcatggcanagtctggcttgaggaactgattacccctctaataattattcttctattatgccttagaacaagtttgaattgtattcttctcattcctttcgttgtgggatgataatttgtatctcaacagttgaaatcaagttaggcgtaagaattaaaagcttcatattacggaatttagtttcaatttttaaagaaaaattaaaaatggaattgagcttgctttttt

SEQ ID NO: 32923 - DNA, 419 bp, Gossypium hirsutum
  Clone ID: LIB3149-015-Q1-K1-F7
tgagtggtctgccaagcagttggagggagagattgagagctctgctgcttccacttacgagctccagcggaaacttgtccaggccgccaccgcctgcgactcctctggtggtgtcacctcctctttctctgtcgttacccctaattctgccgttttccaggtggttattggaggtgctgtaggcggagccttcatcgggggtggaggagctgctgccgctccggctggaggcgctgccgctgccgctgaagctcctgcagctgaggagaaaaaggaagagaaagaggagagtgatgacgatatgggattctctctctttgattaagctcctttactgccttactgcctgtttagatcttagcaagttgttacattttcatttttcatttatgcgtgaattagactatcttgggtgacat

SEQ ID NO: 32924 - DNA, 420 bp, Gossypium hirsutum
  Clone ID: LIB3149-015-Q1-K1-F9
ggtgattttagctttgtgttagttcctttaagcaatccgccaagatgcagaacgaagagggtcaaaacatggatctttacatccccaggaagtgttccgccactaacaggctcatcacctctaaggatcatgcttccgtccaaatcaacgtgggacacttggatgagcttggcagatacactggcacattctccacttttgctctttgtggatttgtccgtgcccagggtgatgctgacagtgctcttgacaggctttggcagaagaagaaagctgaagtccgacagcagtagttggatacctttttaccctagtctatctccgagcttgggaaagaaaaatctcatggcagcgactattatgttctaggttttttcaggttaaactatgtcaaatttatatttttgttgaatggatgac

SEQ ID NO: 32925 - DNA, 373 bp, Gossypium hirsutum
  unsure (1)..(373): unsure at all n locations; Clone ID: LIB3149-015-Q1-K1-G10
cagttgtcgcagcttcttgcctcatcgctggttttggtctctttctaccagctgttgtgaggcccattctagattccttagaatcatcgaagcaagtccctcagcctgctttaagagatgtggttgctggtgtgactggtaaaaagcagggctgatgtgatttatgagttgggaagaagcagacactcaaatgtagctagtaatcagcaacaaaataaacttgactttaaagttgaactcttgcgccttcaacttcatctttagcatgaggaatttgagtgttaatttgttttgattttcagtggtggaggattactcaaaaatcatggatgattcatatcagactgganattgatatcatctacttaatttg

SEQ ID NO: 32926 - DNA, 385 bp, Gossypium hirsutum
  Clone ID: LIB3149-015-Q1-K1-G11
agagttcagaatggtaactaagctgcaaaggagaacagcttctcgcagaaagcttcagtgtcttccaactctctccaacaccaaatctgtaatgcaaatatacatttactctttattattttgagatcccttttatttctttatccagaaaaaaacttaaaacatttttcttttgttttggttttcaaaggttaaaaggagttccatagtcctaaatgttcttctccaatgtcacaagctcaaagtcaagctggaagaaatacacagagagtaccaaaatctgatgactatcagaaaccaatacttcactctattgaaacatatacaagtctcaaaggaagtgaaggtggagaaagttggagaagaatttgtagtcaaagtgagt

SEQ ID NO: 32927 - DNA, 414 bp, Gossypium hirsutum
  Clone ID: LIB3149-015-Q1-K1-G2
gtggaaacatgtctggtaatgtgcctttggttgtggaagacaacggagataatatcacaaagacaccggctcaggatgctggaacaagttctgaggttgctgcagaatctgtaaatcctgacacagtctctaccaaaccggaaagcatcgaagaaacgcttgaaggtgaaggttttactgatcatgccaagattgacagtacatgtgtcttgggtggagatactgctgaaaaccaaactgcaatggaggaatagctgttttaggcttttagctcttaagaaggtaaaagttttttcgaattatgagaaactaggtcaggaaattctctcattcaaccagtaatattggggggactgatggatccacatctgcctctgtattttaattttccatggcaattagcaattttggagc

SEQ ID NO: 32928 - DNA, 97 bp, Gossypium hirsutum
  unsure (1)..(97): unsure at all n locations; Clone ID: LIB3149-015-Q1-K1-G4
ggcaaaaaagtacatgctaaataaatgtttctatttcctttcctccgtttactgttattattattttatattaagtaataggacaattatttagtnt

SEQ ID NO: 32929 - DNA, 242 bp, Gossypium hirsutum
  Clone ID: LIB3149-015-Q1-K1-G5
tattctataaatcctttatttcttaacagcacctcccattaaaccggaatgtccttcacactcattcggacgcccatttcccactccaaatcaactcaatctataaattattttgagatcccttttatttctctatccataataatacttacaacattcttcaatgcttttggttctcaaaattaatctcctaatcctccctcccctaatatttttgcatctactacacacacaaattcaat

SEQ ID NO: 32930 - DNA, 409 bp, Gossypium hirsutum
  Clone ID: LIB3149-015-Q1-K1-G8
aaatgctccccaatataatgccgcgtctggtggggggctccctatgtggataccgcagccgagagcaattggggggccacagatgcatccaatgcgtgaggcaccacctgctatgcaaaaggcacctgtccaacaatgcatcactatgaatcgaccaccacacaagtctccaacagtgggcatgaacccaaataatatgcctgtgcccactgcagctgattctcaatatactgctgcatcacgtcctcgaccatgagtgtcacttcctgtatccaccaccttatatgcactatgatgcatgcacacttcacctttgcctgaaggaatctctacatcaccaccacctgataaagctccttcaccactttctgatgagccagacccacccagactgtaactctatgatgcc

SEQ ID NO: 32931 - DNA, 327 bp, Gossypium hirsutum
  Clone ID: LIB3149-015-Q1-K1-H10
gggcttttattcatggttcttatttggtttcggatctatatgatgctgaaagcaagtgagcattgcagagtctggcttgaggaactgattacccctctaataattattcttctattatgccttagaacaagtttgaattgtattcttctcattcctttcgttgtgggatgataatttgtatctcacagttgtaatcaagttaggcgtaagatttaaagcttcatattacggaattagtttcaattttaaagagaaataagattgagtgagctgcttttttgttaaactgtaatttctttatcgaatgtgatagatgtgcaagtcacg

SEQ ID NO: 32932 - DNA, 401 bp, Gossypium hirsutum
  Clone ID: LIB3149-015-Q1-K1-H12
gttttggttggtggattgcaggatagtttcttggcaagtttcttgctgggttggggtatgacaataggtgctggactggcatcttatccaattgatacggtacgtagaagaatgatgatgacttctggagaagcagtgaaatacaagagctcgatggcagcattttctcaaatcatcaagaatgaaggtgccaaatcgctgttcaagggtgctggtgcaaacattcttcgtgcagttgcaggggctggtgtgcttgctggctatgacaagctgcaagtccttttccttgggaagaaatatggatctggtggcggctaatgtggaaggtgattctgctgccttaaagaatgatctagcgtcccaagtttgaataattttggaaggacaaagtgcttatgatg

SEQ ID NO: 32933 - DNA, 98 bp, Gossypium hirsutum
  Clone ID: LIB3149-015-Q1-K1-H2
ctagtactagatcccgagcgtccacactatatgttccaagcttacctacccttccatgcgacgggatatctctactatagggtcgcctaaattcaatt

SEQ ID NO: 32934 - DNA, 326 bp, Gossypium hirsutum
  Clone ID: LIB3149-015-Q1-K1-H3
ctatcccgtcccttcccctcggaggctttttatacgactagaagttcccatcaaatttttaagttaatcacatcttctacatcccgcactgctcgttcataatccaagacctttttcaccataatttctcacaattcacattaacccttttcttccataactacccgaaccctacaacttcaagcataacacccccactctgccccttttgcctcatcaccatctttcgattgtcattatccaacataaaatatttctaccacgatttttgcgaagatggtatttcccctaaagttaaaaaaccgacgaagtcgaggaattttatc

SEQ ID NO: 32935 - DNA, 434 bp, Gossypium hirsutum
  unsure (1)..(434): unsure at all n locations; Clone ID: LIB3149-015-Q1-K1-H5
aaaaaaaaaaaaaaaaattttatttaaaaattttttattattaaaaaaaaaaaaaaaaaaaaaaggagtgtaaaaataaaaaattagtatggcaaaaaaaaaaaaaaaataaaaaaaaaaaataaaataaatatataataaaaaaaanngggccccccctttttaaaaacccaacttttcttcccctttctttcaaataatttttttttttttttttcccccaaaattaatttccttcccccccttttaccacctgttnaattgtaaaaaccctttcctttccccctctttttttttttttaaaaaatcccttttttcccatttttctattttaaaaaaaaccccccccattccccttttcaaaattttttccaccttaattttatatttgccccccccttttttccccctttttaaccccgcttttttttttt

SEQ ID NO: 32936 - DNA, 274 bp, Gossypium hirsutum
  Clone ID: LIB3149-015-Q1-K1-H6
ccggaacggaagtgcccggccaggcgtcccgtatctttgggatggaattttcaaaatgcaaaattagtctccactttactgtattgaggctgtgggtattttggttcatggcgttggggcctgcatgttggctctaattctatatcctctatgtattggctattttaatgttttaatgaattaaagtttatgctttgtcaatcaaaaaaaaaaaaaaaaaaaaaaaaaaaaaaaaaaaaaaaaaaatgctggtgcaaaaaaatataaaacaaaa

SEQ ID NO: 32937 - DNA, 409 bp, Gossypium hirsutum
  Clone ID: LIB3149-015-Q1-K1-H7
ggactcagtcacgtaggccgctagcattggcattacattctcgaatctccgatgttttcggcgttgatatacatccggcagcaaagatcgggaaagggatcttgttagatcatgccaccggtgtggtgatcggagaaaccgcggttgttggcaacaatgtgtcaattttgcatcacgttaccctcggtgggaccgggaaggcatgtggagatcggcatccgaagattggtgatggagttttaatcggagccggtgcaaccatattagggaatgtgaagattggggaaggagcaaagatcggggcagggtcagtagtgctgatcgatgtgccacctcggaccacagacagcaggtggaagagcctgcattaaggaaccaatgcatggtcgtggtccgaggggaaacaaga

SEQ ID NO: 32938 - DNA, 422 bp, Gossypium hirsutum
  Clone ID: LIB3149-015-Q1-K1-H8
agagcatcttgaaaggaacagcttacttacttctatcaccgtcaccttcccgctctgatggtgggttagacgacagtgttgctgaggttagtgatgctgaactatgctgcatatgcttcgagcagatctgcacgatcgaagtccaagactgtggtcaccagatgtgcgcacaatgcacattggccctttgctgccataacaagccgaaccctacaactgcaagcataacacccccggtctgccccttttgccgcagcaccatcgtccgattggcagtagccaagataaaagattgcgacgacgatgttggggaggatggtagttccccgaaggtgagaagacggaggaagtcgaggaatttcagcgaggggagcagcagtttcaagagcttatctgcagttggatcctttaacaagatgggg

SEQ ID NO: 32939 - DNA, 423 bp, Gossypium hirsutum
  Clone ID: LIB3149-015-Q1-K1-H9
gacataaggttttgctgttggataatgagatcacatttaatgaggctgtcattgaagaaggagaacaaggaattcaagagagttcagcagcaaattggtgaggtgaatgagatcttcaaagatctcgcagtgctagtacatgagcaaggaactatgattgatgacattgggactcatatcgagaattcacgggctgccactatacaggctaaatcccaacttgcgaaagctgcaaagactcagagatcaaattcttccctgacctgcttgcttatggtgatatttggaatcgtgattctgattgtggtcatactactagtagtctaatcggaaactaaagatcatctcagcaacgagacggtgatctcttcgcctatgtatttgattatgttgttctatgagaaatgatggccaacaggagtt

SEQ ID NO: 32940 - DNA, 208 bp, Gossypium hirsutum
  Clone ID: LIB3149-016-Q1-K1-A1
ggactatgaatttgcttcaaggtcaaagacaacagaggagttagctagcaaatacataggcatctacacattcaccggcggcaaggctgtctactaccggaatctattagttataccggggacttctttcatgggtgaagacagacttcacttcataaatggcatactacatcttgaggctgagttaaccatcaggcgataaccaact

SEQ ID NO: 32941 - DNA, 319 bp, Gossypium hirsutum
  Clone ID: LIB3149-016-Q1-K1-A10
ccttgaaaggacaactgaatgtccagattattattgcttgggatataatataaaatacttaaaactgcttagtcttgtaatgtaaaaaaaaaaaaaaaaaaaaaaaaaaaaaaaaaaaaaaaaaaaaaaaaaaaaaaaaaaaaaaaaaaaaaaaaaaaaaaaaaaaaaaaaaaaaaaaaaaaaaaaaaaaaaaaccccaaggggggcccttttaaaaaaacaaaatttaacccccggtgtttggaaaataaaaatttttttttaggggccccaaaaaaaaattaacgggcccggttttaaaaacctgtgaatgggaaaa

SEQ ID NO: 32942 - DNA, 59 bp, Gossypium hirsutum
  Clone ID: LIB3149-016-Q1-K1-A12
tgttgactgtgtatgatgcatgaatttcaaagatttaaaagttatgatgattcatgcat

SEQ ID NO: 32943 - DNA, 377 bp, Gossypium hirsutum
  Clone ID: LIB3149-016-Q1-K1-A2
atcgatgccatggttatgtatcccatacattgaatattggtgcctctgtcgtaattcgagtcttgcatgtatggtagattgcaactattatagatgtcatgattcaaggccaccttcatttggcctaacttgagtaaattggatatttgtagctgtttttaagctgctttttttactagatagagaattttggttggacataagctgctgcttcttttttgtttggttcaaacttaggtatcggagttaacgaacagctttctcaaagagatggggggtagaatcaggggcttacctcagttaatgcttgcaatcccaacatctgcaattctttttttttatctccagactgccgctttctttgcacctaataaaaa

SEQ ID NO: 32944 - DNA, 372 bp, Gossypium hirsutum
  Clone ID: LIB3149-016-Q1-K1-A4
caagtcttcaaatatactgttggatgaacaatggaatgctaagctttcagactttgggttggccagattagggccttcagatggattaagccacgtctcaactgcggttgtaggaaccatcggatatgcagcacctgaatacattcaaacaggacgccttacaatcaaaagtgatgtttggagctatggagttttcctctatgaactcataaccggtaggcgtccgttggatcggaaccgtcccaaaggtgaggaaaagctcttggaatgggtgcgaccacacatctccaatataaaaaagttcaggttgatcattgaccctaggcttgatggcaagtattcgctcaagtcggctcataaacttgcagcagt

SEQ ID NO: 32945 - DNA, 378 bp, Gossypium hirsutum
  unsure (1)..(378): unsure at all n locations; Clone ID: LIB3149-016-Q1-K1-A5
ggggggngggagaagggtggaaatatacttttttaanaactactgcattctaaccccncaaacttatcggtgacgggattattaccttcagagggaccaaaccacatctcaactgctgttgtatgaaccatcctatatgcagcacctgaatacattcaaacaggactccttacaatcaaaagtgatgtatgtatctatggagtattcctctatgatctcataaccgttacgcatccgttgtatctgaaccgtccctaaagttgataaaagctcttctaatggttgccaccacacatctccaatataataaaatttcaagttgatcatttaccctaattttgatgtcaaatatttcatttcaattcctctctataaact

SEQ ID NO: 32946 - DNA, 394 bp, Gossypium hirsutum
  Clone ID: LIB3149-016-Q1-K1-A7
ctctctctctctctcatcttttacatggcatctcaagccagcctcctccttcaaaaacagctcaaagatctttgtaagaatccggttgatgggttctcggctggattggtcgatgagaacaatatctttgaatggagtgtaacaattattggacctcctgatactctttatgaagggggatttttcaatgctatcatgagttttccaccaaattatccaaacagccctccaacagtcaaatttacatcagagatttggcatcctaatgtttatcctgatgggcgtgtttgcatatcaattcttcatcctccgggtgatgatccaaatggctatgagcttgcaagtgagcgctggatgccagtccatacagttgaaagtattggtttgagtatca

SEQ ID NO: 32947 - DNA, 237 bp, Gossypium hirsutum
  Clone ID: LIB3149-016-Q1-K1-A8
attggattcagctggtttcaacaatatgatttagggttcttcagcaaattctatcaaacaagcaaattgcacttttgtttcaagtgtttcaagtgtttacaagtcgattgtgccaaacaaatcaaaagacaataatagtgagagaacaacatgagagcttttaaattaatttgaactggtgggaaactcgccattaactgaacttttggaagatactcatcttttttcagcattcta

SEQ ID NO: 32948 - DNA, 359 bp, Gossypium hirsutum
  Clone ID: LIB3149-016-Q1-K1-A9
cagatctcctcatctccactttttttccttcttcaaatacccaatggccgtcactttctcaaatctccacaccgagtctggtcttaaagctcttaatgacttcctctctggaaaatcttacatctctgggaataagctgaccaaggatgacataaaagtttatgccgctgttctgaagaaccctggtgattctttccccaatgttagccagtggtataattctgtttcttctcaacttgccgccagcttccctggtaaagctgttggcgttgggtttggtggcaaagctgctccagctgagtctgctaaagctgaggctgctgatgatgaggaccgactggatctatttggtgatgaga

SEQ ID NO: 32949 - DNA, 385 bp, Gossypium hirsutum
  unsure (1)..(385): unsure at all n locations; Clone ID: LIB3149-016-Q1-K1-B1
gtgtaattctcggagggactgatgacttaactgaggaagagtcaagtggtgataacatgagctatggcaggtcgcacgatgaggatttgcttcctagtaaggagttaaggagaagacagatcaaagtctctgaccctatcaaccggttatcattagaaaactcagtgagagacaaccttcaaacttgtgctgcccttcatggagagtcgtttaattctgccattgctaaaatacatccagcagcttttgcacagttgaagcaggcgctaaagatgccataagccagcattgatgttctcttttatcaactgaggtctttcttttccggctgattattttccatttttccaaagattgagaaaacatctangtgatattggaaggt

SEQ ID NO: 32950 - DNA, 366 bp, Gossypium hirsutum
  Clone ID: LIB3149-016-Q1-K1-B10
gaaattcagaggagtaaggcaacggccttggggaaaatgggcggctgagatcagggacccgctaaggcgtgtacggttatggttgggtacctatgacaccgccgaagaagcagcaatggtgtacgacaacgcggctattcagctgcgtggtcccgacgcgctcactaactttaccactccccagcaaaaatcactgcaagacaaaaacagtcaaaagccgttatccagctcagagtacaactccgtggaagaatcccacaccaccaccaccaatatttgctccccaacctccgttcttcgttgtccttcgctttcgaccgacgaagtagattcgccgcaaagcgtcaaaagaatctcgagaaatcg

SEQ ID NO: 32951 - DNA, 380 bp, Gossypium hirsutum
  Clone ID: LIB3149-016-Q1-K1-B11
gtttgggtgtgggttcgttcctcttccttctgcttagtcagatactaataatggtgacaagtcggtgcttatgctgtgggaaggccatgagaccaagtggatcgagagcatgggcagttgtcctattcatcacttgttggttgttctttttcattgcggaggtatgtctgctggcagggtcagtgcggaatgcttatcacaccaagtacaagaatctcttaaatgatcccccatcgtgtgcgacattgagaaagggtgtctttggcgctggggctgcatttgctttcctaacagctgtagtctctgagctttactatgtgagttattcgaaggctaatgatgcaacagttaactacgggcaagacaccggagtgaggatg

SEQ ID NO: 32952 - DNA, 361 bp, Gossypium hirsutum
  Clone ID: LIB3149-016-Q1-K1-B12
caagaactacggattccaactttacatgagtgatcctagtggtaactacagtggatggaaagctgcagctatcggtgccaataatcaagcagctcagtcaatgttgaaacaagattacaaggacgatatcacaagggaagaagccgttcaacttgcgctgaaggtgctgagtaaaaccatggacagcaccagccttacttcggagaaacttgaactggctgaggtttttcttacaccttctgggaatgtgaagtaccaggtttgctcacctgattctctgagcaagttgttggtgaagtttggagtgacccaacctgccactgaggcttcttgagttagctttctttattttccattcatc

SEQ ID NO: 32953 - DNA, 356 bp, Gossypium hirsutum
  Clone ID: LIB3149-016-Q1-K1-B2
gcgttggctctgccattgcttacaacaagttgacaactgatgcagccctagatcccgatgggctagtcgccattgctgtttgccatggatttgctctctttgttgcagtggctatcggtgccaacatctcaggtggccatgtcaaccctgcagtcacttttgggttagctcttggtggccaaatcaccatactaactggcatcttttactggattgcccaacttcttggatccattgttgcttgcttcttgctcaaagctgtcactggtggcttgacagttcctatccacggtcttggagctggagttggagctattcaaggagtggtgatggagatcatcatcacatttgcattg

SEQ ID NO: 32954 - DNA, 115 bp, Gossypium hirsutum
  Clone ID: LIB3149-016-Q1-K1-B8
aaaaaaaaaaaaaaaaaaaaaaaaaaaaatttaaaaaaaaaaaaaaaaaaaaaaaaaaaaaggaaaaaaaaaaaaaaaaaaaaaaaaaaaaaaaaaaaaaaaaaaaaaaaaaaaa

SEQ ID NO: 32955 - DNA, 347 bp, Gossypium hirsutum
  Clone ID: LIB3149-016-Q1-K1-B9
agagaatcagagccgcagctgccgccgtcgccatggtgaagtttcttaaaccaaacaaggcagttatcgtcctccagggccgatacgctggccgcaaagccgtcattgtcagatctttcgacgatggcacacgtgaccgcgcctatggccattgtttggttgcagggataaagaagtatccaagcaaggttatccgcaaggactccgcgaagaaaaccgccaagaagtcacgcgtcaagtgcttcatcaagctcgtcaattaccagcacctgatgcccacgcgctacaccctcgatgtggacttgaaagacgtggttaccgtcgatgctctccagaccaaggacaag

SEQ ID NO: 32956 - DNA, 95 bp, Gossypium hirsutum
  Clone ID: LIB3149-016-Q1-K1-C1
taaaaaaaaaatttataaaaaaattttttttttaaaagaaaaaaaaaaatataaatataagggggagagggatttaaaaaaaagtaagggggggg

SEQ ID NO: 32957 - DNA, 389 bp, Gossypium hirsutum
  Clone ID: LIB3149-016-Q1-K1-C10
gtctgtctctcttgcagtcgcctttatcataagcaaaaacactaagctttagcttctacagcggagaaaatggtgaagggacgccaaggagagcgagtcaggctctatgtaagaggaaccatcttgggttacaagagatcaaagtcgaaccagtacccaaacacttcgttgatccagattgagggagttaacaccaaggaggaagtagcttggtatgctggcaagcgtatggcttatatctacaaggccaaagtgaagaagaatggctcacactatcgctgcatttggggaaaagttactagacctcatggtaacagtggggttgttcgtgctaagttcaagtctaaccttcccccgaaatcaatgggagatagaagtagagtcttcat

SEQ ID NO: 32958 - DNA, 247 bp, Gossypium hirsutum
  unsure (1)..(247): unsure at all n locations; Clone ID: LIB3149-016-Q1-K1-C11
aattaaaaatattttaataaatttttttttagaaaaaaaaaaaaantttaaaaaaaaagaaaantttttaaaaaaaaaaagaaagagaaaaaaaataaatatttaataatttaaattaaaaaaataaatataaataataaaaaaaaaaaaatatataaatataataaaaataaaaaaataaaaaaaaaaattaaaaaaaaaaaaaaaaaataaaaaaaaaataaaattaaataataaaaaaaataaa

SEQ ID NO: 32959 - DNA, 384 bp, Gossypium hirsutum
  unsure (1)..(384): unsure at all n locations; Clone ID: LIB3149-016-Q1-K1-C12
gtctgcctctgttgacaccagatgatctcaaggagatgggtatatttgcagtcggccatcgaaggaagttgtacaatgcaatacagcggttaagaggcaatgattcttcttgaagacttttcagataagcagagtttgaagtatcacaagtgatgctgctatgccaactgttgtaattcgaggacaaggaaacgttattgctgcaaagcttaggtatgaattttgtgtttaatgctagtgttgttgttatgagctttatatcaaaaacttaaaccacaaatcacaatcttcattccaaaatcttttaagtagttcagagatctcattttcttagttntgcaaataaaaactatgtttatatatatatangtgtgtgtgcgtgtg

SEQ ID NO: 32960 - DNA, 375 bp, Gossypium hirsutum
  unsure (1)..(375): unsure at all n locations; Clone ID: LIB3149-016-Q1-K1-C3
ccacgcccgtaccgaaagaaaaagtagattttgggttctattcctttgtgtcatctcagaaagatagttcccggtcattgttggtgtctgaaagtttgtcagggatgggtggactatccagaagagttcntggtgatagaagaaaagaaaagcattctgaacatgtgaattatgttcagctttcggcttaatatcgagcgatggggccatctggccttgtcaagactagtggaagtgctaaagttggtgatcatcctgattatactgagagtggaagagcagtatgtgtagaggtagcacaagcagtgatgtaagcaatgaaagttcgtatagcagcttaagtagccgaatcaacagacctaataagacaaacga

SEQ ID NO: 32961 - DNA, 393 bp, Gossypium hirsutum
  Clone ID: LIB3149-016-Q1-K1-C4
caagtcttcaaatatactgttggatgaacattgttatgctaagctttcagactttgggtgggcgggattatggccttcagatggattaagccacgtctcaactgcggttgtaggaaccatcggatatgcagcacctgaatacattcaaacaggacgccttacaatcaaaagtgatgtttggagctatggagttttcctctatgaactcataaccggtaggcgtccgttggatcggaaccgtcccaaaggtgaggaaaagctcttggaatgggtgcgaccacacatctccaatataaaaaaagtcaggttgatcattgaccctaagcttgatggcaagtattcgctcaagtcggctcataaacttgcagcagtggccaataaatgcttgtcacg

SEQ ID NO: 32962 - DNA, 393 bp, Gossypium hirsutum
  Clone ID: LIB3149-016-Q1-K1-C6
caagaagctgtttcaactggttttattaagctcttaaagcagcaagattctgtcgtaagcgcatgccgtgatcacgtgcacgccttgagcaaaggagtccccgcacgcgccgtcatgagtgagctcttcggtaagaccaccggctgctgccgcggccaaggtgggtcgatgcatatgttctctagggaacacaatctgctaggggggtttgcttttattggtgaaggaattcccgttgccacgggggcggcttttacctccaaatataagagggaggttctaaaagaagcggattgtgatcatgttaccttggcgtttttcggcgatggaacttgtaacaatgggcagttctttgagtgtttgaatatggcggccttgtggaagttgcccatt

SEQ ID NO: 32963 - DNA, 313 bp, Gossypium hirsutum
  Clone ID: LIB3149-016-Q1-K1-C7
cttgttactggatatgggctttacgaatttgtccttaacgactgctctggggttttgggtggcaacaatgggcttgctgagtcgggatggtttatcgggttttggctaatcgttaaaagcatgatcaaaaaactgagattatcatttatgataccttggactactctatatgaaaggggatttttcagtgctatcatgagttttccaccaaattatccaaacagccctccaacagtcaaatttacatcagagatttggcatcctaatgtttatcctggtgggcgtgtttgaatatcaaattcttcatcctccg

SEQ ID NO: 32964 - DNA, 362 bp, Gossypium hirsutum
  Clone ID: LIB3149-016-Q1-K1-C8
caactttcttgctttttggaaccttttttacacgaccaaaccaacatgttttggcatgaactcagatgctttgtggagagtccacttaccatggaaacttatgatgcagtagttgagtatagatagatggagtagcggcgcttagccgagttgcatattattttaactgtctacccactatatctctggcgttagagatcagttccttcagagcttgttatcctcgatagtctggtgatggctgcactatcagttgttaagccatcaggtaaaatggcacagcttagagattgaaggatttaatcaaattctgaagctaggatttaactgatgaaaagaaaaaagtgctcagtactatcaaa

SEQ ID NO: 32965 - DNA, 394 bp, Gossypium hirsutum
  Clone ID: LIB3149-016-Q1-K1-D10
aacaaaatcaccatcacaaacgacatgggccgactctccaaagaagaaattgaaaagatggttcaagaagcagagaaatacaaatccgaagatgaagaacataaaaagaaggtcgaggcaaagaatgcattggaaaactatgcatacaatatgaggaacacagttaaggacgaaaagattggtgccaaactcccagcaactgataaaaagaagatcgaagatgctattgaacaagccattcaatggctagacagcaaccaactcgccgaatccgatgaatttgaagacaagatgaaggagttggagagtatttgcaaccccatcattgctaagatgtaccagggtgccggcggtgacatgggtggtggcatggatgaggatgttccggctggtg

SEQ ID NO: 32966 - DNA, 141 bp, Gossypium hirsutum
  Clone ID: LIB3149-016-Q1-K1-D12
gtttttttttttaaagttgtgtcgttatttttttagggaggtaatatgtttgcaaattgggtgatttgattgtatagggtatagaaaaatgtaatgtatacgttatttcttttctttttcaatatatattttggatttttc

SEQ ID NO: 32967 - DNA, 316 bp, Gossypium hirsutum
  Clone ID: LIB3149-016-Q1-K1-D4
agagcatcaaatttaatagaagctgatcatcagtccattttttaaaaaaaaaaaaaaaagggagggaaaaaaaaaaaaaaaaaaaaaaaaaaaaaaaaaaaaaaaaaaaaaaaaaaaaaaaaaaaaaaaaaaaaaaaaaaaaaaaaaaaaaaaaaaaaaaaaaaaaaaaaaaaaaaaaaaaaaaaaaaaaaaagggggggccccttttaaagaaccaaattttccttccccgtgtttgaaaaatataactttttttttggggcccccaaatttaattaactggcccgggttttaaaaccgtggggaggggaaaaac

SEQ ID NO: 32968 - DNA, 402 bp, Gossypium hirsutum
  Clone ID: LIB3149-016-Q1-K1-D5
cccaattgctccagccaggcttttcaaggcttttgttcttgaagctgccaaggtttggcccacggctgcccctcatgcagtcaagagtgttgagctcgaaggtgatgctagtcctggaagtattgtaaagatcacctttgttgaaggccttccataccaatatatgaagcaccagattgggggacacgacgaaaacaatttttcatacagttacagtatgattgaaggtgggcctttaggggacaagcttgagaaaatcagctatgagaaccagtttgtggcagctgcagatggaggaagcatttgcaagagctcaataaaatattacaccattggcgactatgtaatcaccgaagatgaaatcaagactctcattaaagggagtgaggtagtttacaaggc

SEQ ID NO: 32969 - DNA, 402 bp, Gossypium hirsutum
  unsure (1)..(402): unsure at all n locations; Clone ID: LIB3149-016-Q1-K1-D6
gttaagatggttctgccaggggacaatgttactgcaacttttgagctcatctcacctgtgcctcttgaagcaggacaaagatttgccttgagggaaggaggtagaaccgtaggtgctggtgtagtatcaaaagtactgacctaagaagttgccattcccatagcaatgcctggttttctccatcttgttgatcgcagaaatggagaaattgatagaacaatcagttggtgatattttctgttctagaattactaaagagattgttagtgatatgaaaaatgagggctgttattgaaattattttgattcaatttcgctggtggttggtaagcagacagcatgtttttccctgtttccacccaaaaaatcacgattgaacagctntttaatgtcattgaaaat

SEQ ID NO: 32970 - DNA, 394 bp, Gossypium hirsutum
  Clone ID: LIB3149-016-Q1-K1-D7
aaaaaataagaaagacaaaggaccttccgtttgactcttccaacctccacgatccatttctagttcttcacgctgcgattttgttctagcctgagattatccgggtccatgcatccatccgatttagagattttagaacaaatccacagtgacgtatttctatcaggtatgaatctgagtttttccaaaatgttgtgaatggacgtgatattgtgtcgtgggcagctgttgatcacagtcgacccaatggtcaaagtgatgagcttattggatttgttactgcaagaatcgtaacggcaaaggatagtgagatagcagatttgctcaggtatgatccatcgaaggggcatcaaacattagtatatattctgacgctgggagtggtagatgctta

SEQ ID NO: 32971 - DNA, 333 bp, Gossypium hirsutum
  Clone ID: LIB3149-016-Q1-K1-D9
cccacgcgtccgggtcccactggtttgtcttatgactcgaggaagaccatgttcaagatgatgtcttttacttccatgacggctatattcattgttatttgtgtgacatcacctcctttcaccacgcgcatcatctgcttgtctttatgtctagcagagcacatttcataacacaaccattggtttaaatatgcgtaggtacatcaatgtcatgtccacatatcagtgggctagcagcgttgatcaaggctgctcatccagaatggagcccaagtgcaatcaaatcggctctaatgaccactgcctacacccaagacaacaccaactcgactc

SEQ ID NO: 32972 - DNA, 400 bp, Gossypium hirsutum
  unsure (1)..(400): unsure at all n locations; Clone ID: LIB3149-016-Q1-K1-E1
gcaagttcctttcccccatctactctctgtctatgttggcatattgctagacaatgaaggggaaatttctaaaggcatgcattaccaaatggaggaagatggggaatagagtcataccttgtggcagttgcgaatactgttatgagtgggcaaagtggcctaataccaagaatgaagagagttcaatcccgagagatgtgccaaagggtcacttggtagtatatgttggtgaaaactataagaggtttgtaaattaaacttaccttgctcaagcacccactgttcaaggcattgctagatcaagctcaggatgaatatgattntaccacagaccccaaactctgcattccttgtgatgaaagccttttcctcgaagttgttcgatgcgctagctctcctc

SEQ ID NO: 32973 - DNA, 376 bp, Gossypium hirsutum
  Clone ID: LIB3149-016-Q1-K1-E10
cacaaatctcttggctgctgttattatagctttaacatttggccaaattggggacagcacggttgaaaggcccaatttcttcacgcaactttcccaggataattggtcttcggttttattcgcaatggctggtggggtggttctcagcttgggaaacctttctacacaatatgcttgggcttttgttggtttatcagttgtagaagtcatttcatcaagcatgactgttgttataggtacaaccttgaattacttcttggatggaaaaataaacaaagctgagatcctttttcctggtgttggttgcttcctagttgctgtttgtcttgcatcagctgttcactcatccaatgcagctgattataaaacaaagctt

SEQ ID NO: 32974 - DNA, 286 bp, Gossypium hirsutum
  Clone ID: LIB3149-016-Q1-K1-E11
cctgatcttaccaaagaagaacggattaagattagacggtttctggaatccttaactgaagaatagaatagaaaaagcaaacatgtaaattttgtttgaaataagcttgtatcctactgttatcttgtacaattactacaataaattgatggctttaataattgcccacaaaataccaccttcaaaaaaaaaaaaaaaaaaaaaaaaaaaaaaaaaaaaaaaaaaaaaaaaaaaaaaaaaaaaaaaaaaataaaaaaaaaaatataaaaaaaaaaaaaaataatgg

SEQ ID NO: 32975 - DNA, 399 bp, Gossypium hirsutum
  Clone ID: LIB3149-016-Q1-K1-E12
gcaccagggaaatagaaaagctgcgtctgaaacaagaagaagaggacaggcttaatagactgttaattgagaataagataaaggattttgaagctgggtggataaggaaattcgatgcacacaaggatgcagtttctcttctgagtgacaaattgactaacgcagagaatgaagttaaacttctcaaagagctttgcaacctaaaggtttcagcaggtactccagaatgtgttccaaatgaatctggaatgtctagttagtaaggtatgtctagtaagtttttatgtagtgcagaactactcttatttatatgtcaaacaatatgcatcatgcgcggcatctacgaatggaagcttttgttctagttggctcactatatggcagatttgatatgcaaag

SEQ ID NO: 32976 - DNA, 399 bp, Gossypium hirsutum
  Clone ID: LIB3149-016-Q1-K1-E2
gcaagctagtcatccagttccatgttattttcccagaatctggggtattttcacctgagcaatgccggaagattgagagtgtattgcccatgaggcctagtaagcatttgacagacatggagcttgatgactgtgaggagactactttgcatgatgtcagtgctgaggaggtaaagaggcggaaggaacaacgacagcataggcaccgtgaaggttacgatgaagatgacgatgacgatgagtcagcaccaagagtgcaatgtgcccagcagtaagaaatgtttgcgttcaatgttttgcccctcttattttatagcagcagccaccttagatcactacatatccggaacttgtatgcggttttgtctgcaaccagcacattaaattgggtgtttgtct

SEQ ID NO: 32977 - DNA, 356 bp, Gossypium hirsutum
  Clone ID: LIB3149-016-Q1-K1-E4
aatgtagtctggtgtatatagagcttgtaatagtacggttcggccgttgtttgtcggaataagagttcggtgttggtttctcttttgcttatatggatcttaaaactgtaattttatgttttggtgggtgtgtggagccagggttataatagtggatgatgaatgtgacggtgtttgctaaaggtagaacagataagagcggtggtggtggatgcaatgggggttatggacaaatggtgggggcttatcgatgattaatgtcgtggaatttggtattgtcaaaatctgtctttgtgggatcaatttggttgtatgattgggatatgaaaatggaaatgtccgttactgcttaaaat

SEQ ID NO: 32978 - DNA, 392 bp, Gossypium hirsutum
  Clone ID: LIB3149-016-Q1-K1-E5
gctctctgaatacattgggaagaaatatttgattctcttcttttacccgttggacttcacatttgtttgccccacagagattactgctttcagtgaccgctatgaagaatttgagaagctaaacaccgaaatattaggtgtttctattgacagtgtgttctctcaccttgcctgggttcaaacagatagaaagtcaggtggtcttggtgatttgaagtatcctctcatatctgatgtcacaaagacaattgccaaagcctatggagtgttgattcctgatcagggaattgcattgagagggcttttcattatagataaagagggaattatccagcactccaccatcaacaatcttgctattggacggagtgttgatgaaacaatgaggactc

SEQ ID NO: 32979 - DNA, 399 bp, Gossypium hirsutum
  Clone ID: LIB3149-016-Q1-K1-E6
gcagatttgatttacagagaccaaagggggggaaatggcgatcacactgaacaatggatttaagatgccagtggttggtttaggtgtttggcgtatggatggaaaagacgttagagacctcatcatcaactccatcaagcttggttatcgtcattttgattgtgctgctgactacaagaatgaagcagaagttggtgaggcattgtctgaagcattcaaaactgggcttgttaagagagaggacctctttattacaaccaagctttggaattctgatcacgggcatgttcttgaggcctgtaaagacagtcttaagaagcttcaattggattatctggatttgtatctagttcactttcccgttgctgtaaagcacactggagtcggtcaaacggacag

SEQ ID NO: 32980 - DNA, 261 bp, Gossypium hirsutum
  Clone ID: LIB3149-016-Q1-K1-E7
gccaattttatttacataataccaaatttattgaactcgccaccacacttaccaatgggaggaatattccaatcgttgggttacctcttctacttttccattctaaataccacttataccttatcatcaacttcattaatcttccttatctaaatttttatctctctttttaatacaataacaaatcaaaaattcattacttatcctcttaatcattcaaatctatactcactaatacatacaacctctattttacaacca

SEQ ID NO: 32981 - DNA, 388 bp, Gossypium hirsutum
  Clone ID: LIB3149-016-Q1-K1-E8
cccacgcgtccgaagaatatgagaagattctcgaggagaagaggaaagctttggatgccctcaagactgaaggaaggaaagttgatgtcaaagagttcgagtccatgcaacaactttcgaacaagaagagcaatgatgacatctttatcaaactgggatctgaaaaggacaagcgcaaggatgctgataaagaagaaaaagccaaaaagtctgtgagcatcaatgagttcctgaagccagctgaaggggagaagtactatggacctgggcgtggacgaggccgtggccgtggtcccagaggtggatatggaggcaacacagccagcaatgtgcaagctccctcaattgcagatcctggacacttcccctcattgggtggcaagtgatg

SEQ ID NO: 32982 - DNA, 398 bp, Gossypium hirsutum
  Clone ID: LIB3149-016-Q1-K1-E9
cgccagcctcggcctaaggatcttgtgaagtatgcggagagctgcatgtacaaccctgcctatcgaagctaccggtaaagttgtattgaagcttgtcttttggaaacaaaccccccgccctaaaccattccttctcatttcttgtctagcaattgactttggtcgtatttaatcttggaacatcagcccaagcaaggccattggtcatttttaatgtagttagtagcacaccatttttgacacttcaaaagaaccttatatttcaggttaaaacctttttaagtccataactacatgtttcctttttttcaagctacatttatctttcccaccaagggtgttggtgccttttacaagggtctatcagcaggactgctcatgcaagctacatacactac

SEQ ID NO: 32983 - DNA, 391 bp, Gossypium hirsutum
  Clone ID: LIB3149-016-Q1-K1-F10
gtcttctcattcttcactgaagccagagcggagccgctttatatagatgatttggaaaatcttttagaggaaggtttgcttagtcttaatacgttggttgaagatggcagcattgaggaggtggctgagaaattaatgattatgcatgaagagtgtttggaaggtaactatcaatctgttgaaaaactgaggacaacgaatcctcctccagtcgctcatgtccgaccgagtaacgacgaagatgaggatgaggatgatgatgaagatgatagcatgagtgcagacatcgcggcaaacatgatggtggatgtaccaaactctcagtcaagtttgaatccagtcagtatgctgacagatgagccaaagcaaaaccagtcagctgaagctgaag

SEQ ID NO: 32984 - DNA, 397 bp, Gossypium hirsutum
  Clone ID: LIB3149-016-Q1-K1-F11
cagataagtattttctcctttctcaagcgcattctttgctaatctgtgagcatccatgttctccgatctatgggtatactgaaaaatgagttcttgaaaatcggctttcttgttctgaatatctctaataatggctccgatgactgatttatctgtggaattctcctggcattttttattactgtttttgaatcccccataagaattaccgactggatccttagtaaaacccctagctttgcaccgtctaaacatgcatatgcctctgccgcaaaagaagaaggaacgtttctatggataaccgtctttaaaaccttaacatttcccctcagatcccgtcctacaaggccagacgctgaactgaaagtttgctgtcgtacgctgcatcaaagtggat

SEQ ID NO: 32985 - DNA, 312 bp, Gossypium hirsutum
  Clone ID: LIB3149-016-Q1-K1-F12
gattgtgcatggtttaacggtgcggctttttggcgtttgatgtttgacaatttgaagtaatgcttcttgctaattgtaattttttttattgtttctatgatatagtgaggcatctttttgttggtaacctattaaaaaaaaaaaaaaaaaaaaaaaaaaaaaaaaaaaaaaaaaaaaaaaaaaaaaaaaaaaaaaaaaaaaaaaaaaaaaaaaaaaaaaaaaaaaaaaaaaaaaaaaaaaaaaaaaagggggcggcccttttaaaggacccaattttacttccccgggcttgcaaggtattagttttttttt

SEQ ID NO: 32986 - DNA, 336 bp, Gossypium hirsutum
  Clone ID: LIB3149-016-Q1-K1-F2
gaaaaaacaggtggagtttgcagggaagaagatgataagaacccaaagattgtggcactggctttgggttacattgagcagaaacacaaagggtatgttcaaggattgaatcagattctaagagatggatgggattgaagaaagcagtagctgtcaaatttttttggaacaatttgggttcacatggtttggggccaaccagtccattatttcatgttggaacgatatggacgaggcatgttaaaaatgggtgttatgtcttgttatatgatattgatatctccacctattaccaactgattctatagatagaatgcagatcatttcccttttttg

SEQ ID NO: 32987 - DNA, 245 bp, Gossypium hirsutum
  Clone ID: LIB3149-016-Q1-K1-F3
ctaacccctaagctatgagcccaattagacatataggaaattaaggaaaataaaacaactttcatttcacacggttacttttgagctctgtttcgacgatcaaatatccaaaatttctctgtttgtcttcggatccctctttctacatctcaacatctccaataaccagtttgggaaaagagaaaaaaaaagagagatctttaatctatctcatgagatttcattgaagaaataaaagtacccag

SEQ ID NO: 32988 - DNA, 403 bp, Gossypium hirsutum
  Clone ID: LIB3149-016-Q1-K1-F4
ctttggttgccttgccggctgctgttcaggcacagtcctctgctcccgcccctgccccaacgagcgacgggacgtctattgaccaagggattgcatacgtgctgatgctggtggcactggtgctcacatacctcattcacgccgctgatctctgcttcaccttttgagcctgcaaatttcaaagattgaaatggggttgtgacattttatttgttatttatagggagagaaggatggatgatgtgtaaccaattcatggctcgtcgtctgatacatacatacgagagtacaaaagggttataattagagaatgagctggacttcagacgaatcattgttgtggattttgagaatgaaaatgtttatgttttgtggtctttctccctttttttagtagggaatc

SEQ ID NO: 32989 - DNA, 401 bp, Gossypium hirsutum
  Clone ID: LIB3149-016-Q1-K1-F6
gggaaagtagcggagaaagacttgattaattcgattgagctgctgatgagtcagttgcttaaattagatgcgattacagccgatggagatgtaaaattgcaaagaaaaatgcaggtgagaagagttcaaaaatatgttgaaacattggatatgttgaagattaaaaacgctatgccaagcaacaatggaggtcaaatggaaatccaaaatcaacacaagcatacaaatgggcaaaaactagccccaacccaagagcaaaagcctaggcattttaactggcaaagactagcaccagttcaagagcagcaatcgagcaactcaattgcccatttgccaatccatcaacaccaccaatcagcatcggggcccgtcgtagtcaccacgaactgggagacatttga

SEQ ID NO: 32990 - DNA, 317 bp, Gossypium hirsutum
  Clone ID: LIB3149-016-Q1-K1-F7
aacaggtatagtgagtattgaggctggatcatcatttgcgtgggggaagatggttggatcgcgaacggaatgcaatcataattgatcggtttgtggcatgtgcaccatcggggagaatatacatggaatttggcttaactgcacaggctactattgctgctgccatagaactttgctaagcttggatgaaagtttctgttgtaacttaacgttttcgattgtagatgtcgatgaacatctgttccaattgtgacacactcttctgcatagtttacttttataagaaacagacttaaattctctttagttgcttatga

SEQ ID NO: 32991 - DNA, 403 bp, Gossypium hirsutum
  Clone ID: LIB3149-016-Q1-K1-F8
cgattccgttgtccagaagtcctcttccagccatccatgatcgggatggaagctgctggcattcatgaaacgacatacaactcaatcatgaagtgtgatgtggatattaggaaggatctctacggaaacattgtcctcagtggtggcaccacttactccagctcaggcagcacagagagcaaaggaatcagccaaggatattctgggtgtcaagaacttgattgacaaaaaagcctggccttatgtcatgaatgatctccgtctcaaggccgagtatctccgctatgacctcaacaccgtcattgctgccaagcccaaagatgagaagaaaactctcaaggacctcaccaaaaagctcttcagtaccatcgatgatcttgaccatgcagccaagatcaagagc

SEQ ID NO: 32992 - DNA, 223 bp, Gossypium hirsutum
  Clone ID: LIB3149-016-Q1-K1-F9
gccgaagaggaatgattgttatctcaagtcatagttatgggtgccatgttatttttctgtcatagtaatttctttggtaccatggttttttgttgttttacctctttatttggattacagctgctgagtagaaggatgtttatctttatttgttgttttagaaaattttgacttgctgtttgatctttagtactaaatgaaatgggtgaagtttacaattctt

SEQ ID NO: 32993 - DNA, 381 bp, Gossypium hirsutum
  Clone ID: LIB3149-016-Q1-K1-G1
catacttgctatgacaagattcaaggatgcgatttacatgaaggtgaatgggggaaagtcggtgccattgtccattggagttatgtgcatgatggaaaagctaaaaaggcaaaggaagtagtggaagcagtagaccctgataagaatttggtcactttcagagtgatcgaaggagatctaatggaagagtataagagctttgtaatcacgattcaagtttcgcccaagagcgagggtagtggcagcttagtgcactggactttggaatacgagaagctgcacgatgggattgcgcatcccgagactctgctgcaattcgttcaagatgtctctaaagacattgacgcccacctcacccaagcaagctaaacagtatcacat

SEQ ID NO: 32994 - DNA, 211 bp, Gossypium hirsutum
  Clone ID: LIB3149-016-Q1-K1-G10
atcgtctgtaccagaactaatgactaacaatcaggtgttactcacacatctggctgaactgaagcgcttcaatgctgcacctacatgatgagcatacatggcgtgaactacactcatgaggtggatagtagagatgtattttacatacgtatgcggctttcttgggtgataccatggtttatgaaacaataaatgcatgccatgaatgaat

SEQ ID NO: 32995 - DNA, 356 bp, Gossypium hirsutum
  unsure (1)..(356): unsure at all n locations; Clone ID: LIB3149-016-Q1-K1-G11
gttttaatcataatttacttcccggttcaacaaatttatctccccatgctctgacactggtgagtggattcgttgctgtaatttcagtcaatatagttattgcattctacatctatatggcaatgaaggaacctgtggataagcatgagccggatccaaagtttctcgctgacgccaaagctagtgtaagccagccaacgggcgaagctccaacctcttccgagtccataaagaaacgagaatagaatagccaaagcctgagtaactacaatggagagaatggaacaatgagggtctgtgctccatactcatgtcttatgattatgaaatngagttctttctaatgttttntgtgt

SEQ ID NO: 32996 - DNA, 387 bp, Gossypium hirsutum
  Clone ID: LIB3149-016-Q1-K1-G12
gttccttgggctcctggtggttccaagtttactcgaaaccctgtcccaccttctgggatcgagatcgtgtatgattatggtcgagaagaaaatgactaagacatccatcttttcaacttccccagaaataaagttgatgcaggtctaaaggatcgttgagtgtgtaacgagtggtctaggacagcaactaatttgcattacctcaattgaaacgagataaggcttttaataacatttatggtgattctccattgtgcttattgttgtgtgcctggtgttttgtataataaaagatcattggtctgattgaaggtacaaaatgcttgcttacatggcatggaactacaacgatcttgaatctttcttgtcataaactatatttctctt

SEQ ID NO: 32997 - DNA, 408 bp, Gossypium hirsutum
  Clone ID: LIB3149-016-Q1-K1-G2
ggagaggagtattgccttagacattgacactagtctataaataatgtctagcctaaacatcaacgcaaaccactcccacattaaacaaaccactcccacattaaatattgttgctgaaacaatggcgttttcagctctgacaggtaagcttgaggcagatgtagagattaaggcttctcctgagcagttccatgaaatgtttgcccacaaaccgcaccacgtgcaccatacttgctatgacaagattcaaggatgcgatttacatgaaggtgaatgggggaaagtcggtaccattgtccattggagttatgtgcatgatggaaaagctaaaaaggcaaaggaagtagtggaagcagtagaccctgataagaatttggtcactttcagagtgatcgaaggagatctaat

SEQ ID NO: 32998 - DNA, 317 bp, Gossypium hirsutum
  Clone ID: LIB3149-016-Q1-K1-G4
ctgtacaccaacaaatgattgacgaccaagtgaaaaagacatatctggctgaaccgaagcgatagaatacgaccctaatcgaaatgcatacattggtctcatacactatggggatggagagaagagatgtattttacatacgagaggggctatatttggagataccatggtttatggtacagaagatgctatccaaatgggaaatgccctacctttgaccgatatgcccttatgcacggccatacataacatagaaatcacactggaaaggggtggacaatgagctacagcacaggtgctgatgcgaaactgattgc

SEQ ID NO: 32999 - DNA, 404 bp, Gossypium hirsutum
  unsure (1)..(404): unsure at all n locations; Clone ID: LIB3149-016-Q1-K1-G5
gaatanncgggcggaccgcacgcgtccgatcgtctataccgtaaaattgattntcatactaatgtaaaaagacatatatggtagaatcatgacggttttttacgaccctggccggaaatacatacatttgtctcatacactatgttgatggtgagaatagatttttcctacataccagatgggctataattggagataccattgtttctggtacataatttcctattaaaatgatgaaattccctactctttaccaatattcccttatgctcttacatacatttcattttaattacactttttatttttggatcaattaactatattcatactatttcctgtttgcaataactgatttcataatgaaggtttaaatccgctcacatttttaaatttaccctttt

SEQ ID NO: 33000 - DNA, 398 bp, Gossypium hirsutum
  Clone ID: LIB3149-016-Q1-K1-G6
ggtttattgcattaaatagatcatgaaatctttcctttctttttttgcattcctctcacttctgctgtttgtagacaccattgcagcagctaggaaagatgctggagagtactggggagctgtaacgaaagatcagcctatgcctgaggcactccaagagcttgttcggattgaggctgccgttgtcagccccgatgagaaaaccaagtgccatacatcaggtaatattgagcttaaggaagagaagattattgttaatgaggagttcgaaccaaggccaaacgtttcagcttatggtgatgacgctaatctaaaaggagataaatcatcatcttttgctgaagattttgaaccgagacctaacgtttcggcttacgggggcgatgatgctggtctta

SEQ ID NO: 33001 - DNA, 360 bp, Gossypium hirsutum
  Clone ID: LIB3149-016-Q1-K1-G7
cttcaataatttcttccgttgatctttgttagagattagctttttaatttttcattatgggaaagatcaagatcggaatcaatggatttggaaggatcgggcgtttggttgcgagagttgctctccaaagcgatgatattgagctcgttgctgttaacgatcctttcatcaccactgaatacatgacgtacatgtttaagtacgacagtgttcacggtcaatggaagcatcatgagcttaaggtgaaagactcaaagacccttctctttggtgaaaagcctgtcacagttttcggtatcagaaaccctgaggaaatcccatgggctgaggctggagctgagtatgttgttgagtctactg

SEQ ID NO: 33002 - DNA, 327 bp, Gossypium hirsutum
  Clone ID: LIB3149-016-Q1-K1-G8
gagttgaattcaattaccattttcaaacttcaatttcaaatgttcttctttctcttcatcgctttttttctttttaataattgaacccttcattggatttgaactcttgttgacatacacagtaatattaggatcttttttctttgttctatatatttatggatttttattgtttttcaaaaaaaaaaaaaaaaaaaaaaaaaaaaaaaaaaaaaaaaaaaaaaaaaaaaaaaaaaaaaaaaaaaaaaaaaaaaaaaaaaaaataatattaaaaaaaaaaaaaaaaaaaaaaaataaaaataaaaataaaggggggcccttttaaaa

SEQ ID NO: 33003 - DNA, 252 bp, Gossypium hirsutum
  Clone ID: LIB3149-016-Q1-K1-H10
agacccacgcttacatacacactttcttcatcattaactttatttagtctctatcactttcacatttaggggaggttaatatgatgagcaggctgggtccccattttttcaacaacccactatattttatactacactttcacagacgatcactttctctctggaacaaacaaccaccattcagagaaccatatcacatttccaaattccaactctttcacttactatcttttttgtcatagccatattcac

SEQ ID NO: 33004 - DNA, 115 bp, Gossypium hirsutum
  Clone ID: LIB3149-016-Q1-K1-H12
gtctaaatgatccacactcacatgcgcgttcatgctacaccatagacattctattgtggcgcctagcttcagttgactggccgatgctttacatcatcaggtatggcaaaaccct

SEQ ID NO: 33005 - DNA, 401 bp, Gossypium hirsutum
  Clone ID: LIB3149-016-Q1-K1-H4
acccaaatatgactaaagaagaaatagaaaatgaacttaaggcatatcttggagttgagaaggggatctggttgcctcgtggattatatggtgatgatgatacgaatggtcatattgataatatgtgttgctttgcaaagcctggtgttgttgtgttgtcttggattgatgatgaaaaggaccctcaatatgaacgttccatggaagcattcactgttctctcaaatgaaaaagatgcccgtggtcggaaattagaaatagtcaaactccatgtccctgggccgctttatatgacagatgaagaagctgatggagttgttcaagatggtgacgctaaagcgagacttcctggtacacgacttgctgcttcttatgtaaacttctatattgccaatggagcg

SEQ ID NO: 33006 - DNA, 292 bp, Gossypium hirsutum
  Clone ID: LIB3149-016-Q1-K1-H5
attacagacaaagttccttcatgatgaacccttggaagctttgtgcagttacaagggtggaggaggttaagaagatgatcaggctactcccgatttgggcaacaacgattatattttggacgacatatgcacagatgatcactttctcggtggaacaagcaaccaccatggagagaaccatatgacatttccaaattccagctggttcacttactgtcttttttgtgggagccatattgatcagcttagctgtatatgatcgttttattattgcactttggaaaaaatggag

SEQ ID NO: 33007 - DNA, 374 bp, Gossypium hirsutum
  Clone ID: LIB3149-016-Q1-K1-H6
gtctaatggacaccattggccaagatctataaagccggagttgtgaggcaagagcttgctaagttgaaaaaggaaaatgcatcttgaagtgattcagaagattttgagtattttgctaattttgtcttctagtattctgcatattagttttccgtatgtttttatctaagaaaggattaaaaagaatcaattgggggcactttctttagtagatgcaacatttgatttcggaggttaagcctgtcacagtttttagttcaattagttgaaccggccaattgattaaatcgattaatcgatggatttgatccgataatttaaaccatgctacgaaataaaactatgagatgacagaaaccctgagctccccccta

SEQ ID NO: 33008 - DNA, 397 bp, Gossypium hirsutum
  Clone ID: LIB3149-016-Q1-K1-H7
gaaaaaggggtgatcaccttcgacagcctgaagaagaattcggcattgttgggtttacaggatttgagtgatgatgatttgaggtgtatggtgaaagaaggagatttcgatggcgatggtgcgcttaaccagatggagttttgtgttctgatgtttaggttaagcccagagttaatggaagcgtctgggtttttcttggaagaagcttttgcaacatgatttcaaggattttatttaatccccttcattttgctctttctttcttgtaatgaaattgtagaatttgagatcagaaatttgctttttgtcattgcttctctcattttttttattcattctggcaaatataattatagctgaaaattaaaatggaaactgtataataatttcatttcat

SEQ ID NO: 33009 - DNA, 286 bp, Gossypium hirsutum
  unsure (1)..(286): unsure at all n locations; Clone ID: LIB3149-016-Q1-K1-H8
ggccgaccacgcgaacggaaaaaanattatcaccttcnacatttcttataaaaatacaacattcatccatttacaagatttttttaaaaattattatgagccccaccaaccaaataattatatttctatactatttttcacttaaccatatttattttcctattctaatatataatttaaccccatattttaattcaatcaacaaaccaaatcttataaaaatctttttcttacactcatttacctattttatttaatcccccttatattaactctttcttccttt

SEQ ID NO: 33010 - DNA, 357 bp, Gossypium hirsutum
  Clone ID: LIB3149-016-Q1-K1-H9
cggacgcgtgggcccacgcgtccgtgaatttggtcagatcactagtgctgtggtaatgagggatgctgatgggaaatccaagggctttgggtttatcaacttcgagaacgcagatgacgctgctagagccgttgagttcctcaatggaaagaaatttgacgataaggagtggtttgtcgggaaagctcaaaaaaaatctgaaagggaggctgaactgaaacatcgatttgagcagacaatgaaagaggcagcagataaatttcaaggagcaaatttgtatgtcaagaatttggatgatagcataagtgacgaaaagcttaaagagctattctctcaatatggtaccataacatcatg

SEQ ID NO: 33011 - DNA, 428 bp, Gossypium hirsutum
  Clone ID: LIB3149-017-Q1-K1-A1
gaaaggaccaaaagggtttaatctgctgtgctcgttgtagctcaccacccaaactttaacaatggccgtcggtaagaacaagaggatttccaagggaaagaagggaggaaagaagaaagcagctgatccatttgcgaagaaggattggtatgatatcaaggctccatcagtttttacgagcagaaatgttgggaagactcttgttacccgtactcagggtaccaagattgcttcagaaggactcaaacacagagtgtttgaggtttcactggctgatcttcaaggaggtgatgaggatcatgctttcagaaagattcgtttgagagctgaagatgttcaaggaaaaaatgttttgaccaacttctggggaatgaattttacgactgacaagctgaggtctttggttcgtaaatggcaaactctgatcg

SEQ ID NO: 33012 - DNA, 425 bp, Gossypium hirsutum
  Clone ID: LIB3149-017-Q1-K1-A10
ttcaaggttgagtaccaaaagcttgggtatacaagcttatccctttcaaagcagattccagtcaggccatatagacacaatgaatatgaaagattcataccaactgcttatccctactacggagctgcattttctacgatggcaggattcttcatcttttcttttgttcatctatataacaagtaaagtgtggcatgtctagtatgctttgcctcggacggtgggattacaatttctagccaacaatggtagtcataaatgtatcgtagaaattttagactttgagttctagtatcaatgatgaaaatcaaaccctaacagatctccaaaaaaggattttgatgcaccatgattttgagtggatacagaaggtgcattcgcagttacatctactttattttaaccctggatgtatttgactttac

SEQ ID NO: 33013 - DNA, 427 bp, Gossypium hirsutum
  Clone ID: LIB3149-017-Q1-K1-A11
gagggatcctcctgaggagagggatccactgcggatattttatgaaacaatgtaccagcaaattccccatagtgaaatggcacaattctggatgatggagtctggtttgctccccttagcagaagcaaagaaagtcttcgaaaagaaacagaagaagattaagcagcaaaagctgagttccccaatgaaacctggttcagctgtaaagagtagtacaggatccgtcaccgttaagagaactcctatggtctccccaggttcttcgaataaaaagaaaacagattccaaggttgccccaaagcagactaagaaacgcaaggccgaagaaagcgaaagctctgatgatgattttgagaatactttggtcagtagaatgaagaaacagaaagcaaactaattttgatttccaccataactgattgtttct

SEQ ID NO: 33014 - DNA, 420 bp, Gossypium hirsutum
  Clone ID: LIB3149-017-Q1-K1-A12
cgttgacttgtgcttggaccgtatcaggaagcttgctgataactgtaccggccttcaaggtttccttgttttcaacgctgttggtggaggcactggatctggtcttggctccctccttttggagcgtttgtctgttgattatggcaagaaatccaagttgggtttcactgtcttcccatcaccccaggtctccacatctgttgttgagccctacaacagtgtcctctcaactcactcccttttggagcacactgatgtggctgttcttcttgacaatgaggctatctatgacatttgcaggcgctctcttgacattgagcgacccacttacaccaatcttaaccgtcttgtctcccaggtgatctcctctttgactgcttcacttacgttcgatggtgccttgaacgtggatgtaacaga

SEQ ID NO: 33015 - DNA, 396 bp, Gossypium hirsutum
  Clone ID: LIB3149-017-Q1-K1-A4
agtaatcaagctcctgggtcaggtagggcatagagagatgctgctgctcgtgccatgcggagctggcattctcaacgtgttctcgataacggtgaggtctgtcatccaatcatcaaggacaagacctctagtccgacgctcaaaagtgacagacaacttaaaaattttggtttattgaagcgtaaaaagccatccactttggactctggtgtccgagtttctcaacttaaagcaactaaatcacagcgttcttttggtaggttggataccgcggttgttgatgttggagccccagctgattgggtgaagattaacgtgcaaaaaaccgttgactgctatgaggtctatgctttggttcccgggcttcttcgtgaggaggtgcatgttcagtctgat

SEQ ID NO: 33016 - DNA, 423 bp, Gossypium hirsutum
  unsure (1)..(423): unsure at all n locations; Clone ID: LIB3149-017-Q1-K1-A5
ttttgtgattgttgtgatggaagtgatgagtatgatggtagcatcctgtgtcccaacacatgtatcatgggtggtaatgtcgagtacaaaactgaagattatgtttctacaactagtcatctgcactctactaaattgaaggaaatgaaaattggaattaaattagaagacttgattcagactcttgcagggttgaagatgataacagtagcagaggtggctcttggttgtgttctggtggttaaatggatatttcataagcgtgtcaagtctaagaaaagacatcatagatgaaggaatctaccgttagcttggtaataatactctagaatatccttgtcctctaattntcactttntacattttaatatgtaggggaaggatccacttatttcataataaaactcaagtgattttataccc

SEQ ID NO: 33017 - DNA, 372 bp, Gossypium hirsutum
  Clone ID: LIB3149-017-Q1-K1-A6
ggatggtacagagtcatctagctttgcttccttgtgtggaactggtacatctcccggcggcgatgactatcgagaccagccagctctttcgttctagccattctcgggatgtcgatggatatgatgcatgtttaaggactcctgcttgtatacgcaaatagccgtgtctgtatagtggtcactctaacttcaatagctacatgtgcagtagttctacaccggcttgactggacatgcctatgggttcatcaactgattcagctatcagcacataagcctttggtgagataggatattaccgattaggcattgattgattgatgcttcgaacatttgctcatgcataatagacaatggctcgcccaatggagc

SEQ ID NO: 33018 - DNA, 422 bp, Gossypium hirsutum
  unsure (1)..(422): unsure at all n locations; Clone ID: LIB3149-017-Q1-K1-A7
gaanntccgggtcgacgccacccatccacgctttcgagggtaccagataacatgcgaatgtgtgcaccatactctcatcatataccatggatatccgcgatggggtcaatatcaaagtgaaagctaaaatgatcgagggtgaacgtcccaggggtaagctcactcgtaacttcaagcacctcaacctctatttccacctcaccaaggacgaggagaccggcacgcgtaagctcacgatcgaggcctggttcggtaccaggaagaccagcgctgccatccgtaccgtcctcagccacatggagaatctcatcaccggcgtcaccaaaggttaccggtacaagatgacgttcgtctacactcactttacgatcaacgcctatatcactagcggcaacaagttcatcgagatccagaacttcctt

SEQ ID NO: 33019 - DNA, 284 bp, Gossypium hirsutum
  Clone ID: LIB3149-017-Q1-K1-A8
caactcgtggcgaccgacttgtctcggttccaagttcagcctcattggcaaggtcttagccctcgagcacagccgagacagaagcaggattcacttcctccggatcttaatatcgggttccaatctccagggtcaccggtgaaacaatcggcaggtgttttggttgattcccagcagccagatctggctttgcagctttgagttgctgtgacggatttatctattttttctttcttgtagctatgtatttattacaagtttaagaaagttttaattttgttttc

SEQ ID NO: 33020 - DNA, 102 bp, Gossypium hirsutum
  Clone ID: LIB3149-017-Q1-K1-A9
gctctatgtcagaaatccgtggtagagaataaaaaaaagaaagaaaaaaaggaagagaaagaacaaaggagaaggagaaagaaaagtaggagacacgaacac

SEQ ID NO: 33021 - DNA, 318 bp, Gossypium hirsutum
  unsure (1)..(318): unsure at all n locations; Clone ID: LIB3149-017-Q1-K1-B1
ggatgtcgaatgttgaagaagctaccgttaaactccaatagtgcaaaaggaaaaaggctcgtcattgtaggaagggaggaatggtggaatgatctanaatgggaggatgaattcactcgaattgcttttctcccctctttcaaatctcgtgatctatgaaattttggatattaatcaaggcttaaagccctcattgtatcatagcatacctcactataagttgtattttgcctatccctaaattacatgcagcttggttctttgttttacacaatgacttgttcacttacataaaataatgtgtttgaatttgagcgt

SEQ ID NO: 33022 - DNA, 418 bp, Gossypium hirsutum
  Clone ID: LIB3149-017-Q1-K1-B10
gattcctcccaaaactcaacaatgaaatcaatggtatgagaaatttacttacaaggaacggcttgcaagtttacagaatctggtgcttataatgtttgaggacgatacagttttgataccaaaagaaacagcctggttcagttattttccagacggtgctttcgaacctgtattgcctgtacaagcggccaagctctataaggaagattggatcggtttgaaaactttggatgaagctggaaaagttaaattcgtaaatgtctcgggtaatcacctacaaatctcaacaagcgacatgaagaagtacatggtaccatatttggagtaccaaacacctgcaccaacagggcagacaccgacagaagcttcatcgtatcaatggttttcaaaagttgggcacttttttaaagatttaatt

SEQ ID NO: 33023 - DNA, 421 bp, Gossypium hirsutum
  Clone ID: LIB3149-017-Q1-K1-B11
gttataatggggagtagagggtgtggagctgagaaaagagggaatgatgggaggttggggagcgttactgattattgtgtgcatcactgtgtttgtcctgttattgttgttaggcatcctgatgagaaagatggcgggaatggtcagcctgtggtgatagataaggaggccagggtggaggaaaaaggtggcaaatgttaatcctattgatgcctagcaagtccggtaattgcagctttatcccatcagtagcagatagcaaagaagactatgagtcgctcaggattagctcggatgaaggattcagttaaaatggatcctgggattctctttttctactttcatctccgcattgtttaactttttattggtgatgttatcgtatgattgatgaggttcttgatttccttttatggcactc

SEQ ID NO: 33024 - DNA, 256 bp, Gossypium hirsutum
  Clone ID: LIB3149-017-Q1-K1-B12
gggccgacccaagcggacgattggaatcaaaactaattagtgtaaagtttttaaaacaaaaaacgatggaaggcgggcggtcgttttttatcatgagtcgcatcactataatgcgtcccgacatatgcagttaggcataccagaagagaaagatctgcgttaattgtcagcctgacgtgactgataaacctgccagggcggaacaaaaaggcagcatatgtaaagactattgactcctatcaaaaactttgaatgc

SEQ ID NO: 33025 - DNA, 398 bp, Gossypium hirsutum
  Clone ID: LIB3149-017-Q1-K1-B3
ctctgaaatagcagagaacaaggaagattacaacaagttttatgaggcattctcgaagaacctcaagcttggtatccatgaggattctcagaacaggactaaaattgccgaattgctccgctaccactccaccaagagtggtgatgagatgaccagcttgaaggactatgtcaccagaatgaaggagggtcagaatgatatctactacatcactggggagagtaaaaaggccgttgagaactctcccttccttgagaagctgaagaagaagggttatgaggtcctttacatggttgatgctattgatgagtatgctgtgggacagctcaaggaatttgagggcaaaaagcttgtgtcagctaccaaagaaggtcttaaacttgatgagagtgaggatg

SEQ ID NO: 33026 - DNA, 431 bp, Gossypium hirsutum
  unsure (1)..(431): unsure at all n locations; Clone ID: LIB3149-017-Q1-K1-B4
cacgcgggcgntctgaaatggcananaacaaggaagatttttactttttttatgaggcattctcnaanagcgtcaggcttgttatccatgaggattctcanaacaggactaaaattgccgaattgctccgctaccactccaccaagagtggtgatgagatgaccagcttgaaggactatgtcaccagaatgaaggagggtcagaatgatatctactacatcactggggagagtaaaaaggccgttgagaactctcccttccttgagaagctgaagaagaagggttatgaggtcctttacatggttgatgctattgatgagtatgctgtgggacagctcaaggaatttgagggcaaaaagcttgtgtcagctaccaaggaaagtcttaaacttgatgagagtgaggatgagaaaaaaaagcaggaagctttg

SEQ ID NO: 33027 - DNA, 425 bp, Gossypium hirsutum
  Clone ID: LIB3149-017-Q1-K1-B5
gaagcccctgcccttaattcgagtttctttaaggttattgaattaaaacgcgagatctgagcaatggcgacagattcatcaaatggggaacaaaagacaacctcaaagccaccacctttgccatctccattgcgcttttctaagttttatcagtccaacatgaggatcctggttactggaggagctggttttattggttctcacttagttgacaaattgatggaaaatgagaaaaatgaggtgattgttgctgataactacttcaccggatccaaggacaatcttagaaagtggattggccatcctagatttgagcttattcgtcacgatgttactcagccgttgttggttgaggttgatcagatttaccaccttgcctgtcctgcttctccaattttctacaaatacaatcctgtgaagacaat

SEQ ID NO: 33028 - DNA, 298 bp, Gossypium hirsutum
  Clone ID: LIB3149-017-Q1-K1-B7
ctgagttgtatttgatactaaatttataattggcaacaaatagaaatgaacatgctgtgggaatctaggccatgtatatataagtttagatagtaaatattgtagggatcacaggacgaagatgaacaaaagcgggactgagaaaacaaaaagagcaaacgcaactaaaacccctagcaacagagtcctaatatagccagcaggatacaaaagcaaaggggcccgcaccagataagggcttcccaactggtgcccaggaagagcggctaaagggactcgcaatggagcagcaaattaa

SEQ ID NO: 33029 - DNA, 330 bp, Gossypium hirsutum
  Clone ID: LIB3149-017-Q1-K1-B8
atcaagtacgatccttcaactggtatctacggcatggacttctacgttgttctggaacgagctggttatcgcgttggccgtcgtcgccgatgcaagtcacgtgttggtattcagcacagagttactaaggaagatgccatgaagtggttccaggtcaaatatgaaggtgtcatccttaacaagtcccaaaatattggagcttaagaaatagcagtaacgagctcagtttgagttgttttcagttttggctacttgattttgactagtttgtgtatcagtttctctctttttcctgaatagatttatgcttgagactttcctgttggtttt

SEQ ID NO: 33030 - DNA, 422 bp, Gossypium hirsutum
  Clone ID: LIB3149-017-Q1-K1-B9
tgcaacttcagatcaatctgcactaatcttgagcattcctaagcgcaagcccggtgatgaaactcaagaaactttacgaacatctcaattccccagcacacatgttaaggaaaaatgggcaaaaaatctctatcttgcttgtctatgctatgggaggactgtatcatgaaatggggtatcaatggtggtgacaattttcctagggaaaaaagggggaggttccctacatgttatctccatcagtttccttttgatgtgttccccatgttaaatgtttatagcggacattaggatgtcttaaaaatatctcccaagtccttgtactattaaaatgttgcaatttagtcctaattttggttatttctggattttaaaatacaactgttaacaatgtttgctagtgtctgttaaatatgtgctat

SEQ ID NO: 33031 - DNA, 359 bp, Gossypium hirsutum
  unsure (1)..(359): unsure at all n locations; Clone ID: LIB3149-017-Q1-K1-C1
gttggtggaaaacactcccgatgatccccgacaaaggaagccggacataaccaaagcaaaagaggtgctcggatgggagccaaaggtgaagttgcgtgacgggcttccgcttatggaggaggatttccgtcagaggctcggggtcccaaagaagaactgattgaaagttattttacagcaacagaagttacaaatataaagtactattgcttcttttcctttctataatcaaattccaatatgtttatcttcaatgcataataatggcagcaatggagttattttggattttgtttttaatgttttttgaacgatatttgagttaaatggaacacaatttttgcctttccttnnnnaaa

SEQ ID NO: 33032 - DNA, 219 bp, Gossypium hirsutum
  Clone ID: LIB3149-017-Q1-K1-C10
atccgcatgagttttctcagcagttgctttacctgccatggtttctagtttcttgcaaaggttatgtccatatcctcaaatcttttccataaagtattagcttccaatggagtatttgtttccggatttttttcgctgctggtttctcggcttccctactcttccatgtaaattatcttaagatttctagattcgatggtccaggagactgcagatttc

SEQ ID NO: 33033 - DNA, 353 bp, Gossypium hirsutum
  Clone ID: LIB3149-017-Q1-K1-C11
gttattacattattgaagagcatggatgctaacgatggatcagagcatgctccgggtactgaactgaaagcatcggatgaacatcttaagggacatggaccattcatggctggggaaaggagtacggctgtggagttatggttgggaccaaagctgtgccatatagggatcacactacgcacattttaagaagtcgactgatgctgaatgcttgactaatgcccacaattacatgaaggcgattgttcgtcggaaatctttcgcgaaaactacagctgacaaggaacatttgatcgcagaatgggcaccgaatgcgaatgcatgaactgtacttgaacagctttacgtctttg

SEQ ID NO: 33034 - DNA, 422 bp, Gossypium hirsutum
  Clone ID: LIB3149-017-Q1-K1-C12
gtattccatacctgaatacctacgatggacgcacaatacgctacccagaccctttgatcaaagccaacgacaccatcaagcttgacttagagagcaacaaaattgttgatttcattaagtttgatgttgggaatgttgtcatggtcactggtggaaggaacaggggacgtgttggagtgattaagaacagggagaagcacaagggtagcttcgagacaatccatgtacaagatgctgctggacacgagtttgcaactcgtctaggcaatgtcttcacaatcggtaaaggaacaaagccatgggtttcgcttcccaagggcaagggtatcaagttgtcgatcattgaggaagcgaggaagaggcttgctgctcaggctgctgcttaaacctatcatatctggagtttttttttttgtcgaaag

SEQ ID NO: 33035 - DNA, 397 bp, Gossypium hirsutum
  Clone ID: LIB3149-017-Q1-K1-C2
cgagtccataaaaaaatcaaatgctgggacgaatagggcggcatcaagtagtacttctttgaacacaaggaagctcgatgaagacactgagaatcttgctcatgaccgagtgccaactgagctaaagaaagccatcatgcaagctcgaatggataagaaacttacccaggctcaacttgctcagatgatcaatgagaagcctcagattatacaggagtatgaatccggaaaagccatccctaaccaacaaataattggtaaactggagagggctcttggtgcgaagctgcgaaggaagaagtgagtgagtaagagtctcgtagaaagaacaaacagaacttgaatatcgcccagaatcttgagtcctaaaacttggtgatgtaaatgaatgttttat

SEQ ID NO: 33036 - DNA, 305 bp, Gossypium hirsutum
  unsure (1)..(305): unsure at all n locations; Clone ID: LIB3149-017-Q1-K1-C5
aattaaactacatctancaacctcgccgcaatctcataccattccctccctccatttatttatggttcgctcactccacttacttctcaggctcacaacaatacaggcctgttactgttcccgatctcactcaacaaatgtgctatgccaaaaacatgatgtgtgctgctgatcctcaccatgggcgatacttgactgctttagccatattccgcgccaagatcagcaccaaggaattacgatgaacaaattattaatgtgcacaataagaactcatcatactttgtggagtggatccccaataa

SEQ ID NO: 33037 - DNA, 101 bp, Gossypium hirsutum
  Clone ID: LIB3149-017-Q1-K1-C6
attactctttcttttcttttaaaatattcaaaataaacgttttctcctttaagttagtttttttaatctttttatttttttcatttttttttttttgtcga

SEQ ID NO: 33038 - DNA, 360 bp, Gossypium hirsutum
  Clone ID: LIB3149-017-Q1-K1-C8
agatgcgatcagataagatcagcaattgaatcaagcacttctgattacgacaaggacaaattacaagagaggcttgcaaagctctctggtggcgttgcagttttgaagattggaggagcaagtgaagcagaagttggtgaaaagaaggatagagttactgatgccctaaatgccacgaaagctgctgtggaggaaggaattgttcctggtggtggtgctgcacttctttatgcctctaaggaacttgaaaacctggagactgcaaactttgatcagaagatcggtgttcagatcatccaaaatgctcttaagatgcctgtacatacaattgcatctaatgctggagttgagggtgcagtg

SEQ ID NO: 33039 - DNA, 374 bp, Gossypium hirsutum
  Clone ID: LIB3149-017-Q1-K1-C9
gcaagttggtggtcggaaagctctctctgtcatttcaaactcgggtaaaccacgcttgaaggagacatcaaagaagaatcaaacttcaaagttaaccattttggcagagaatccaagtgaacccgaagatattgcgaaggaaggatttctgcacaatcacgatgaatgtatcaaagctcagaaaaaagctataagcacgaatgaatttttgcggatactccgattagaagatttctccaaacctgcatctgcaaagggaattcgtatgccaaatgaaatgcccatgagtccttcaaggtacttggaagctaaagagatgagtgagctactgatggaagattggtcacctccgaagtgtaagttgtcaaagaaac

SEQ ID NO: 33040 - DNA, 337 bp, Gossypium hirsutum
  Clone ID: LIB3149-017-Q1-K1-D1
ggctccgtcatcacggatggcaatgacaagaagagtgcatcctcttgtttcattgaatccttaccagggcaattggatgattaaagttcgtctcacaagcaagggaaacatgcgtacctataagaatgctagaggagaaggttgtgttttcaatgtggagttaacagatgaagatggtacacaaatacaagccacaatgtttaatgaagctgctaggaagttctatgagaagtttcaactggggaaggtctattacatatcaagaggaacactaaaagttgcaaataagcagtttaagactgttcaaaatgattatgaaatgactttgaatgagaat

SEQ ID NO: 33041 - DNA, 426 bp, Gossypium hirsutum
  Clone ID: LIB3149-017-Q1-K1-D10
gcatccgacatggagaaatttctatgcgaccggttgcttgacccgacacaacccatatccgagcgcttccgagctctcttctcccttcgcaacctcaaaggccctgcccctcgcaacgctctcattcaagcgacaagggattcatcaaatttgttggctcatgaagctgcatttgcattgggtcaaatgcaagatgctgaagctattcctgctttggaagtagttctaaatgatctttctttgcatcccatcgttcgtcatgaggcagctgaagcacttggtgccattggtttggagagtaacattcctcttttgaagaatagtttggttctagatcctgctccagaagtccgtgaaacatgtgaactggctctccagcgaattgaggagttaaaatccgatggtagtgatgacaaatcatccatg

SEQ ID NO: 33042 - DNA, 312 bp, Gossypium hirsutum
  Clone ID: LIB3149-017-Q1-K1-D2
agaaaaacaggggtctccatggaaagggtcatttgcaccacaagaaccgtccttctcgcagggcaacctggaagagaaacaacactctctcccttcgccgctaccgctgagttactgtgttccttagactttttatcctagttgattttagaagtcattgttttgagtttgaaatttttggaagttttaaaaaactgactctttgaatttacatgcaatttatttttgttttggatgctatgaatttctgaagttattgctacttgcttttcagaataactacttgcacatcatttgcctatcttgggctct

SEQ ID NO: 33043 - DNA, 407 bp, Gossypium hirsutum
  unsure (1)..(407): unsure at all n locations; Clone ID: LIB3149-017-Q1-K1-D5
ctccgatctctagtttaagaaaagcattgctttttttttactgaaaagtttaaatccaggttttggctagttttacgattttgttcatcaactgtttttcctttggtattcggtttatcgttgtttagacttttaagctcggtgcaatttatgtttcaatggcggaatcaggttctttttgcaaaaaaaaaaaaaaaaaaaaaaaaaaaaaaaaaaaaaaaaaaaaaaaaaaaaaaaaaaaataaaaaaaaaaaaaaaaacaaacaaaccccnccaaanaaaaaaataaaaaaaaaccaaaacccaaactaaaanaccacaaccnnaacaataaaaaaaaggggggctgttttaaagggtcccaatcttaaacccggtggggtggaaacaaattttttttttttggg

SEQ ID NO: 33044 - DNA, 399 bp, Gossypium hirsutum
  Clone ID: LIB3149-017-Q1-K1-D6
gttctcaaggggaaagttgtaatcgatgcatgccttggactgacattgcggattcctgacggagttgtgctcgaagatgaggagatcaatgatcccacagatatttaagggagggaatcagttgtagcatttttggtgaatgcgttgaacatgaagcacaacacacaaaaaaaaagcctttgtaatgctttaatattttgttattcaaattttgtattgatcaatgttatttgttattggaagaggaaataatagttagagcttgagctgagtgattgattcctcattataagcagcttaatgtagaatgatggctctaacttcagaacatgagaattgagacttggcctttttgttgctccggttagcgggtgcccattatttatttatcattttaaa

SEQ ID NO: 33045 - DNA, 404 bp, Gossypium hirsutum
  Clone ID: LIB3149-017-Q1-K1-D8
aagaaaacaaggattggaaacccatgaaaattcctgatcatttccagcctcagcaatcatgagaagaagctcactgaatcttttttttttttttttttttttgctatttttttagatcgaatgtgagatgtatgtatgtgtgtacaaattgatttgacctttaagtattgttaataccaaaaatcaaagatgtaaatgaattcccaataagcatttttttgataaagcaaagtacatttcaacaaaaaaaaaaaaaaaaaaaaaaaaaaaaaaaaaaaaaaaaaaaaaaaaaaaaaaaaaaaaaaaaaaaaaaaaaaaaaaaaaaaaaaaaaaaaaaaaaagggggggggggtttaaaaaaaacaaaatttaaaaagggggggccgttttaaaaaaaccatttt

SEQ ID NO: 33046 - DNA, 392 bp, Gossypium hirsutum
  Clone ID: LIB3149-017-Q1-K1-D9
cccaattgttgaaaggcttacaatctcacttatgatgcatggccgaaacaatgggaagaagcttatggcagtcaggattgtgaagcatgccatggaaattatttatctcttgactgatcagaacccaattcaagtcattgttgatgctattatcaacagtgggccacgtgaagatgctactcgaattggttctgctggtgttgtcaggcgtcaggctgttgatatttctcctcttcgtcgtgtgaatcaggccatctatcttttgaccactggtgcacgtgagtctgcattcaggaacattaaaacaattgccgagtgtttggctgatgagcttattaatgctgctaagggatcatctaacagctatgccatcaagaagaaggatgaaattg

SEQ ID NO: 33047 - DNA, 349 bp, Gossypium hirsutum
  Clone ID: LIB3149-017-Q1-K1-E1
cccacgcgtccgcatgaacccagctcgctccttcggaccagcagtggctagtggcgacttcaacggcatatggatctactgggtgggaccactgatcggtggtggattggctggtctcatctatggaaatgtgttcatgaactctgaccatgcaccattgtccaatgacttttaatcaagttattctcaggacagtctaattcgcttaatttgatcttttaatccattgcttactgtaataaaatggcacttcttgttgttctttcctcttttagctttgggtttggttttgttttgttattgtttggaaagttattgtcgccaatcgttgctattgtggaaatggatg

SEQ ID NO: 33048 - DNA, 425 bp, Gossypium hirsutum
  Clone ID: LIB3149-017-Q1-K1-E10
cttcaaaaggatcaacatgggatgaaattgatttcgagttcctcgggaatttaagtggcgacccttacattcttcacacaaacgtgttcagtcaaggcaagggtaacagagaacaacagttttatctctggtttgacccaactgcagatttccatacttattcaatcctttggaacccccaacgtataatcttctctgttgacggtacacccattagagagttcaaaaacatggaatcacttggtgtcccatttcctaagaaccagccgatgagaatttactctagcttgtggaatgccgatgattgggccacaaggggtggtttggttaagaccgattggacccaagctcctttcactgcttcttacaggaacttcaatgccgatgcttgtgtgtggtccaatggagcttcttcatgcaaatcg

SEQ ID NO: 33049 - DNA, 423 bp, Gossypium hirsutum
  Clone ID: LIB3149-017-Q1-K1-E12
gcttgccatttcttctgaaaagagatagagattgaaaatggaggctgatcaaaagggtaaatccgatatctccttcgctggaacctttgccagcagcgctttcgctgcttgctttgctgagatatgtacaattcctttggacactgctaaagttaggctccagcttcagaagaaagctcttggtggagatgctgcagccttaccgaaatacaggggtttgttaggtacagttggtactattgctagagaagaaggtttagctgcactatggaaaggtgttattcctggattacatcgccaatgtctttttggtggcttgagaattgggatgtatgagcctgttaagaatttttatgttggaaaagatcacgttggagacgttcctttgaccaagaagatacttgctgcccttacaactggtgc

SEQ ID NO: 33050 - DNA, 398 bp, Gossypium hirsutum
  Clone ID: LIB3149-017-Q1-K1-E3
cacggcttctgattactggctcactaagcatgttcagtaataggtttttcagatctggtgtgcagaaagctgggagccaaactaaacatgagaaatcaggcaatgaacaatttttgactgaaattagcaaatggattttccatgaaagaggtcatcttaaggctgtaaatgtgaaacaccacagagttggggaaacagatgaacctgcattatacaggattaatgatgagttggaatactcagttgagatctatgagtggtctggaacaagctgggagccatatgttgctaatgatgtccaagtgcagttttacatgatgagcccctatgttttgaaaactttatcatctgacaaaaagggtctatattccgcatcatttaaggttcccgatgtttat

SEQ ID NO: 33051 - DNA, 378 bp, Gossypium hirsutum
  Clone ID: LIB3149-017-Q1-K1-E5
cccacgcgtccgaaagctcctctttctgtgaaagtgaaagtaagaatcagatttttggtgataatgatggagccttgatatcatacaaagatccggatccattgcttccctgtttcctgtaagcaaaaaagagagaaaatgaaggttgttgctgcttatttgttggctgtacttggaggcaatgcctctccttcagctgatgatcttaagaacattcttgccagcgttggagctgacgctgaagaggaaaggctccagcttcttttatctgaagtgaagggaaaagatataaccgagcttattgcatctgggagggaaaagcttgcctctgttcccagcggtggtggtgttgctgtggcggcatctgcacccggagcc

SEQ ID NO: 33052 - DNA, 340 bp, Gossypium hirsutum
  unsure (1)..(340): unsure at all n locations; Clone ID: LIB3149-017-Q1-K1-E6
acgcgnncggattgatgaggagtgggagttaatggaagtatggatttgagattacacagcaatgggaagatgacggggatgatgatgatgtcactgacgatttctctttacaactgaggagggaacttgagaataacactgagaacaacaactaagctggacttatgcattcctctgcactgaacttgtctgaatcggggttattttttttgtttgattttcttttccatgcaaagcgaatgaaggaatcagctgtaactctttatgcttgggtgtactggtagaaacttaaaatgcagaaactggtttgatggttctctaaaatatagacatttgattt

SEQ ID NO: 33053 - DNA, 272 bp, Gossypium hirsutum
  Clone ID: LIB3149-017-Q1-K1-E9
gcgaaaaaaagaatcttttttattttctagctgtcattatctgaaggtaaaatatatggcctggggaaaaaatatttgtaatttatatatttgcattcgttgataatgataccagagaatttacagtgaaagaactctgcttttttgtctacttctctctttgttgaagttctactttacatgaaacatgcctccccacattctctcagtttgtctttaaatcttcagacttcaggaaaaaagtttcgttgatgggtgtcttcagtttattt

SEQ ID NO: 33054 - DNA, 423 bp, Gossypium hirsutum
  Clone ID: LIB3149-017-Q1-K1-F1
gtcctcttctttgaccaagtcagggctacttcatcagctgaaaacagcacgtccgatctcccaggttccatcagggcccttctccctggtgggtctcatggcagctcaaggtccactacaacgaacaccgaagaggattgggattcggtgccaacagctgatgatatcaaagctttgaaaggggagcttgctactctaagattaggcagtaatgatagtggaaatgaggcagctaaatccgatgttgaaaaggttgctgctagtcgaatgaaaggtttggtgatgtcaaaaatattctcgaaactttggtcgagtaaggaaagacatggtgaaattagcagctcggatacatcagacagccatggatctgtgaatgcggaagaaacaaagtccaccccttctagaagtaggagacattcacta

SEQ ID NO: 33055 - DNA, 378 bp, Gossypium hirsutum
  unsure (1)..(378): unsure at all n locations; Clone ID: LIB3149-017-Q1-K1-F2
atttatctgataggatcagtgatacgtgcatactgcaatgaaccaggattgattggtaggaaccttgatgtgtgacattgcagttatgcagccatttatcacggttttcaggatttctgagtgtataacaatatatactagctgtacgaaacattgcaaactgatgtaatatcttttttgaagtgtaaaatagccgattgctaaggttggcgattggcaaaaaaaaaaaaaaaaaaaaaaaaaaaaaaaaaaaaaaaaaaaaaaaaaaaaaaaaaaaaaaaaaaaaaaaaaaaaaaaaaaaaaaaaaaaaaaaannnnaaaaaaaaaaaaaaaaaaaaaaaaaaaaaaaaaaaaaaaaaaaaannaaaagggggggcc

SEQ ID NO: 33056 - DNA, 366 bp, Gossypium hirsutum
  unsure (1)..(366): unsure at all n locations; Clone ID: LIB3149-017-Q1-K1-F3
aaaaagagggcgggaaaaaaaaaacaaanttttaaaaaaaaaaaaaacgaaaaaaaaaaaaaaaaaacacgacaaacaaacaaaagaaataaaaaatattaaaaaaaaaaaaaacacaaagataaagaggcaattgacaaaaaaaaaaaaaaaaaaaaaaaaaaaaaaaaaaaaaataaaaacaaaaaaaaaaaaaataaaaaaaaaaaaaaaaaaaaaaaactaacaaaaaaaaaaaacaaaaaaaaaacaaaagaaaaaaagtaaaaaacaaaaaaaatcaacaaaaaaaaaaaaaaaaaataaaaagaaaacagaaaagaaaaaaaacaaaaaaaaaataaaaaagcaacacacaagacaatt

SEQ ID NO: 33057 - DNA, 524 bp, Gossypium hirsutum
  unsure (1)..(524): unsure at all n locations; Clone ID: LIB3149-017-Q1-K1-F5
aaaattaaaaataaaatttaaattaaaaaaaaaaaaaaaaaaaaggaaagggttaaaaaaaaaaaaggatgggaaaaaaaaaaataaaattaaaaaaataaaaaaaataaataaaaaaaatataaatataaaaaaaaaaaataaaaagaaaaagagaagaaaaaataataaaaaaaattaaaaataatagatataaaaaaaaaaaaaaaagataaaaaaaaaaataataaaaaaaaagtagaaataaaaaaaaattaaaaaaaaaaatagaaaaaaaataaaaatatagaatataaaaaaataataaaaaaaaaaaataaaaaaaaataataaataaatataaaataaaanaaaaaaaaataaaaaaaaaaaaaaataaaaataattaaataaaaaaaaaaaaataaaaaaaattaaatataaaaatataaaaaaaaaatataaaatataaaaaaaaaaaataaaaataaaaaaaataataattaaaaaaaaatataaaaataaaaagtataaaaaaaataaaa

SEQ ID NO: 33058 - DNA, 403 bp, Gossypium hirsutum
  Clone ID: LIB3149-017-Q1-K1-F7
ggagcttcatgaggaaggctcctcttgattttagccagctggggatgaaattcgggttagatgtcattgtactttatgcggcaggaaatcaacagcgtcaaaaaggtttgagatctccctcccatccttcaccacagtttttacttattaaggggaaaaacagaattaaatgttgtaaattagattaacatgaaatggtattttgcctggattagctggatcttcattacttgataatttgaggttctaaacacacttaaactcgatttttttttccgtgtatttgagaaatctttgaatatcatcgtaccaatgtctggatatgcaatgaagagtcgacataacgagtaaaaaaaaaaaaaaagggcggcccgcctttttttttttttttaatagaaattta

SEQ ID NO: 33059 - DNA, 417 bp, Gossypium hirsutum
  Clone ID: LIB3149-017-Q1-K1-F9
tctcattcttttgtttccttcaaccaatgcggactggccaccttctcctggttactggccaagctctaaatttaggcctatgagctttcacaaaggctttaaaaatctctggggtccttcccatcaaagtgttaaccacaatgcattaaccatctggcttgacaaaacttcaggaagtggattcaagtcagttcgtccatttcgatccggttacttcagtgcctcgattaaggtccaacccggttacactgcaggggttataacagcattctatctatcaaacaacgaagctcatccggggttccatgatgaagtggacatagagttccttggaacaacatttgggaagccttatactttacaaaccaatgtttatgtcagagggagtggggatgggaaaatcattggagggaaatg

SEQ ID NO: 33060 - DNA, 337 bp, Gossypium hirsutum
  unsure (1)..(337): unsure at all n locations; Clone ID: LIB3149-017-Q1-K1-G1
ccccccccaccnacacacaccgccacgttttattattatgggccacacccaaatcactaatacatccatctattcaacttccccagaaataaccttgatgcaagtctaaacgatcattcaaatgtttaaccagtcttctaacacagcaactaatttgcattacctcaatttaaaccacataacgcttttaataacattcatagtgattctccattgtgcttattgatctacacctgatattttgtataataaaagatcattgctcttaactaacgtacaaaaagcttgcttacatgtcatttaacatacaaccatctttaatctttcttatcataaa

SEQ ID NO: 33061 - DNA, 425 bp, Gossypium hirsutum
  Clone ID: LIB3149-017-Q1-K1-G10
ctgcaatccatgaggagaaacctgaagatgtggtcaaggttggagaaattgcaacagaagaggtaccggctgttgctcctgcagcagaacctgttgctgaagaaccaaaggaagcagtgcctgaagcagcatccggagaaccccaggctccagaaactgaagccacagttgaaactgaatcaaaggaggtggttaaagagcccaaggctgtgactgaggagccagaagttgagaaaaaagaagaagagactcctaaggaaacggtagcagagccagttgccgaggagtccaaggagtccaaggagacttctgagccaacagttgaagaaaccaaagaaagcacagagtctacagaagcagcagcagcagcagcagcagcagcagcagaagtaaaagcagaagccgaagccgtcccagtggaagca

SEQ ID NO: 33062 - DNA, 420 bp, Gossypium hirsutum
  Clone ID: LIB3149-017-Q1-K1-G11
ataagctcgacatatccttgggtgtggctttagggtcatcaactcagatttctatgttggggatacctttttgtgtggttattgggtggatgatggggcaagaaatggacttaaacttccaacttttcgagacagcaactctgttcattaccgttatagtcgtagccttttttctgcaggaagggacgtctaactacttcaaaggactaatgcttatactttgctatctgatagttgctgcgagtttcttcgtacatgaagatcctcccacagatgatcaaagtaagcaaccgggaacctgatgaatgacacagttgaatcgagatatggaaattcggagcccttgaaagatgcaagaggcaagaagcaagaacccatggagatttgaaacaagtttgtcccacatggtgtaaatagtac

SEQ ID NO: 33063 - DNA, 378 bp, Gossypium hirsutum
  Clone ID: LIB3149-017-Q1-K1-G12
gttcggggtgcgtcgatcttgagaactgtgtgcactaacaactaaaagttacaatttttaaggtttttagcgttttaagaggatgtaaatagggaaataaaaggaaataaaggcagccaccaagggaaagcaagaaaattaccttgagaacaccattgaagccaatcttcaagcaattttccacaaagatttaagagtccaagttgattttcaagagagttatcatggatttcttttattctagtggttatatagtattattggtttactcttgctattattaattaattctcttaataccaagagagatgaaccccgagatagattctattgtttgatttctatttttatgcaataaaatcttagtttctttgtttt

SEQ ID NO: 33064 - DNA, 414 bp, Gossypium hirsutum
  Clone ID: LIB3149-017-Q1-K1-G2
cattgatgtaggagtcgatgagggtgtgaagttgctaaaggcatctttgcagtccaagactgtgctcactgatgtgttcattgagaagaaggtgggcgaaactgatgctagcaattctgctggtgtagtacattcaatcgagatataagaaatgctggccgattttcagtttgcaagtttgttttatcagtcccggtctaagaagggatgctcattggtttttttaaaaccttagcagtctgtatgaggatcctttgagcctcttttgtgttttaattgctagtcttcgaagcctcttttgtatgtaacttggtttttactttttaaccaatgtttaaaccccatctaagtcaaaaaatcttagctctttttagagctaccatttgtatgttataatagaaatataatatggaa

SEQ ID NO: 33065 - DNA, 331 bp, Gossypium hirsutum
  Clone ID: LIB3149-017-Q1-K1-G3
gagtttcaaatatattccgggaaatgaaacgccattagtgattcttttattctggaatctggagggtcctgtcatgatttggggaatggagtgtgactgtaattctttttggatttatcttaagcattagctaattgggaaaatgaagcttagcctggagcttatttcctttttattatatacaataatgcaaaggagtgggtaacccgaaagatagtgtaattagtatcattattatgaccagtgatatgtcagagctaggtcttgattcttgaacttgagccttcatttgagttaatctaaaattgaactggtgaatctgagttgattt

SEQ ID NO: 33066 - DNA, 354 bp, Gossypium hirsutum
  unsure (1)..(354): unsure at all n locations; Clone ID: LIB3149-017-Q1-K1-G4
gcggagggtcaaaggtattcttgaaaatgaatttccagttgtgattcttnnattctggaatcgggagcgtcctgttatgatttggggaatggagtgtcactgtaattctttttggatttatcttaagcattagctaattgggaaaatgaagcttagcctggagcttatttcctttttattatatacaataatgcaaaggagtgggtaacccgaaagatagtgtaattagtatcattattatgaccagtgatatgtcagagctaggtcttgattcttgaacttgagccttcatttgagttaatctaaaattgaactggtgaatctgagttgatttaaaaaaaacaaatctaatat

SEQ ID NO: 33067 - DNA, 385 bp, Gossypium hirsutum
  Clone ID: LIB3149-017-Q1-K1-G6
cagaggttgaccctgccctcaaccccgaccatgttttacacatactccataaatgccctgatcagatcccagaccccaaggccgtccagtatgtgagaaacgaccgtgggacacccatggttttggataacaactactacaggaacatactggacaacaagggtttgttgattgtggatcaccaactggcgtacgacaaaaggaccagaccttatgtgaagaaaatggccaagagccaagactatttcttcaaggagttctcaagggccattactctcctctctgagaacaatcctctcactggtagcaagggtgagatcaggaagcaatgcaatcttgcaaacaagcttcactaaaatgcctcgccaaagagaaagccgagtgt

SEQ ID NO: 33068 - DNA, 368 bp, Gossypium hirsutum
  unsure (1)..(368): unsure at all n locations; Clone ID: LIB3149-017-Q1-K1-G7
accacacanacnccataaatggctctggtttgattccaaacccgaccgcccacacaaatannanaaacnaccgtnttacactcatgtttttggataacatctactacaagaacatactgtacaacatggttttttttattgttgttcaccaactgtcttactacaaaatgaccataccttatatgaataaaattaccaatatccaagactatttcttcaattagttttcaatttccattactcttcttttttaaaacaattttttcactaatatcaactgtcaaatcattaaatcaattcaatcttacaaacaatcttctttaataattcttttctaaacataaattttctatttttttcaaataaaa

SEQ ID NO: 33069 - DNA, 402 bp, Gossypium hirsutum
  Clone ID: LIB3149-017-Q1-K1-G8
attagttgtggttcacgctagtgcaagaaatgttcccacaaagactactacaatggctgctaacgccgtgcctagtgctgcatctgcgtccgttggtgaccaaaagaacttccttacttacggtggtgcagggggcttcgctggcattggctcaaatggcatgccatttggtggtggtggggttcttggtggggttactccctttggtggtgtaggtggacttggtggtggtggtttgggtggacttggaggaaccggaggattcggtggacttggaggaaccggtggagtcggtggacttggaggtcccggtggagtcggtggatttggaggtaccggtggagccgatggacttggaggaaccggtggagtcggtggatttggtggtgctggtggtggtgt

SEQ ID NO: 33070 - DNA, 386 bp, Gossypium hirsutum
  Clone ID: LIB3149-017-Q1-K1-G9
gcaagggttaataatccacagtggttgattgtcgttgggggttgcacacatgtgggttgcattcccttgccaaatgctcgtgattatggtggatggttcacgcccttgccatggttcccattatgatgtctgtggcaggattcgcaagggtacagcaccatacaacctgtaagtacccacttacacctttttggatgagagcaaactgcttatactttaaaaattggtagcgttcctttgggttctcgtgagttcatataatgttattagataatgccgaacgcttgttacaaaattttgcttttacttgcctcggactttgacggcattggtagtgttgattttgtaactggaataattgcaactgcaaccagttcatatttctc

SEQ ID NO: 33071 - DNA, 340 bp, Gossypium hirsutum
  Clone ID: LIB3149-017-Q1-K1-H1
gttcaaatagattttaagaggttttttaatgggatggtacggtcaaatcttatcataggggtgtaggggtgtagataaacagagcgatgaactgttcgtgaattattggtataatgtttgtttattaagctaaataaacgagcatgaacaaattttttatgtttgtttaatgaacgaacacgaatagatgtgtatttggtttatttatgctcatgaacaaatttgtttatcaatttgtctatgacttggttatttattaatgttataaaaatttcattttggtatgtattttttatttataatataatgattaatatttatatttgactattctatattt

SEQ ID NO: 33072 - DNA, 243 bp, Gossypium hirsutum
  Clone ID: LIB3149-017-Q1-K1-H10
taaaaaaaaaaaaaaaataaaatttaaattttaaaaaaaaaaaaaaaaaaaaaggagaaaggggagaattaaaaaaggaaacaggcaaaaaaattaaatataatttatgtaggggccattttgttgcagtgacctgcttttgatagctttattattgcccttttgctagtattcttatgttaattcgggttttcaacatttccccttttaacaataggtctattagtgaaaaccatgggaatg

SEQ ID NO: 33073 - DNA, 301 bp, Gossypium hirsutum
  Clone ID: LIB3149-017-Q1-K1-H11
ttgacggaccgacccacgcgtacggcgagctctcaaggtagctaaaagaaaattgggaactcacaagagagccaagaagaagcgtgaagagatgtcgagtgttctccgcaagatgagggctcatcatcctggaggtggagacaagaagaagtgaagcttttatttttgttgatttatggacaagcttgaaggtttgatttagtagctgttagagattttgtttagcactttgtttgagactgaaaatcatgcactcaaatttgctgctttacatgaattactgcaagtttttttttttttt

SEQ ID NO: 33074 - DNA, 269 bp, Gossypium hirsutum
  Clone ID: LIB3149-017-Q1-K1-H12
accgctgcgtctacgcgctcacctatcaaaaatatggtactggaagctgcataaagcacatcagaatggtgcttgcgtgtgtgtttgaatgcggaagcatcctttggcctctcagcttgaacactgctgataactgattatcgcattgcttttattttgatttgatcggttttatcattgtcctgatatatgcaccaacacatttgtgagatgtggcatatgatgcacacttaatatcctttttaaggaaagggaatgatattgatatt

SEQ ID NO: 33075 - DNA, 358 bp, Gossypium hirsutum
  unsure (1)..(358): unsure at all n locations; Clone ID: LIB3149-017-Q1-K1-H3
atttggccaagattttccaaaaataaaatttttttttttaaaaaaaaaaaaaaaaaaaaacggaacgggtaatttataaaaaaaaacaaacaaaaaaaaaaaaaaaaaaaaaaaaaaaaaaaaaaaataaaaaaatacnctatttataataatataaaaggccccccctttttaaaaatcccaatttttcttccccttctttccaacgttttatttttttttttggcccccctaattccattcccctccccccctttttccaccttcttatttggaaaacccttgcctttccccactttattccctttgaaccaattccctttttccccacttgcttttttaccaaaaagcccccccc

SEQ ID NO: 33076 - DNA, 439 bp, Gossypium hirsutum
  Clone ID: LIB3149-017-Q1-K1-H4
cgcgtccggacaaagtttcggagcccgtcggaaagaataagggtgacgatcatcctcatcatcagcctgttactgcgtatccagcggcgcatgtggcggctggatcgagttctgctgttccgtatggtggtccgggggcttatccaccaccaccacaaggtgctgggtacggataccctcctccgccgccgcatgcagtggcgggttatggtgggtatccaccgcagggaccgcctccgcctggatatggatatccacctccaccaccggggtatgcgtatcctcctccaccaccaggggcttatgggtacccaccggtgcaacagccaccgaagaagaatagcaagtttggattgggattgggtgccgggttggttggaggagcgattggtgggatgttgatcggagatatggtgtccgatgcggcggaatatgatgg

SEQ ID NO: 33077 - DNA, 415 bp, Gossypium hirsutum
  unsure (1)..(415): unsure at all n locations; Clone ID: LIB3149-017-Q1-K1-H5
acggtgagttctcgtggcaattatatatcagttgggaactcctttcagaaacgagagagccagtgaactcggctttttcggtctctaagttttgataaaagtcgggtttagtgaaaaaaacaaaatggtagagggggtggagagccatggtcaaattttgatttgattaaaaattcagatacttgataggtaggttccacctttggttaaacatgctttggatagaagaaaatgaggtctttaattgtaatctctgatgttgttttaagcttttttagccctttaatttacttcctttaaaaaaaaaactgaacttgtagatttggccttttcagaatacaaactccatcgaatcctaactntttttccttggaaaaaagattggttttttaggttattctatattgggttaatt

SEQ ID NO: 33078 - DNA, 421 bp, Gossypium hirsutum
  Clone ID: LIB3149-017-Q1-K1-H6
cccgggcgttcacctatcaaaaatatggttctcgaagcttcataaagcactttgcttgggtggtagctattgttcaaagtctcttgattgtggcatcccgcaaacattacacggttgatgtagttgttgcatggtacactgttaatttagtggtattcttcatagacaagaaactgccagaattgcctgacagaagcagtggaagctcaccaatgttgctaccattgagcaccaaagacaaggatagtaaaaccaaagaagagaaccacaagctcttgaatgggaattctgtagatcctgcagattggaggccgagaactcaagtaaatggcaagattcaggaagatggaaatggaatccatgatactgcaatgaacggggcatagatgatggaaattacatgctgtcaccgtaatggggc

SEQ ID NO: 33079 - DNA, 417 bp, Gossypium hirsutum
  Clone ID: LIB3149-017-Q1-K1-H7
gtacttcgcaatgagccctcaaatgagaaatgtgatgtttatagctttggaatcattctctgggagctcgccactttgagattaccttggagtggaatgaatccgatgcaagttgtaggtgcagtaggtttccagaatcgacgcctcgacattcccaaggagctcgatcctttggttgcaagaataatttggcaatgctggcagactgatccgagtttgcgcccatcctttgcggaccttacggtagctttaaaacccttacagcggcttgttatcccattgcatcaagatcaatcaagctcccctatgccacaagggatttcagtaaattctacaccctgaaatcaaaatactcagctcctcaattgtgaataagaagaaaagttcgctgtatgttcctttcccttcacttcaatg

SEQ ID NO: 33080 - DNA, 423 bp, Gossypium hirsutum
  Clone ID: LIB3149-017-Q1-K1-H9
cgacatatgcacagatgatcactttctcggtggaacaagcaaccaccatggagagaaccataggacatttccaaattccagctggttcacttactgtcttttttgtgggagccatattgatcagtttagctgtttatgatcgttttattattccactttgtaaaaaatggagaggtgaaccagggtttacaaatctgcaactgataggcataggtctgttcctgtcagccatgggaatggcagctgcagcagtggtagaggtgaaacggctatcagtggcaaagaaatacaatgaaacaaccacactaccaataaccgttttctacctgattccgcaattcttcttggtgggtgcaggagaaggatttatatacactggtcaactggatttcttcatcactcaatccccaaaaggaatgaaaa

SEQ ID NO: 33081 - DNA, 368 bp, Gossypium hirsutum
  Clone ID: LIB3149-018-Q1-K1-A1
agcacatagaagaattctatggcaaagtggctagactacacggatccgttaagaatttaccagcgtcttgcacttcaagaatgggagccagaccagagttgtgtttcttccctcagtacgtggtgcagactatgcaaacaccaatcttcttcgtaaattcagcttatgactcctggcagattaagaacattttggctcccagtgctgctgacaaaagtaaggcgtggaaaagctgcaagcttgacttgaagaagtgtacagcagcgcagctcaaaaccatccaagatttcaggacgcaattcttaagtgccctgaacagagccggggtggtcaactctccatctaaaggaatgttcatagattcgtgc

SEQ ID NO: 33082 - DNA, 405 bp, Gossypium hirsutum
  Clone ID: LIB3149-018-Q1-K1-A11
agaatgtcgatggactctgattatcttgttgacaggcgtattgtgatcaaactacttgtgacctacttccagagaaaccagagcaaagaggttttggaacttatggttcggatgctgggattctcagatgaagacaagcagcggataggtattgctcaacaaggtactggcaaaggtgttgttcggggtgttttgggtctacctggtcgtttggttggtggcatcttgggtggaggttcggctgatgtacctgcaagtatagcccctgataatcagtcaattgcagatctttgggttgattttctactcaaggaaaccgaagaacgagaaaagagggcggaaggtgctagtaaatccaatgaagaccttaatggaagaaatccaaatgctacaggacctactaca

SEQ ID NO: 33083 - DNA, 419 bp, Gossypium hirsutum
  Clone ID: LIB3149-018-Q1-K1-A12
aaatagaagagaaactaggatgtggagttaatgcttgctgatgattaggtttgaaaatggaatttcacaagtgaatgagagagtttgcctagttcgtaaagcaccaagctttagtggtccgttgatgcttcctactcgagcatctgcaaacagtttatcagctccaattaaatcatctggagggtttagggattctctggatgacaagtcaaaggctaatctggtgcaaataaaaggtcgattttcagtaacatctgaaaatttatatcttgtaaaggatattcctctaagttcagtttcgcgccgatcgtcacagacttcacctctcagaaagtctgctagtgtgggtgactggatacctgaatacaaacaagcggttcgtgcactagatcttctcctcaacatggtttaatcctaac

SEQ ID NO: 33084 - DNA, 302 bp, Gossypium hirsutum
  unsure (1)..(302): unsure at all n locations; Clone ID: LIB3149-018-Q1-K1-A2
ntntttttttttttttttttttttttttttttttttagctaatagtaagcagttgcttagataggaaaaagcttaatttgaaggttccagaaagtccaggatggaagggaaaccaacatattggttatacttaaatattttctgtcccaaaccttttaggacaaccataagcaggggttccaacatttaatatctcacatattacttttcactgccaccaaacaggtaatccaaggaagacccaccgccaggcgctgcgtgaaccttagttgtccggcgctccgtaagaaagttgccacaat

SEQ ID NO: 33085 - DNA, 308 bp, Gossypium hirsutum
  Clone ID: LIB3149-018-Q1-K1-A3
gccggatccggcgccacgcgtccgcgaactcgaagcttgaccaaccaaaaccaaattaaaataatccttaaataacctactaaatcttataactctaaaaacccaaattcctccaaaagtaaaaaagagatcggaatgcgaccataatgaactgaagatataccgctgaatcactgatgaggagcttttgcgatgaaagccctcagccagatacgctatctattggccaccggacggaaaggactaatctcatataagatagactgctggtactggcacgggaatgcgaagctgtgtgtgtaaaccct

SEQ ID NO: 33086 - DNA, 224 bp, Gossypium hirsutum
  Clone ID: LIB3149-018-Q1-K1-A4
acgacgcgtacgctcacgctttcgttcacgcgtacgggagacgaggacttttgggagctgacagacctataagaatgcacgcttacgagtaccactcgcgtactacttaaagctttgacgctgctctgaaagaatataaaatggcgggcgatgttgatgatccgagcctacatgcgcgggcttgcgacgactgagctgtgctatacagccacctaagtctaata

SEQ ID NO: 33087 - DNA, 377 bp, Gossypium hirsutum
  Clone ID: LIB3149-018-Q1-K1-A6
caaagcttcacaagaaggaaacttgcgaagcagttaccattgttgagaccccgcctatggttgggggtggagtagtcggatgtgtggaaactccgcgtggtcttcgtactttaggcaccgtgtgggctcagcatttgagtgaggaggttaaacgaaggttctataagcactggtgcaagtctaagaagaaagctttcaccaagtattccaagaagtttgaatccgaagatggtaaaaaagatatccagtcacagcttgaaaaactgaagaaatattgcactgtgattcgtgtttcggctcacactcacataaggaaaatgaagggtttgaagcaaaagaaggctcatttgatggagattgaagtcaatggtggaact

SEQ ID NO: 33088 - DNA, 422 bp, Gossypium hirsutum
  Clone ID: LIB3149-018-Q1-K1-A7
cgacccacgcgtactttttttttttaatttttttttttcccttttttttatctcacaaaaaacaccaccttgggtagggaaaaacttaatttggggtttccaaaaaatccacaatttaatgaaaaccaacatattctttatacttaaatattttctttcccaaaccttttataacaaccattaacattctttccaacattaaatatttcacatatcacttttcacttcccccaaacaagtaatccatataaaacccacctccaccctcttctttaaccttaattgtcctcccctcctatataaatattccacaatttctttccatcccctccgaaataaatattcgtttttttttcctttaacaccccccccgatctttttttctttcccccattatttttaatctaaattccgtttttttt

SEQ ID NO: 33089 - DNA, 394 bp, Gossypium hirsutum
  Clone ID: LIB3149-018-Q1-K1-A8
attttgcccatttcactgctctcccctagatcgtctccaagagagagatctccttacaggtaccgtacacattcacacacacattcactgaatgggtcgagtcatccgagctcaacgtaagggtgctggttccgtcttcaaggcccacacccaccaccgcaagggtcctgctcgtttccgcagcctcgacttcggtgaacgaaatggctacctcaagggtgttgtcaccgatgtcatccacgaccctggccgtggcgctcctttggcccgtgtcgtcttccgtcaccctttccgttacaagaagcagaaggagcttttcgttgccgccgagggtatgtacactggacagttcgtctattgtggtaagaaggctactcttgtggtcggaaatgta

SEQ ID NO: 33090 - DNA, 393 bp, Gossypium hirsutum
  Clone ID: LIB3149-018-Q1-K1-B1
tcatgatccctggcttgagtgcttaagagatcctcaggttgtatctattatggtaatatgaagagataaaagtaacatttagtccttgaacctggtagcatttttcagttttggtccatgtgtgactcacctaaaaatgataacttttaataaaaaaactaggtgatgatgtggtatattatcacagggatcaaaattgagaaaagttgtcaagtttcaagtctaatatggaataaaaaaagtttcgggactaatttgagaaaagttgttaacttctcatgatatgaaactgggaagatagtatgaattgcatgtttggtctgttggatagtattgttgcagatgcagcggctggtggtactatatatactattctttgatagaatggttcat

SEQ ID NO: 33091 - DNA, 421 bp, Gossypium hirsutum
  Clone ID: LIB3149-018-Q1-K1-B10
caatcagtcatcgccgctaaaaactttaaagaacaaaaaaatatcttgaaacccggagatgtcggacgaggagcaccatttcgaatccaaggccgacgccggcgcctctaaaacctatcctcagcaggccggtactatccgcaagaacggctatatcgtcataaaaaaccgcccatgcaaggttgttgaagtttccacctccaagactgggaagcatggtcatgctaagtgtcactttgtcggaatcgacatcttcactggcaagaaactggaagatattgttccatcttcccacaactgtgatgttccacatgtcaatcgtactgattaccagttgattgacatttctgaggacggatttgtgagtttgctgactgacagtggagacaccaaagatgatttgaggcttccaactgatgac

SEQ ID NO: 33092 - DNA, 374 bp, Gossypium hirsutum
  Clone ID: LIB3149-018-Q1-K1-B12
accgtccggaattccgggcaaaaaaaaaaaaaaaaaaaaaaaaaaaaaaaaataaaaaaattttttataaaaaaaaaaaataaaaaacaaaggacaattaaaacaaaaggccatccaatccacacccctccttttttcctttcccacctttttctcctctccctttctcaactctttctttttaaccctctctcctttctcccccttttttttccccccctactcttttctcccctttctttccccttttttcctccccccccctcccctctttcttttttttctttcccaccattcccccccctctcctttttattttttacccccctgattaccttcttttcccccccctccccccccctctaaaactttcc

SEQ ID NO: 33093 - DNA, 264 bp, Gossypium hirsutum
  Clone ID: LIB3149-018-Q1-K1-B3
gcctgaggttcccgagaagccggctgttgttgctgttgaagaagaagctgttgaagttgagaagcccaaggttgaagaaaaggaagaaactaagataacccagtctgtttccttcaaagaggaaactaatatcgctggtgaacttcctgagcctcaaaagaaggcccttgatgagcttaagcagcttattcaagaagcccttaacaaccacgagttcactgccaaacccgaagcagaagaaaaacctgtagctgagcctgagcc

SEQ ID NO: 33094 - DNA, 232 bp, Gossypium hirsutum
  Clone ID: LIB3149-018-Q1-K1-B6
gtctctactgacatgtccgccaagcagccagctacagacctttatgtgagactgaacactggcctggtggcatcctctatggaatgggttccacgtccatctaacggcggacgatatactagctccagacttcatttcgcgagcaacttaataagtaaatttgctgtttttgcacctaatgacaataggattaccgagcttttcaacgttggtgactacaaacaacctctca

SEQ ID NO: 33095 - DNA, 407 bp, Gossypium hirsutum
  Clone ID: LIB3149-018-Q1-K1-B8
ctattggcgttttcctttggtcgacaatcgacaatccccacccagcagctaacttcttgtttttatttttgttcttcagtctgaaaatcagtgagagatcgaagagatggcctttttccttggacaaagtagccttgcgaaccacttccgatcttatcagcagaaggcagaggcttccatggctgtgccaacacgagcatttcatgttgaacttggggatcgtgagaaagctctcttggcaaaggacccttcgttaagtcgttttaaatcttataagaagagtgtgtcgacactgaagagaattggggatgttcttacagttgttgttgtagcaggttgttgctatgaaatttatgtcaaggcagtaatgcgagaagaagctaggaacaaggcaaaggctggtggtg

SEQ ID NO: 33096 - DNA, 397 bp, Gossypium hirsutum
  Clone ID: LIB3149-018-Q1-K1-B9
cccacgcgtccgcaagtttgaggcagctgcaggtggaggaagtatttgcaagagctcaatgaaattctacactgttggcgataatgttatcactgaagacgaaatcaaggctctcattaaagggagtgaaggagtttacaagcctgttgaagcttacctcttggctaatcccgaagcctgcaactaggatataagttgctttaaattcttatgcttgcttttaaagaggggtttgattttaatgttgtgcttttgatattttctttttcatcttaaaacctatattgtcttctggttgttcagtaagaatgatggtggtggtgatcgaactttgatcatctttgatatataatgaaataaataaatatataaactggcaaaaaaaaaatctttaccc

SEQ ID NO: 33097 - DNA, 185 bp, Gossypium hirsutum
  Clone ID: LIB3149-018-Q1-K1-C10
gtttttgctgttctgtctttataagagtttgcataaaacgtatgtactaattttatgtatgcttttttgttgctagaaaagtttttttttttgggggggggagataaaggagagaaatgaatggtgtttgattgaacatcccaaactctggaaaataaaaagaggaaaaattattcaccttctgc

SEQ ID NO: 33098 - DNA, 366 bp, Gossypium hirsutum
  Clone ID: LIB3149-018-Q1-K1-C11
atgagcgataaagggtgggtgattggatgatgtgggcatgggatatcactagcttaaaagaactttgggggaacacaaacaatgatgaatgccctgactcttggttggatgcctacatatttataagctacatttaattatgaatacactgaatatagagagaggacaagatgggaggaagacattctggatatatatcatacaatatcgaacagagcttgagccttcctaatgggcatgaacaccggaaagcatatgaaacacatgaagcaatttgagcttactgtttgaagtctcaatctccacaggtgggctgtttaaacgatgcaatctgaattactcgttcatgcgacgatatcttgaaca

SEQ ID NO: 33099 - DNA, 425 bp, Gossypium hirsutum
  unsure (1)..(425): unsure at all n locations; Clone ID: LIB3149-018-Q1-K1-C2
ctggtttcaaatgcggtattaactatcagcccccaactgttgtacctggaggagatcttgctaaggtgcagcgagctgtttgcatgataagcaataatacagcagtggctgaggtgtttgcacgcattgaccacaagtttgatctcatgtactcaaagagagcttttgtgcattggtatgttggcgaaggcatggaagaaggtgaattctcagaagcccgtgaggatctggctgctcttgagaaggattatgaagaagttggtgctgaaggtggagatgctgaagaggaaggtgaagaatattgatgtgcttatgcaaaatcatctattttgaagatcggttcaccgtgtgagggtatgcccaccctcttttcctatatccttcctatcgntctttatttgtgaggtttgcgaaattatgcatgt

SEQ ID NO: 33100 - DNA, 427 bp, Gossypium hirsutum
  Clone ID: LIB3149-018-Q1-K1-C3
ggagggggccgcgcgaacacgagcccccaactgccacaaattatgacgtacactctccataagaaggagatgttaggctgatgcaccacctcaatgtgcaatggaggccaccaacctaggccatgggcctacttgatcgcccatagaccccgtccaggtatgtatggatgcacttgccccttttcctcttttttaaaccactaacctccacctgcatcttgcttacctcagcgatgtgggataataggaaatatggcttcttaatttttaaatccaataactgccaataactggctttctttgggaagttggggcctgcaaaatgcactaaccagtgaccaatttgattggtaatctaattacataaagttgtaataatctttgttgtgaaaatgagtaatttctttagattattgggttatgattt

SEQ ID NO: 33101 - DNA, 414 bp, Gossypium hirsutum
  Clone ID: LIB3149-018-Q1-K1-C6
cttagaacagtcttttctttctggtaatctttctcacaaatcaagtggtttttgtgatgaacgtggcaagtataaaggtaaagaagaggttgttgatgaagaagaagacctttccatggtttctgatgcatcttctgggcctccacacttgaatgtagataatggttatttcaatgatgataatcattatcaatatactttacctaaaggtgctacattgaataaaaatggtggtactaaaagacataggaagaaagagcatcaaagacaaagggaagttcatcaagaattgccttcgttacttgatgatactgccagctctcctctcatcaagaacaattttgctcacaccaataatcatgcttcagtggaggaaagtgtcctccattatcccccagggttctctgcaacaca

SEQ ID NO: 33102 - DNA, 406 bp, Gossypium hirsutum
  Clone ID: LIB3149-018-Q1-K1-C7
cccacgcgtccgcaagaatcaaactctaccttcaaaactaggagaaaaaactaaaaatggacgcaattgactcagtttttgatccgctaagagagttcgctaaggacagtgttcgtcttgtcaagagatgccacaagcccgatcgtaaagaatttacgaaagtagcggtccgtacagcgatcggattcgtggttatgggattcgtaggatttttcgtcaagctcatctttatccctattaacaacattattgttggatccggttagccttgcttcatgttacagactcacaggaaggacgggaactggtagaaattttcaacactgagataaaagaagaactgtatgtttttagatcaagagctatatcatgtgagtttttgaactagttttaatttaagccccgg

SEQ ID NO: 33103 - DNA, 416 bp, Gossypium hirsutum
  Clone ID: LIB3149-018-Q1-K1-C8
gaacaaaatgtgaagaggataaaggattataggcaaagggtcgaagatgaactctcaaagatatgcaatgacatactctcagtcattgataagcacctcattccatcttcctccaccggggaatcaactgttttctactataagatgaaaggagattattttcgttatttggcagaatttaaggcaggagatgatcgtaaagaagctgctgatcagtcacttaaggcttatgaggctgccacttccactgcaagctcagatttgcctccaactcacccaattagacttggcctggctttgaacttctcagttttctactatgagatattaaattctcccgagagggcttgtcatctggctaaacaagcatttgatgaggctattgctgagcttgatagccttaatgaagaatctta

SEQ ID NO: 33104 - DNA, 407 bp, Gossypium hirsutum
  Clone ID: LIB3149-018-Q1-K1-C9
gttcaaagagaaaaacaaggtggacaaggttgttgtactctggactgcaaacactgagaggtacagcaatgtcattgtggggctaaatgacaccgtggaaagccttatggcttctttggagaagaatgaatcagagatttctccttccactttgtatgctattgcttgtgttcttgaaaatgttcctttcatcaatggcagcccacaaaacacctttgttccagggttgattgatttggctattcaaaggaactgtctgattggaggagatgacttcaagagtggccagaccaagatgaaatctgtcctcgtggatttccttgttggggctggtatcaagccaacatcgatagtgagttacaaccatctgggaaataatgatggcatgaatctgtcagcaccccaaa

SEQ ID NO: 33105 - DNA, 379 bp, Gossypium hirsutum
  Clone ID: LIB3149-018-Q1-K1-D1
ggggatttgcgttgggcttagaaggtggaacattgacaaaaggaggagcaaagaaagcattgaagttgatattgtgcagccaagaagggaagaaaatgagagagaaaattagagttcaaaaagagctggtttgcaaggctgttaaacccaatggtagttctattgaaaatttcaaaacactggtgaaacttctccaacacttaccaccaagttgattgaaccaagtacacaaaacaagtaaacacaagtgctaggatgataaagttgttagggatttatgtcatgtcgagaattaaagatgaacatcatttgaggttctctcccaaagcacatttggcttcctatttgtgttttttcttttcggtgtagttttggtatc

SEQ ID NO: 33106 - DNA, 247 bp, Gossypium hirsutum
  Clone ID: LIB3149-018-Q1-K1-D10
gttgcacttcctgtgtgtgttttgggtgtgaaatctgtcggttcactgattgcaggtgcgaaacttgcattgacttcattaggaatgccgaagcttgagttattttaagggtggggattcctttttgttgctctggttccttgaagtcattgtctttcattactattaattgccagtccctgagttcagcactcatggtgtcgttatctggtttaaaaacttcaaattaatttatatttagatctca

SEQ ID NO: 33107 - DNA, 419 bp, Gossypium hirsutum
  Clone ID: LIB3149-018-Q1-K1-D11
gtcggcggcaaagccatacgtggcgcagcctgtttcgccgcaagatctccctgtcgattattccggttttatcgccgtgattttcgggattgcaggcgtcatgttcaggtacaagctgagctcgtggctagcgatcatattctgcgcccaatcacttgcgaacatgaagaacgttgagaacgatctcaagcagatctctatggctatgatgtttgctatcatgggattagttacaaactatttcggaccagctcgaccaggaaaacagagttaaagataactccaatgatgcggttaagtttctaatttcattttgcacgatgatatcagatcatgaagtttagataaattgtgaccttattcaagaacaattttgtcggataattattttctatatgactaattggtttatatttata

SEQ ID NO: 33108 - DNA, 421 bp, Gossypium hirsutum
  Clone ID: LIB3149-018-Q1-K1-D2
cgaagattgcaagctactatgaggaatattatcaatctaaaggagttaagttcgtcaaaggaactgtcttgacgtcgtttgaatttgattctagtggaaaggttatggctgttaatcttagagatggaagtcagctacctgcagacttggtcgtggttggaatcggaatacgcccaaacacgagcctttttgaaggccaactaacacttgaaaaaggtgggatcaaggtgaatgggaagatgcaaacaagcaacgactcagtttatgcggttggagatgttgcagcatttccagtcaaactatttggtgaaactcgcagactggagcatgttgattcagccagaaaatctgctaaacatgctgttgctgcaataatggaacccaagaaatcaggcgagtttgactaccttccattcttcta

SEQ ID NO: 33109 - DNA, 159 bp, Gossypium hirsutum
  Clone ID: LIB3149-018-Q1-K1-D3
gtggttttgagtatatttccccaatgtgttgggaaaatttttgggcttcattgcgccgattttgagaaaaccggatcgaatgttgaaatgatttgcactatgaggtctttttatgattgttcgaaatttttaatgcccaaagcttggattattttcgtc

SEQ ID NO: 33110 - DNA, 386 bp, Gossypium hirsutum
  Clone ID: LIB3149-018-Q1-K1-D4
agacaaaatggagatgcatgtcggtgccgtgcaagctggagaacgtgctttgataatagatgatgtcgttgccaccggtggaaccttgtctgctgcgattaggctacttgagcgagtcggcgtgcatattgtggagtgcgcttgtgttatcgaattatcaggtttaaagggtcgggaacggttaggagatacaccgctgtttgttcttgtaaactcggcttgatatcacaagtgttgtggtggtggtagatgggcattgtttgttgcactttttagagttttcaatatatagctacaactttgcctaaaggcctaacaagtctatttggttgaataaaaaaggctgcatttggtaaaagttttagtggattgaaccatgataatat

SEQ ID NO: 33111 - DNA, 424 bp, Gossypium hirsutum
  Clone ID: LIB3149-018-Q1-K1-D9
cttgtgctcactcggctacaccgtcgaccatgtcaagaccatagtgaaacgccccaacattacatgttcgacgaaattcaaggaccctggtgaactcaattacccatcgttttcagtcttgtttgggggcaaaagggttgttcgatacactcgtgaattaacaaacgtaggccctgcaaggtccatatacaaagtcacagtaaatggaccatcgacagtagggatctcagttaggcccaagacactcatctttagatccgtgggtgaaaagaagagatacacagtcacctttgtagctaaaagaggaacaagcccaatggctaaacctgaatttggttcaatagtatggggcaatgctcaaaaccaagttaaaagcccagtttccttctcatggtcattgatgtgagagtgtcccacagtttat

SEQ ID NO: 33112 - DNA, 207 bp, Gossypium hirsutum
  Clone ID: LIB3149-018-Q1-K1-E1
gtttacatgtatgcattatacggtcttagtgggaaaaaagaaataatggttaggcggtagtagcaccttggctatatatttctttgattcatgttactgtgtcgaattggtgtaccataaagcactccgaaagtgggagtatggacagctatcaagaatgaaagaaacaatatgtttttgatgaatctacaacttggtgatagcact

SEQ ID NO: 33113 - DNA, 180 bp, Gossypium hirsutum
  Clone ID: LIB3149-018-Q1-K1-E10
gtttgttattggaagcaataaatggcctactgcttgggctggtatttatatgtggtattgagctatgtatgaaatatacttgatttaatttatttttctatttaaattttatgaaaatttctagttgctctggttgcatcaactaggtatcatgtctttatgacaaatgatattttatgg

SEQ ID NO: 33114 - DNA, 417 bp, Gossypium hirsutum
  Clone ID: LIB3149-018-Q1-K1-E11
atctatctcctcaccactggtgctcgtgagtctgcattcagaaacagtaaaactatcgctgaatgtttagctgatgagcttattaacgcagcaaagggatcatctaacagctatgccatcaagaagaaggacgaaattgagagagttgccaaggccaatcgttgaggaattggtaggagttcgcataaaccatggcggtggacacttttgttttttcattcagtactttataagttacctattttatgttccagacataatatgaatgttccgttatttaagttgagatgttattgaagaaaaaaaactggagtttacaaaagtgtcaagatggtcaaaaaacacaccatgtgacgataattcaataaccacctatttatagctgataagcgcaggtcaaggattatgtatgatatg

SEQ ID NO: 33115 - DNA, 409 bp, Gossypium hirsutum
  Clone ID: LIB3149-018-Q1-K1-E2
aacaaggagtaaggcacagctcaatgcaactctcaaccattacaatacctcattcggcaatgctatcaacaaggatttgaaggctgatcccagtgatgaattcctcaaattactaagagctgtgatcaagtgcttgaccaccccagagcaatatttcgagaaggttctacgtcaagccatcaataagttgggatccgatgaatgggctcttacccgagtcgtcacaactcgtgcagaggtcgacatggtacgtattaaggaggcatatcaacgaagaaacagcatccctctcgaacaagcaattgctaaagatacttcgggtgactatgagaagtttcttcttgccttgatcggagctggagatgcatgaaccgtcttcggtattaagttcctctgtatgaatgtctag

SEQ ID NO: 33116 - DNA, 424 bp, Gossypium hirsutum
  Clone ID: LIB3149-018-Q1-K1-E3
attgactacggggagtttgtagctgctacgctgcacctaaacaaaatcgagaaagaagatcatctatttgctgccttctcctactttgataaggatggtagtggttatattactccagatgagctccaaaaagcttgcgaggagtttggcatagaagatgttcgccttgaagaaatgatccgagaagttgatcaggataatgacggacgcatcgattacaatgagtttgtggcgatgatgcagggtggaaatgttgccggtgctggtaagaaaggcctgcaaaatagttttagcatcaagtttagagaagcattaaaattttagtacaggcaattgcactagttcttgttccttttttattttcacctttcaagtttttgagggaactgaggtttgtatagtaagaagttacctattgttcttt

SEQ ID NO: 33117 - DNA, 341 bp, Gossypium hirsutum
  Clone ID: LIB3149-018-Q1-K1-E4
ctcgcgattcctatggctactgctgttgttgtatctattgatactgctcttgatgaggagaaaactgcatgaattatgtgaggagcaagatgctacatcagatgaagttcttgacgctgctactgctgaagaagcagctgccgctgatgcaaaggaagcagatcctgcagaggcggcagacgcggaacctgcagcctcggctgaagttgaaaccaaagacgtggttgaagaaccaaccgctgttgctgaagaaccaccaatagatgatactgctgaggcaacagtgccagaaactgctgacgaagcaatcacagaaaccactgcacaggccgttgaagcca

SEQ ID NO: 33118 - DNA, 417 bp, Gossypium hirsutum
  Clone ID: LIB3149-018-Q1-K1-E5
gttttcctcaccttaggagcagtgatgtggttcttctatggccttttgttgaaggatatgaacgttgctgttcccaatgtacttgggtttatctttggaattcttcaaatgattctttacgccatatacaagaactaccccaagaaaatggtggaagatcccaagcttcaattatcggctcagcaagtagtcgtcgacgtcgtcaaactgggatcgacgacggtgtctctggaagtgaacgcggtgggtcctaaccccaacaatggtgacggaaccggtgaagctcaaaatatcaagactaacaacaccgcagatgcttcaaacaaagtctgaaagtggaattagaattattctaagcatgcaacgtcatattgtgaggtttttgcatggaaaaatctgggttgaaacccatgcaaa

SEQ ID NO: 33119 - DNA, 404 bp, Gossypium hirsutum
  Clone ID: LIB3149-018-Q1-K1-E6
tcacactctatttcaaagaaaaaaaaaagataaaaacccttagagaaaatgaaaaactgatattctccgaaaattttctatttatgtagaaaaatataaggaaaataaaagtaaaaattttgcaactggactgaaaggatatgtcgtcgaaggggaagggaaaggagaaggaggtggtttatgggaaacggaaggtcagcgccggaagaagcggtggtggagcggaggagaaccgtcggaagcggaagaatcggggagttcttcagttctttgaagacgctgctgatgttgatgacaatgaagccagcgatgacagcgattttgatgattattttatggaagaagcgacggtgtagggggctcggttttgaagaagaagaagaaggaagaagaagaagaagaag

SEQ ID NO: 33120 - DNA, 419 bp, Gossypium hirsutum
  Clone ID: LIB3149-018-Q1-K1-E7
gaaaactaaaaattagtgtgagcgggtagaagagatgatgctacccgtagtaaagctaggaactcttgcgctgaaaaccgcttgcaaacccattgctaatcgtctcaagaaagaagctggtttgcatcccagattccgccaattgatcatcaatattgcccaggcaaatcatcgatttacaaccacgatgcaaagacgaatttacggtcatgcaactgatgttgcgatacgccccttgaacgaggagaaagctgtccaggctgctgccgatcttctgggggagctttttgtattcacggttgcaggagctgctattatttttgaggtacaaagaagctccagatcagaagcaagaaaagaggagcagcgcaaacaagaattggaggcaatgaaacaaaaagatgaagatgtagcacgag

SEQ ID NO: 33121 - DNA, 421 bp, Gossypium hirsutum
  Clone ID: LIB3149-018-Q1-K1-E8
ggggagtatttgaatcggggtctttccgatgatgagagatcggatcatggggttcctgtgggatataggaaaacacaaactccagtgattcagcctcagggtttacctcttcagaatcaacagaagtatagcagtggtcaagatttggcttctccagattccatctcaagtgacggtagttttacaaatccattatcacgccaaaagcctgtgatttatcaagacccagttgttcaaatcccatctggggttaacaggattcctgcaaacactgtcgatccaaagcttaatatctctgatccgaactcaattggccgagttcagatacaacaacaagttcaggattctggttatgtattgcagcaaccacaattcgatcaacagcaacaaccacaacagcagcagcagcagcagcagcagc

SEQ ID NO: 33122 - DNA, 411 bp, Gossypium hirsutum
  Clone ID: LIB3149-018-Q1-K1-E9
gtgagtgatgcggatatccgcaagtaccatgcatttgcacaaacattgcagcaatcaaggggatttggaagtgaatttaggtttgctgaaactggttcaaggactgcagcatctgatccttttgcagcttctgctggtggagctgatgaagatgacctttacagttaaattacctttcatctgtgtttgcttatgggtctttcatatgatatttacatataaacgtagtgttaattgaactgtatgatattaagaacacattggcacagatcttgagcctgtgggtgctcaatggagtttagaaaacaggttttgttattttggaattccaagtttttattttctactagagttaaattcaaattttacccttttcatcatataaatagaatttacaatatttagtgttcg

SEQ ID NO: 33123 - DNA, 445 bp, Gossypium hirsutum
  Clone ID: LIB3149-018-Q1-K1-F1
tatttcctttggcttaggataggcctaataagaaaacaaataattccaattcatatatgaacatttttgcctccttatttcttgaaaatgtggaattggaattcctttcctttggcttcaggataggcctaataagaaaacaaatgattccaattcatatatgaacatttttgcctccttatttcttgaaaatgtggaattggaattccccgaggaattccgatctcatttcctttggcttcaggataggcctaataagaaaacaaataattccaattcatatatgaacatttttgcctccttatttcttgaaaatgtggaattggaattccccgaggaattccgatctcatttcctttggcttcaggataggcctaataagaaaacaaataattccaattcatatatgaacatttttgcctccttatttcttgaaaatgtggaa

SEQ ID NO: 33124 - DNA, 406 bp, Gossypium hirsutum
  Clone ID: LIB3149-018-Q1-K1-F10
gccgcaccgaggaaggaagcagaaggcaagcaaaatgaagaccattctttcttcagagacaatggacatccctgatggggttgatattaaggtgaaggccaagatgatcgaggttgaaggtcccaggggtaagctcatccgtaacttcaagcacctcaacctcgattttcatcttatcaaggacgaggagagcggcaaacgcaagctcaggatcgaggcttggtttggctctagaaagactagcgccgccatccgtactgctctcagccacgttgagaatctcatcaccggcgtcaccaagggctaccgttacaagatgaggtttgtttatgctcattttcccatcaacgcctccatcactaacggcaacaagtccatcgagatccgtaatttccttggcgagaaa

SEQ ID NO: 33125 - DNA, 422 bp, Gossypium hirsutum
  Clone ID: LIB3149-018-Q1-K1-F11
caggcgtacgaatgacatcgccatctttcaacatctggttattgtatcacaatgaacacggctcacaccaggatggtaacaaactccatggggccggcaacatcaacccttaccaatgtccatctaaggatacatttgcattttagactgccacattaccatataccatgcatgttcttctacaagaaatgttgcaggacatgcctttgtgttcctccaacgtattataggaacaaacaatttaaaaccttatacaacatctgcaaaaccaacgaaggaggccccaaatgcctttaaattactcaaaaaaagacccttttattactttcatacattattatccctatcaaatttctattttaaattcaagtcattgaatcatagtgtcgcgctgtgatactaactctatatcaaacgttctt

SEQ ID NO: 33126 - DNA, 409 bp, Gossypium hirsutum
  Clone ID: LIB3149-018-Q1-K1-F12
gaaccgaacgacaacctgccgccgcaacaatgaagtacaacccgcgtgtctcctcctctcgccgcaagagccgaaaggcccatttcacagcaccttcttccgtccgccgcgtcttaatgagcgcacccctctcatccgatctgaagtccaagtacaacgtccggtctatgccggtgcgcaaggatgacgaggtccaagtgattcgtgggacctacaagggacgggaagggaaagtggttcaagtgtaccgccgcaaatgggtgatccacatcgagcgcatcacgcgcgagaaagtgaacggttccaccgtcaacgttgggatcaacccatccaaggttgtcatcaccaagctgaggctggacaaggataggaagtctttgctggatcgtaaggctaagggacgcgtcgc

SEQ ID NO: 33127 - DNA, 362 bp, Gossypium hirsutum
  Clone ID: LIB3149-018-Q1-K1-F2
gtgctgccaaggtcgtcggaaaagtttagtcagctctggatggcaagctgactggaatggctttgcgtgttcccactgttgatgtgtctgtggttgacctcactgtgagacttgagaagaaggctacatatgatgaaggttgggctgctatcaaggccgaatctgaaggcaacttgaagggaattcttggttatgtggacgaagatttagtctcaactgacttcatcggagacaacacgtcaagcattttagatgccaaggctggaattgctttgaatgacaactttgctaagcttgtgacttggtatgacaactaatggagttacagttcccgtgttatctactagatccgacacatgtct

SEQ ID NO: 33128 - DNA, 283 bp, Gossypium hirsutum
  Clone ID: LIB3149-018-Q1-K1-F4
gcaggactcggaagtcagacgaagaagttgaaccctagccttgaggtgcaagccggcgatagttacaaaactgtgattcataagaaagcacttgctaggtttcgtgaaatgtcttagcagcccttaggtagaaaagatgtggaaatcattattgtttctgtttatatatatgtatcatttagagaatgttggcgtggtttgaaacttccagtccacaccattttggaaagttaatatttatggccattttaatttcggtgtgaatcgagtttttggagcctta

SEQ ID NO: 33129 - DNA, 413 bp, Gossypium hirsutum
  Clone ID: LIB3149-018-Q1-K1-F5
gatgagtttcctttctgtgtccatcttgtgagttgggagaaggagaacgtctcaagtgaggcattggaagctgcccgtattgcctgcaacaagtacatggccaagtttgcagggaaggatgctttccatttgagagtgcgggttcatcccttccatgttctgcgtatcaacaagatgctttcatgtgccggtgctgataggcttcagaccggaatgaggggtgcttttggaaaacctcaaggaacatgtgccagagttgacattggtcaggttctgctctctgttcgttgcaaggatagcaacagccatcatgcacaggaggccctccgtcgtgcaaagttcaagtttcctggtcgtcaaaagattattgttagcaagaagtggggatttaccaagtacaaccgtgctgatta

SEQ ID NO: 33130 - DNA, 402 bp, Gossypium hirsutum
  Clone ID: LIB3149-018-Q1-K1-F6
attgccatctccatggttcaaactttggttatggcatcacatggacatggtggtcaccattatgataacaaacgttatggacctggaagtctcaagccttaccaatgtccatctcagtgcacaaggaggtgtagccagacacagtaccataaaccatgcatgttcttctgtcagaaatgttgcaggacatgcctttgtgttcctccagggtattatgggaacaaacaagtttgcccttgctacaacaactggaaaaccaaggaaggaggccccaaatgcccttaaattactcaaaagaagaaccctttttttcttttttacattattatccctataaatttcctatttgaaattcaagtcattgaagcataaaggtgcacttgtatactaactatatatttt

SEQ ID NO: 33131 - DNA, 422 bp, Gossypium hirsutum
  Clone ID: LIB3149-018-Q1-K1-F7
aaatcgtcatctcctagctcgtaagtacagatccaaaaagtccttgactccctgtccaattcttctctcttaaaactttaaaagcaatggagaatctatggcgagccgcaacgcgtcaggatccgaatccggaagactacaaaggcgtcgatttctggaccaaccccgaacgagctggttggttaacaaaacaaggcgattatatcaaaacttggcgacgccggtggtttgttttgaagcgaggcaagctgttatggttcaaggaccctggctccgtcgcccgcacctccgctccacgcggcgttgtatcggtggacctttgccttactgtcaagggagccgaggatatcgtcaaaaaggccttcgctttcgagctatcaacacgagattcaaccatgtatttcgtcgccgatacggagaag

SEQ ID NO: 33132 - DNA, 418 bp, Gossypium hirsutum
  Clone ID: LIB3149-018-Q1-K1-G10
catgtctccatgggtggcagacatggaccagaatactcgtgacgttatcatgcgtgaattccgctctggttcatctcgtgttctcatcaccaccgatctccttgctcgaggtattgacgtgcagcaagtctctctagtcataaactatgatctgcctactcaaccagaaaactacctccaccgtattggtcgaagtggaaggtttgggagaaaaggtgtggccatcaactttgtgactacagatgatgagaggatgctttttgacatccaaaagttctataatgtggtcattgaggagctgccatcaaacgttgctgatctcctttgatgagattagacaccctttttgaatattgttgaggcaaggtgttttgttgttttggcaagtttcttatttttctccctatctagcgtctta

SEQ ID NO: 33133 - DNA, 422 bp, Gossypium hirsutum
  Clone ID: LIB3149-018-Q1-K1-G12
gtttctctcttcaggtaaattcttggttgtttcgttcgttttaagaacagagattcgaagatgagtaagcttcagagtgatgcccttagagaagctatttcaaccattgtggctaattccaaggagaaaagtcgcaagttcaccgagaccattgaactccagattgggctgaaaaactatgatccccaaaaagacaagcgtttcagtggttccgtgaagctgccacacattcctcgtcccaagatgaagatttgcatgcttggagatgctcaacatgttgaagaggctgagaagattggtttggattatatggatgttgaagcattgaagaagctaaacaagaacaagaagttggtcaagaagcttgctaagaaatatcatgcatttttggcctctgaatctgtcatcaagcagatcccccg

SEQ ID NO: 33134 - DNA, 111 bp, Gossypium hirsutum
  Clone ID: LIB3149-018-Q1-K1-G2
gtaggccagcagccccagcagacgatctattcgttccaacccgaccttcccatgcatgcgacgtgatatctcgtctattgagtcgcctaaactcaacgcactggcccaacg

SEQ ID NO: 33135 - DNA, 420 bp, Gossypium hirsutum
  Clone ID: LIB3149-018-Q1-K1-G3
ggaagattagcaaaagctatcctctagcaattactaaagttgaggaatctggtgagcacactatattaggtactggagagttgtacttggactcaattatgaaggaccttagggagctttattcagaggtggaagttaaggtggcagatcctgttgtttcattctgtgaaacagtggtggagtcttcatccatgaaatgctttgctgaaacacccaacaagaagaataaaataaccatgattgcagagccattggagagaggtcttgcagaggacattgagaatggtgttgtaagtgttgactggagtcggaagcaacttggtgacttcttcaagacaaaatatgactgggatttgcttgctgcacgttccatctgggcatttggccctgataagcagggacctaacattttattagatg

SEQ ID NO: 33136 - DNA, 414 bp, Gossypium hirsutum
  unsure (1)..(414): unsure at all n locations; Clone ID: LIB3149-018-Q1-K1-G5
tttccaaccaactttgaacccatcacttcgaacaatgtttctcaaggcgcttaggggattaaacgcaacaattgctatcctagtagacgaagatgcggatttgacatcgaataatttggtatgcagattaagatctgcattcaattatctgtggataccatacgatacagtggatacgttccttccaataggaagcaaacaaaggcagtggtatgaagctaatatttgttggaaagtagagaatgttatagctcatgaaggtttgcagagggtggaaagggttgaatcaaagagccgatgggtgcagcggatgcgaaacgctgagtttagaggggttagctntggggatgaaacggtttcggaagtaaaaacaatgcttgatgaacatgcagctggatggggattaaagaaaga

SEQ ID NO: 33137 - DNA, 413 bp, Gossypium hirsutum
  Clone ID: LIB3149-018-Q1-K1-G6
ctctggtaaatgttatagttttgttcgtggaaagaacagagattcagagatgagtaagcttcagagtgatgcccttagagaagctatttcaaccattgtagctcagtccaaggagaagcagcgtaagtttattgagactattgaactccagattgggttgaaaaactatgatccccaaaaagacaagcgtttcagtggttccgtgaagttgccacacattcctcgacctaaaatgaagatctgcatgcttggagatgcccagcatgttgaagaggcagagaagataggtttagattatatggatgttgaagcactgaagaagctaaacaagaacaagaagttggtcaaaaagcttgccaagaagtatcatgcttttttggcttctgaatctgttatcaagcagatccctcgtc

SEQ ID NO: 33138 - DNA, 407 bp, Gossypium hirsutum
  Clone ID: LIB3149-018-Q1-K1-G7
gcggaaggaaagggagaaaaaagggacatcaagggaaacacgaatcacaagcgctgatgaacaatctggaagagtgcaaagcctacaacccacaacatctacaacaagaagagatggcagcttccgcgggggctatggacggattggctgcatccgctctccgctccgttctccagagagtccaccagaccgccgagcggtgtggtcgtgaatcgcagcggatccatgtggtcgccgtcagtaaaaccaaacccgtctccgtcattcgccaagtgtacgacgctggtcatcgctgtttcggtgaaaactatgtccaggaaattgtcgaaaaagctcctcagcttccggatgacatagagtggcattttattgggaatttgcagagcaataaagtgaagcctttgatt

SEQ ID NO: 33139 - DNA, 331 bp, Gossypium hirsutum
  Clone ID: LIB3149-018-Q1-K1-G8
caccaatcacaaacgctgggaggctatcttaatagtgggaaggctacaacccacaacatctactacaagaagagatggcatcttcccccgtggctatggactgatagactgcatcctctctccactccattctccacaaagtacaccagaccgtctatctttgtagtccttaatctcaaccgatccatatgatctccattatttaaaccaaaccctttttccacattctccaaatttaccactcttttcatctcttattcgtggaaaactatgtccaggaaaattttctaaaaaacttcttaacttccccaattacatacacttgcatttt

SEQ ID NO: 33140 - DNA, 419 bp, Gossypium hirsutum
  Clone ID: LIB3149-018-Q1-K1-G9
gaaagaccaagcagtgcaagcatctttgttggaggttttattttgggaggacttgtggttggtgcacttggatgtgtatttgctccccagatcagcaaggcagtagctggagctgatagaaaggatctaatgaagagactacctaaattcatatatgatgaagaaaaagctttggagaaaacacgaaagatactgaccgagaagattgctcagttgaactctgctattgatgatgtttctgctcagcttcgatccgaagatgctccgaatggagttgcggtgaactctgatgaaattgaaactgccatatgaatgggctaccttgttattattcagatgctgttttaacacttaactgatattgtcatcctcggtatgaaataatatgtgaatttattgtaattttcctgttttcaagt

SEQ ID NO: 33141 - DNA, 378 bp, Gossypium hirsutum
  Clone ID: LIB3149-018-Q1-K1-H1
aatgagcggcaggtacctacgcgatgtatggtgatgattacgatgaaagaaactttataaaaatatacggcggtcaaaaagaaacttgcgagaagggttaaatgggtggaattgaatttattttgtatcaaagttaagaagtgttgcgattcttttatatatatattagtgtcgggataattttggatgatatgatgtaatattttaatatagaagacaatgtaatataatggagaaggtagagtaatggtattggaatttgtcttttataagaaagaaccggcaaatcggttcaaatgacaagcagcaagtgttgcttgctactccgaaatgttactcaactcttcctatctactgggaatatatgtttaagtttgg

SEQ ID NO: 33142 - DNA, 419 bp, Gossypium hirsutum
  Clone ID: LIB3149-018-Q1-K1-H10
gaaggaaggagcaaggctcctcttcttctggaacattgctgaaggctgcattgcagtataaaaccttcattgaggattggatgccacctcttctcgaagctgagctgaataatgatggtgatgaagactggcttctaactaagaagcagctagggaaacccgcggccaaaagacctgatgacaatgaccatacatgtgttgcgagtgcaagtttgcacccgagtgcacattttcttccggcagctgagatttatgcactgccttatacagttccattttgattccgcttagtggaggggctgtctttttgttctcccctgcaaagagcggcttcgtggcgggattgggtttgggtggcgaattctaacttgtacagtcttgagaatttactaatagaaacaagagaaatttttgcaaaa

SEQ ID NO: 33143 - DNA, 415 bp, Gossypium hirsutum
  Clone ID: LIB3149-018-Q1-K1-H11
cgttcataaaaattaaaagcctcttttttctctctgttcttcgccatttttttgaatccgaaaccaatcccagatgttctgctgaaaaacaaaaacaccctctaagtaactttccgggaaaatgtcggggaaaggagcaaaaggattgattacggctggaaaatccaccaaggacaaagataaggacaagaagaaacccgtctctcgctcttctcgtgctggtctccagttccctgtgggtcgagtccaccgactgctgaagacaagggttagtgctaatggaagggttggagctacagctgcagtctacacagctgccatactggaatacctgaccgcagaagtcctagaactggcaggtaatgcaagcaaggatttgaaggttaagcgtattacacctaggcatttgcagctc

SEQ ID NO: 33144 - DNA, 422 bp, Gossypium hirsutum
  Clone ID: LIB3149-018-Q1-K1-H12
ctggtggccacaccctgggaaggtgccacaaggagaggtctggatttgagggaccatggactaccaaccctcttatctttgacaactcttacttcaaggagctcttgactggagagaaggatggcctgttacagttgccaactgacaaagttctcctttccgaccctgttttccgtccattggccgacaaatatgcggctgatgaggatgctttctttgctgattacactgaagctcacctgaagctgtctgagctaggatttgctgatgcataagctgatgattgcaaaaataggaaaaagccagcggcacacagatgttttaggttttgttttctctccaaaagtggcttaaagaatgaatttggggaagtttccgagacaagcttttttcgataattttattctaagctcacattcccc

SEQ ID NO: 33145 - DNA, 414 bp, Gossypium hirsutum
  Clone ID: LIB3149-018-Q1-K1-H2
gtcaaactcaccgtccagaaccgtcaggcgaaagtcgctgtggtcccgtcggcggcggctgttgtaatcaaggcgttaaaggagccagagagggataggaaaaagaccaagaacatcaagcacaacgggaacattaacctcgacgacgtcatcgaaattgctaaggtaatgaggccgaggtcgatggctaaggatttgagagggactgtgaaagagattttgggaacgtgcgtctccgttgggtgtactgttgatggaaaagaccctaaggatctgcagcaggagatcgatgatggagatgttgatgttcctttggagtgagcaagcttgttcttctcgttttttacgtctatcctcatgcttgcctcttttagaaaaatgttcaatataaagattttgaacaatttgcttata

SEQ ID NO: 33146 - DNA, 378 bp, Gossypium hirsutum
  unsure (1)..(378): unsure at all n locations; Clone ID: LIB3149-018-Q1-K1-H3
gttgctactggaaatgggtcacaaaaaacaacaagatgcatgtgatggtgttggtctcttgggtattgcatgggctttcggtggcatgatctttatccttgtttactgcactgccggtatctcaggtggacacattaaccctgcggtgacttttgggttgtttttggcccgtaaagtgtctttcattagggctgtggcttacatggtgtcacagtgcttgggtgctatatgtggagttgggttggttaaagctttcatgaagcatccatacaactcccttggtggtggtgcaaacaccgtggcttctggctacaacaagggaacttgccttggagctgagattattggaactntcgtacttgtctacactgttttctc

SEQ ID NO: 33147 - DNA, 442 bp, Gossypium hirsutum
  Clone ID: LIB3149-018-Q1-K1-H4
gaatcggagggtcgacctagaccctaccggccatgctgaaggccttcttgatggcctcgtcgatctcgaagctgctgtttgcctttgcaccgctatcaaagctaacatcttaggcatcaaccttaacattccagtttcccttagcttgctcctcaacgtttgctcaaagaatgttccttccaacttccaatgctaagtcttcactgttcccaatattctttctagtcttccttattgtgtttggttattgaaagttacggtttccgacatttgcagcaaaccagtggtttttcatttgtaactttattatttggatttccttgtgagggagggatactgaataaatttaatacttctcttcaagtgtttttcttttggggttttttttatctccaaaagacatgaaaaagacttgtattattcccttgcttttggttctcta

SEQ ID NO: 33148 - DNA, 418 bp, Gossypium hirsutum
  Clone ID: LIB3149-018-Q1-K1-H5
gggaaggaaggagcaaggctcctctttttctttaacattgctgaaggctgcattgcggtatgaaaccttcattgagggttgggggccacctcttctcgaagctgagctgaataatgatggtgatgaagactggcttctaactaagaagcagctagggaaacccgcggccaaaagacctgatgacaatgaccatacatgtgttgcgagtgcaagtttgcacccgagtgcacattttcttccggcagctgagatttatgcactgccttatacagttccattttgattccgcttagtggaggggctgtctttttgttctcccctgcaaagagcggcttcgtggcgggattgggtttgggtggcgaattctaacttgtacagtcttgagaatttactaatagaaacaagagaaattttttgc

SEQ ID NO: 33149 - DNA, 363 bp, Gossypium hirsutum
  Clone ID: LIB3149-019-Q1-K1-A1
atgcgacagtggtttgaagacccttgaaacggagcatcttaccaagtcaagcacccttgtgcaaaactatactgttataataacaccagaagagataccagctgcgatgatggaggatcgtcacaccgtgccttacccttatgctgtcctgtattgccatagccaagtgactgaaaacagggtgtttaaggtatcattggacggtgagaacggagataacgtgaccgcggtggctgtttgtcacacggatactacgcaatggaaccgcaaccacgtgtcgtgtcgtgttttggggaccgagccaagaacgcccggtgtatgccatttctttcaggggaataactttgttctggttccagaccc

SEQ ID NO: 33150 - DNA, 398 bp, Gossypium hirsutum
  unsure (1)..(398): unsure at all n locations; Clone ID: LIB3149-019-Q1-K1-A10
ggtctggcgatggcgacgacggtggtgaatagcgcgttgcaggcgatccgtgagaggggtctccgcactttcttaagggagctcaaggatgatggcttcacgaaatgcttcttcgatggaaaccttctgcaaaccaaaatccacaacataggggcaacagttgtgggtgttgataaatttggcaataagtattatgagaaactcggagacacacaagctggaagacacaggtgggttgaatatgcgaaaaaggatcgttatgatgcttctcaggtaccaccagaatggcatggttggcttcacttcataactgaccataccggtgatgagcttttgatgctaaaacccaagaggtacggngtggagcacaaggagaacttatctggtaaggggaatga

SEQ ID NO: 33151 - DNA, 304 bp, Gossypium hirsutum
  Clone ID: LIB3149-019-Q1-K1-A11
ggaagagcaagaaaagagattgtttaattcattttcctttgaagactatgcatggagagtttataatgaatgttatctctttaatgatccacttgatagatatcgaatttaatgggtttttttttgtaatttttctcgattttagtactgttgctgttataacaatttgaagatcgtggattcgagtgtgtttaaaaaataatatttttcgatttgattagttgggatttaaagagatttatgggtaatttaagaaatatattaatttttttcttttatctttataaataatggaatttttgtc

SEQ ID NO: 33152 - DNA, 196 bp, Gossypium hirsutum
  Clone ID: LIB3149-019-Q1-K1-A12
gaacattctttgcataatcaatattcatcaagaaaagaatatagaggaacaaatgtatcttaagctttatatatgccagatggatcagcatcctgaacaatccatggatgctcaagaagcttatgtagtgggaggcgctgggaggaatctttgacaagcatctgtaaataatgttgaaatgtgttcagtatatgcc

SEQ ID NO: 33153 - DNA, 369 bp, Gossypium hirsutum
  Clone ID: LIB3149-019-Q1-K1-A2
aaaaaaaaataattaaaatatactaaacaatttatttttttaccaaagcctaaaacaactcaagagagctattcatactacaataacaacccattcaccccctcatgcgatacaagtaacatcgttacaccgtatactcaaccttacactgccctgccttcatcatatacaagcaaaaacaaaacaacatgctcaggggatgatattacgacatcaactgatctatattcccccaccggcaacaacttgagacccaaactaaagaaaaaaaaccggatcccgttgaaaattgatattgatactaaaaagacagggacacccgatggattttatatctataaagtggggattagagttacctgtgaagac

SEQ ID NO: 33154 - DNA, 399 bp, Gossypium hirsutum
  Clone ID: LIB3149-019-Q1-K1-A3
atgacgatgaaggcaaagtttgtggtgtcacatctgaaggtgaaactgccaggtgtaagaaagttgtttgcgacccttcctacttgccaaacaaggttaggaagatcggcaaggttgctagggcaattgctattatgagtcacccaattccaaacaccaatgattctcattctgtgcagattatcctgccacaaaagcagttgggtcgtaaatcggatatgtatgtcttctgttgttcatattctcacaatgttgctccaaagggcaaattcattgcatttgtttcaacagaggccgagacagatcaccctgagagtgaactaaagcctggaattgaccttctaggtcccgttgatgagatattctttgatatctatgacagatatgaaccagtcaacg

SEQ ID NO: 33155 - DNA, 342 bp, Gossypium hirsutum
  unsure (1)..(342): unsure at all n locations; Clone ID: LIB3149-019-Q1-K1-A4
ggccgaggaggcgtacgatgacgaacaanttacaatatctcaaccctttttatttattcccaaccgtccaaaaacccaagttaggttttctaccttaatgacgacccaacaaccctctgatgcgttacaaggaacaacgatcagtttataagcaacagtacattgcccgccttcatcaattacaacaaaaacgagacaacattcaagggagatgaaaaaacgacatcaatttatttattttctttcaccggcaacaactagagacccgatctgaagaagaaaaacgggatcccggtgaaaattgaaacagataccaaaacgaccagaaaagtggatggactg

SEQ ID NO: 33156 - DNA, 388 bp, Gossypium hirsutum
  Clone ID: LIB3149-019-Q1-K1-A6
cgcctcttcccatctctcaacccttttcaacttaaccctttcttccaaaaacccaaattcccacctcaccttcacttacgacccattcaccctctcatgcgttacaagtaacaacgatgtgtttataggcaacggcacattgccggccttcatcagtaacagcaaaaacgagacaacattcaagggagttgtaataacgacatcaagtgatctagatgccgacaccgtcaacaacttgagacccgatctgaagaagaaaaatgggatcccgttgaaaattgagatggatactaaagtgacagtgaaagtggatggattgaagagcaagaaagtggggattagagttacgtgtgatgacattaaagggactgtgccgaaaggtaagtca

SEQ ID NO: 33157 - DNA, 342 bp, Gossypium hirsutum
  Clone ID: LIB3149-019-Q1-K1-A7
catttagccgttctttttgcactgaacaacgaattctttggggtatttttcaaaagaagcgaaggcatcacctgatataaggaaacacttaaaaccctaaaatctttgaattcacaaatatgtggagaaggctgttgacttcacagctcaaaaccctagccacagcttcatgcagatccgcttctaaaacggtgccgcttccattcaaatctaacgtttcatcatcgcctttttcctgtctcctcactcgtcacttatacgcctcgtcagcggatagtgctgtaaagaacacagttgaggatgtcatgcctatcgccacttgtcatgagcgcgaagagcttg

SEQ ID NO: 33158 - DNA, 263 bp, Gossypium hirsutum
  unsure (1)..(263): unsure at all n locations; Clone ID: LIB3149-019-Q1-K1-A8
ccgggccgacccacgcgtacggatttataccttttttttttactaattaattttttccccggcgnacaaaaacaaagaagccgattttttatttaatatcaacacacactcaataccctacaaatcatagaatcacacaattattttatttaatacttataatttttctttttaaatccctaaccacaaatacaagcaaacacgcaaggaaaacggaaatttttttttttattttttactttccaacaccgncaacatcctga

SEQ ID NO: 33159 - DNA, 405 bp, Gossypium hirsutum
  Clone ID: LIB3149-019-Q1-K1-A9
gatttattgtccttactaattcaaatatagattaatgagtttggtttattttttttaaaacatatcattatataaggctgatttgaagttaagaaatcatctaaggtcgtgcgatttttgaaattaaagttttagtcttgtgatagttgtgtcggactaagatttgaagttgccagatgacaaaaggagtaaaagagcagattgagcctagggagactcatgggagggatatgctgtcgactttgaaaggggatcaaaggacctccttacagattcatccatggcaacaacaaggaagttaccaaaatgaaacaaaaagctttaagcaaatctgtgggcttgacagatgatttatttcccaaagtagagccacatttttacacctggaccaacagatatgggaag

SEQ ID NO: 33160 - DNA, 395 bp, Gossypium hirsutum
  Clone ID: LIB3149-019-Q1-K1-B10
gcaggtaataggaggactgccatgagcattaccagaaaagtgaaaggagttggctgggatgtttcggctattggaaacgctgtctggggtggtgccaaattggctgatattcttgaacttattggggttccgaagttgacaagttgcactcagagtggaggaaaacacattgaatttgtgagcgtgataagtgtgaggaggaaaacggaggtccatacaaggcatcgattccacttagtcaggccacaaaccctgaagcagatgttttacttgcatatgagatgaatggagaagtaagcaacttctatcttatgatcatattctttcccacactcgggaaaaccagaaatcaaactgaactcaacaagtatgctaaaatggttgcatcttttata

SEQ ID NO: 33161 - DNA, 353 bp, Gossypium hirsutum
  Clone ID: LIB3149-019-Q1-K1-B11
gcgacattgatggctatagcagtgctgagattcgcgtgaactctgaagatcgtgacagtcgaaagttaagactcaattatattgatctgggatgtcaatatctgaagaacagagaggggttctgagggcaacaatggaactctgacttctatgctatatccatggggggtcctatgattggcttgagagcacatatgagaaggatctaatactctggtgcttctgtatgtgtaacaatcgtaaacatgtaaatggagagggtcagtgtcaaagagaagggttactactgccttagggccaaaaggaacaaacctttcatatatatatatatataactacaattttggcatggc

SEQ ID NO: 33162 - DNA, 293 bp, Gossypium hirsutum
  unsure (1)..(293): unsure at all n locations; Clone ID: LIB3149-019-Q1-K1-B12
gttgttttggctataaactggcgaaagatatcagcagagaggggaggacttcaatgagtggagacctcactaacacaaagggaactcgtaggatgctgggttactccattttttggagcgtcttgaaccttcggctaccatcacttctccaccaacgggacgctccaattctaaaactgaattttatgtataaaattttaatacttccaactcgatcacaaaatagaaaacttcctcccgnaggaaatcaagtgtatgcaccaaggctggatgatccatactcaaaaaacatg

SEQ ID NO: 33163 - DNA, 81 bp, Gossypium hirsutum
  Clone ID: LIB3149-019-Q1-K1-B2
atcactttttgttagatgacggatgagctaataagcccgaacagagcgacacccccaacaaaaacacagcctgaatggcaa

SEQ ID NO: 33164 - DNA, 413 bp, Gossypium hirsutum
  Clone ID: LIB3149-019-Q1-K1-B3
acgataagaaacctgaggactgggatgagagagccaaaattcccgacccaaatgctgtaaagccggatgattgggatgaggatgctcccatggaaattgaagatgaggaggctgtgaaaccagaaggatggttagatgatgagcctgaggagatagatgatcctgaggcaaccaagccagaagattgggatgatgaagaggacggtgagtgggaagcccccaaaattgataacccgaagtgtgagacagcccctggttgtggtgaatggaagaggccaatgaagatgaatccagcttacaagggaaaatggtctgctccactaattgataaccccaattacaagggtatttggaagcctcaagagattccaaaccccgactacgttgagcttgataagcctgactttgagcct

SEQ ID NO: 33165 - DNA, 257 bp, Gossypium hirsutum
  unsure (1)..(257): unsure at all n locations; Clone ID: LIB3149-019-Q1-K1-B4
aggcgtacgccgacgagaaaccttatgactggtaggagttatatttacttccggacccaaatgctgcaagggcgggtgattgtatagacggtgctcacaccgaaatcgaggaaaacgaggcacccccaccagacagatttttacctgataatccttgtttgataaacgacactgaagcanccaagcaagaagactgacatgatgatgaagaccgtgagaggaaagcccccaaaacccatacccctaacagagagaca

SEQ ID NO: 33166 - DNA, 227 bp, Gossypium hirsutum
  unsure (1)..(227): unsure at all n locations; Clone ID: LIB3149-019-Q1-K1-B5
caaatggtgcattactggatatttgcagacttgtgtatctttctttatgcaaagatgccggctgaatattgtcttgaggcttatgaacgcatatgaactgaaggaggaaggatacccnaaagaaggataaaagatcagcctgaagagataaaatgatccagacgcaaccaagccaggaaaatgggatgatgaacaggacagggagtgggaagcccgggggggcggtt

SEQ ID NO: 33167 - DNA, 404 bp, Gossypium hirsutum
  Clone ID: LIB3149-019-Q1-K1-B6
gtttgtttgtgtgaattttctgagaaagataaactgaggttgcttcctatgtgtagccatgcttttcatataaactgtattgacacctggctcttgtcaaactcaacatgccctctttgtagaggtacccttttcactcctgggttttcaatggagaatccagtttttgattttgatgacttaagggaagatgaagggtgtgttggtaatggtgaaaatggatatacccctagtcaaaaaacagtggaaatggaagaaattgttgttgacaaaggggttttacctgttaggcttgggaaattcagaaggataaatggtgaaccagatgaagcaggtggtgaaaccagtagcagcaacttagatgcaaggaggtgtttttcaatgggttcttatcaatatgtgct

SEQ ID NO: 33168 - DNA, 310 bp, Gossypium hirsutum
  Clone ID: LIB3149-019-Q1-K1-B7
gcatggtggcaaatgagatcgggtttacatgctctaatgtgcatgtttaattttgggggagagatgtttggcttgtggttttggttcttattattcttactagtaaaatgagtgatttatggattagaaaagacttcgggaaggtccttatgattagaaactatcgtcatattggataattattatgattatattttaggatgtgtaatgtttgcttcaaattttgtctgatttgcattctacatgcgtgatccttaaatggaaggtttatggttttccggaagtctgtgcttatataattggagttttg

SEQ ID NO: 33169 - DNA, 416 bp, Gossypium hirsutum
  Clone ID: LIB3149-019-Q1-K1-B8
gcttaacaatcttttgatggaagtggaatctgcattaggagaatccagggcaaaggggaagatagtagtaggtcaccatgcaatcaagagtgcaggacaccatgggaacgctaaggagctcaacatttatctccttccacttcttcagacatacgacgttgatctttatattaatgggcatgaccattgcttacagcacataagcagcagtgacagtggaacccaattcatgacaagtggagggggatcaaaggcatggaggggagacgtgagttggtggaatccacaagaactgaaattttatcatgatggacaaggtttcatgtcagtggaaatgactcccactgaagttagcattaaattctatgacgtttttggtaatgttttgcacaattggagcagttccaagcaacttt

SEQ ID NO: 33170 - DNA, 404 bp, Gossypium hirsutum
  Clone ID: LIB3149-019-Q1-K1-B9
caaaaaataaaaccctttgaaaaccaaagaaggaagaagaagatgtcgtggcaagcttatgtagatgatcacttgatgtgtgaaatcgaaggaaaccatctctctgccgccgctatcatcggccaggacggcagcgtttgggcccaaagcgccagtttccctcagctcaagcctgaagaaattagtgccatcatgaatgactttaatgaaccgggttcactcgctccgaccgggttgcacctcggtggcacaaaatacatggtgatccaaggcgaaccgggagctgttatccgagggaagaagggacccggaggtgttactgttaagaagaccaatatggccttgattatcggaatctatgatgaaccaatgacacccggccaatgcaacatgatcgtcgagag

SEQ ID NO: 33171 - DNA, 285 bp, Gossypium hirsutum
  Clone ID: LIB3149-019-Q1-K1-C10
ggaacatgtagtgatacttttagttgcttctcttagcattttcaaacccttttaaagattttgtttaaaatgttgtaaggattgttttcattttgtttggaggttttcattgagccctatgctcttatgttattttggtttggttgttacattagaagatattttacttatttacgtgagttgttcccctctataaaatgtgtgccgcagtttttgagaccgaattaaatctcactgagtattcagaaaaaaaaaaaaaacaaaaaaaaaaaaaaaaacaaaaat

SEQ ID NO: 33172 - DNA, 176 bp, Gossypium hirsutum
  Clone ID: LIB3149-019-Q1-K1-C11
agtttaagaataattggttaaattttcggtttctattgttggtcttggtagttggaaaaaaaaaatgtattgttttccccaatctcgaggtcattccattcttgatggaaattaacaggttaagtcggtttctttaatctttaaatataaagataccagatttctttggattcttt

SEQ ID NO: 33173 - DNA, 58 bp, Gossypium hirsutum
  Clone ID: LIB3149-019-Q1-K1-C2
gctaggaattaaacaatatttactcacactttttttttacttcagagaaacccaataa

SEQ ID NO: 33174 - DNA, 177 bp, Gossypium hirsutum
  Clone ID: LIB3149-019-Q1-K1-C3
cggagatttccttttaggcattcgttcattctgaatgtcatatgttctgcgttagctgctgtggtaaacttgttccattctgtgaaacttaataagcttttggaacttgaagactttatattagcatattcgagaaacttaaaaaagaaaaagaaaaaaaagcgacgttgcttgatt

SEQ ID NO: 33175 - DNA, 318 bp, Gossypium hirsutum
  Clone ID: LIB3149-019-Q1-K1-C5
cttacacctttaaacactgtgcatagttattcaattaagcccaccagatgccaaggcttggaaaaaccctcactggggagaccactaccctctcggcggagagtgcacacaccattggtgatgtgcaggctaaaatgcactataatgatgggatatctccggatctccctaggcttatatttgctggcgaacaacatgaggatggtctcacgctatccgtctacaacattaagaaagaatccacccttcacttggtgcacaagaattcgtggcggcatgcatatctttgccaagactctcactggaaagacaattacc

SEQ ID NO: 33176 - DNA, 115 bp, Gossypium hirsutum
  Clone ID: LIB3149-019-Q1-K1-C6
ataagacctaaaatcactttacattttttgtcattaaagcccacaagaatcaaagcggggaaattacacttactgacaagaccattaccatataagttgatagtacacacaccat

SEQ ID NO: 33177 - DNA, 410 bp, Gossypium hirsutum
  Clone ID: LIB3149-019-Q1-K1-C8
ctcaacgcctctctctctatcttctacaagccggcgagggaaggaaaacctgagagggtgaaaaatgccagctggtcacggtctccgatctcggactagggatctgttttccagacccttcagaaagaagggttacatcccattgtccacttacctcaggacctacaagatcggtgactatgttgacgtcaaggtaaatggcgccgttcacaagggtatgccccacaagttctaccatggccgcactggtcgtgtctggaacgtcaccaagcgcgccattggcgttgaggtcaacaagcaggttggtaaccggattataaggaagaggattcatgtcagagtggagcatgttcaaccttcaaggtgcactgaggaattcaagctgaggaagctgaaaaatgatcagctta

SEQ ID NO: 33178 - DNA, 403 bp, Gossypium hirsutum
  Clone ID: LIB3149-019-Q1-K1-C9
tataatttaggaacaagcctaaaaaaatatatttaatttaatttttacatattttcttaagtactaaattaagtgacaccagataaatatttatagcagacgcagtataggttacacggtaaccatccccgattctcttgtgattagcccctacacagaggaaaaaaaagaagaagaaggaaccaccttgatggctactttggcggcggttgcagctcgtaggatagcgactgtacctcgaacaccacctccctgtcaagccgcttctctcattacccgccggggtcttgccggcgctgcagatcaccatggacccccaaaagttaattgttggcaagaaccaatgaacccagctaattggaaggaagagcattttgttatcgtctctttaactggttggggg

SEQ ID NO: 33179 - DNA, 235 bp, Gossypium hirsutum
  Clone ID: LIB3149-019-Q1-K1-D1
acgatatcatacttacaaatatttattagaacacaaataaaagcattggacacattggatttacagaattaaaaagacaaacatgccagaaaatacaaagctcctccccgggactggatattgatctaaacgtacattttcagatcaaaatacatgagaaagggaggtggcactttattcattaaatagatgaatagtgcgttaagtagcggcaacaatagcatcatgggatact

SEQ ID NO: 33180 - DNA, 296 bp, Gossypium hirsutum
  unsure (1)..(296): unsure at all n locations; Clone ID: LIB3149-019-Q1-K1-D10
ggatacatcttgcgccgttttttctancgtttgttcaccacgangcaagagggnggaagagcgggccttacgggagaacgaagcgaaaccganggaggnacaggaaaccgcaaatgcatgaggagccataaccacaaccaagaagggagcaaacccaaccctttcaacctatgctgaagtccttgccttaatcaatggagcttttgattattatcatcaaaccttaattaactatgcctatcttttttttgttttaaaattcttacattttcttagtatagggttttagaaatttt

SEQ ID NO: 33181 - DNA, 371 bp, Gossypium hirsutum
  Clone ID: LIB3149-019-Q1-K1-D11
gtctgatatttgaagccattccttggatgatgatcacacttgctgaaatcaataatcattcatggtttgtgacgcacttgcccagactgctaacatacacagcacacagctgcattattaccgtagcgataaccttacattttctatgcaaagtataaacgagataatgaaaactgcggaagaggcaagaattccacctccatccttagtgcctgtcaagggctctggttggggccaacacgatgatgataaagtggtagacatgcttctggaagtgaatgaagacgtcgaacaacatgtatatgataaactggctatggaagtacatgcaagtgtagaatatactatatattcagcacacgtaatcttta

SEQ ID NO: 33182 - DNA, 238 bp, Gossypium hirsutum
  Clone ID: LIB3149-019-Q1-K1-D12
aaaaaaaaaaaaaaaaaaaaaaaaaaaaaataaaaaaaaaaaaaaaaaaaaaaaaaaaaaaaaaaaaaaaaaaaaaaaaaaaaaaaaaaaaaaaaaaaaaaaaaaaaaaaaaaaaaaaaaaaaaaaaaaaaaaaaaaaaaacaggaaaaaaaaaaaaaaaaatagagggtagggggaagggagtttttgggaaattggttttgggatgaagaaaatggaatttttgggggtttggcgt

SEQ ID NO: 33183 - DNA, 90 bp, Gossypium hirsutum
  unsure (1)..(90): unsure at all n locations; Clone ID: LIB3149-019-Q1-K1-D2
cggaaaataattaggaggcggtgttgtgcgttgtcaacaacaacagagactgttcattttttngggatattgtttccttatctcaagttt

SEQ ID NO: 33184 - DNA, 399 bp, Gossypium hirsutum
  Clone ID: LIB3149-019-Q1-K1-D3
ggctcggcacaaagctatggcagtgcaacgtaccctactcaagagggtcacactccctcctatggtggtcaaggagatgctggtcaagcacctacttctacccaaccttctgcggtgggtcagcaagggtacaatacaagtcaggtgcctagcccaaatcctggcagttatccacctcaaggaagtactcaacctagttacagtcagagtggctatgggagtcaaccaccagctcagtcgggctatggacctgggtatggaccaccacaagggcagaaaccactggtcaatcaccctgcctatgggcagacacagcagtctcctaccaccccaggaagctatggccagtcatgatatcaatcacagccttcatcttctggctatggacaagcagaatca

SEQ ID NO: 33185 - DNA, 417 bp, Gossypium hirsutum
  Clone ID: LIB3149-019-Q1-K1-D4
gcaggaactggagactgcgaagagcagctcatctgttgagaagaactatgagttgcctgacggacaagtcattactattggagctgagagattccgttgcccggaagtcctcttccagccatctttcatcgggatggaagctgctggaatccatgaaactacctacaactctatcatgaagtgtgatgtggatatcaggaaggatctctacggtaacattgtgctcagtgggggttcaaccatgttccctggtattgcagaccgcatgagcaaggagatcactgcacttgctccaagcagcatgaagattaaggtcgttgcaccaccagagagaaagtacagtgtctggattggaggatctatcttggcatcactcagcaccttccagcagatgtggatttccaggggtgagtatga

SEQ ID NO: 33186 - DNA, 316 bp, Gossypium hirsutum
  Clone ID: LIB3149-019-Q1-K1-D5
gctagaactcgagactgctaacagtttttctattttagagaagaacgatgacttgcctggcggtcaagtcaatactagtggagctgagagatttccactacccgaagttttataacagccaggcttcataaatattgaagctgctagactaaatcaaactacatacaactctattatgaagagtgacttgaatatcaaaaaggatctctacggtcacattgacctaagcaggggtacaacgaagctcccttgtgtcgcacaccgcatcagcaccgaaatcactgcaattgttccaattaccatgaacattaatgtt

SEQ ID NO: 33187 - DNA, 284 bp, Gossypium hirsutum
  Clone ID: LIB3149-019-Q1-K1-D6
gacggtttgaaaactttggatgaatttgtttagttaaattcgaaatgtctcgggtaggggtacatatctaacaagcgacatgaacaatcatggaccatatttggagtaccaaacacctgcccaacagggcaacaccgacagaagctcactccatcaattttttaaaagatgggcacttctttaagatcaattggtctgacaaacacaacctttgctgatactgtgtctgtaccgaacttcctggcgacgattcacttattattgttctaaaccactattattac

SEQ ID NO: 33188 - DNA, 399 bp, Gossypium hirsutum
  unsure (1)..(399): unsure at all n locations; Clone ID: LIB3149-019-Q1-K1-D8
ggggtttcggctttgtaacttacaattctagtgaagaggtggatagtgctgtcaaaacatttaatggtgttgagttggatggcagaccaattcgagtctcagtggctgagtctaggccgaggcgtcaattttgagcgcgactggtatctactggtactgctgaagttctttggacacactgagaacagctctttatgttcctaggaatctacaaacatgcaaattgtagcagctgcatttggatggtattcgcaatctgtgcttagattagattagaaagagccgataacgagatgataatatcaattgaaatattttggttatatgttccgaaagtatcatgattcagtgactgacatgtgccttaattntgtttattcaagtgtgggatttccagtt

SEQ ID NO: 33189 - DNA, 400 bp, Gossypium hirsutum
  Clone ID: LIB3149-019-Q1-K1-D9
gatacaactggcgccggggactcttttgttggtgctttactatgcaagatcgtggaagacccaaccatacttgagaatgaatcgaaattgagggaggtactgaaattcgcaaatgcatgtggagccataaccacaaccaagaagggagcaatcccagcccttccaaccgaggctgaagtccttgccttaatcaatggagcttaggattattagcagcaaacttcaataatctatgctcatctttttctttttttaatttcttacatttcagagagagggttttgaaaggtatcgattttttcttcccctcttttgatttcctttttccctcgtttttcctccatccctccctgtgtagtgttgttaggctttgtgctttcaaggggagtaggaataaaaa

SEQ ID NO: 33190 - DNA, 348 bp, Gossypium hirsutum
  Clone ID: LIB3149-019-Q1-K1-E1
gtgcttatggtgctcatggtgcttatggtgctcatgggtttggtcatggtcatcatgggaagttcaaacatcatggtggtgggaagtttaagcatcatggggggaaattcaagcacgggaagcatgggaaatttaagcacggaaagcatggaggcggcaaattcaggaagtggaagtgatgttactgcccgcaaaagcatggagaattgggagtcaaaactgatagtgtcgaatgaatgaatgtcataataatttgacttcaactgctttgtattgaataatcacagacttgtttttctttctttttaattgttgacatataacaataacaacatttgattcaacgat

SEQ ID NO: 33191 - DNA, 399 bp, Gossypium hirsutum
  Clone ID: LIB3149-019-Q1-K1-E10
gttctagatctttctagacttgaagatggctgcctagagttagattttggaatgttcgatcttcatggaatcttcaaagaggccattaatcttataaagcccattgcatccataaagaagctatctatgactatgatcctggcacctgatttgccaatgtacgctgttggcgatgagaaacggcttatgcaaaccattttgaacattgttggtaatgctgtgaagttcacaaaggagggctatgtttcaattatagcttcagttgcaaaaccagagtctttaagagactggcgacgtcctgaattttacccagtgtcaagtcaaggccacttctacttacgagtccaggttaaggattctggttgtggtgttctcccacaagatataccaattcttttt

SEQ ID NO: 33192 - DNA, 127 bp, Gossypium hirsutum
  Clone ID: LIB3149-019-Q1-K1-E11
gcgaaactaaaaaggattcgataatcagtaataagatgattcacaaatcatcccttcaaattcaatctatggcgtggacaaattattcattaaccgaaaaaaaaataaaagatctgactaagagaac

SEQ ID NO: 33193 - DNA, 396 bp, Gossypium hirsutum
  Clone ID: LIB3149-019-Q1-K1-E12
agaacaagttattgatggcctcgataaaactgtgaaggccatgaagaaaggagaacttgcacttatcactattcagccagaatacgcgtttggttcgtccgaatcacagcaggagttggctgttgttcctgcaaactcaactgtgtattacgaggttgagatggtctcttttgtgaaggagaaagaatcttgggacatgaatgctcaggaaaaaatcgaagctgctgggaagaagaaagaagaagggaatgctttattcaaggcaggtaaatatgaaagagcattgaaaagatatgagaaggcttttaggttcatagaatatgactcttctttcagtgacgaggagaagcagcaagctaagttgctaaaagtaacttgcaatctcaacaatgcagc

SEQ ID NO: 33194 - DNA, 421 bp, Gossypium hirsutum
  unsure (1)..(421): unsure at all n locations; Clone ID: LIB3149-019-Q1-K1-E2
gaacaattggaaaagaagaaagcagaatatgcagagaaaatgaaaaacaaggtagctttgcttcacaaggaagcagaagaaaagagggcaatggttgaagccaaacaaggagaagaggttctcaaggcggaggaaatggctgcaaaataccgtgcaaccggacaaactccaaaaaaggtccttgggtgtttctgaagttcaaaagcttggggtctgaggttgaagcaaatgtgaattttgactggtgttgtttgaagcttcccgtttttcatctgtatatctcttggtttctatgtttgttttgtgtgtaaacagtaacatcacaaatatttaatctaccatcgtatttgttgattgatatagttttcgttttggttcttttagacacaagttgngaggttntccatctggacttattaaa

SEQ ID NO: 33195 - DNA, 386 bp, Gossypium hirsutum
  unsure (1)..(386): unsure at all n locations; Clone ID: LIB3149-019-Q1-K1-E3
atttacctggattaaatggaattgggttaaaacctaaaaccggcggccgtttaagattgttagggtcccgattgattccccttcggaaaatccgtaaagggaccatttaaagggaccttttcccctaaattatggattgattgggcccgggtttttaaaaccaataaaatgtcacaagggttggcttaccttttattcttatccccattctaatttaatgacatacatatcaattagatccgacaatgaatcaacaaaatccctttatttgaactcctaaattttctcttttgtggaaatctctcactcttttggaatccctatacgaatcaaatcgaaacnccggattgatttattttatttgaaaaaaaaaaaaaaagggcggc

SEQ ID NO: 33196 - DNA, 329 bp, Gossypium hirsutum
  Clone ID: LIB3149-019-Q1-K1-E4
gtagtgctggagttcctatcttggttcattttaataattttctgtgtgaaaaaagaaaaagtgttcaaaagaaagtgttgtttaatttgcactctagaaggaaaatcttgagcttaacggagtagggtttttttcaatttgtgttgattcaaattttaagaatgaaatcaacttaagttgcgataagaaatttaagtattgaatttaaaaaaaaaaaaaaaaaaaaaaaaaaaattaaacaatgggtcggtcgatgtattagatctgagctttctttcgctttcacgcaacaatatcgctttattttaaagtcaccaaatttcaatttt

SEQ ID NO: 33197 - DNA, 317 bp, Gossypium hirsutum
  Clone ID: LIB3149-019-Q1-K1-E5
gccttcatccacagaaagaatatcatagattacgtagaataatgggtcaacggctgacataccggacccgccatagctatgccaccaagtccaaccagcaccgggtcgtcaaaactcctggtggaaaacttgtctaccatacaactaataagagagctagcggacccaaatgtccagttactggcaaacgcatccaagggattcctcacttgagacctgcggaatacaagaggcctaggtcacctaggaacaggtggactgcgaaccgtgcctatggtggtgtgacatactgcagtgcattcaagtagaggatcatt

SEQ ID NO: 33198 - DNA, 388 bp, Gossypium hirsutum
  Clone ID: LIB3149-019-Q1-K1-E6
atttgtgaactgttcaacactgtatggtgaattactcgtttttcttttataaaaacactcaacctgcttgatattttaagacgggatttcttagtgaaagatgttaataagcaagactcgcagtcgtggtcaatcatatatcttttctatcccttaaataatcatatatgatcgggatcaattaagatgtatttttggttcagtgtttcatatgcatttctctccatcctgatcgcaggataggaagatttccccctgtggtgaggactgcagttcctgtggatgggaggtttgagcatatagttctttcctgcaatgcaacctctgatcatgctattatttggatagaaagagagtcccaaagagctcttgatttgatggtggagaa

SEQ ID NO: 33199 - DNA, 170 bp, Gossypium hirsutum
  Clone ID: LIB3149-019-Q1-K1-E7
gtctgggtccagataaagaatgtattgtgtttctctgagataatgggcaacggctgacatagccctacctcgccaagctatgacaccaattccgacccgaaggtgttcgtcaaaactactggcggaaggggtcactactatacgacttatatccgtgcaagaagtatcta

SEQ ID NO: 33200 - DNA, 391 bp, Gossypium hirsutum
  Clone ID: LIB3149-019-Q1-K1-E9
tgcgagtatacaatggcaggtcggggtaaaactcttggatccggggcctcgaagaaggcgacatcgaggagtagcaaggccgggcttcagtttccggtgggtcgtatcgctcggttccttaaggctggaaaatatgctgaacgtgtcggagctggagctcctgtttacctagctgccgttcttgaatatcttgcggctgaggttctcgagcttgctggaaatgcagccagagacaacaagaaaacccgaattgtgccacgtcatatccagcttgctgtgaggaacgacgaagaactgagcaaactacttggagatgtaacgattgccaatggaggtgtgatgcccaacatccacaacctcctcctccccaagaaagccggaggctcctcaa

SEQ ID NO: 33201 - DNA, 293 bp, Gossypium hirsutum
  unsure (1)..(293): unsure at all n locations; Clone ID: LIB3149-019-Q1-K1-F1
ccggacttttaaccggatatacgggcaacatagaaacagagatttgtatttggtgtgatttcagtttgtatcagtggggggaaatcgaacccctatcaggttcatgttgggagcggttcctagtatggccattgttttatgtgcagttcctgaatccaaaagtcttctttttcagttgtnnaaaaaaaaaaaaaaaaaaaaaaaaaaaaagtaattacaataaaaaaaaatattaaaaaacaaaattaaaaaaaatnctttaattaaataaaaatacaaaaaaattttttacc

SEQ ID NO: 33202 - DNA, 398 bp, Gossypium hirsutum
  Clone ID: LIB3149-019-Q1-K1-F11
cagaagcaagcagctagcagtttgctttgaattatactactataactccaccactttccaccagatttacattgcagatggcttcatcaatgctgtgggcttcaagggcggcttcttatcttaggatctctgtcttccacagaggcttttccactgttctaaaggatctgaaatatgcggattctcatgagtgggtgaaggttgagggtaactctgccactattggtattactgatcatgctcaagatcatttaggtgatgttgtgtatgttgaattacccgaagtgggagctgctgtaaagcaaggtgaaagttttggagcagttgaaagtgttaaggctactagtgatgttaattctcctgtttcaggaaaagtggttgaagttaatgaagagctc

SEQ ID NO: 33203 - DNA, 263 bp, Gossypium hirsutum
  Clone ID: LIB3149-019-Q1-K1-F12
ctcattgccaaatatcagcaagataatgctaaggcctaagccctcccaatgaacgtctttcacaatgattgtcgcatgcattttgccatttttgtatttgctgcttttgtgtgtaatgacctacttgcttttatgttcgagtgaaaaaataaattaactcattgtactcttaaataaaattggttattaagttatcaatgagtttttccataaaaaaaaaaaaaaaaaaaaaaaaaaaaaaaaaaaaaaaaaaaaaaataaaa

SEQ ID NO: 33204 - DNA, 218 bp, Gossypium hirsutum
  Clone ID: LIB3149-019-Q1-K1-F2
ccggacttttaaccggatatactggcaacatatattcatagatttgtatttggagtgattggagggtgtatcagtggggggaaatcgaacccctatcaggttcatgttgggagcggttcctagtatggccattgttttatgtgcagttcctgaatccaaaagtcttctttttcagttgttgacaaaaaccaataaaggtgcaaaaaatctaatggaca

SEQ ID NO: 33205 - DNA, 341 bp, Gossypium hirsutum
  unsure (1)..(341): unsure at all n locations; Clone ID: LIB3149-019-Q1-K1-F3
gggaagttcagcactcgattgatcctcgtgcgccggacttaattaccttggagagcatgctccagaaaccatcatggccccgtctctcgtttactgcagaagcattgctgcagcaacaggaatctaaaatatatgaaagtgctagtgctttatctttagcaacattcgcatcactattgattgagtttgttgcaaggctccaaaatctcgtggatgcatttcaagagcttagtgagaaagcaaatttcaaggttcctgtggaccaatcacctcaaaaggaggctccaggattntggagaagattaagaaatngcttccagtcaaaagaactanattctatt

SEQ ID NO: 33206 - DNA, 302 bp, Gossypium hirsutum
  Clone ID: LIB3149-019-Q1-K1-F5
gccaggaaggccgtgagcttcgtcgtaggttgcctcacccaaggttcaatgctcagcctgtgctggtcatgatccctcctggcgagcagaccatgggccgtggtgactgagttcattctggacacgtgctgaattcgaatagcttgttgccgccttgcccatgtttttgtcagcgtgatgtcatgcgataaaatagggttgaaggttatccacgttgttcaaattcttaagtacccactgaagtatgatcgctagttgcggtcaagcacaataacatattgacggacatatggtttatacgt

SEQ ID NO: 33207 - DNA, 312 bp, Gossypium hirsutum
  Clone ID: LIB3149-019-Q1-K1-F6
cccatctatctctcatacttactctactttccctttgaggttaggaaaacagctgagaaattaaggaatggtgaccttcctatttacctcggagtctgtgaacgagggacatccgcaagctgtgtgatcagatctctgatgcagtcctcgatgcctgtttggcacacgatcctgaagcaaggtggcttgcgagacctgcatcaagacaaacatggtgatggtgtttggtgagatcactaccaaagccgtcgtagactacgagatgattgtgcgtgacacctgtcgtggcatcggtttcacatctgacgatgt

SEQ ID NO: 33208 - DNA, 396 bp, Gossypium hirsutum
  Clone ID: LIB3149-019-Q1-K1-F7
atactccggaaacctcaatgaaaccaagtatacaggaatcgggatcggttctgaaggagactggattgttgttgtcctaacaaccagtacaactgaaggaaactacgctacggctactactgctgctactactagtgcggccaattcagtttccaagataaccataattcatcaccttctattgctcctcatggctgctttctacatgttatgagcagctaaccctttaaagactacacaaaaatcatatgttttcatgtactaataagcttggattatttttttccctttttgggaaaattttcatatgattccgggttagataggtaatttcttattgttctcggtgtgggttttgtccggataacaataatgtgatattttagaccttggatt

SEQ ID NO: 33209 - DNA, 304 bp, Gossypium hirsutum
  unsure (1)..(304): unsure at all n locations; Clone ID: LIB3149-019-Q1-K1-F8
ntccgatacatccggaaacctaaatgaaactcttttttcatgcaatcgggatcgactcttaaggagactgtattgttgatggcctaacaaccaattcaactgaagggaactacactactgctactactgcagctactactattgcctacaattgagctacctagataaccatacaccatgaccttctattgctccagatggatgctatatacatgttatgatcagctaaccctttaaagactacacaaaaatcatatgtgtccatgtactaataaacttgaattatctctatacctttttggga

SEQ ID NO: 33210 - DNA, 400 bp, Gossypium hirsutum
  Clone ID: LIB3149-019-Q1-K1-F9
ggaaatttaaagcaaccgaaggaactttctattaataaagtcgggcatgcgttacatgagattgatccagttttcaaagaattctcttgctctgagaaggtttcgagtttgcttttctccttaggttataagaagcccgtgatcattcaatcaatgtatatctttaagcaaccaggtataggaggtgaggtaactcctcaccaggacaactcgtttctttatactgaacctaaaacttgcaccggtctgtggctagctctagaagatgcaacagttgtaaacggctgcctttgggccattcctgaatctcaaaaaaatggtcttgttagaaggttcattaggggtgatgatggagtctactttgataggccgtccctatcatatgaccagaaagattttg

SEQ ID NO: 33211 - DNA, 250 bp, Gossypium hirsutum
  Clone ID: LIB3149-019-Q1-K1-G1
agtagctgtggtagtggatctagggagtgattatattatatatataaatatataaatttatgagagagagagaggtagttattttatttgttgcacagattattgatggctgatgttttggatttggattattttctgtattattatggattgatgttatagcgagacattttattatttatatatattttcaatattgtttcttaaaaaaaaaaaaaccaaacaatagacaaagaaattacattaaacg

SEQ ID NO: 33212 - DNA, 392 bp, Gossypium hirsutum
  unsure (1)..(392): unsure at all n locations; Clone ID: LIB3149-019-Q1-K1-G10
ctcttgggctcttgttacttaacctagggctgctctttattttccttttctctctgttcttttgtccctttgctttacttctttttgcttccatgtcgtttagaggattcagtcggccaaatgctacatcaggcatgggcgttgctgatcagaccaaggatactttcttggagctgaaaaggaagaaagtttatcggtatgtgatatataggatcgatgagaagaaaagggaggttgtggttgagaaaactggtgcccctgctgagacctatgatgacttcgctgcatctctgcctgaaactgattgccgatatgccgtctacgactntgattttgttacttctgagaattgtcaaaagagcaagattttcttcattgcatggtgcccttca

SEQ ID NO: 33213 - DNA, 184 bp, Gossypium hirsutum
  unsure (1)..(184): unsure at all n locations; Clone ID: LIB3149-019-Q1-K1-G11
aaaaaaaaaaaaaagaaaaataaaaaaagacaccaaaaaaaaaaaaaaaaaggagaaaaaagggagggcaaaaaaagaaacaaaaaaaaaaagaaaaaaaaaaaaaaaagggggggggccgcccaaaaggaccaaagcnaacggccgggggcgggcaaggcaaaagcgccccaaaggggccccc

SEQ ID NO: 33214 - DNA, 309 bp, Gossypium hirsutum
  Clone ID: LIB3149-019-Q1-K1-G12
acttttgctctttgtggatttgtccgtgcccagggtgatgctgacagtgctctcgacaggctttggcagaagaagaaagctgaagtccgacagcagtagttggatacctttttaccctagtctatctccgagcttgggaatgaaaaatctcatggcagtgactattatgttctaggtcttttcaggttaaactatgtcaaatttatatttttgttgattggatgacatttcagacttggttttcttatatttgaacctaatatatatgccttcggtcatgttaatcgacaaaaaagaaaaaacaaatga

SEQ ID NO: 33215 - DNA, 264 bp, Gossypium hirsutum
  Clone ID: LIB3149-019-Q1-K1-G2
gatacatttaagggagggggaaacgttgcacggagtagtataaaatgattaggcttttgaagagcccttaaaagagcaaatggatgggctctatcaaatctgttgggatctcactctaaatggggtcaacagatcgctactatctaaaaactgtggaatgatatggatccacgcttggtatgtaaccaagcccaagagaaaaggcacgacgggaagaatggagaacggtccttaacagaagaaataaatacaggcgggcgctct

SEQ ID NO: 33216 - DNA, 414 bp, Gossypium hirsutum
  Clone ID: LIB3149-019-Q1-K1-G3
caaaaggagtagtgaagcacatattgttggcaaagttcaaagatgaaatccaacctgagaagattgaggaactcatcaaaggctatgccaatcttgttaatctcattcaccccatgaaagctttccactgggggaaggatgttagtattgagaacctgcatcaagggttcactcatgtgtttgaatccacatttgaaagcacagaggggattgctgagtatatagctcatcctgctcacgtggagtttgcaaatctgtttctccccagcttggacaaggtcattgtatttgactacaaacccaccgttgtacgttgctaagttacaagcatagttctgtctcaatgtagcttttgtcctgttcatgtctgttgttattttgaataaagtttgacgtcttgtactatgaaatgca

SEQ ID NO: 33217 - DNA, 271 bp, Gossypium hirsutum
  Clone ID: LIB3149-019-Q1-K1-G4
gttagttattgtcatgcaatgcaagtatgccaccgtgatttgaagttggaaaacactttgttggatggtagtccagctcctcggcttaagatatgcgattttgggtattcaaagtcttcagttcttcattcgcaaccgaagtccactgttggaactcctgcatacattgcccccgaggtactccaaaggcaagaatacgatggcaagattgcagatgtatggtcatgcggggttaccttgtatgtaatgctggtcggggcatatcctttcg

SEQ ID NO: 33218 - DNA, 372 bp, Gossypium hirsutum
  unsure (1)..(372): unsure at all n locations; Clone ID: LIB3149-019-Q1-K1-G6
cgtaggtattgtattcaatgcaagatgcttccttattngaagttggaaaacacttcgtgggatggtagtccagctcctcggcttaagatatgcaattttgggtattcaaagtcttcagttcttcattcgcaaccgaagtccactgttggaactcctgcatacattgcccccgaggtactccaaaggcaagaatacgatggcaagattgcagatgtatggtcatgcggggttaccttgtatgtaatgctggtcggggcatatcctttcgaggatcccgatgagccaaaagactttccgaagacgatacaaagaattctcaggatccagtactccattccagattttgttcaaatatcttccgaatgtcgacat

SEQ ID NO: 33219 - DNA, 409 bp, Gossypium hirsutum
  Clone ID: LIB3149-019-Q1-K1-G7
gtcaaatgcttgacaaagcattttacgaggtggaagtgaaaaggctttgcttagctttcgagcaacagttccattacggtgttttctttgcatacatgagattaagggagcaggagataaggaacctgatgtggatctctgaatgtgtggctcaaaaccaaaagtctagggttcatgacagtgtggtctttatattttaaatgatccatctgaccaccgagccgaagtcggttaggaataatgaatggtaatgtcttttacttgatcagctgtacattgtctgtcctccctcaaattctccacccatattttcatttaagtggtgtgtttagccgctctttatcccaacaatttgtgtgctgaggaataaatcccttcatatattattatatgttttctttggtaattg

SEQ ID NO: 33220 - DNA, 249 bp, Gossypium hirsutum
  Clone ID: LIB3149-019-Q1-K1-G8
gcttggctttgaagtttgaacaattatcattaatggattattgaacattggtgagaaaaaatgtaaaaaagcaggcttttctgtattcaaaatatttaaaaaaaaaaaaacaaaaaaaaaaagaacaaaaaaaaaatctataaatgaaaaaaaaaaaaacaaaaaaaataaaaaaaataaaaaaaaaaaagggcgtcctttaaaagaaacatatgtccccctcgcctacatgcgggtcgcaatttttaa

SEQ ID NO: 33221 - DNA, 249 bp, Gossypium hirsutum
  Clone ID: LIB3149-019-Q1-K1-H1
catggaatatatacttacatttactttattttcaggggcagaattgttcacgggagggatataacagtgcaggaccagacaaccaggaatcttcttttcagagaattatgggaatctagaggatatctgtttctgacctagccttacggtaggacgaaactgttacctcgttttaaagccaagcattaatccatgataattcacatgtggcggcatcgactcattactgcaaagaataaaaatttggtc

SEQ ID NO: 33222 - DNA, 311 bp, Gossypium hirsutum
  unsure (1)..(311): unsure at all n locations; Clone ID: LIB3149-019-Q1-K1-H10
ggacactgccccccccggntnttgngtttttatngcttttctctttatgatgactggggtcttcctgagccagattcagaaggtanagagaaaaatggggccgtagagcgttgtcacttctcagagacgtggcgtaatgctggactaattgattgcgtcaaataaaagcctgtatttttgctggttccggctaatcatgcaaattgtgaaatacattttaagtcaatgttgactaatttgtctgattaaatattttacggtgagatacgaaaaccattcgcatcccacagttatgatttgattgctcatac

SEQ ID NO: 33223 - DNA, 396 bp, Gossypium hirsutum
  Clone ID: LIB3149-019-Q1-K1-H12
cccatctctcctctcatacttcactctaacgttccctttgaggttttaggaaaacagcagagaaattaaggaatggagaccttcctatttacctcggagtctgtgaacgagggacatcccgacaagctgtgtgatcagatctctgatgcagtcctcgatgcctgtttggcacaggatcctgagagcaaggtggcttgcgagacctgcagcaagacaaacatggtgatggtgtttggtgagatcactaccaaagccgacgtagactacgagaagattgtgcgtgacacctgccgtggcatcggtttcacatctgacgatgtgggtctggatgccgacaactgcaaagtgctggttaacatagagcaacaaagccctgatattgcccaaggtgtccat

SEQ ID NO: 33224 - DNA, 415 bp, Gossypium hirsutum
  Clone ID: LIB3149-019-Q1-K1-H3
cgattacatggaatatatacttacatttactttagctccaggtggtcagaattgttcagccaatgctaatataacagtgtcaggaccagacaaccagggaatcttctctttcaggcagaattatgggaagcaagcatggcagagctgtggcctgtacctaggccttagcggtcaggacgaaactgttaacctcgtctttgaaagccaagcagttgaatccgatgataattccacatgttggccggtcatcgactcattacttgtcaaagcagtagaaaatctggttcaaggcaaagataacctactgctgaatggaggattcgaatttggcccagatttcttaagtaactccaccgaagggattctacttgattccgcatcaagtccagttcaatcgccattaagtcaatggtct

SEQ ID NO: 33225 - DNA, 146 bp, Gossypium hirsutum
  Clone ID: LIB3149-019-Q1-K1-H5
ccagtgcatgatatctatcattaactttattttaaccaggcccgaatagacctgcccacgcgtattataatactaccctgaccggaccatccaagaaatttatcttttatgccaaacaatagtaagggaagcaagcatagctgagg

SEQ ID NO: 33226 - DNA, 113 bp, Gossypium hirsutum
  Clone ID: LIB3149-019-Q1-K1-H6
cgggccaggcccacgcgtgcgctagggcttgatctctctcctctatttgattttagccacagacgcgtgcctgcgacgggggagcttttttatagtgtgaccgaaacccaaat

SEQ ID NO: 33227 - DNA, 382 bp, Gossypium hirsutum
  Clone ID: LIB3149-019-Q1-K1-H7
gcgaagtatacttttccaacgagtcacactacaacgacggccgtggataccaccacgctggcaaaagtgaccaccctgtcaagggtctgctaaggaaaataaagggtggcatttcacgtaataaaagctgtagtgatagcgacagtggcagcgacagtgatgatgatggttacgggaagaagacggtcttcgtgagcaaggcaatatgatgaagacatatatgataataataatgataaatatggtgaagatgttggctatataaatgccatacaaaataaaataaaattaaagatccccctatgttgatgttttcgtatcatatgtacctttatgaattaagtaatgatataacctcttgctctggaggagttgggttgtt

SEQ ID NO: 33228 - DNA, 258 bp, Gossypium hirsutum
  Clone ID: LIB3149-019-Q1-K1-H8
ggcgaccgtaagctttgcgccatcacatcttcatgagagccaagtggaacaagaagcgtatgagaagattgaagagaaagcgccgaaagatgaggcacatatccaagtccacagcgaaatctgtgggttgtgttttagttattggattactgtcttatttcgatctttcgaatcgagagcaatccatcagtggatgggttttagatttttaaatagatgagaacagcttactggtttctatagaatgggtatttgtac

SEQ ID NO: 33229 - DNA, 345 bp, Gossypium hirsutum
  Clone ID: LIB3149-020-Q1-K1-A1
ctggagtacaaaattttccaactgttggattatttgatggtaactttagacaaaatctgggagagactggaatgggatatgggctggaggttcaaatgattgcaaaagcacataaaatgggattcttgacaactccgtatgctttcaacactaatgaagctgcggaaatggcaaaagctggtgccaatataatattagcccatatgggactcactacatcatggttctataggtgccaaaacagctgtctcattggaagaaagtgttcttcgtgttcaagctattgccgatgctgctcatgccatcaatcctaatgtcatcgtgttatgtcatggaggtccaata

SEQ ID NO: 33230 - DNA, 101 bp, Gossypium hirsutum
  Clone ID: LIB3149-020-Q1-K1-A10
ggattggccttttaatgggcttattatttggtttatttatggcttagtcggccgggcaaaatttgggttgtacacatgttattaattgaattgttgtatat

SEQ ID NO: 33231 - DNA, 324 bp, Gossypium hirsutum
  Clone ID: LIB3149-020-Q1-K1-A11
attacccgctgagtttaagcatatcaataagcggaggaaaagaaacttaccaggattcccgtagtaacggcgagcgaaccgggaaaagcccagcttgagaatcggtcgccatcggcgtccgaattgtagtctggagaagcgtcctcagcgacggaccgggcccaagtcccctggaaaggggcgccggagagggtgagagccccgtcgtgcccggaccctgtcgcaccaagaggcgctgtctacgagtcgggttgtctgggaatgcagtcctaatcgggcggtaaattccgttcaaggctaaatacgggcgatagaccgattgcg

SEQ ID NO: 33232 - DNA, 411 bp, Gossypium hirsutum
  Clone ID: LIB3149-020-Q1-K1-A12
atccaaggtcgaggaagctacgaagatcgaactgaaatgcttcgccttattgttgatctggtggaggcaagcatatgtgcagataatccagaatggagtgtggatgagcaggtagcaaaggacatacaactaatagatgctattgctgagaaacaagccctgatattctccgaggaatgcaagttgttccctgcagatgtgcagattcaatccatatatccgttacctgatgtttctgagttggagtcaaagcttacagaacagtccaagattctctcaaatcttcagcaaaaagttgatgacttggcatcaaagcatgcttacaaccctgatgaggagtatacggaggtggaatcgaaactgcgggcacaattggaatcttttcttgaaactgcaagatcattcaatatg

SEQ ID NO: 33233 - DNA, 402 bp, Gossypium hirsutum
  Clone ID: LIB3149-020-Q1-K1-A2
gattttggagtcgcgttacgagctcggggatcgtcagcatagactatcacactatcgacgcggtttggtattttataaattctgaattcgaacctatggcatgtatagtgtagttaatatgtttaaatttgggatttgtgaatatgagccatgcgaaaatggcttattcattttggctaagcttggttttatctttttgatctatttggtatatatataagatgtttaagcttatgcaaatttcggctatatatatggaagtgtgatgtgtgtagcatatttggtcgtgctgataatgccaatcaaccttatgtcatcgaggtatgtcatggaggtccaatatccggtccattagaagctgagttcatattgaaaagaacaaaaggagtttatgggtttttc

SEQ ID NO: 33234 - DNA, 186 bp, Gossypium hirsutum
  Clone ID: LIB3149-020-Q1-K1-A3
gattgtggagtcactttacgagctcggggtatcgtttcatagactatcacactatcgaccggctggggtattttataaattgtgaatacgaacctatggcatgtatagtgtaattaatatgtttaaatttgggatttgtgtatattaaacatgctaacatggctgattcattcggggctaactttg

SEQ ID NO: 33235 - DNA, 410 bp, Gossypium hirsutum
  Clone ID: LIB3149-020-Q1-K1-A4
ccaatcggtatcctctaattttaaacctaagagttttaagttaacgaagcatttgggtcgtttcgaagtaatggaaacttcaggaaaagtaaagaagggagccggaggaaggaaaggcggtggcccgaagaagaagcccgtttcaaggtccgtcaaagccggtctccagttccccgttggtaggatcggccgttatttgaagaaaggaaggtattcacagcgggtcggaaccggagccccagtttacttggctgcagttcttgagtacttggcggctgaggttttggaattggctgggaacgctgcacgtgacaacaagaaaaacaggatcatcccaaggcacgtgctactcgccgtgaggaacgacgaagaattagggaagcttctcgccggcgtaaccatcgctcatg

SEQ ID NO: 33236 - DNA, 310 bp, Gossypium hirsutum
  unsure (1)..(310): unsure at all n locations; Clone ID: LIB3149-020-Q1-K1-A5
aagagatttctttgtctgctttgctttggttcttgncctttttcttctcattatactcaggtctgtcagttgtaagatgtcaaatttcttcatttacttgaatatttgctcctcctacacagatttcgagtcaacctatgggtatcttatgtctaaatcaactatgaacaaagaccttattatgactttggtcttggactcaattggacagaacaccatccaatggttcataaacgagtcgatattattgcttttatcaaaggggcctgaactcataacttnttaagtataactgctactttcaaactta

SEQ ID NO: 33237 - DNA, 328 bp, Gossypium hirsutum
  Clone ID: LIB3149-020-Q1-K1-A8
aaggaattcgccggtggctcatgctgttggattttgggattaccattcttttattttggctgcttccatttatgagcctttgggttttgggactactggtggtaagcgtatgcaaatgaaggaagtcgcggcttttcttgcacatgtcggcgccaagacatcttttggggagagggtgatataccggggagcttttggatggggggttttcttttcaagagagaaatgagtcctagccaggattactgtgatgattactacaaatacatgtatccatgtgcccctggagctcaatactatggccgtggtgctttggcaatttactgga

SEQ ID NO: 33238 - DNA, 399 bp, Gossypium hirsutum
  Clone ID: LIB3149-020-Q1-K1-A9
tgttttcactgctcattcttgccatcactgcaggccactcaagtggtgcgacgggcaaatggtgtgtttgcaaagatggtgtgggtgatggaaacttgcagaagacgttggactatgcttgtggaaacggtgctgactgtaaccctatccgttcaaatggaccttgttacaaccccaacactgttaaagcacattgcaattatgctgttaacagctatttccaaaaaaaaggccaaggtcaaggctcctgtgaatttgctggcacggcagctatcactacaactgaccctagctctggtggctgttcttacccctccagtgccagtggtggaggcacgaccttaacaccaacaacaccgggcacgacaacaactccatcatcatcaacaaccaccacgc

SEQ ID NO: 33239 - DNA, 402 bp, Gossypium hirsutum
  Clone ID: LIB3149-020-Q1-K1-B1
gttcggtggtatatgcgcctttcttctcttggtctaaggtgaatcatggataaacatagcaatgtggtgccatatgggctcttcaagaaacactggcagaactatgtgaagacttggttcagtcagccagcacgaaaggctagaagaagaatttcaaggcacaagaaggctgtgaggatctttccaaggccaactgctggaccccttcaccctattgtccatggccagactttgaagtataacatgaacttgagagctggaaggggtttcacccttgaagagcttaacgctgctggtatttcaaagaaacttgcaccgaccattggtatcgctgttgatcaccgccgtaagaacaaatcacttgaaggtcttcaagccaatgttcagaggcttatgacctac

SEQ ID NO: 33240 - DNA, 406 bp, Gossypium hirsutum
  Clone ID: LIB3149-020-Q1-K1-B10
catggcctaaggtttcggacaatgcaaaggaccttgtaaagaaaatgcttaatcctgatcgagagcagcatcttacagtacagaaagtgcttgaacatccatggctacaaaatgccaagaaagcacccaacgttttgttgggtgagactgtgaaagctaggctcaaacaattttctataatgaacaagctgaagaagagagctctaagggtaataatccaatttgcaccacctttgactagtttttattgattatatgttgcattattaaatgttttccagggccctggtgctggaactagctctaacttacctcctgtaggtgcaattgctgatagtcagtcaggcatgttctatttttcttgctcctgattttgtctggtcatttattgcaatagtttattttt

SEQ ID NO: 33241 - DNA, 407 bp, Gossypium hirsutum
  Clone ID: LIB3149-020-Q1-K1-B11
gcagcggcaaagtccctggatacacaattcaccgcattgcgtcaggaagaagagctcgagaaagagatggaaagagcagccattaagatcccagttgtgtctgaaaccagaaacggtacttttgccggtggctcattgctaaaccagtcagcaggtgactcgactggaagcacatccaaaacatcaactccaagcaatatctagaaaacaagcagcaggaataagcagcagttctaggttactgctggctctaaaatttaagtttttgttattatagaaagaatatgagtatctaaaactgtactctgtagaattgcatttggatgaacatcaagcaaaagtgcaaacacccttctatctgagttcttcaaatgctgcttatgtcaactgattttacattttactga

SEQ ID NO: 33242 - DNA, 404 bp, Gossypium hirsutum
  Clone ID: LIB3149-020-Q1-K1-B12
atcatttttctcgatccatgcttttttcgatctggaacaaaaccattgcttagtgattggacttccgatcaagggaaagctcgtcaaatcaattcagaattgactgataaatgcgttgtgagtgatgcattgaaaagcacattcacgaggtcaaggattttgtttggtctcatttccgggactgttttcctcttatgtactggtttcttcttccggttatacggatgggaatttctacatgaggcattgctataccatcttactcgcacggatccaagacataatttttccatctatttctaccatatctatcttaactatgaacgcgagctttcggttcttgaaaagctcatctcctttttgcctcagtttatagtgcagctagtcctcattttatgcttcgc

SEQ ID NO: 33243 - DNA, 248 bp, Gossypium hirsutum
  Clone ID: LIB3149-020-Q1-K1-B2
gcacagtgcacctcaccatcaccaccggcatagctttcgttcaacttcacttttctccggcgcttgcctcgttggtggcgcggcgagggagacacaagtccgtcactgttctactccacgtagagttaatgggttttccggtttggtcaccggcgccggtgggttcatcggttctcactgttcacttgctttgaaaaaacgcggcgatggggatttgggattggatgactttaacgattattacgatc

SEQ ID NO: 33244 - DNA, 172 bp, Gossypium hirsutum
  Clone ID: LIB3149-020-Q1-K1-B3
ctttatttctggttaaaattttgacatttttaagtgttggtaagcaaagtcatatggattgaatttgcttcttatgatttagtttctggtatgcattgcgatggtgtgggattgagtttaaaatggttattgttgtttgacaaattctattctcaaggaaaaattaatgatt

SEQ ID NO: 33245 - DNA, 156 bp, Gossypium hirsutum
  Clone ID: LIB3149-020-Q1-K1-B5
gtcaaagctgatttgaaaggtgaattacatttcataacgggcaacatggcctatcggagggggggcattccatatccgacaggcaaccaaaacaaattacaatcaaaataagcaaaatctggataagcaaatccaatacctcacaacacttattgc

SEQ ID NO: 33246 - DNA, 55 bp, Gossypium hirsutum
  Clone ID: LIB3149-020-Q1-K1-B6
aacgccctctgtattggaacgttaatcactgttggtgaggtagacgctgcttata

SEQ ID NO: 33247 - DNA, 315 bp, Gossypium hirsutum
  unsure (1)..(315): unsure at all n locations; Clone ID: LIB3149-020-Q1-K1-B7
cactncaagacacactcacaaaactatattaaaacttgactcaatcaaccatcacaaaacgctataataataatttcaaggcaaaaaaatgctgtgaggatctttccaaagccaaatgatgcaccccttcgccctattgtccatggccagactttgaagtataacatgaaatttacaactgtaaagggtttcacccttcaataacttaacgctgcttttatttcaaaaaaacttgcaccgaccattgttatcgttgttgatcaccgccctaagaacatatcacttgaaagtctttaacccaatgttcaaaagctt

SEQ ID NO: 33248 - DNA, 414 bp, Gossypium hirsutum
  Clone ID: LIB3149-020-Q1-K1-C1
gttcgtttctctttgcgcctttcttctctctgccgaaggtaaggcatggttaagcataacaatggggtgccaaatgggcacttcaagaaacactggcagaactatgtgaagacttggttcagtcagccagcacgaaaggctagaagaagaatttcaaggcaaaagaaggctgtgaggatctttccaaggccaactgctggaccccttcgccctattgtccatggccagactttgaagtataacatgaagttgagagctggaaagggtttcacccttgaagagcttaaggctgctggtatttcaaagaaacttgcaccgaccattggtatcgctgttgatcaccgccgtaagaacaaatcacttgaaggtcttcaagccaatgctcagaggcttaagacctacaacgccaaactt

SEQ ID NO: 33249 - DNA, 242 bp, Gossypium hirsutum
  Clone ID: LIB3149-020-Q1-K1-C10
ttttttttttttatttttttttttttttggggtgttttcatttgccaaaaataacttgccctatttttccctttttttaagggccaatttttaattttattatatttggtaaggaatatatattcatccattgctatgaaaacatcattttaaaaggtttgtttgctcaaaattttattaacaaaaaaacattggaagatctctattagttattttaacccaaacaaacatttaatttgttt

SEQ ID NO: 33250 - DNA, 408 bp, Gossypium hirsutum
  Clone ID: LIB3149-020-Q1-K1-C11
ggaatggctaccaagcagccaaatactggcctctttgtgggactgaacaagggccatgttgtaaccaagaaggagttggctccacgtccctctaatcggaaaggaaaaactagcaaaagagtccattttgtgaggaacttgattagggaagttgctggttttgcaccatatgagaagaggattactgaacttctgaaagttggtaaggacaaacgagcgctcaaggttgctaaaagaaagttgggaactcacaaaagggcaaagaagaagcgtgaggagatgtctagtgtgctccgcaagatgagggctcaccctggaggtggagaaaagaagaagtgaagctctctggtgacaagtcaccttgatgatttcattagagaacttttgttagcatatatttcaacttat

SEQ ID NO: 33251 - DNA, 410 bp, Gossypium hirsutum
  Clone ID: LIB3149-020-Q1-K1-C12
ctatttgctcagagagtaatggatcttgctgagtatcgaaagaatctttatgattacttagtgactaagatgaacgacattgcaccaaatttggcatcgttgattggggaagttgttggggctcggttgatctctcatgctggtagtctcacaaatttggccaaatgtccctcttccactcttcagattcttggtgctgagaaggcccttttcagggcactgaaaacacgagggaacacacctaagtatggtctaattttccattcatctttcattggtcgagcatctgctaaaaacaagggccgaatggcacgctatcttgcaaataagtgttccattgcatctcgcatagattgttttgcggagcgaggcaccactgtttttggggagaaactgcgggaacaagtggg

SEQ ID NO: 33252 - DNA, 324 bp, Gossypium hirsutum
  unsure (1)..(324): unsure at all n locations; Clone ID: LIB3149-020-Q1-K1-C2
gttcagttcactttaccattaccaccgntataacttacgtaaaacatcactaatcatagcagcttgggtccttattagcactgcaagaaacactcatataactattttaacactttctttaataaaccatctactaaattttttaacaataatttctaagcaaaataatgcttttataaatctttcacgtccaaattaatgacctttttttcttattttttcatttacataatttttaaatataactatcaatttttatatctaaaataagtttttacttctttaataaattatatatttttttatatttttaaaaaaaattta

SEQ ID NO: 33253 - DNA, 252 bp, Gossypium hirsutum
  Clone ID: LIB3149-020-Q1-K1-C3
gatcagtcttgcatttggcgatgcttatggtaatcatgtgtatgcaccaaggctggatgagccatgctcgagaacatttgaaagctgttcaactgatacatttcaaataaagggtccttgcacataccagatttgctatctttacctctacaggagtggatatgatggttggaagccacatagcgcgactgtgtactgatattataccacagtttgcacatgtaattacattgtctttatttctaatgtggt

SEQ ID NO: 33254 - DNA, 352 bp, Gossypium hirsutum
  unsure (1)..(352): unsure at all n locations; Clone ID: LIB3149-020-Q1-K1-C4
ctggagagttgatacattctgttaggntgtttctttttgaagaggactgngtagtngangggggcggtctattatannctggctcatcccaacaaatttttagttcataaattttttattcacctttctagtactcgtgtcttgtatatctcaaccaatcatccccatccttcatttctttttccctccactaaatccttgctcccattctccctattttctttattcaaattttttcctttttccccttctctcttaattctctatatatccttatccctctatcttttagcttctcctctttttcttttttttcttctcaaacaccttttccaactccctttttattttt

SEQ ID NO: 33255 - DNA, 148 bp, Gossypium hirsutum
  Clone ID: LIB3149-020-Q1-K1-C7
gcagaggcaatagaaaatggcagataacgatgacattcagcctcttgtttgtgacgagggcgactggaatggacaaggctggattttctctaaatgatgctccaagaacttcattccctaacattgttggtcgcccacgtcacacatg

SEQ ID NO: 33256 - DNA, 396 bp, Gossypium hirsutum
  Clone ID: LIB3149-020-Q1-K1-C8
catcaaccttgacattccagtttctcttatcttgctcctcaatgtttgctcaaagaaaggggcttatggcttccaatgctaatttaagtcaatcattttcccctacattctttctcaacttctctatggtttgtgtctggtttttttcaagttatgataccataacttcattgttttaatgtgcaataaattagtgttttcatttctaattttgttgttttaatttcttcgtgggggatagatatagaataagtttaatacttatcttcaagtgttgtttgaagtttttttatatctccaaagaacatggaaagacttgtattatttagctcgttaatttattcccttgtttatttatcagtttattaaaaaaaaaaaaaaaaaaaaaaaataaaa

SEQ ID NO: 33257 - DNA, 345 bp, Gossypium hirsutum
  unsure (1)..(345): unsure at all n locations; Clone ID: LIB3149-020-Q1-K1-C9
gaggatcacttggatcagatctgtgatgcatttcttgtgaagagctcccagcttggttgtgccacaatgtcccccggtcgtgaacgtgcccgtgttatcttgaccaacttcaatggcatttcatccaccacccgttatgccaatgccatgggcttcatggttgacgagcctgaagcaggctgtgctgagatgatgaagataataataaccattcagatttcgaccaanaaaaaaaaaaaaaaaaaaaaaaaaaaaaagaaaagaataaaaaaaaaaaaaaataaaaaaaanaaaaaaaaaaaaaaaaaaaaatggtggggnggtttaaagatcaaagctttcttc

SEQ ID NO: 33258 - DNA, 168 bp, Gossypium hirsutum
  Clone ID: LIB3149-020-Q1-K1-D1
gacgcgtgcttgagcagtgcattaagcgctgtagctgtggatgatacgcgcagggtgaccggtatactcgcaaggtgactagtgcactctccagtggcttagtgcccgttctttttggtcacgtacgttgccttttcgccacgtgctctagatttggcgctccagcta

SEQ ID NO: 33259 - DNA, 371 bp, Gossypium hirsutum
  Clone ID: LIB3149-020-Q1-K1-D10
gtaattggcggaggaatagccaactttactgatgtcggtgctacatttaacggcattatgcgagccttgaaggagaaggaatcaaagctcaaagccgctcggatgatgctatacgtgaggagaggaggtccaaattaccagaggggcctcgcgaaaatgcgggcacttggagaggaaatcggaatccctatcgaggtttatggtcccgaagctacggttcgggttcatgttcggtctctgttttttttttctccgtttcaagtgggtcattttcattagatttcccttttgccatgttactgaaacatttggaatttatttgctgaaaagtgaacatgaaatcttaggcataaatggcatttgtcagcaat

SEQ ID NO: 33260 - DNA, 329 bp, Gossypium hirsutum
  Clone ID: LIB3149-020-Q1-K1-D12
gcagaagagtgttatgagaaagatgaattttttgtgaaaaggaggatgatggcagatgctgatttgtattatatttatactcaaaatcataagccttagaattattattaatgatccataaatatacaatacaaagggctaatatatatatatatataatttagaaaaaagaattgtgttattatgaagttgtatgtatgcatgtatgtatgtatctagcattaatttagcaaagtttgaatgtatctctcttcgtttattaattataacttttttaaaataaataatataaagctttttaaggcacataaaagagaaaatcattattt

SEQ ID NO: 33261 - DNA, 126 bp, Gossypium hirsutum
  Clone ID: LIB3149-020-Q1-K1-D2
gcgggtggcatattccactgtcgtcaaccatatcaatatctgataggctcgcaccaaacccactgatcccacatctgatcatcctgaatatcaaatgcgcagccccaatagactttgcaacacgcc

SEQ ID NO: 33262 - DNA, 350 bp, Gossypium hirsutum
  unsure (1)..(350): unsure at all n locations; Clone ID: LIB3149-020-Q1-K1-D3
ccggggcagacccacgcgtccggagggtcagaatttacaaaaggttttagatataccacggacgccngcaagcgacgggcccggttttaaataatttcccctaaattcactacactgaccctcaaaaaacaacgcctttacccaaaaaaccctaccttacccaacttcaatttccaccgcacacatccccctaaaaccagcactcgctatttttaataggccctcaccgaacacccttaaaaacaatagcgccgcccccattaccaatgcaacacaccctgaagcggcgcattaaacgcgccggctgtccgattcacatgcaccgtgaccaattcacttaccaccgccct

SEQ ID NO: 33263 - DNA, 111 bp, Gossypium hirsutum
  Clone ID: LIB3149-020-Q1-K1-D4
gtcataataataattttttactaaaatttatttatactacccaccccagcaaacaacggcatggcttttttttcatttcccaaaaataaacaacactgaccgtgatattac

SEQ ID NO: 33264 - DNA, 321 bp, Gossypium hirsutum
  Clone ID: LIB3149-020-Q1-K1-D5
accaccgtcactagcggcgctgtcacaaaatgtcgtcaacggagtctctcatcctccaacgccatgaaatctccgccgttaaattcggtaacttcaagctgaaatctgggatcttctcccctatctacatagacctccgtctcatcgtctcttacccttccctcctccgccaaatctcccactccctcctctcctctctccctccccaaacaccctttaacctcatatgtggtgtcccttacactgccctccctatagccacctccatctctctcgacacctccatccccatgctcatgcgccgcaaagaagtaaaagact

SEQ ID NO: 33265 - DNA, 224 bp, Gossypium hirsutum
  unsure (1)..(224): unsure at all n locations; Clone ID: LIB3149-020-Q1-K1-D6
ggttgactgtttccactttaaaattgtgtattttgtaggccattgtattattgtgtgtttgttattgtaatgaagtgcaaagattatctgttacaaaaaaaaaaaaaaaaaaaaaaaaaaaaaaaaaaaaaaaaaaaaaaaaaaaaaaaaaaaaaaaaaagattntaattttaataaataaaaaaaaataatattatttttaattaaaaaaaaaattatatatt

SEQ ID NO: 33266 - DNA, 54 bp, Gossypium hirsutum
  Clone ID: LIB3149-020-Q1-K1-D7
ccacctccgtggttttggaggtggaaaaggtggtagggataggaggtcggttgt

SEQ ID NO: 33267 - DNA, 415 bp, Gossypium hirsutum
  Clone ID: LIB3149-020-Q1-K1-D8
ccatttttgttactttgaatttgtatatcgaagatgttaaatctgggaaagtaaagtttcactgtggcaccattaacaaaagtttaagtgttctcttgttgcttttacttggttaagaagcgaataaagaagcctatctatgtctactaccaactgggcaatttctaccagaatcatcagagatattgaaggtgcggcagaggattcaatctcttcaagctagaaaagccaaggcttagcacgtcttcaagtggaacgttatttaatgttgcattccatggtcattcatcttagtcaaaacttgaatcttgtgttatggaaacagggttttgtagctaccttgtgtaccagcttctttaaccatgatggttcattattacgagttttgtagcttcttttataattggcctagtta

SEQ ID NO: 33268 - DNA, 398 bp, Gossypium hirsutum
  Clone ID: LIB3149-020-Q1-K1-D9
cacctacttccacaccttatccactttcataggaaactgtggcatctcaaactctctatcgagaacctctttaagctaaatttgtcatctaatttgattacttttatttcatggtcattattgtatctactatgattaaaattatcgttacttgatctagtacttgtaatggcccaaattcgtctgacccaaaccaaccaaaaaaaaaaaaaaaaaaaaaccaaacaaaaaaaactaaacaaaaaaaaaaaatacacaaaaaaagaaaaaaaaaatatgaaatctttttcatatacaccctaattcgtgatcaaaaagaaaagggggcggcccttttaaggaatccaagtttaacgcccgggccttggaaggtttaaatttttttttggggcccccaa

SEQ ID NO: 33269 - DNA, 414 bp, Gossypium hirsutum
  Clone ID: LIB3149-020-Q1-K1-E1
caggtacattgagaccatcaaagaagctgtttaaagggaatgtcctggagttgtttcttgtgctgatatccttgttctgtctgctagggaaggcatcgtttcgttgggaggcccttatattcctctcaaaactggaagaagagacggtagaaggagcagagcagatgttgtggaggagtatcttccggaccacaatgagaccatctctggcgttcttgacaggtttgccgccatgggtattgacacccctggagtcgttgccctcctaggagctcacagtgtcggcagaactcactgtgtgaagctggtgcatcgtttgtacccagaggttgaccctgccctcaaccccgaccatgttccacacatactccataaatgccctgatcagatcccagaccccaaggccgtccagta

SEQ ID NO: 33270 - DNA, 396 bp, Gossypium hirsutum
  Clone ID: LIB3149-020-Q1-K1-E10
gttcgtttctctttgcgcctttcttctctcggccgaaggtaagtcatggttaagcataagaatgtcgtgccaaatgggcacttcaagaaacactggcagaactatgtgaagacttggttcagtcagccagcacgaaaggctagaagaagaatttcaaggcaaaagaaggctgtgaggatctttccaaggccaactgctggaccccttcgccctattgtccatggccagactttgaagtataacatgaagttgagagctggaaagggtttcacccttgaagagcttaaggctgctggtatttcaaagaaacttgcaccgaccattggtatcgctgttgatcaccgccgtaagaacaaatcacttgaaggtcttcaagccaatgttcagaggcttaag

SEQ ID NO: 33271 - DNA, 405 bp, Gossypium hirsutum
  Clone ID: LIB3149-020-Q1-K1-E12
aggatttgctcggcagtgcactcatgcaaaatattcattttaatttcaccaccttcagaagtcaggaatgcgggcaaacgatgcgcagtaggtcatgatgtgctgattaatatccgtaaattgtctttgcttgtgaagtgaataccaaattgcaccttattgttttcatatttctgcagatggatagcaatttaccaagctgaatgctcgagtttattggtaaagctctatatcagtgatgcagggttcttacatgctgatgtcctgatgttctctcattgatgctcgagtttatcgcctgcgtacaaggaattgtgttaatttcagggtctggtaacctcctcacccttgttcttaatactaaactgctaatttattaggaatgtattactacaatggatagag

SEQ ID NO: 33272 - DNA, 391 bp, Gossypium hirsutum
  unsure (1)..(391): unsure at all n locations; Clone ID: LIB3149-020-Q1-K1-E2
ggcagaaggcagcttcttgaacccgatcttaacgttaaattttccttagtggatggacaacattaccagatcttattttccaatctagaatcttcctgggaggagaaatgagttatgaagattgagacagaggtgtagctgtagataaacagcagcataaccaatatgggacattccaaggagttgccaaatacaccttcttacgtgctctacagttccaccaccacaacccgcatacgcaacagcaacagcaccagcaccagcaacagcaacagcaccatgtgccaactattgggtttcctccacctccctctatcgctgctcctcagnattacccccaagcctaccagaccgtgccgggttatgatgttgctgaaggaacacctgttag

SEQ ID NO: 33273 - DNA, 199 bp, Gossypium hirsutum
  Clone ID: LIB3149-020-Q1-K1-E3
gaaaaaataagggtgatatcggatcagcttttcattagttttaaactctctctcgctctggggctggcatgagtttcttttaaacggatgtatgatatgcaacgtttaatactaaattattttatttatggctttagccttgaactctacatgttatctatctgatggaagccataatatataaaagctttttaatatt

SEQ ID NO: 33274 - DNA, 342 bp, Gossypium hirsutum
  Clone ID: LIB3149-020-Q1-K1-E4
gctgttggtaaggacacaaggattggaccttaatttttgaatgctagtgtcggttttgggggatcctgcttccagaaggatattctaaatctggtttacatctgcgagtgcaatggccttcccgaggtggcagagtattggaagcaagtcattaagatcaatgactatcagaaaaaccgatttgttaatcgtgttgtttcctcgatgtttaacaccgtttcaaacaagaagattgctatcttagggttcgcctttaagaaggataccggtgacactagggagacccctgccatcgatgtatgcaaaggactcttgggagacaaagcacggttgagcatatat

SEQ ID NO: 33275 - DNA, 296 bp, Gossypium hirsutum
  unsure (1)..(296): unsure at all n locations; Clone ID: LIB3149-020-Q1-K1-E5
atttagtgaaaaatcctttaatagtttatatgcgctccgaatggtgaattccccagagtggtctcccttccaaacttgacggtcancataattcatttcagcaagagggatctgtaatattcactgaacaacctcattctgaaagttcccactcttcaacatagctctctatggagaagtcccttccaaacccaaatgctcttttaggtaacagatctacatgtgactctaaactcttgacacacagtatgatgatgcattaccaggagcgccttacagatctagacagaatacaa

SEQ ID NO: 33276 - DNA, 353 bp, Gossypium hirsutum
  Clone ID: LIB3149-020-Q1-K1-E6
aaaaaaaaaaaaaaaaataaaaaatttaatttaaaaaaaaaaaaaaaaaaaaaaaaggaagggagaaaaaaaaaaaaaaaaaaaaaaataagggtaaaaattaatgaggggggggggttttttaggatccaagtttactttcttttgttttcaatggattagcttttttttatgtgaaggtaaattattttcattggccgtggttttaaaattctgggattgggaaaattttggggttttcgaaatttttcgcttttggaaaatttccttttttcccaattggcatattagcaaaaagtttcgaaccatttgccttttttaaagggtgaagggcttgattggttaatgggatc

SEQ ID NO: 33277 - DNA, 415 bp, Gossypium hirsutum
  Clone ID: LIB3149-020-Q1-K1-E8
gaagcccaaaggaccacttgaagccctccggcccaaattgcagcccacacaacaacaaacacgatacaggaagtctccttgtgccccatctgatggtgaagttggagggagtgctcaaccggaggatgaaaccaccaacgaatgagaaactgctgccaatcttctaaacttgtgaggactattgatagttattctaatacctcgacaggtaatgagtaattttcaattgttcccatgaataaagcttgttaaagatgctttgatcttagtcaagatttacaagttacaacattaatgcagtcgactatattatgggaactgaaatgtatgttgttccaatgtttttcctgatgtggaacatacaagtaaatcacttataaaatgatttttcgctctactagattcccatttggct

SEQ ID NO: 33278 - DNA, 312 bp, Gossypium hirsutum
  unsure (1)..(312): unsure at all n locations; Clone ID: LIB3149-020-Q1-K1-E9
tgcccttccatttttatttctacacaaaatgcatgtaaactaggggattggatgatgaagaaactcatgcaggcttgagctaccatcatatttatattttcatttttataatctgatgaaatttgaataccttgaaggtagagtaacatgtaacaattgattcaattttctttgagcattttttatggatttttttaagtgttcacataagtcaaacttggaatattttcataaaataataatgataaaatttagggacgataatggcgtcagtccctgttatggtttcnaanaaaaaaaaaaaaaaataat

SEQ ID NO: 33279 - DNA, 402 bp, Gossypium hirsutum
  Clone ID: LIB3149-020-Q1-K1-F1
caggattccaccatcagtggatgaatcaacctttcggaggcattttgaggagtatggtgagataacagatttatacatgccgaaggatcaagtctcaaaagctcaccgtggaattggctttatcacttttgctagcgcagaatctgtggagaatctgatggctgatgctcatgaactgggtggttctacagtagtagttgatcgagcaacacctaaggaagatgacttaaagccaataggcagaatgtcacagggggggtatggtgcatacaatgcttacatttctgctgccactaggtatgctgcagttggtgctcctaccttgtatgaccatcctggccccatgtatggaagaggggagtccagccgagggatgggcaaaaagatatttgttggcagact

SEQ ID NO: 33280 - DNA, 434 bp, Gossypium hirsutum
  unsure (1)..(434): unsure at all n locations; Clone ID: LIB3149-020-Q1-K1-F10
cggaattacccgggctcagacccacagccgtccggcttatgtatgttccctttagcatacttggaccttgtatccgagatgggtggaataataccttatcaccgagatagctgatagagagaagtccagcaatctttataccgcttcacagtagtcctcagttcacagtaggtggggtgcatggtaggacanttattatgcatttatcagagccgacttctttctgatcaatggtataaatttgatgatgaaagagtaacgaaagaagatatgaaaagggcattggaggagcagtatggtggtgaagaagagttaccacagacaaatccaggattcaataatactccttttaaatttaccaaatactcaaatgcatacatgctggtgtatatacgtgaaagtgacaaagacaagataatatgtaatgtggatga

SEQ ID NO: 33281 - DNA, 410 bp, Gossypium hirsutum
  Clone ID: LIB3149-020-Q1-K1-F12
ggcgagagctgggagagatcgcgattcatcggccttgtccattgcaacagcagaagcagcaataatggtagcagcgatgctaaaaagggagtccctaattcaaactacgttgtgccactcaacaagtcgttttcggcatcaaactcttcgtacatcactcgtcctctagttgaaatccttcgcgatctcaacaagcgaatccctgataacatcgtcaagcctccttctgattcttcttccacttttctcccttggtaccatgccaatcgcatgttgagcttctacgcccctggatggtgtggagaagtacgtgatgttatattctctgagaatggaactatcactgttgtatatcgactcactattcgaggatctgatggagaagcacatagggagtcaacagggacagt

SEQ ID NO: 33282 - DNA, 149 bp, Gossypium hirsutum
  Clone ID: LIB3149-020-Q1-K1-F2
atttgctgcaactgactagttttagaaacattgagtgaaaaaagaaaaaaagaatccatgacatgtttcatagtaaacttgcaaggatgctatgatatgattaataaatattcatgttaataaaagattttatgtacacatttatttgt

SEQ ID NO: 33283 - DNA, 298 bp, Gossypium hirsutum
  Clone ID: LIB3149-020-Q1-K1-F3
aatccttccaataacttatagcataccgaatgtttatagtaaattacaatcagatgagtttaaaacagaacagattcattgtattcttttcttctaattgccatataatatccagatatcactctatgtttttacctattttttcattgccacagaatattgaagagcttaccaaggagcatctaccatcaaatgccttaagcagcctaccaaatgcttgcatgacaacatgttgcaaccgatatactgaggacatcattatcacacatattgtaagctttctcatactgtgtggcaa

SEQ ID NO: 33284 - DNA, 392 bp, Gossypium hirsutum
  Clone ID: LIB3149-020-Q1-K1-F4
gagcatttgagtataggatgttataccggctgtttattgtgaattacaaatacatgacctggaaggacacggttagcttgcgtggatgaagtctaaacaacttaccctgtaaagatctatctcactgttgctagcgcagaactatttgacacacatatggcaattgcttatgaactagcatctcccataaagatggtttaacagataataactgcatataatgacttaaagtcgacacgaagaatgtatgatggatggtattaatcatacaaaactatcatttttcctatctggtaaaatgctcatatgattgctcctagcatatatcacctttctttcctcatgtattgaagaagggaccgcaaacaatgaatgggcattatgatccttgg

SEQ ID NO: 33285 - DNA, 288 bp, Gossypium hirsutum
  Clone ID: LIB3149-020-Q1-K1-F5
aatcatttcaatatatgataacatttcttctgttcacagcaaaagacaatcacatgaccacggaacatatcaaatccatcgcgtccttcaaaacgaaataccatatcctagtcttacctcattctgttatcctacctattaattacccgccaaaaagataaccatatctaatgaactactatataccacaatcttaacttgctcccccaaaccaacatcaaaccactccaagacgccacttataatataactcttctggtacctatcataccaacatttcttttctcc

SEQ ID NO: 33286 - DNA, 356 bp, Gossypium hirsutum
  Clone ID: LIB3149-020-Q1-K1-F6
gaagacaaatcctcagacggaatttcattttgtgatgtcacacgcgaaacaggtggtgggtgcacatgctatgaaaatggacggtacgtatattctgatgacgatgacagcttcaaaggaaggtacatgttatcctatagcacctctggcactaccacattctttacatgcatgcggactagtcttttcagcagatgaactgaacatggaaggtttccatacatttcgtgggggattctggaattacttcattatgggaatggatgctccactatcttatgctattcactcagagacggatgatgatactgaaaaatttaaaaaccaaggggattattatagcactaatgcaaaga

SEQ ID NO: 33287 - DNA, 298 bp, Gossypium hirsutum
  Clone ID: LIB3149-020-Q1-K1-F8
cccaggcttacgtccacgccatcgtgaaatagcttacttccacagctaaacaggaacagcagtgcgccaaatcttagtgaaataaaggcactacctgctccctgaaataatactcgaccgtcaccaccacagcctgtgcctgctcaacccacggggccacatgaggattaaaggaatgacccggatcatactgtctaagctgatcatcatgggaacacataggctacgggtttataaaatggtccttctgctaatcatgggtacggatcatggaagacttctccatcacatggaccat

SEQ ID NO: 33288 - DNA, 406 bp, Gossypium hirsutum
  Clone ID: LIB3149-020-Q1-K1-F9
gaaagaagaatcctgggactgatcggaattctgtgctgtcattcttggaacaagtaatgaaagcaaaggaaatgaaaatagacaattggcatattctcatgaggatgagagctccaaaggaaggtccatgtgatcctattgcacctctggaactaccacattctttacatgcatttggtcgagtctcttcaacagatgaactgaacatggaaggttaccatacatttcgtgggggattctggaattacttcagcatgggaatggatgctcaagtatcttatgcttttcactcagagcggaagttgcatcctgaaaaatttaaaaaccagttggttaatcagagcacttatgcaaagcttggctgtacccaggggtggtttgctgcttctgtttttcatccctcttc

SEQ ID NO: 33289 - DNA, 382 bp, Gossypium hirsutum
  Clone ID: LIB3149-020-Q1-K1-G1
ataattcgaaaaattgttttaccgaacaaagcaattttaaaaagtctccctttcgaccacccaacgtaaaatgcaaattctaggattattaatgttacaaaaacatttacaattacatctaattttacaaacctcacaacattaaaaccatgactgaacctaacttaaattacaacatttcactcgaatcccccactgcccacatcttcaagttcaacgtcccaggatacaataaggaggatataaaagtgcagatacaagatgggaatattatgcatataaaaggagagggtattaaagaggagagtcacacgaaagatactgtttggcatgttgcggagagagggacagggaaagctgaattttctcgggaaattgaatt

SEQ ID NO: 33290 - DNA, 356 bp, Gossypium hirsutum
  Clone ID: LIB3149-020-Q1-K1-G10
aaccgggccggacccacgcgtccgccgccttttttagttggccagccgccgtttaccatcagcgagaggcctctcttccagggggggcggaagctcaaacagaaactccgccttccctatctgagcaatattcactgaaggagaaagcggagaaatcagatgtggctacaaaagtagctgacgcacaagaggtcgaaaattcagcgagtacttcttccaaggaagtggtgaccgaggaagttgagactcctgctcctcttgtggaaagtactgaggttcctcctgctgttgctgaagaaaacaccgaagccaatcctgttgctgagaacaaaggtgaagatgctcaagttgctgcg

SEQ ID NO: 33291 - DNA, 364 bp, Gossypium hirsutum
  Clone ID: LIB3149-020-Q1-K1-G11
gatgcccgattcacgttgcgcatgtccgtgtgatgctctatgccaaaccagaaacttacctgactttatgaaagcgtcctgatcctctctgcgagcaagggatgtcgaaacattcaggctggctgattggctaagagccttcaaaacgaaggtgtgattgttgatgaggaccacaaattgcttcataaaatgaaaacatactttgtattatgagggtcacctaccactaaactgttgtcattcgttatgacaagatgcctgtaccggcattggctctcatattattcagactaaaagaaatgcgaattgcatatttaaactcacatacttttgtctaactgtcttggaggtgcacttatattat

SEQ ID NO: 33292 - DNA, 303 bp, Gossypium hirsutum
  Clone ID: LIB3149-020-Q1-K1-G12
cacgcttttgctgttctatagtgtgagctagatctaataacctggccgagcatctactacatcgagactgggaaaaccctacctgatacgcaacttaataaccatggaagccatgcgtctttgttgagctgacgtcttatctcaaacagtcgcttattgaaatggaagctaccagattcgccgacacaattgataatggcacgcgcaattgtgcggttcatataacacaggacttgtgcggtacatagcgcttagtggtggatccaccatgtctcctgaaattgctgatatattgagcaagga

SEQ ID NO: 33293 - DNA, 420 bp, Gossypium hirsutum
  Clone ID: LIB3149-020-Q1-K1-G2
aacaaagaagcgattagggttgatgtagcgccgaaagatggaaacttcggtttcgatgttccactgcttgagactatgttcccgagtgggacgttggatcctagtcttggacgagtttacggaaagatgccacaatgggaagaaacggtggatgaatctagaagtagatataaacaaattattaaggcattggctgataaatacccctctgagaacttgctattagtcacacatggggaaggagttggagtttcgatatctgggttcttggagcacacgacagtggttgaagtagaatattgtggttatgcagagttaaaaagattaatgacatgcaaaaatgggtcaaccactgctggaaactttttggtgcttacaaaaagtggtcagagtgggattacttattttgattaaagaatg

SEQ ID NO: 33294 - DNA, 169 bp, Gossypium hirsutum
  Clone ID: LIB3149-020-Q1-K1-G4
gaatgacgaaacagaaatgaaaatcaaagaagaatacaatctaaaattaccttaaagctaatttcgaatggatttttagtatctgcatatatttctctgctattctctttgtgacaagaagaaaaaagaaaaaaaccatttacaccgttttttctcggttttatagccg

SEQ ID NO: 33295 - DNA, 203 bp, Gossypium hirsutum
  Clone ID: LIB3149-020-Q1-K1-G5
gtatgacaaaacataaattaaaatttatgtttaatacaatctaaaaataccttggcggctagtccgaatggatcaatagtatctccatatattatccagctattatctttgttacaggacgaaaaaagataaataccatgtacaccgttttacactcacgttttatagccaaaaaacaaaccttactcaacttaataaaattg

SEQ ID NO: 33296 - DNA, 408 bp, Gossypium hirsutum
  Clone ID: LIB3149-020-Q1-K1-G6
ccagaatcaacgtaagaattagggttgtgtctagaaatggcgattgcagcgcgcatcagatccactctccctctctttcacaggcttttgagatccgattccctgccttctcacactcccagagctgctcttcaccgaactctactttgtcccgaactgtcgaggaaatattccacttctccgaagaaggacgagaatgttaaggtgcctttggctttgtttggtggatctggaaactatgcatctgcactgtaccttgcagccgtaaaaggaaatgctctggacaaggttgagtctgaacttcttgaccttgttcaggcatcaaaaaacagtcaattcttttctcaattcactaaggacttgtcagtacctgcagagacacgggtcaaagccattaatgagatatgt

SEQ ID NO: 33297 - DNA, 331 bp, Gossypium hirsutum
  Clone ID: LIB3149-020-Q1-K1-G7
ggtcaccagggaccagtatggcaggtggcttgggctcatccaaagtttggctctttacttgcttcttgttgttatgatggacgtgtgattatttggaaggaaggcaatcagaatgattgggctcaggctcatgtatttgatgaccataagtcatctgtgtaattcaaatgcttgggctcctcatgaactgggactatgtttggcatgtggttcttttgatggaaatatattggattttacagcacgggcctacggcggctgggatgaattagggattgttcaggctcagctggacgtgatctcatttgcctcattgactccttcaacagca

SEQ ID NO: 33298 - DNA, 159 bp, Gossypium hirsutum
  Clone ID: LIB3149-020-Q1-K1-G8
aattccagttctatatatctgcctttaccgaactatgtatttgcctcctttatttttttttggttcttttgatcttttttatccagttttgttatttattttctttttacagtgatgatgttttaaaagcaagtaaaagaacagattatatttcagttg

SEQ ID NO: 33299 - DNA, 410 bp, Gossypium hirsutum
  Clone ID: LIB3149-020-Q1-K1-G9
atttagtgaagaatcctgtaatagtttataggcgctccgaatggtgaattccccagattggtcccccttccaaacttgacggtcagcatagttcatttcagcaagagggatctgtaatattcactgaacaacctcattctgaaagttcccactctccagcatagctctctatggagaagtcccttcgaagcccagatgctcttctaggtaacagatctacatgtgactctaaactctcgacacacagtaggatgatgcagtaccaggagcgccgaacagatctagacagaaaacaataaaaccagaataaaacctaaagacgcataccagaggcggcagacagaaacgtgctagggtagcagactttaccattagtctacaactatatttaaaaacaggcttaatgcaca

SEQ ID NO: 33300 - DNA, 394 bp, Gossypium hirsutum
  Clone ID: LIB3149-020-Q1-K1-H1
cccacgcgtacggagctctgatgcaattggattagctcctagagcaatggagaaatccaaggccaacagcaaaaaagaatttggatatgggtgctaatttcctcgtgccaaacccgaaccaaaccaacaattcagaggtgaaatctgtagggtgtgttgtggagagtgaaagatcatatcatgcttcatctcatctataggttagttgcaagaaccatttactcatagatatcatatgatctcggaggaacctgtgactataaagacatgctctctattgagtgtagaatgagagcccgatcataaagctggtacctgttatttgttcatcactacacaaatacacgatatcgcctaatgatctgaaggtgttgggttgctaacacgacataag

SEQ ID NO: 33301 - DNA, 410 bp, Gossypium hirsutum
  Clone ID: LIB3149-020-Q1-K1-H11
ccggcttgttggcttgctgcgtttggcttcagaatgcacaggtcacatgtccaaggttcgagggctggtgccagagagaagaaggtgagaaaagagaagctaggagatagaataacagcacttcaccagttagtttccccatttggaaagactgacactgcttctgtgttgttagaagttattgggtatatcagattccttcaggatcaaattgaggctcttagctccccttacttgggtactgcatctccaggcgtgacaaaccaacaatctgaaaaaccaaaggacttgaggagtagagggctgtgcttggttccagtatctttcactcatccagttgaaagtgattgtaatggtgctgattactgggcaccggcattcgcaggcgccggcagcttttaaggagctgg

SEQ ID NO: 33302 - DNA, 412 bp, Gossypium hirsutum
  Clone ID: LIB3149-020-Q1-K1-H2
ttttgattttacaatacaaggtatgttatgcaaggattttggatttgaagaggaagttcttggaagcagcattgcgatactatgacatatctcaaattgagaagcgacaaataggagacgaaacaattgacgaggatgctctggagcaagctctatctgctgctgttacatgtacaatattagctggtgcaggtcctcagcgttctcgtgttcttgccacactttacaaagatgaacgttgctccaagctgaagatttatccaatattacaaaaggtttatttggagagaatattaagaaaacctgaaattgatgcatttgctgaagaactgaaaccacatcagaaagcattgcttcctgacaattttactgtgctggaccgtgccatgatagagcataatcttctgagtgc

SEQ ID NO: 33303 - DNA, 411 bp, Gossypium hirsutum
  Clone ID: LIB3149-020-Q1-K1-H3
ttttgattttacaatacaaggtatgttatgcaaggattttggatttgaagaggaagttcttggaagcagcattgcgatactatgacatatctcaaattgagaagcgacaaataggagacgaaacaattgacgaggatgctctggagcaagctctatctgctgctgttacatgtacaatattagctggtgcaggtcctcagcgttctcgtgttcttgccacactttacaaagatgaacgttgctccaagctgaagatttatccaatattacaaaaggtttatttggagagaatattaagaaaacctgaaattgatgcatttgctgaagaactgaaaccacatcagaaagcattgcttcctgacaattttactgtgctggaccgtgccatgatagagcataatcttctgagtg

SEQ ID NO: 33304 - DNA, 322 bp, Gossypium hirsutum
  Clone ID: LIB3149-020-Q1-K1-H4
cttagacattgcaatactatatatcacactttaatttcctccaacaaaacagaaattctggggaagcatcatattctaactatgacatatttactaatttacatgcgaccaatcacacgaccatacaaactgacgaggatgctacagatcaagctctatctgctactgttacatctacaaataataactgcttcaagtcctaagcgatctcatgaacttatcacactttacaaatattaacattcctccaagctatagatctatccaatattccatcaggtttatttggagagaatattactaatacctgaaattgatgcat

SEQ ID NO: 33305 - DNA, 226 bp, Gossypium hirsutum
  Clone ID: LIB3149-020-Q1-K1-H5
tcaaaacaggaagggcggggaaacttcataactagactaggacatctaaaaaaatgccacccgacccataccaaaccaaacatcaggaggggatgctactaagctggctctatctggtgcagagacatgaacaaagttagctgatgcacgagctaagcgatgtgccgtactcaccataccatacaaaaaggatcgttgcgccaagctctttatctatacaacatta

SEQ ID NO: 33306 - DNA, 236 bp, Gossypium hirsutum
  Clone ID: LIB3149-020-Q1-K1-H6
gtgggacaaggtccatgcttaattggagcttcttcacattgattctatgtctggtttatcttatctgctgtctgctaccatatgagtctgcttttcttacaatttcctttaatttctttttttgggtttgaaatttgattaaatttatatatatgcatatgcatatgatatgagaggtaatgaatgaaatagcaatgagaaaggatgtactgccatgttattattattacaatttg

SEQ ID NO: 33307 - DNA, 414 bp, Gossypium hirsutum
  Clone ID: LIB3149-020-Q1-K1-H7
gttttgtaccacctgatggtgaatttgaactaatgaagtaccgaatcactgagggagttgagcttcctttccgggtattgccaacaatcaaggagcttggtcgaacacgaatggaagtaaatgttaaggttaaaagtgtctttggagcaaagatgtttgctcttggagttgtcatcaaaattcctgttccaaaacagacagcgaaaacaagtttccaagtaacatcaggtcgagcaaagtaccaagctgctattgattgcttggtttggaagataagaaaattccctggacaaacagaaccaaccttgagcgcagaagtggagttaatttccacgatggcagaaaagaagtcatggacaaggcctccaattcagatggaatttcaggttccaatgtttacagcctctggcttac

SEQ ID NO: 33308 - DNA, 296 bp, Gossypium hirsutum
  Clone ID: LIB3149-020-Q1-K1-H8
aaaggaatgattttcttatgcacaagaaagtttgaaaaaggtgaaagatttgtgggaaattcatttttggttgatggggttttgttgatcccctcaagcaagaaaaagaaacttcagaaatttttttcttttttttacaaattattgtaataatctgtttgatcatttggactacatatatatatttattgtaagctgaatcattccctgtaaacgtgaagcagtctttaagttccggctgaaggatgtagacaattccttattattaatgtgaagctaaggttcggtagacgttc

SEQ ID NO: 33309 - DNA, 383 bp, Gossypium hirsutum
  Clone ID: LIB3149-020-Q1-K1-H9
gaaaacccggataaaaaagaagaagaaaaaccagcagccgaagaagaagccaaggaagaaggaaacaatgaagctactggtgagaccaaggaaggagaagataagaaagaagacaacaatggcagcaacaatgaggatgaatctatgaagaagatgatctactattatcagccgctctacgttattgaacgaatgccaccggctcctcagttgttcagcgatgaaaatcctaatgcttgctgcatttcatagtcaaatgatcatactagttgacagtatatagtgtatatgtatatattttggtgagtccgtgccactggtaatgagaattttagagcaaagcggtggacggatcgcatgatgatcaatcagtgaatgtgggg

SEQ ID NO: 33310 - DNA, 423 bp, Gossypium hirsutum
  unsure (1)..(423): unsure at all n locations; Clone ID: LIB3149-021-Q1-K1-A1
gaaatggagaatggtgaggcatttagagtctgcagtgcacgtattggaagttcaagcatttggaggaacaacgccatggaagctttctccatgtctgctcgtgaagaagatgatgaagaagacctgaaatgggctgccatcgagaaactgcctacatatttgcgtgtaaggagagggatattcacagaaggtgaaggtcaatcaagggaaaaaaaaaaaaaaaaaaaaaaaaaaaaaaaaaaaaaaaaaaaaaaaaaaaaaaaacaaaaaaaaaaaaaaaaaaaaaaaaaaaaaaaaaaaaaaaaaaaaaaaaaaaaaaaaaaaaaaaaaaaaaaaaaaaaaaaaaaaaaaaaaaaaaantggggggggccctttaaagggaccaaattttaaaaccgggggttggaaaaagataattttttt

SEQ ID NO: 33311 - DNA, 415 bp, Gossypium hirsutum
  Clone ID: LIB3149-021-Q1-K1-A11
ccgacatcttgtttccttgataggttattgtgatgagaagaacgagatgatcttgatttacgaatatatggagaatgggacactcaagagtcatctctacggttcaggccatccaagtttaagttggaaacaaaggcttgaaatatgcattggagcagccagaggactccattaccttcacacgggctatgcaaaagcagttattcatcgtgatgtgaagtcggcaaatatcttacttgacgagaatctcatggccaaagttgctgattttggactgtcaaagacaggtcctgaacttgatcagacccatgtcagcacggcagttaaaggaagttttgggtaccttgaccctgagtatttcagaagacaacaactgacagagaaatctgatgtgtattcatttggcgtggtcttg

SEQ ID NO: 33312 - DNA, 421 bp, Gossypium hirsutum
  Clone ID: LIB3149-021-Q1-K1-A2
tttctataattggattgacaatttccttgaagaaaagctatatttccttgggactgtagtagagcataatatcacatgaatctcataaaatgattctatgccttttctactatactttgggttttgcaggcggagtcgaagagcggctcaaatgaatcggttttaaaggttgctttagatcatggaaaggcctcaggtgttataaagccacatgaccgtgtggtggtttgccagaagctgggtgatgcatcagtggtaaagatccttgaacttgaagattagaagctaatatgtggatgagaagttttgcataacctaaaaccctaagcatagcatggatgaaataaaccgtatctgtacatgtattcttaaactatccatgctatttttgtgtaaacggattttgcgtcttgtaagaaaa

SEQ ID NO: 33313 - DNA, 275 bp, Gossypium hirsutum
  Clone ID: LIB3149-021-Q1-K1-A3
ccatacgcggcacggcataaggaaggtttattgatctgattttcaacacttatagaccacgcattaacactgtacatgggcgtgtgctagcaaattcatagatcaagtacaacgaaatgagccttaaagtggttaaataccatggacacacacaaggagttattgatctacttgacccatgggtgactggccaaaacctcttatatgcagagagaacaccgatccaatcaatatctgataatcagctgaaatcaccatgctcaatcttgcataat

SEQ ID NO: 33314 - DNA, 316 bp, Gossypium hirsutum
  Clone ID: LIB3149-021-Q1-K1-A4
ttcattgatgaacataactctaacaacaacactacatataagcttgggttgaacaagtttgctgatttaaccaaccaagagtaccgagccaagttcttgggcaccaggactgaccctagacgtcgactcatgaagtccaagatccccagctcacgttacgctcaccgtgccggcgataacttgccggattcagtagactggagagatcatggagctgttagtccggtcaaggatcaaggatcttgtggtgagtgaatttttatgtaatttctaacttcaaaatgaaaataattatatccatgcacttctttttttt

SEQ ID NO: 33315 - DNA, 421 bp, Gossypium hirsutum
  Clone ID: LIB3149-021-Q1-K1-A5
gaaaaaatcaaacctttttcatcgtttagcaaagctaaaccagaagaaaggggaaaatggacgcaattgactcagttttcgatccactgagagagttcgctaaggacagtgttcgtctcgtcaagagatgccacaagcccgatcgcaaagaatttaccaaggttgcgttccgaacagcgatcggattcgttgttatgggattcgtaggatttttcgtcaagctcatctttatccctattaacaacattattgttggatccggttaggccttgtcaacgtttgctgaaaatcggtagaatgtttaagttaagaggtacgtcatgagtttatgaagtaatttcaatttagacttgggtttgtctttaaattcagttttgttgaaaaagggttcaattttggtgtttgtaatagaatcttgttg

SEQ ID NO: 33316 - DNA, 414 bp, Gossypium hirsutum
  unsure (1)..(414): unsure at all n locations; Clone ID: LIB3149-021-Q1-K1-A6
aggcgaacggnnaggtaagggaattaacaatttccccgattaatttttatatttccttggaactgtagtagagcgtgtttattacatgaatctcataaccccactctatgcctttactactatactttgggttttgcaggcggagtcgaagagcggctcaaatgaatcggctttaaaggttgctttacatcatggaaaggcctcaagagttataaagccacatgaccgtgtggtggtatgacatatactatgtgatgcataagtggtaaagatccttgaacttgaaaattacaaacttatatgtagataagaagtttttcataacctaaaaccctaatcatagcatggattaaataaaccgtatctgtacacttattcttaaactatccattctatttttgtgtaaactgattt

SEQ ID NO: 33317 - DNA, 423 bp, Gossypium hirsutum
  Clone ID: LIB3149-021-Q1-K1-A7
gggaaaacgagtggctgaaactttgatgtttgattaccataggcagcatggcatagagattcgaattgctcggatcttcaacacttatggaccacgcatgaacattgatgatggtcgtgttgttagcaatttcatagctcaagcactccgcaatgagcctttgactgttcaattacctggaacacagacaaggagtttctgttatgtttccgacatggttgacggcttaatccgacttatggaaggagagaacaccggaccaatcaatatcgggaatccaggtgaattcaccatgctcgagcttgcagaatccgtgaaggagcttatcaatcctgaggtgaagatatcgatggtggaaaacactcctgatgatccccgacaaaggaagccggacataaccaaagcaaaagaggtgctcggatg

SEQ ID NO: 33318 - DNA, 415 bp, Gossypium hirsutum
  Clone ID: LIB3149-021-Q1-K1-A8
ctaagatatcgagccatcccccaaatctaatagtcagtttttacacgatggcggagttgttggacaaggcgaagaactttgtggccgataaggtggccaatatgaagaagcctgaggctagcatcacggatgttgatctgagccatgtaggccgtgacggcatccagtatgacgctaaagtctccgtcaccaacccctatagcgctcctatccccatctgcgagatctcttacactctcaaaagtgctggcagggtgattgcatcggggaaagtaccagacccgggttcactgaaggcaagcgactcgacgatgttggacgttgcagtgaaggtaccgcatagcgtattggtaagcttgataaaggacatcggtgcagactgggatattgactatgaattggaagtgggactcac

SEQ ID NO: 33319 - DNA, 379 bp, Gossypium hirsutum
  unsure (1)..(379): unsure at all n locations; Clone ID: LIB3149-021-Q1-K1-B1
gggggggagggaagcgtggggnnaaaactaatttttcaaaccctgtctttttattaccaaaggcancatggcatagggagggttattgttcagatctgcaacactcataaaccactcatgaacattgatcatggtcgcgttgatagcaatcaaatatctcaagcactccgcaaagaacctttgactgttcaattacctgcaacacagacaaggagtttctgttatgtatccgacatggatgacggcttaatccgacttatggaacgagataacaccggaccaatcaatatcggtaattcaggtcaatccaccaaactcgagcttgcagaatcctttaacaaccttatcaatcctgaagtaaatatattgatggttgaaa

SEQ ID NO: 33320 - DNA, 390 bp, Gossypium hirsutum
  Clone ID: LIB3149-021-Q1-K1-B12
tcttcacagaaaatagcgacttcgaagatgatgagagcagtgatctatttgctccccttgactttcatcttcttcaccatagctgatggtaagcgcatccttccactgcttcagcctcagcctcttgaatccttcaaggtcaatgcaacccagaatgtggggagctgcacttacacagtatcaataaggacaagctgttcttcaactacctacacaagagatcagatcagtcttgcatttggcgatgcttatgggaatcaggtgtatgcaccaaggctggatgatccatactcgagaacatttgaaagctgttcaactgatacatttcaaataaagggtccttgcacataccagatttgctatctttacctctacaggagtggatatgat

SEQ ID NO: 33321 - DNA, 417 bp, Gossypium hirsutum
  Clone ID: LIB3149-021-Q1-K1-B4
gaaaaaagaagcaaaaaaacatggccaaagttctgttgttcattgcactatgtgtgcttccagctttggttagtgctacacgcattctgaataatcaattggtggtagaaggctatgtgtactgtgatacttgccgtgctggttttgaaacccctaagactagaagcctagctgatgccatggttaggttggtatgctccgacaggaagagcggccaagttgtcttcaaaaaggagggatacaccgacaaaaccggaaaataccagattcgtgtatccgaggatcacttggatcagatctgtgatgcagttcttgtgaagagctcccagcttggttgtgccacaatgtcccccggtcgtgaacgtgcccgtgttatcttgaccaacttcaatggcatttcatccaccacccgttatg

SEQ ID NO: 33322 - DNA, 427 bp, Gossypium hirsutum
  Clone ID: LIB3149-021-Q1-K1-B5
tgaaaatgaaaggtcgagggccatgactgatatgaatggagtgtattgctcgagtagaccaatgaggattagtgttgccactcccaagaaagcatttggatatcagcaacagtattactcacaaggtagacaagcatcgaatggtgctgtggaacaaggtcttcattctcataatgactcgaacaatgctactatttttgttggaggacttgactcggatgttagtgatgatgatcttagacaacccttttcccagtttggtgagatcatctctgtgaaaataccgcctggaaaaggatgtgggtttgtgctatttgcaaacaggaaggacgctgaggaagcaatccagagcttgaacggaacaaccataggcaagcagaccgtccgactttcttggggtcgaagtattggaaacaaacagcggaga

SEQ ID NO: 33323 - DNA, 415 bp, Gossypium hirsutum
  Clone ID: LIB3149-021-Q1-K1-B6
tgaaaatgaaaggtcgagggccatgtctgatatgaatggagtgtattgctcgtttagaccagatgaggattagtgttgccactcccaagaaagcatttggatatcagcaacagtattactcacaaggtagacaagcatcgaatggtgctgtggaacaaggtcttcattctcataatgactcgaacaatgctactatttttgttggaggacttgactcggatgttagtgatgatgatcttagacaacccttttcccagtttggtgagatcatctctgtgaaaataccgcctggaaaaggatgtgggtttgtgctatttgcaaacaggaaggacgctgaggaaacaatccagagcttgaacggaacaaccataggcaagcagaccgtccgactttcttggggtcgaagtattggaaa

SEQ ID NO: 33324 - DNA, 412 bp, Gossypium hirsutum
  Clone ID: LIB3149-021-Q1-K1-B8
gaggactcaaaatcagcacttgaaaaagttcttagacatgaagatcttcagggagcccctctcttgatattagcaaacaagcaggatctctcagaagctttatcagctgaagaacttgcccaatacctagatcttaaaaagttggacgaaagggtttacatgtttgaggcggcttctgcttttgatgggatggggattaaagaaggtgttgagtggtcagtggaggtaatggagagaagcaagagaaccgagactttgagaattcgtgcaggtataactggtcctaattagagctttagagggaaagaaaccgagttacagctgcttcaaccctttttttgtagcttctgtgcataaatcagggttcacgttaggttttatattgattaaaagttaaatcaatttttcccac

SEQ ID NO: 33325 - DNA, 413 bp, Gossypium hirsutum
  Clone ID: LIB3149-021-Q1-K1-B9
gaggaacaccaaaaccttcttttgttttcttcttctaatcaatggcatcttccatagctacaactctcacttcctcttcaaagctttgcaggaacacttctctcttcgagtcttccttccatggggttccaattaaaccactttcttttcatttcaaaacaaagtcttccccgtgcaacgcatccatttccatgtctgcagcatcacctccaccctatgatctgaataatttcaggtttgaccccatcaaggagtccatcgtctcacgtgagatgacacgcaggtacatgatggacatgatcacctatgctgataccgatgtggtggtcgtcggtgccggctccgccgggctctcttgtgcctatgagcttagcaagaacccctccgtacagatagctattgtcgagcagtct

SEQ ID NO: 33326 - DNA, 401 bp, Gossypium hirsutum
  Clone ID: LIB3149-021-Q1-K1-C10
ctagcaacacataaaaatgcagtgggggtagcggtgggagccataataggacacaccatctgtacgtcactggccgtggtgggagggagcatgttggcggccaagatctcgcagcgaacagtggccgcaatcggcggctttctcttccttggcttttccctttcctcgtatttctatcctcccctatgatgatttgtaggttaaacatgattcttttgaagaacccaactcccgttgctcctttcaattcaatttttctcattgtttttgcctttatagtttatatatgcaacactgaaagtgttttatactaactggttaaaaaccagatcaatgtccttttccttttttttgtacacatgcatacatgtatggtttcttagggtaaggtgttatcaatc

SEQ ID NO: 33327 - DNA, 220 bp, Gossypium hirsutum
  Clone ID: LIB3149-021-Q1-K1-C11
gagatattgaggagggaattgaaaataatgcttcatcagagcgacggaagaagaagaaggttaaaaatgaagttgataagtgattgattttgcggcattttagcaattttgttgttttagatgaccgattgaaggtgggttttgggctttttggatgctatttgtaattgaaggaagtatgtttctaatttataatgaatgaaatctatccatggttatt

SEQ ID NO: 33328 - DNA, 354 bp, Gossypium hirsutum
  Clone ID: LIB3149-021-Q1-K1-C2
attttccaatattctgctgagaagctcggttgggatgctacacaaggtgaaaatcatctggattcaatggtgagaagagaaattttgactgcgcttgctatgcttggagacaggagacattggtgagcagcagacgattgatgcttctgaagacaaacacaccactctccccagacacagaagcacttgtagctgcatcagcagcacctctcaataactggttgacttctttgaagttatagagagctgattaagccggagaaaatcgatttaggtcattgcatcttgcccgacaggataattcggaagtctaagtttattgctctgagtcgcagcagaccttgttgcctgctg

SEQ ID NO: 33329 - DNA, 404 bp, Gossypium hirsutum
  Clone ID: LIB3149-021-Q1-K1-C3
cttcatctgaaactcgaaattcgcctttggtggttccagtttgagggtgaacaagtataactgttcaacaattgcttaaaacctttctttttcattttgctacaataatatgataaataataataatggaaaagtgaaaccggtgattgaaagtgcacaaccgtcagatctgaacaacttaaattgttgtttttgtttgtgtttattattctcaagtttttgggatgaacttcggctccttattgttatgatttggttggttgtatgaaagcaaacatcgatccgtctttgaagtagataaaccgcatccataataattagctttttatgatggaaaaattatgtggatattttttattagcttggacaaatttatcaataaaaagatttatatttttccttgc

SEQ ID NO: 33330 - DNA, 425 bp, Gossypium hirsutum
  Clone ID: LIB3149-021-Q1-K1-C5
ctgagatcaacaatggctactgatcaaaacgtgttgcaaaaacatgctgcgttcttcgataggaatcatgacggccttgtttatccatgggagacctttcaaggttttcgagcaattggagctggttatttactgtcaatggcgggtgctgtcttcatcaacctttctcttagtggcacaactcgaccaggaaagtttccatctcttctctttcctattgaggttaaaaacatccaaatgggaaaacatgggagtgactctggtgtatacgacagtgaaggaaggttcgtaccttcgaaatttgatgaaatcttcagcaaatacgcacgaacacatactaatgcgttgacatctgatgaactaatggcgatgctcaaatctaacagggaacctaaagattacaaaggctggattggaagctggac

SEQ ID NO: 33331 - DNA, 422 bp, Gossypium hirsutum
  Clone ID: LIB3149-021-Q1-K1-C7
cgcaagagccgcaaggctcatttcacagcaccttcttccgtccgccgcgtcttaatgagcgcacccctctcatccgatctgaagtccaagtacaacgtccggtctatgccggtgcgcaaggatgacgaggtccaagtggttcgtgggacctacaagggacgcgaagggaaagtggttcaagtgtaccgccgcaaatgggtgatccacatcgagcgcatcacgcgcgagaaagtgaacggttccaccgtcaacgttgggatcaacccatccaaggttgtcatcaccaagctgaggctggacaaggataggaagtctttgctggatcgtaaggctaagggacgcgccgctgctgataaagataaggggactaagttttcagctgaggatataatgcggagcgtcgattaaggttgtcttttttt

SEQ ID NO: 33332 - DNA, 394 bp, Gossypium hirsutum
  Clone ID: LIB3149-021-Q1-K1-C8
cgcagagaaccgcaaggctcatttcactgcttcttcttccgtccgccgcgtcttaatgagctgacccctctcatccgatctgaagtccaactacaacgtccggtctatgccggtgcgcaaggatgaccaggtccaagtggttcgtgggacctacaagggacgcgaagggaaagtggttcaagtgtaccgccgcaaatgggtgatccacatcgagcgcatcacgcgcgagaaagtgaacgattccaccgttaacgttgggatcaacccatccaaggttgtcatcaccaagctgaggctggacaaggataggaagtctttgctggatcgtaaggctaagggacgcgccgctgctgataaagataaggggactaagttttcaactgatgatataatg

SEQ ID NO: 33333 - DNA, 200 bp, Gossypium hirsutum
  unsure (1)..(200): unsure at all n locations; Clone ID: LIB3149-021-Q1-K1-D10
aagccaaacaacggcgcctatatgcgacccatccggggacancgacgtcttcncccgcgtcaccggtggtgaggtcggagcagccagttccatcgctccaaagattggttcgtcgggtctctctcccaaaaagatcgtgaaaaacattttcaaagaaactgccaagaatggaaggttctccacgtaactgataaactcac

SEQ ID NO: 33334 - DNA, 193 bp, Gossypium hirsutum
  Clone ID: LIB3149-021-Q1-K1-D2
attggaagcagctgtgcactgtctgatgcacagaactcgtcactttttgtgaagattcttgtgattgagatttttggcagtgcacttggattatttggagtgattgtaggtataatcatgtcagctcaagcaacatggcctgcaaagtcagtgtaattttccgctcttagttacaacttagctctgtgagact

SEQ ID NO: 33335 - DNA, 428 bp, Gossypium hirsutum
  Clone ID: LIB3149-021-Q1-K1-D3
gcaaaaagaacccaccgctttattgttttcaaaatcgaggagaagcagaagcaagttatcgtggagaagcttggtgagccaactgagagctatgaagattttactaaatgtcttcccgctgatgaatgtcgttatgctgtgtacgattttgattttctaacagccgagaacgtcccaaagagcagaatctttttcatcgcatggtctcccgatacatcaaggatcaggagcaaaatgatatatgctagctccaaagacagattcaagcgagaactggatggaatccaagtggaattgcaagcaacagatccaaccgagatgggtcttgatgtcttcaaaagccgtgcaaactgaatacagttcttttaggcttttgcaacggggaagcttccttccttccttcctacagtatgtcttttacttatgtg

SEQ ID NO: 33336 - DNA, 420 bp, Gossypium hirsutum
  Clone ID: LIB3149-021-Q1-K1-D4
caatggttggcttgcttgcatatttgtcgtttacaatgggaccaatgccattgcttaaactctacggcatcccttatgcaatatttgtgatgtggttggatttggtgacatacctacatcaccatggtcatgacgagaagcttccatggtatcgaggaaaggagtggagttacctgagaggagggcttacgacgcttgatcgggattatggatggattaacaacatccaccacgatattggaactcatgttatacatcatctcttccctcaaatcccacattatcacttgattgaagctaccgaagcagcgaagccagtgctcgggaaatactacagggagccaaagaaatccgggcctttaccattttatttacttgggatactcataaaaagcatgagaaaggatcattatgtgagtg

SEQ ID NO: 33337 - DNA, 419 bp, Gossypium hirsutum
  Clone ID: LIB3149-021-Q1-K1-D5
ttccgaatcttttacgactcgtaaaatagttgaattgactcatggcttccgccgttgcttccgttgcgaagaagaaaactgctggctctaagaagtctaaatcagctccttcacatcctccatttcttgagatgatttcagatgcaatcgtttcgttgaaagagaggacagggtcgagccaatatgcgatcgcgaaattcatcgaagagaagtataagcaattaccggcgaatttccgcaaagtcttacttgttcagacgaagaagtttgttgcttctggaaagcttgtcaaagtaaaagcctcttttaagctgccttcggcttctgccgcagctaagaaaccggccgccgtagctaagaagcctgccgccgcgaagcctaaatctgcagctaccactgccgcctcaaagtccaagccg

SEQ ID NO: 33338 - DNA, 254 bp, Gossypium hirsutum
  Clone ID: LIB3149-021-Q1-K1-D6
gaaatggagaatggtgaggcatttatagtctgcagtgcacgtattggaagttcaagcatttggaggaacaacgccatggaagctttctccatgtctgctcgtgaagaagatgatgaagaagacctgaaatgggctgccatcgagaaactgcctacatatttgcgtgtaaggagagggatattcacagaaggtgaaggtcaatcaagggaaaaaaaaaaaaattacacaacaaatttgaaacttatgttattcat

SEQ ID NO: 33339 - DNA, 419 bp, Gossypium hirsutum
  Clone ID: LIB3149-021-Q1-K1-D7
gaaaaaagaatggcagaggagcatagatgccaagcgccagaggccatcgctttgcgtcaataactgcggctttttcggaaattcggcgacgatgaacctttgctccaaatgttacagagatctctgtctcaaggaacaggaagcttcttcgatcaaatccgctctttcctcttccccttcgtcttcgtcaacggttgtcgaatctatttctcaggttcctcttttggctctccctgaagtcaacagagaatcggcggtcccggagattgcaccggcggccgaacagctatcgcagcaacaaccgaatcggtgcatggtttgcaggaagcgggtcgggttgaccggattcagatgcaagtgcggtgttacgttttgcgggtcccacaggtaccctgagaatcacgggtgtacgttcgatt

SEQ ID NO: 33340 - DNA, 415 bp, Gossypium hirsutum
  Clone ID: LIB3149-021-Q1-K1-D8
caagaactgtgatttccaaatggatcgttacgtcttcaagcgtcgcaatgacggaatttacatcatcaaccttggcaagacctgggagaagcttcagcttgcagctcgtgtaattgtcgctatagagaaccctcaagatatcattgtccaatctgcaagaccctatggtcagagggctgtcttgaaatttgctcagtacactggttgtcatgccattgctggaaggcacactcctggtacattcactaaccaactccagacatctttcagtgagcctcgccttcttatcctcacagatcctaggaccgaccaccagcctatcaaggaagcagctcttggaaatattcctaccattgctttttgtgacacagactcaccaatgcgatatgttgacattggtattcctgctaataac

SEQ ID NO: 33341 - DNA, 409 bp, Gossypium hirsutum
  Clone ID: LIB3149-021-Q1-K1-D9
cccacgcgtccgcccacgcgtccgcgatttctcctccatcaaagaagaagccaaacaatgccgcctaaattcgacccaacccaagtcgtcgacgtcttcgtccgcgtcaccggtggtgaggtcggagcagccagttccctcgctccaaagattggtccgttgggtctctctcccaaaaagatcggtgaagacatcgccaaagaaactgccaaagaatggaagggtctccgcgtaactgtcaaactcaccgtccagaaccgtcaggcgaaagtcgctgtggtcccgtcggcggcggctcttgtaatcaaggcgttaaaggagccagagagggataggaaaaagaccaagaacatcaagcacaacgggaacattaacctcgacgacgtcatcgaaattgctaaggtaatga

SEQ ID NO: 33342 - DNA, 426 bp, Gossypium hirsutum
  Clone ID: LIB3149-021-Q1-K1-E1
ctctaccaagctcctactcgctctcaatggagtcaagaaatcccagctccgcccactccctacccagatccaagctgaggcactttctacccccattatttccggaacaagccaagggagtggagagtacttttcccgggtcggagtcggtaaaccggctaaacaattctacatggttcttgatactggaagtgatatcaactggattcagtgtgagccctgtaacgaatgttaccaacaatccgaccccatatttaacccatccgggtcctccacttacagcccggttacttgcgaatcaaaacagtgctcttctcttgaagtttccgcttgccgtagcgggaaatgcctataccaagtctcgtacggtgatggatcttacacggtgggtgatttcgttaccgagacagtgtcgtttggaaactc

SEQ ID NO: 33343 - DNA, 409 bp, Gossypium hirsutum
  Clone ID: LIB3149-021-Q1-K1-E10
ggcacttgcagcgttatgacaacctcggtcgccgccaggtcgtcgggtgcattccctatagattcaaatgtagcagtgatggaaccattagtgatgagttagaggttcttgtaatctcctcacaaaaaggtcaaaaaatgatgttccctaagggtgggtgggagcttgatgaatccatagaagaagctgctttaagagagtcaattgaagaagctggagttataggcaatgttgagtgtgaactgggcaaatggtactttataagcaaaagccatggcacattttatgaaggttacatgttccctttgcttgtgaaggaggaacttgatttctggcctgagcagaatgttcgccgaaggacttggatgaatgtgaaagaagcaagggatgtatgccagcattggtggat

SEQ ID NO: 33344 - DNA, 409 bp, Gossypium hirsutum
  Clone ID: LIB3149-021-Q1-K1-E11
caggttcgtggtgcaatggaaaaatatcctccctatcaatcgattttctctaaattatcatatggagaaagtcaaatgcttgacaaagcattttacgaggaggaagtgaaaaggctttgcttagctttcgagcaacagttccattacggtgttttctttgcatacatgagattaagggagcaggagataaggaacctgatgtggatctctgaatgtgtggctcaaaaccaaaagtctagggttcatgacagtgtggtctttatattttaaatgatccatctgaccaccgagccgaagtgggttaggaataatgaatggtaatgtcttttacttgatcagctgtacattgtctgtcctccctcaaattctccacccatattttcatttaagtggtgtgtttagccgctct

SEQ ID NO: 33345 - DNA, 261 bp, Gossypium hirsutum
  Clone ID: LIB3149-021-Q1-K1-E2
tttttttgcaatatcctgcttccgtaactgtgcttcaatatcaactcttctttttccctcaagttcttcaatggttgttgggaacttaggctgttccacaggtctatcttcatcagcaacatcataaaaccccggaggaggcctcttctcaaaggggatttcagcattataatcaattccctttctttttctctttcgttgccttgtatcgatcccagcagccttaagttccctccttttctgcaaagatgcaaggcaacg

SEQ ID NO: 33346 - DNA, 72 bp, Gossypium hirsutum
  Clone ID: LIB3149-021-Q1-K1-E3
aaaaaaaaaaaaaaaaaaaaaaaaaccaaatttaaaaaaaaaaaaaaaaaaaaaaaaaggacggccgaatat

SEQ ID NO: 33347 - DNA, 418 bp, Gossypium hirsutum
  Clone ID: LIB3149-021-Q1-K1-E4
atggttttagactgtcttgtcttaggtataagggctataattaagttattcagggttatcttacttcggattgggtttccttaaaatgcaacttttttttccctccttttggcagggtggatttattgatgatttcctctcacatttgatgtgctgctgttgcgcccttgttcaagaatggcgagaagtagagatacgtgggtttaatgggtcagagaagactaaaacaagcccgccaccatcacaatttatggaatcatgagtaacaggacaggataggattcaaagcttttcccttcttttttttttggaggtttaatatatagagcgtaaccctccttagtggcctctgtgaaattaaaactgtactaagaatatggcgccctttgcttttgaacctatagatatgtaaattagt

SEQ ID NO: 33348 - DNA, 412 bp, Gossypium hirsutum
  Clone ID: LIB3149-021-Q1-K1-E6
cttggtggtgtcatgaccaaaatcattccaagaaacaccacacttcccacctccaaatcggaggtcttttcaacagctgctgatggccagacaagtgttgagatcaatgtactccaaggtgaaagagaatttgttcgggacaacaaatctcttggcagcttccgactcgatggtattccaccagcaccacgtggtgttccccagattgaagttaaatttgacattgatgccaatggcatcctttctgtaactgctgtcgataaaggaaccgggaagaagcaggacatcactattactggtgccagtactttgccaaatgacgaggttgatagaatggtaaaggaagctgagaagttttcaaaggaggataaggagagaagggatgccattgacacaaagaaccaagctgatt

SEQ ID NO: 33349 - DNA, 422 bp, Gossypium hirsutum
  Clone ID: LIB3149-021-Q1-K1-E7
caaatttctaaagctattgaagaagaatggcaagttcctccattatttttctcttgctttcccttctatgcattgtttgcgaggccagatctccaactgctgcaagatcaggtgcctcaaatttcatcaaggcttcatgtagtgccaccaaatatccatcactttgcatccaatctctcgcagcttttgccccttcaatccagcggagcccacgccaactggctcagactgccctttcggtgagcctagagagggcaaagtccacccaggcattcgtctccaaaatgaagaaattcaggggacttaagaggagggaatatgaagcaatcaaagattgcattgaggagatgagcgagagcgtggacaggctgagcaaatcagtgcaagagctcaagtacatgggtcaagccaagggtcaggat

SEQ ID NO: 33350 - DNA, 410 bp, Gossypium hirsutum
  Clone ID: LIB3149-021-Q1-K1-E8
aaaaaaaaaaaaaataaaaaaaaaaaaatagtttagaaaaaaaaaaataaaaaaaaaagggaagggttatataaatagaaaagaaaggcaaaaaaaaaaaaatgatgaaaaataaaagaacctaaaattaaataaaaggattaatgtagtgcacacctaatatacatcactttaaataaaaatatatcgaaaattttgggctcttttttccagcggagcccactcctactggctcatactgccctttctgttttcctagagagggcaaagttcaaccaggcatgcggcttcaaaatgaacaaattctggggacttaagaggagggaatatgaagcaatctaagattgcattgccgatatgagcgagagcgtgtacaggctgagcagatcaccgcaagagctcacctacat

SEQ ID NO: 33351 - DNA, 147 bp, Gossypium hirsutum
  Clone ID: LIB3149-021-Q1-K1-F1
tctcactcttagctcttgtttaactgccatgcatgtatttgtttagataagtctacctaaggtaagacccatggaaagaagctaactccaagtacaacaaacgaaggacagactaactcaccggataagacctcaggaccggtctat

SEQ ID NO: 33352 - DNA, 409 bp, Gossypium hirsutum
  Clone ID: LIB3149-021-Q1-K1-F11
aacgtgggctagatgggtgaaccgcaatgttgatcctttgaaaaccaaggtttttttccagggcatttctccaacccattatgagggaaaggattggaacaagccaacagagtcctgctcgggacagacacaaccattcttcgggatgagatacccaggaggcacacccatggcttgggttgttgtgaagaaggtcctgagtaggattaagaaaccggtgtttttgctcgacgttaccggactctctcagtaccgaaaagatgcacacccgtcggcatacagaggcatggacggcgggactgactgtagccattggtgccttccatgtgtgccagatacttggaacagtttactttatgcagctgttttttagtgaatttaggcaggaagatggaaaaccatttgtttt

SEQ ID NO: 33353 - DNA, 360 bp, Gossypium hirsutum
  Clone ID: LIB3149-021-Q1-K1-F12
tgccatttgccttaatcatcttcctctttctttaaaacctcttcctatttaatttccgactaaacttgcgctgaattccatggctactgcagaggttgtatcagctcagactgcaatccatgaggagaaacctgaagaagtggtcaaggttggagaaattgcaacagaagaggtaccggctgttgctcctgcagcagaacctgttgctgaagaaccaaaggaagcagtgcctgaagcagcatccggagaaccccaggctccagaaactgaagccacagttgaaactgaatcaaaggaggtggttaaagagcccaaggctgtgactgaagagccagaagttgagaaaaaagaggaagagac

SEQ ID NO: 33354 - DNA, 419 bp, Gossypium hirsutum
  unsure (1)..(419): unsure at all n locations; Clone ID: LIB3149-021-Q1-K1-F2
ggaacaaaagcttgctgcatagcatgtggaaatgcagagacttggtacagaaaaccagagaattgctgctacccatgggacattgagacaggaacttgctactgcacagcatgagttacagatcttgcacgctcagataggagctgtaacatctgaaagagaataacaaatgaggagccttacggataaaatagctaagatggaagcagaactgcaagctggacattgttataatagaatgttctttcaattttaaaactgtatgagcaaaatgaaatggactaggatactgcaaagaagtaatcactttgataataagtcattgagtttaagttggattataggttcaattgtatttattgttctagaggctacactaggtatcaactntagcaccctntctctttcaaatttttttt

SEQ ID NO: 33355 - DNA, 423 bp, Gossypium hirsutum
  Clone ID: LIB3149-021-Q1-K1-F3
agaagatggtctagacttcgctgagctggcattaatgacagaaggatataccggaagtgaccttaagaatttatgcacaaccgcggcttatcggccagttagagagttaatacagcaagagagattgaaagatctggagagaaaacaaagagttgttgaagtacaaaacaaagaagatggtgcagaagaaagagtcattaccctaaggccattgtctatggaagatttcaggcaagcaaagaatcaggtggcggctagcttcgcatctgagggagctggaatgaatgagttaaaacagtggaatgacttgtacggagaagggggttcaagaaaaaaggagcaactatcttacttcctatgaaggggttcgttttacagttacagacaccgcaggaagaattttaacagagaaaccatgattga

SEQ ID NO: 33356 - DNA, 392 bp, Gossypium hirsutum
  Clone ID: LIB3149-021-Q1-K1-F4
gtcttgcagcttgttaaaagcaatagatcttatacttgaaggagctcaaaaccttgtggtaccaatcaaaaccaagctcagcaacaagagaaaacagcaccagaagccatcaccgacggtcactgtccacaaaggccgtgaattctgctggttaactcaagaagatgtgattagattcctactcagctcaattggcctcttttcacctgtccctactttctccatcgacactcttggcatcatcagctctgaaatcctcaccattgagtaccactcccctgcttctgcagccataggagccatttctcgatcccttgtggaccaaacttcagtggctgtggttgacagtgaaggctgtttgattggagaaatttctcccttcaccttggcct

SEQ ID NO: 33357 - DNA, 418 bp, Gossypium hirsutum
  Clone ID: LIB3149-021-Q1-K1-F5
gaacttttatatacataaaggatgctattgtagctgttctcttgatgattgaaaatccagatagggccaatggccatattttcaatgtgggtaacccgaacaatgaagtcacagttaggcaacttgctgaaatgatgactaaggtctatgccaaggttagtggagaaactgtgctggagtctccaacagttgatgtcagctccaaggaattttatggtgagggttatgatgatagtgacaagagaattccagacatgaccataataaacaaacaactcggttggaaccccaagacatccctttgggacttgctcgaatctaccctaacctaccaacacaggacttatgccgaggctattaagaaatctatagcaaaaccttctgcatcctaaaggaggctagatgtttaaaccacggc

SEQ ID NO: 33358 - DNA, 359 bp, Gossypium hirsutum
  Clone ID: LIB3149-021-Q1-K1-F6
agaaagaagaagaagaaagcaaggttttatttagatgggtcttccatgcactatggggctttggtttcagcttctacttttgatgtgtggcagtgggatacatggtgtgaagaatttgagggaaaaacaaggggatgctcaacttgttagaaaggtggaggataaatattctcttgtttctaatatagcacatcctgcagctgaggagtcatcttttcaagttacttatcagctgggggatatatattctagtttttctgtgttggaggacaaatgtactaagttgccttctgatcaacttgctaaggagctggaggataaatattctagaattggctggcaggaaaccttttgttgac

SEQ ID NO: 33359 - DNA, 384 bp, Gossypium hirsutum
  Clone ID: LIB3149-021-Q1-K1-F7
gccaaaggaagatgaagaggtggttctttccatggcccgtgttcttcaagagagagtgcaatcgcacttggcctttcctcgttggtttcgccgtcaccgggaccatcatcacaaagttctcccttggtctaaccgaggaagatgctaagaactctccctttgctcagaagcacaagaggtgatccaactgatttcaaaagcctatatggttgcagtcccttggtatgagaggctcagttgttttcctttttccttttcccaatgaacaatgaaaataacagaagacatcagttctgagtacactttattttgtgaattatgattttgtcatcaattaatgattttgctttgaataaggttaaaacacccttccagttagtgatt

SEQ ID NO: 33360 - DNA, 414 bp, Gossypium hirsutum
  Clone ID: LIB3149-021-Q1-K1-F8
ctcgaagctgctgtttgcctttgcaccgctatcaaagctaacatcttaggcatcaaccttaacattccagtttcccttagcttgctcctcaacgtttgctcaaagaatgttccttccaacttccaatgctaagtcttcactgttcccaacattctttctagttttccttattgtgtttggttattgaaagttacggtttccgacatttgcagtaaatcagtggtttttcatttgtaactttattatttcaatttccttgcgagggatggatactgaataaatttaatacttctcttcaagtgtttttcttttggggttttttgtttctccaaaagacatgaaaaagacttgtttaattcccttgcttttgtttctctatccatttactaatggattttgtatgtgaaccaatct

SEQ ID NO: 33361 - DNA, 350 bp, Gossypium hirsutum
  unsure (1)..(350): unsure at all n locations; Clone ID: LIB3149-021-Q1-K1-F9
acgcgnncgaggagactggtgtaatgtactacactgcttcccataggcacttacttgggccaaactatcagcgactacgagccaatgctgccaaatgagctcatcacaacgatcaccaaaaaggttttatgaatttcatagcacacaggatcaggacagaaatttctttccttcaaggtacaataacggtgcgtcgatgcaaaggaaccccctatcccacctgctgtttgcaccgtaaaagccaaaatgtgcggtatatgacaaggagagcatctttatacagaaccggacagagatacccgcgccgcgcagcgggctagcaataacgaatggtctggcgctgtatttag

SEQ ID NO: 33362 - DNA, 219 bp, Gossypium hirsutum
  Clone ID: LIB3149-021-Q1-K1-G10
aaaccctttggtattaaacctcccacggaacttgcgcggaattacatgggtactccagaggctgtatcagctcagactgcaatgcatgaggagaaacaccaactagtaggcaagggtggagaaatttctacacataaagtacccgctgttgctcctgcatcaaaacctgttgctgaagaaccacatgaagcagtgcctgaagcagcattctgagaaccc

SEQ ID NO: 33363 - DNA, 393 bp, Gossypium hirsutum
  Clone ID: LIB3149-021-Q1-K1-G12
gtggtagaccagagatggtggcgggagggtaccattcacattctggatctggctgccggctcaatggagtggacataaacacacagcttagttacgaagctttgaaccaaagggccgcccccaaggtggagcacccaatgacgagcgtttaacggccagtggagaacgatgcatagcgttggaccaaaccacaaaccacgatgcttgcccaagagccacaaccatcatcatgtactcgcctgcattttaataagccacctatccaagcgttactacatgggctccacacacattcctactcgatgaacattagactgaccggagattgacactgagaaaaagatgctgttgaaacttcacaagaagaagatgacagatggactgacacttaca

SEQ ID NO: 33364 - DNA, 401 bp, Gossypium hirsutum
  Clone ID: LIB3149-021-Q1-K1-G2
aatgccaatggcttgatcatgatttagatgacagaccaaattttgagaggccccaacgaaccccttcctgcgcattgcagtttgctgttaccggctcttcaattcatgtctttggtttggccatctaactaggagagtgtgttcgtcgcagatcatctctgtagcattgggatacagtatagagcctgaaaaccttgcccgggtttctgtacacaagttacacggtaatgtttcgggacagcgataatttgtcttccagttaaataagtttgtcgagttccaaatatggtgcaatggacatgctttgaagcgaagcatgtaagaaatcaaagtaatggagcaataaaggcatgaaaaagcatgcatgtgaaacatccaagtgccactcggattaaagtgac

SEQ ID NO: 33365 - DNA, 402 bp, Gossypium hirsutum
  unsure (1)..(402): unsure at all n locations; Clone ID: LIB3149-021-Q1-K1-G3
caagtttcttgggttcctactagcaaatctgaggccatttgatctgtatcaacataagcaaaagatccctgacctgacttgcatcatcgatgtagtgaaagaagtgttagagaacaagtgagtagaaggtaggagaggcaaggctttgaatgctggtgaagctgttttgctgttcattttgtggctgcaattattataagtagtatcaactcgttttcttaatgtatatgcattggtgatccatagtaatattagaatggtgagaagctatatatgtattttaccatctgctggtaagttttcgtcctgtatctcagctctcttcttcagtaagatcctagtttggcttatggattaagaaattatcccttgttatatataatggtgatctatntgtttttc

SEQ ID NO: 33366 - DNA, 293 bp, Gossypium hirsutum
  Clone ID: LIB3149-021-Q1-K1-G4
gtagccgtgacaatcaccctcttcgaagttttgggctcctctcgttaaggaaatgatggagaagattatcagttgcaagctgatctttttaataacttacaatctcaattgtagacgttttattctcaccaacatctttcaaaaaatttatttgtgaaaatttttgaattgaattattagattaattctcttttttggtttattttggtgttccttttaattcgtctaaaatcgaaatcaacttttgtaattgatggttaaattttactaacaagtgacgtttaaggtttatg

SEQ ID NO: 33367 - DNA, 408 bp, Gossypium hirsutum
  Clone ID: LIB3149-021-Q1-K1-G5
ggatgggttaggggggttttggaacataggtatctcggcgtgcgctgtgtgtgatggggcagctccgatcttcagggagaagcccttggcagtgatcggtggaggtgactccgccatggaagaatccacttttctcaccaagtacggttccaaggtttacatcattcacaggagggatacgttcagggcatccaagattatgcagaacagggttatttcgaaccctaagatagaagtcatatggaactcggtggtcgtagaggcctacggcgatagggttttgggagggctcaaggtgaagaacttggtcaccgaagaagtttccgatttgaaagtcaatggtctattctttgccatcgggcacgagcctgccaccaagtttttgggaggtcagctggagctcgactc

SEQ ID NO: 33368 - DNA, 222 bp, Gossypium hirsutum
  Clone ID: LIB3149-021-Q1-K1-G6
cgacccgatggcgatggattcactcttgttttaaaatttttatttcactccgaaaggcaacaacgaacgagagtcttttcttcaaactgagctgtcccctaccttacaatctatatgttagaccctgtcttctcaccaacatattgcaaaaaatccagatcataaaatgtaactatttaatacaacatataaccctaaaacctggcccatttttctgaacac

SEQ ID NO: 33369 - DNA, 408 bp, Gossypium hirsutum
  Clone ID: LIB3149-021-Q1-K1-G7
aatgccaatggcttgatcatgatttatatgacagaccaaattttgagaggccccaacgaaccccttcctgcgcattgcagtttgctgttaccggctcttcaattcatgtctttggtttggccatctaactaggagagtgtgttcgtcgcagatcatctctgtagcattgggatacagtatagagcctgaaaaccttgcccgggtttctgtacacaagttacacggtaatgtttcgggacagcgataatttgtcttccagttaaataagtttgtcgagttccaaatatggtgcaatggacatgctttgaagcgaagcatgtaagaaatcaaagtaatggagcaataaaggcatgaaaaagcatgcatgtgaaacatccaagtgccactcggataaagttgactgggcac

SEQ ID NO: 33370 - DNA, 419 bp, Gossypium hirsutum
  Clone ID: LIB3149-021-Q1-K1-G8
ttttgaatggtgctagcttcaatttttccgataatcacggtctctgcggcatacctggactacctaaatgcggaccccacctctctgctggtgcgaaggttggcattgcctttgctgtatttttgtctcttgtacttcttgttatctgttcaatatgttggtggaaacggcgacagaatatccttcgagcacagcagattgcagctgcatcaagaagtgctccctatgcaaaagcaaggactcaatcatcacacgatattcagatgtcaaggaatcctagtcgtggccggacagcttccgagaatgggccgagcttgctatcgtgatccaatcagttttccatctctttgttgtgtttatttttgaccaggaagatgaattgcagaaacaaccgagttgattttagttcatgatgccct

SEQ ID NO: 33371 - DNA, 74 bp, Gossypium hirsutum
  Clone ID: LIB3149-021-Q1-K1-H1
aaaaaaaaaaaaaaaaaaaaaaaaaccaaattataaaaaaaaaaaaaaaaaaaaaaaaggacggacagatatgt

SEQ ID NO: 33372 - DNA, 375 bp, Gossypium hirsutum
  Clone ID: LIB3149-021-Q1-K1-H10
attttacactgggttccccgtatattgtgttaggattgctccgcacgtcatgatgacttggatattcctcaaccagattcagaaggtagagaaaaaaatggggttgtagagcgttgtcacttctcagagacgtggagtaatgctggactaattgattgcgtcaaataaaatcctggatttttgctggttctggctaatcatgcaaattttgaaatacatttcaagtcaatgttgtcttatttttctgattaaatattttagggtgagataggaaaaccatttgcatcccagagttatgatttgattgctcatacttctgattaaaaataaatgtgtaccaaaccaagttcaaagcattaaatcttcatatttttc

SEQ ID NO: 33373 - DNA, 412 bp, Gossypium hirsutum
  Clone ID: LIB3149-021-Q1-K1-H12
aaaatctttaaataaaacaattaaatgtgtggaaattgaagtcatttaaagtgacaatgtctggtgagtctgcaagtataatttacaggtaagttaaagatgatagaagatgctcagaacggaaataataaccttccttttgtgggtgagaatcgatatactatcttatatgtttgtactaattgtgtcggcaaagctcaaatgaacttgtctaagcccagtttatttatacttgtaagattctctgcactgtatcatctatttatattatacttaaaattgttatttaaaccgataaaaatcattacgttattatatgatccatccgtttcttttggaaaaaatttgatgacacggccatattttgtcttttacttggatcagtggtggaggcacgaccttaacaccaaca

SEQ ID NO: 33374 - DNA, 262 bp, Gossypium hirsutum
  Clone ID: LIB3149-021-Q1-K1-H4
aaaaaaaaaaaaaaaaaaaaaaaaaaaaatatattttttaaaaaaagggcgaaaaaaaaaaggacggacaatattaaaaaaaccaagataacaaacccatacctccgccataatgacaccttctatacaagtccctggccttcaatttaacaaccacctttttacaacaacccggccggtaaaacccttggtcttcctaaatcaaaccccttttttcccatccccctttctacccctgacgcactcgcgaaaagcccttccc

SEQ ID NO: 33375 - DNA, 464 bp, Gossypium hirsutum
  unsure (1)..(464): unsure at all n locations; Clone ID: LIB3149-021-Q1-K1-H6
aaaagaaaagaaaaaaaaaaaaaaaaaaatataaattaaaaaaaaannaaaaaaanaaaagaagaaggtgttttttataaaaggggccacccaaaaaaaaggggccaacataaaaaaacaaaaaaaaaaaaaaaagggtctaaataaaaagacacaccggaaaaaaaaaaacggggaagaaaaaaaaaaatggggggagggagaaaaaaaaacactaaaaaaaaaaaaagcgcgtatcaaaaaaataaggaaaacaacaaaaaaaaacccnngnaaaaaaaaaaaaaataacgaaataaaagagaaaaaaagaaaaaacaccacaaaaagaaaaaaaaaacaaagattacaacaaacaagaaaaacaaaaaaataaaaagaaaaataagaaaaaaaaagataaaaataaaataaaaaacagaaaactaaaaaaaaaaaaaataaaaaaatataaagcaagaacc

SEQ ID NO: 33376 - DNA, 416 bp, Gossypium hirsutum
  Clone ID: LIB3149-021-Q1-K1-H8
gctgaagggcttgcactaggagtggctgctccaaaagcttatggacttggccggcacatggtccttcctgtatcccttcacgggcttccacgtggtgcagcagtggccagctgcatctttggagctactggcagttggtatggctctcttgcagcagctgctctaattggcttcataggcccgatatctgcaattggagcaatattggcaggaattgactacagtggtcttgaccatgtgatggttttggcctgtggaggattgatcccatgctttgttagaatagttcaaagagcagtaaggttagatatccgaaaaagcagctgcggtcttgctgttggagtcggttttgctactctttgtttagcatgcaccaagttggtttgcttgcatacaccttattgcaattctgctcc

SEQ ID NO: 33377 - DNA, 401 bp, Gossypium hirsutum
  Clone ID: LIB3149-021-Q1-K1-H9
gcagctttcgtcattccaaatgagggtactataatcaagacacccaaagagtttatagatgaccaacatcctcggcttttcaaggacttagatttcatggagttcttcctttatgccttttccgatcctgcaaggcacatcgacaacggggagttgctccatgtctttgctggcctctcaccaccagtttccaattaaaatcatgctcatatagacaagtaaaagtttggttttggttttaaattaatgttacaaataataaattgagtcctatactcgagatctacgttctcgaactgtattaccatgttatattttgttataattgtgtactactaaatctactatgttgagtaatggtgggtttatgaaatcaataagattgcagttcatgggaaaaa

SEQ ID NO: 33378 - DNA, 159 bp, Gossypium hirsutum
  unsure (1)..(159): unsure at all n locations; Clone ID: LIB3149-022-Q1-K1-A1
ggccgggccaggcgnncgagcaaggcaacaactttttatccatcggctatcaattttataccaaagaactcaactatgatgaacggctttttctaaaaattgccaattcccaattccaaaaacttaataaagatgctcatttatcaatgtaaacacaaa

SEQ ID NO: 33379 - DNA, 326 bp, Gossypium hirsutum
  Clone ID: LIB3149-022-Q1-K1-A10
gacagcccccaaatccgatgatatttacctcaaactcctcgtcaagctttaccgtttccttggtagaagaactggaagcaaattcaatgctgtgatattgaaacgcttggttatgagcaaagttaacaagcctccactatctctctctaagcttattgaattcatgaaaggaaaggaggataagattgctgtggttgtggggacagtgacagatgatattagggtttatgagggttcctcttttgaaggtactgctcttaggtttactgagactgctagagctaggattgagaaagctggtggagaatgcttgacttttgatcagc

SEQ ID NO: 33380 - DNA, 134 bp, Gossypium hirsutum
  Clone ID: LIB3149-022-Q1-K1-A12
ggttattttgattttgtacatttgggctaataaattgttacctttttactcgaatctctattaatgaccatgtcttggctgctttttaacattgtatcatttgtacattattttagttgtcaacaatagttgtt

SEQ ID NO: 33381 - DNA, 403 bp, Gossypium hirsutum
  Clone ID: LIB3149-022-Q1-K1-A2
aggaagtactgatggtatattggatgatcttgaaagagctgctgatgatggagtcaatacatataaggcaatgtgcaaggatagtcgtatggaacctggagctgctgctacagaaatcgagttggcgagaagactgaaagagttcttcttcaaggaaacaggattggatcagtatgccattgctaagtttgctgaaagttttgaattgctaccgagaaccctggcagagaatgctggactcaatccaatggatattatatctaagttgcatgaaaagcatgcatctgggaatggtcaagtgtgcatcgacttgaggggagacgactctgaggacggtgtttgcgaagatgtctcaaccgtgaatgtttgggacctttatgtcactaagttttggctctaaata

SEQ ID NO: 33382 - DNA, 338 bp, Gossypium hirsutum
  Clone ID: LIB3149-022-Q1-K1-A3
aaaactctctcattttatcactgccgatttttcagcagccgcgccacactcgagagagagctcgtcagccatggccgaacagactgagatagcctttttgaagcaaccaaaagtgtttttaagctcaaagaaatcttcaaaagggatgagacctggaaagggaggtaaccgcttctggaatgagcttaggttggtgcttgatgactattggtgaagctatcgatggaacctacttctacactaaatgcccgggagctggcactgaagcggtcaggagagctagcatatctgaatcgtgccatagggctcatattgataggacactaatctgacgacgg

SEQ ID NO: 33383 - DNA, 424 bp, Gossypium hirsutum
  Clone ID: LIB3149-022-Q1-K1-A5
agcagctgcaccacaactacagagaagagagttaaggggaaaaaaagcgtcgtcgtttttgctgcttcttctacttcgctctctctccttctccgaagttcctctttcgttctttcatttattcagtattgtaaaagatggccgacggtgaggatattcaacccctcgtctgtgataatggaactggaatggtgaaggctggttttgctggtgatgatgctccaagggcagtttttcccagtattgttggtcgtccccggcacactggtgttatggttgggatgggtcagaaggatgcctatgtaggagatgaagcacaatctaaaagaggtatccttactttgaaatatcctattgagcatggtattgtgagcaactgggatgatattggaaagatctggcatcatacattttacaatgaact

SEQ ID NO: 33384 - DNA, 344 bp, Gossypium hirsutum
  Clone ID: LIB3149-022-Q1-K1-A7
ccaaagagctcatgtattaaggacggcttatctaaaaattgccaaggcccaatccaaggagctcaataatgatgctctttaagcaatggaaacacaaaagaagccgtaggaattcaaggatgaggcaatgcctgatgtgaaatcattggacatccgaaactttatctgaaactcgaaattcgcctttggtggttccagtttgagggagaacaagtataactgttcaacaattgcttaaaacctttctttttcattttgctacaataatatgattaataataataatggaaaagttgaaactcattattgaatgtgcacaaccgtaatatctgaacaacttaaat

SEQ ID NO: 33385 - DNA, 57 bp, Gossypium hirsutum
  Clone ID: LIB3149-022-Q1-K1-A9
tgttggcaatttgatatgtcattcgtaaaaggatcaaactgagtgcagaaaaagcaa

SEQ ID NO: 33386 - DNA, 436 bp, Gossypium hirsutum
  Clone ID: LIB3149-022-Q1-K1-B1
agcaatgcaacaactgttgctccatcggcgatcaaacttgcaccaaagtgctcaagtatgaagaacaactggagctaaaaattgccaaggcgcaattggaggagctgaagaaggatgctcttgaagcaatggaaacacaaaagaagcgggaggaattcaaggatgaggcaatgcctgatgtgaagtcattggacatccggaacttcatctgaaactcgaaattcgcctttggtggttccagtttgagggtgaacaagtataactgttcaacaattgcttaaaacctttctttttcattttgctacaataatatgataaataataataatggaaaagtgaaaccggtgattgaaagtgcacaaccgtcagatctgaacaacttaaattggtggttttggttgtggttattattctcaagtttttgggatgaacttcg

SEQ ID NO: 33387 - DNA, 340 bp, Gossypium hirsutum
  Clone ID: LIB3149-022-Q1-K1-B10
gcgagtttgggcgaatgcgcaaaaggattgctcgcatgcttactgttaaacgggaaagagagctcgaagagggcatcaacaagcgattgtcaagaaagctcgatcggcaatggaagaaaagcattgttgtgaaaccacctccatctttgatcaagttgagagagcaagaggcagcagaagaagctgagaaatcggctgcttgagtgatccagtgtttgatactttcacattttcatggctttgtgaagtgctcttttaagttgttgcagtttctatttcagacccattttgtgcataatgttttggtgttgaagttaaagctaggattccttcaatgttt

SEQ ID NO: 33388 - DNA, 384 bp, Gossypium hirsutum
  unsure (1)..(384): unsure at all n locations; Clone ID: LIB3149-022-Q1-K1-B11
gctccattcaagcagtggtatctccagcactatggcattgacattggtcgcaagaagaaatcagctgcagccaagaaagaaggagaggaaggtgaaactgctacagaggaggtgaagaaaagcaaccatgtattgaggaagctggagaagcgtcaacaaaatcgcacgcttgacccacatattgaggaacaatttggcagtggtcgactgttggcttgtatctcttcacggcctggtcaatgtggccgtgcagatggatacatcttggagggcaaagagctggagttctacatgaagaagatccagagaaagaaagggaagggagctgcttaaaaattattgcatgagttttcagctttcatatcaaaantgccgcctgagttt

SEQ ID NO: 33389 - DNA, 401 bp, Gossypium hirsutum
  Clone ID: LIB3149-022-Q1-K1-B12
gcttaaggaaaaatcgccaaataaaataccactaccctcaaggaatctacagatctctgtgcctctttctctacgtctcaaaccctaattccttaatttttacagaagatcgggggtttaatcgcggagaatcaaccatgtttaacaggcttttcgggaaacccaagcaggaagcaaatgctctaaccacgttagacaaattaaatgagacccttgaaatgcttgagaagaaggagaaagtacttgcgaaaaaggctgctgctgaggttgaaaaggccaaggaatttgccaaagggagaaacaagagagcggctatacagtgcttgaagaggaagagactatatgaacagcaaatagagcagcttggaaacttccagcttcgattcatgatcaaatgataa

SEQ ID NO: 33390 - DNA, 162 bp, Gossypium hirsutum
  Clone ID: LIB3149-022-Q1-K1-B3
gcctttgctggctcttagctaggatgggtctttattttcgcgcaacaattcctcctggacagagaggggttgtcatgaaagatctattcttctacagggagcctgatgaaactaaacatctagaagaggaggaagccatctctactcctgagtattgaatgg

SEQ ID NO: 33391 - DNA, 245 bp, Gossypium hirsutum
  Clone ID: LIB3149-022-Q1-K1-B4
ccggattttctccgatctcatttgagtttcctatctctttccttgttttttgtgtttaatttgtggcccgtcgatcttgtttacttttttttcattccccatcctctatcatgatcatcatgcatggcagatgttgtttacaattgcatgccctgaaaaaatagtatatgagtgactcactgtaagtcttttttcttatattattcaaaaccagcatcagggctgtaaatgtgacttttctcttt

SEQ ID NO: 33392 - DNA, 269 bp, Gossypium hirsutum
  Clone ID: LIB3149-022-Q1-K1-B5
ccggattttctccgatctcatttgagttttctttctctctccttgctttttgtgtttagagcggggtcctgtcgatcttgtctactctcttttcattccccatcctctatcatgatcatcatgcatggcagatcttgtttacaattgcgtgctctgaaaaaatactatatcagtgactcactgtaagtctttcttctcatattattcaaaaccagcatcaggcctgtaaatttcacttttctctttaacaagtataacttttcaacaat

SEQ ID NO: 33393 - DNA, 440 bp, Gossypium hirsutum
  unsure (1)..(440): unsure at all n locations; Clone ID: LIB3149-022-Q1-K1-B6
gattgcccagctcgagctatggaaggagaattctaactggaaaatatgagaagaaggttgacgtgttgccaaagcacctcgacgagaaagttgctgcacttcacctcggcaagctcggagctaagctcactaagctcactaaagatcaagctgattacattagtgtgcctgttgaaggtccttacaagcctcctcattacaggtactgagggggacagttaatgagtttttatcgagaaagaaaaagcatccggatggtttgattgtttcttgttttactgaaatttcatgatggttaggtttttgttttattnttagagttcttttttgtgtttgggtgatgggaaagtgtctggggatgggaaaatgatgtgggatttggtctcttcttgtttgaagatgaccaaatggtttgaaataaaagtgttttgagggatgtg

SEQ ID NO: 33394 - DNA, 436 bp, Gossypium hirsutum
  unsure (1)..(436): unsure at all n locations; Clone ID: LIB3149-022-Q1-K1-B7
ggctcaactgagggtatataatttggggaatacttcgcctgtgccagtttcagatcttgtgagtatcttggagaggctgttgaaagttaatgcaaagagggatattatgaagttgccacgaaacggggatgttcagtttactcatgccaatattagcttggctcaaagagagcttggatataagccctcaactgatttgcagactggtttgaagaaatttgtcaagtggtatcttggttactataatggtgggaagaaagctgctgggtgattcattctttgaattgcggtaggatcctccaaattcttgttcattatcattcgaatcctttgttttaacatttctctgttcgttaggaaattatcngttgttcatacatctttaatgatgccatcgtataaagaaggatatcatgtcctacttgggagaaagttt

SEQ ID NO: 33395 - DNA, 395 bp, Gossypium hirsutum
  unsure (1)..(395): unsure at all n locations; Clone ID: LIB3149-022-Q1-K1-B8
ggctcgactganggtatataattnggttaatttttcgcctgtgccaggttcagatcttggnagtatcttttagaggctgctgaaagttaatgcaaagagggatattatgaagttgccaccaaacggggatgttcagattactcatgccaatattagcttggctcagagagagcttggatataagccctcaactgatttgcagactggtttgaagaaatttgtcaggtggtatcttggttactataatggagggaagaaggctgctgggtgattcattctttgaattgcggtaggatcctccaaaatcttgttcattatcattcgaaatcttgtttttaacatttctctgttcgttaggaaaataatcgttgttcatacatctttaatgatgccat

SEQ ID NO: 33396 - DNA, 352 bp, Gossypium hirsutum
  Clone ID: LIB3149-022-Q1-K1-C1
aaaaaaaaaaaaaaaaaaaaaaaaaaaaaaaataaaataaaaaaaaaaaaaaaaaaaaaaaaaagagagggaaaaaaaaaaaaaaaaaaaaaaaaaaaaaaaaaaaaaaaaaaaaaaaaaaaaaaaaaaaaaaaaaaaaaaaaaaaaaaaaaaaaaaaaaaaaaaaaaaaaaaaaaaaaaaaaaaaaaaaaaaaaaaaaaggggggggggttttaaaggggaaaaaaataattttgggggggggggaaaggaaaaattttttgttggggaaaaaaaaaaaaaatttatggggggttttttaaaaaataggagaagggaaaaaattggggaaaacaaaaaaaatggtgggggg

SEQ ID NO: 33397 - DNA, 376 bp, Gossypium hirsutum
  Clone ID: LIB3149-022-Q1-K1-C10
aaaaaccaaacccagttctgaaaccaaagaacccgaccaagatttcatggttaaaccctagaccaaattgtataacccaaacgacgatactcctaaagcgtgttcgatgcctgccgatggggattctatggttgcaagtattgctgcttctgctgacccgcttgcactctttaacgatagtactcctaaagaagggttgagaaatgttgtgttgcctgatggttgggattctatgttggaaaagaagattgtagtgatggaaatggaaaggaaagaatcggatgaaagcttgggtgatgagaaaaatgaaggtgaagttcaagtgaagagaaaaaagaaaaagaaaagaaaaagaagaagaagagaagaagaagaa

SEQ ID NO: 33398 - DNA, 235 bp, Gossypium hirsutum
  unsure (1)..(235): unsure at all n locations; Clone ID: LIB3149-022-Q1-K1-C11
aacccaanttttaaaccaaatttttttacccagagnacaaggccaaaccctgaagccaattttataacccaaaggaccaccctcctaaagcttgttcgatacctgtcaaaggagattctatagctgcaagtattgcaaattctgttgacccaattgtactctttaacaaaagtactcttaaaaagatgattgaaaaaatatgagccatctcatgttttaccttttttatttaaaa

SEQ ID NO: 33399 - DNA, 413 bp, Gossypium hirsutum
  unsure (1)..(413): unsure at all n locations; Clone ID: LIB3149-022-Q1-K1-C12
gtaccacattcctccgtcctctcaacgccaccgcggcacccgaaaaaatcgaaaacctcggcactgaaatctccaacttaaccctcgaagaagcccgaacactcgtcgactacctccaggacaaactcggtgtctccgccgctgcatttgccccttccgccgtcgccgtcgcagcaccagatgccggtggtgccgcagctccagttgttgaggagaagacggagtttgatgtggtgattgaggaagttcctagcaatgcgaggatagcggtgattaaggctgtgaggggtctgactagtttggcattgaaagaagctaaggaattgattgaagggctgcctaagaaaattaaaagaggagtttctaaagaggaagctgacgatgccaagaaacagctngaagaagctggtgct

SEQ ID NO: 33400 - DNA, 402 bp, Gossypium hirsutum
  Clone ID: LIB3149-022-Q1-K1-C2
ctaaaaaggcaaaggaagtagtggaagcagtttaccctgataagaatttggtcactttcagagtgatcgaaggagatctaatggaagagtataagagctttgtaatcacgattcaagtttcgcccaagagcgagggtagtggcagcttagtgcactggactttggaatacgagaagctgcacgatgggattgcgcatcccgagactctgctgcaattcgttcaagatgtctctaaagacattgacgcccacctcacccaagcaagctaaacagtatcacatgttgctattgttaccgctactttaagcactattcatctatttaatgaataaagtgacaactttctttcttcagtattttgatctgaatatgtatgtttagatcaatattcactcaatggga

SEQ ID NO: 33401 - DNA, 432 bp, Gossypium hirsutum
  Clone ID: LIB3149-022-Q1-K1-C4
caaatggataggatatcgaaagaggaaaggatttatatttcgggtatgattaaaaagattaaggcgactggttgtaaagttctggtgatccaaaaaagtattgggtgagatgcaagcacggatttatcaatgcattataaagccatggcttaaatgaccgatgctgaggactaaacgaggcataaaatactataaatattccaggatgaaagaagtcagctttgctcttatagtatgcactgtgcatatattatccttcgtcatacattacaaggattaaaatctcgactttatagctcgaaaaagagagaaaagaaaattataatataataatacaatgttctccttttgtttgtatttctgctgttgcttgtttgtttctttgcaagtgcaggtgtgctgacactcgggtattggctgtgctggcgcgga

SEQ ID NO: 33402 - DNA, 367 bp, Gossypium hirsutum
  Clone ID: LIB3149-022-Q1-K1-C5
gggttttctcgatccttccttttgtggtcattttgtttgtgtcgattccaaaattaaagcctggaagatggcttgtggtaaacatgcatcatgtggattggaatttatatttgaacacgctcttttggaatctaaactattgggactctataagtactcttgctggagaggtagagaacccaaaaaaaactcttccaaaagcattgttttacgctttgatcttagtggtggttgggtatttctttccgcttttagttggcacgggggctctttcccttgatcgtgagctgtggactgatggttatttctcggacatagctaaattgctgggtggagtttggttgagatggtggatccaagcagctgc

SEQ ID NO: 33403 - DNA, 171 bp, Gossypium hirsutum
  Clone ID: LIB3149-022-Q1-K1-C6
cctttagctttacatttaaaaaagacctagctatgaataatgcaggatgtatttttatttttagaaggtttagacgatgttataatagttttgtaacagttaaatttgctataggaaacatccgagcaaaacctagagacaggatattttaatttattttctctttgcttc

SEQ ID NO: 33404 - DNA, 418 bp, Gossypium hirsutum
  unsure (1)..(418): unsure at all n locations; Clone ID: LIB3149-022-Q1-K1-C7
ctcaagctccagccttttggaacagttcctgtcactcaagatggagattatgttttatatgaatcccgtgcaatcataagatactatgcaaaaaatacaaatcacaagggactgatctactgggaaagacagtagaggaaaggggtcaagtggaaaattggctagaggttgaggcacacaatttcaacccaccaatttacgccttgaccctacatttgatgtttgcttccaagatggggttccctcctgatgaaaatttgatcaaagaaagcgaggaaaagctaggcaaagttctggatatttatgaggagaggctgtcaaaaaacaagtactnggccggtgatttcttcagccttgctgatctgagccacctacccattactcagtacttggtgggtcaaatggggaagggatacat

SEQ ID NO: 33405 - DNA, 387 bp, Gossypium hirsutum
  unsure (1)..(387): unsure at all n locations; Clone ID: LIB3149-022-Q1-K1-C8
gatccttcgcgcctagaggaatttcagcccgaaatccctcctccacttcaattttgaggaggaaaggaggagaaatccacggcttgctcgcacggtaaggctcctctgtcaccgtttttttgtttattttttttaaaacaaatatgatgaatgacccaaactggaaactaaacgatgcatagaaaactaaaaggattccaggaagaaagaagtcacctctgctttttttgtattctttgtgcgtatattttcgttcgtaaaacattacaaggattaaaatctcggctttatagccgaaaaagagagaaaagaaaattataatataataatacaatatttttcttttgtttgtatttcntgtgctgcttgtttgattctttgcaagtg

SEQ ID NO: 33406 - DNA, 153 bp, Gossypium hirsutum
  unsure (1)..(153): unsure at all n locations; Clone ID: LIB3149-022-Q1-K1-D10
ctattgggcattatgctagagagtacaatcatgcctaaggatatccagcttgctaggaggattagaggtgagagagcttangttgcctgtatttaccttgatttgattattaaaattttaagaaaaggaatctaagatatctttgggaatttt

SEQ ID NO: 33407 - DNA, 243 bp, Gossypium hirsutum
  Clone ID: LIB3149-022-Q1-K1-D11
gcgaaatgatgattgtgtacgacttttacgccatacggaagcctcgacaaatggctgtttggcgcaggggttcttccctggacacgacgtttcaaagtcatcaacgacgttgcaaaagcactgagcttccttcattctaagcagctcgcccacaagaacatgaaaacaagcagcgtttttcttgatgtaagcttccgggcttgtttaagtgatttcgggatggtgctttcaacaaccgattct

SEQ ID NO: 33408 - DNA, 385 bp, Gossypium hirsutum
  unsure (1)..(385): unsure at all n locations; Clone ID: LIB3149-022-Q1-K1-D12
ggaagggtattgatttggccaccacacttgaacgtatagagaaaaactttggcattactggtccaagggtggctggtaatcccattatctttggctctgataactttttggaacttgccaaagtccatcgggaaaaaatactggccaaaactggagtttctacaaggccttgaactgtccagctactgtaaggaaatcgggaggcatcgataccagacagaataactgtgcagctaataactacactaagagtgggaagaagtctggaatctgttncatctacagnctatgcgtgatcagaaaggagaagttcagtatttttatcggagtgcagctagacggcagtgccaaagtcgatccacttcattatagtattcctgatact

SEQ ID NO: 33409 - DNA, 421 bp, Gossypium hirsutum
  unsure (1)..(421): unsure at all n locations; Clone ID: LIB3149-022-Q1-K1-D3
gcaagtccaagggtgatcgatgttatattaaaaagttcgataacattgttaatgactgcagcgaatttttcaaatctatctgtgctcaggaagaatacaggggaaagagcagatttttatatggagagcccgatgagaacgtggaaatggtgttcgcggatatcataggttggcttgacaagcgctgcaatgctgtaactttagaccaaagtctgggtcctttcgatcaaggttcggaagaatgcagtgataatatagtgatttcgatggcaacggccagtggcggaacacaagcaaacgggagatatttgtgtggtttgaagggaccacgcgcacggnctcactcggcaatgtaggctgatcgtatcaagttaactaaacgttgtctctgaatattgcaaaatatttgaaagggggaatt

SEQ ID NO: 33410 - DNA, 350 bp, Gossypium hirsutum
  unsure (1)..(350): unsure at all n locations; Clone ID: LIB3149-022-Q1-K1-D4
ccgggtccgacccacgccgtccggcgatgtccctggtcatgctcaacctccgtatctctattgaaacttnngccgtgaanntctcatccccgggtcgcgtcgtcttcacattttttcatgggggtgggttttgcctcccacttcacttcnntagggggtctcaaccagtactcgagcctctannacagtacctgagcctcacctctagcaaatgtgtggaccgccaaagaacccatgatgtgtgctnnngctgatcctcgtcacccggtcgataccttnngactgcatcttgctatgttcnncgtggtaaaatgaagctactcaaggaaagtggatgagcaagatgtttg

SEQ ID NO: 33411 - DNA, 409 bp, Gossypium hirsutum
  Clone ID: LIB3149-022-Q1-K1-D5
gcagccaacatggggaagacacgaggtatggtagctggacgtaagctgaggacccaccgaaggaggcaaaggtgggccgataagtcatacaaaaaatccaaccttggtaatgaatggaagaagccatttgctggttcttctcatgccaaaggcattgtccttgaaaagataggtattgaagctaagcaacctaactctgctatcagaaagtgtgctcgagttcaattgatcaagaatggaaaaaagattgccgcattcgttccaaacgacggttgtttaaattacatcgaagaaaatgatgaggtgttgattgccggatttggacgaaagggtcatgccgtcggtgatattcccggtgttagattcaaagttgtgaaggtgtctggtgtttcattattggcactttttc

SEQ ID NO: 33412 - DNA, 428 bp, Gossypium hirsutum
  Clone ID: LIB3149-022-Q1-K1-D6
aaaaaaaaaataaaaaaaataaaaaaattttatttatataaaaaaaaaaaaaaaaaaaaaaagaaaggaattttaaataaaaaaataaaatttacaaaaaaataaaaccttaaatataatatactataagctattttcttaattattctaataccaaaaacattgtcctttaaaagattattattgaatctaaacatcctaactttgctatcataaattatactcaagtttaatttatcaataatgtaataaatatttttctattctttacaatctacatttgtctaaattacatttaataaaattaataggttttgattgctcttttttatactaaagtatcatttcctttggttatattcctttttttataattatttgatttaaatacttttttgttctttattttttttcacttttttaattaa

SEQ ID NO: 33413 - DNA, 441 bp, Gossypium hirsutum
  Clone ID: LIB3149-022-Q1-K1-D7
aatggacttgttgctcataaagatgggaaactcattggaacccagagtttgaagtcgtttctcggagaagataagctgaaggaatttataaacttcacattgcattatattgctgacttggatatcccgataaaaagggggacattcattgaattccgaagtgggatgcttaatgtatctccgattggacgtaactgtagccaagaagaaagggatgaattcgaaaagtacgacaaggttcacaatattcgcctgaaaatggtgtctgtacttcgagaaaagtttgctcaccttaacttgacattttcaattggagggcaaataagctttgatgttttccccgagggctgggacaaaacatattgcttgagatatcttgaagagtttcaagaaatccacttctttggggacaaaacttacaagggaggtaacgatcatgaa

SEQ ID NO: 33414 - DNA, 441 bp, Gossypium hirsutum
  Clone ID: LIB3149-022-Q1-K1-D8
gcgattccctggtcagctcaactccgatctcatgaaacttgccgtgaatctcatcccctttcgtcgtcttcactttttcatggtgggttttgctccactcacttctagggggtctcaacagtaccgagctctaacagtacctgagctcacccagcaaatgtgggacgcaaagaacatgatgtgtgctgctgatcctcgtcacggtcgatacttgactgcatctgctatgttccgtggtaaaatgagcaccaaggaagtggatgagcagatgttgaatgtccagaacaagaactcctcatactttgttgagtggatcccgaacaatgtgaaatcgactgtttgtgacatcccacccactgggctgaagatggcatcaacatttattggcaattcaacatccatacaggagatgttcaggcgtgtgagtgagcaggtcacagc

SEQ ID NO: 33415 - DNA, 57 bp, Gossypium hirsutum
  Clone ID: LIB3149-022-Q1-K1-E1
gatgaataggatgctccagcaccatcaagaattatctctttaccaccactaaaggca

SEQ ID NO: 33416 - DNA, 311 bp, Gossypium hirsutum
  unsure (1)..(311): unsure at all n locations; Clone ID: LIB3149-022-Q1-K1-E10
cggatatctcggctctcgcatcgatgaagaacgtagcgaaatgcgatacttggtgtgaattgcagaatcccgtgaaccatcgagtctttgaacgcaagttgcgccccaagccattaggccgagggcacgtctgcctgggtgtcacgcatcgtcgccnaaaaagaaaaaaaaaaaaaaaaaaaaaaaaaaaaaaaaaaaaaaaaaaaaaaaaaaaaaaaaaaaaaaaaaaaaaaaaaaaaaaaaaaaaaaaaaaaaaaaaaaaaaaaaaaaaaataaaaaatantaaaaaataaataaaaaaattggggggg

SEQ ID NO: 33417 - DNA, 395 bp, Gossypium hirsutum
  Clone ID: LIB3149-022-Q1-K1-E11
gttgcaaccagataaagtgaagaggcaaatgtcgatctctgatgggaaactttctgtgcactttgaagcagttgaagctaggtttctccgtgcatcattttcagctttcgttgatgtactcacacttgcctcgaaaaccatcgaagaacttggcccaggaatggtattgtgatctttgattattgcaattttacaataaatgctgtgggattctggcattaatgcattctttttcgttattctgttcttcatcttttgtattcttaatgatacacatgtaatttaaattaggatgtaagcttagcttctagctcaccgttatcttccaggtttttttctttatgtatgttgatcagggttaaacatgtggaactatcactaagttatgccgaatt

SEQ ID NO: 33418 - DNA, 429 bp, Gossypium hirsutum
  unsure (1)..(429): unsure at all n locations; Clone ID: LIB3149-022-Q1-K1-E2
gaatgganagggccggacccgacgccgacgcgtggcggcgtatatccgctggctcagcatctaactccgtatttctttgaaacttcgaccgtgaactctcataccccgtgtcgggcagtcttcacgtttttcatggctgggtctttgcttcacactcacattttagaggggctctcaaccagtacgcgagcatctaacacgtacactgagcctcactccagcagaatgtagggaccgcacaagannacatgatgtgtgcctgctcgatctctcgtcaccggtcgataccttgactgcattctgctatgnttccgtggtaacaatgaagcacttcaaggaagtggattgagccagatnngttgaatgtcctagaacaaagaacctcctcataccttttgttgaggtggatccccgaaccaatgtgaaaat

SEQ ID NO: 33419 - DNA, 370 bp, Gossypium hirsutum
  Clone ID: LIB3149-022-Q1-K1-E3
aagaaaaagaaggtagcttctaaggaaaagtttgtggttctttgcaaggctcatcaaggatgtgctgcgcgacaaggttgaaaaggttgttgttcttgatcgagcggacgactcatctaggaggctacatgactgccgagcattgctggactgcaaacatgtaaagtattatgaaagcctatgctttgatgaatcacactatacattgttacatgtctagcacgtatacactggacttctaccctgataacttcatcatagaagatctgataaggagagccgatccataccatagtgatagatctgtccaggaccttgaactccttatcttctagactgctgatctgacctctaacttgaaacttgatga

SEQ ID NO: 33420 - DNA, 331 bp, Gossypium hirsutum
  unsure (1)..(331): unsure at all n locations; Clone ID: LIB3149-022-Q1-K1-E4
taaaaataaaaatggcccaatacatctttgaacatttaagcctcatgctaattaattaatgtatacgatgagttgcacattcctngacaaggcagccattctgacggaagaagatattgtaaaaccagggcaagctcctaatctatggagactgaacaccatccatcgagtggaggaactaaaagcagtgatccgaatgggaccgatatgggcagcaagaattcttctaatcacagcctatgctcagcaaaacacattgtccgttcaacaggccaaaagcatgaacaggcacctcaccaagttatttgagatccctgctggttccatgact

SEQ ID NO: 33421 - DNA, 193 bp, Gossypium hirsutum
  Clone ID: LIB3149-022-Q1-K1-E5
taaaaataaaaatggcccaatacatctttgtatatggaagcctcatgctaattaattaatgtagacgatgtgttgcagattccttgacaaggcatccattctgactgaagaagatattgtaaaaccatggcaagctcctaatctattgatactgaacactatccatcgagttgtaggatcttaaagcagtgat

SEQ ID NO: 33422 - DNA, 431 bp, Gossypium hirsutum
  Clone ID: LIB3149-022-Q1-K1-E8
aacttttatcacaacgccgacgtgagtaggtgttgcagattgtctccggtgattgcgatacgaagaaaacgcctggacaagataatgatgtaatgggtgaagttttgaaaacccatgaagcaattcaatctctagacaagtcggttgcaatgctagagatgcagttagctgcctctcgtagttctcaggaaatggacaatggggaggcatctaaagttgtttcaaccttgactcgtgatggtccacctaggaagaaggtgttcatggtcattggaatcaatactgcttttagtagtaggcgacggcgcgattctgtccgggagacttggatgccacaaggggaaaagcttattaaattggagcgtgagaaggggatcatcattcgtttcatgatcggccataggttaaccatttcacgcaagagaaagctt

SEQ ID NO: 33423 - DNA, 220 bp, Gossypium hirsutum
  Clone ID: LIB3149-022-Q1-K1-E9
aaaaaaaaaaaaaaaaattaataaaaaaatattattatacaaaaaaaaaaaaaaataaaaaggggggaattttataaaaaaaaccagccccccctcttcctcttccacccttataaatctcttgtaattcccctacctttcaccttgatttacatgtcccttttgattcccttctctttgagcattttttatcgatttttttaaacttttcacccctctc

SEQ ID NO: 33424 - DNA, 429 bp, Gossypium hirsutum
  Clone ID: LIB3149-022-Q1-K1-F1
cagggttcatgtttgagaaacagctgatgaatgggttatatttcaatcaatcaccaacaaaggatgttgctttggccatggtgtccatgagatccaccccactaggtcctatcatggagaaactgtcattgacccccgagaagtacggaactgggcggcggttctacgttcagacattggaggatcgtgctctttcgccagatgtgcaagaaaagctagtaagagaaaatccacctgaaagagtttttaaggtcaaagggagtgatcactgcccattcttctcaaagccacagtcacttcacaagattttaatagaaattgttcaaattccttagcttaattttcagattaaaaaagaaaagaacatatttctttagtcttttatttctatagtgaaagaagacgataataagttgtcattacacttgt

SEQ ID NO: 33425 - DNA, 281 bp, Gossypium hirsutum
  Clone ID: LIB3149-022-Q1-K1-F12
cccacgcgtccgcattttaaggaggccaacaatttcctctggcccttcaagctcaaggcacctttgggaggtctgaagaagaagagaaaccactatgttgaaggaggagacgctggcaatcgtgagaattacatcaatgagctaattcggagaatgaattagacgttggctttatttgttaattcagtatttttggtttgttttgaaggatcctgatatgatttcttttggccttttagaaacagttttgtttaaaaggatgaatatttttcacggtgttt

SEQ ID NO: 33426 - DNA, 334 bp, Gossypium hirsutum
  Clone ID: LIB3149-022-Q1-K1-F2
tccgtcacctccagaaggagggttatgggaattatgtttgtggtttctgtgttgctgtggaagtatggagaagctgctgccctccactgtttgaaccagggccacctcctccgtagatctgcattcttttttctcttttggaatgtatgagtattttacccggatttaatcatttggaacatgatgattggttcttgtggtttgtcattcttcttcttattatctgctaatctatgtagcaactgagattagagttgcaaaatttatgaatttatagctttcttgtaattttatgtcttcaataatatattaaagataaaaaacaatgtcgttt

SEQ ID NO: 33427 - DNA, 433 bp, Gossypium hirsutum
  Clone ID: LIB3149-022-Q1-K1-F3
ccagtccagcggcattcactagggcaacagttgtcattgccgtaaaatattctattgttgagcggccagagaagatagatgagatcatttatcctgagattgcttcattccttatgcttatcaaggatcaggatcgacatgttaggcgtgcagctgtgttggctttaagtacttttgctcacaataagcctaacttaattaaggggcttcttcctgaattattgccgcttctctatgatcaaacgactgttaagaaagaattgataagaactgttgaccttggtcccttcaagcacatcgtcgatgatggccttgagctaaggaaggcagcgtttgagtgtgtagacacattgctggatagttgtcttgatcagtgaacccctcatctttcattgtcccgaccttaaatctggacttgatgatcattatgatg

SEQ ID NO: 33428 - DNA, 374 bp, Gossypium hirsutum
  Clone ID: LIB3149-022-Q1-K1-F4
caccgagcttttgaaggtcggtaaggacaagcgagctctcaaggtagctaaaagaaagttgggaactcacaaaagggcaaagaagaagcgtgaagagatgtccagcgttctccgcaagatgagagcccacggtggaggtgcagaaaagaagaaataaagctttattttcttggtttcttactgttgtcgtgctcgagtttcttgtttaggagcagctagaggtttgtttagcatatgtttcatttttgttgttttgagactgaaatcagtgctttggaacttttgtttatttgagttagagatgagaaattggaagaagtaataacttttaaattttatgtttcttgaattatatttaacgccattactattct

SEQ ID NO: 33429 - DNA, 373 bp, Gossypium hirsutum
  unsure (1)..(373): unsure at all n locations; Clone ID: LIB3149-022-Q1-K1-F5
ccgactccttcacctgatatgcttggacctttcgctccaccaactggagctcctggacctagcctcgatgcttcctctcccggtccatctgtcgctgccgatgagagtggagcagaggcaatgaagaacatgaagaagataattggagggttggcgttgggatgggcagccattgctacgagcttctagatttggtttgatcacattccacattctgcgtggtaattcttcggttggtgaactgagaggcggagacactagtattattgcttttggaanttccgactattctggttatagatgtgcaattacccgaagtcatgactttaaaattcgatgatataagaaatatacataacgccattactattct

SEQ ID NO: 33430 - DNA, 447 bp, Gossypium hirsutum
  Clone ID: LIB3149-022-Q1-K1-F6
cccacgcgtccgccaagtttgatttaagttagtgagtttcttagtttccctagaagttaagcgtggctcaaattaagaggatggagtgccaactcgagatcaagtcctcagctgataagttctttgatgcctacaagaccaaagcccagcttatgccaaaaatggccaatcaaatcgttagagatgtaaaacttgttgagggtagtggttgggattccgagagttcggttagacaatggtattttgttgccggaggtaagcttgagacttgtaaggaaatgatggaaaaggtggatgataaagataggactgtcgtttacaaattggtggaaggtgaaatcatgaaagctttcaaaagctggaactccatcctcaacgtgatgccgatgagggagggaagtttggtgaaatggactatggaatttgaaaagcaaaatgatgatgtcc

SEQ ID NO: 33431 - DNA, 438 bp, Gossypium hirsutum
  Clone ID: LIB3149-022-Q1-K1-F8
gcgttatgatatcggccggacacatatcaggcggccatcttaacccagccgtcacgcttgggttgctattcggtggtcacatcacggtggtccgtgcgatcctctactggatcgatcagttgttggcatcttcagctgcttgtatacttctcaagtatctcaccggaggattgaacactccggttcacacattagcaagtggaatggggttccttcaaggtgttatatgggagattattctcacattcgcattgctgttcacagtgtatgccaccatagtagaccccaagaaaggttccatcgatgggctaggtccaatgctcactggcttcgtcgttggggccaacatcttagccggtggagctttctcgggtgcttcaatgaatccggctcggtcattcggaccggctctagtgagctggaactggaccgatcact

SEQ ID NO: 33432 - DNA, 327 bp, Gossypium hirsutum
  Clone ID: LIB3149-022-Q1-K1-F9
ctttaaagtaggacgttacaacccagaagagagacaagaaaggatttccaagtacagagcaaagcgcaatcaaaggaacttcaacaaaacaattaagtatgcatgccgcaaaacactagccgacagccgtcctcgtatacgtggcagattcgcacgcaacgatgaagctattgagattcccaaagctgcatgttcaaccagagatgaagaggaagatgatttatgggtattgcatgaggttgaagatgatgaaacactagcaagaggagattttatgaacagtttctgtcaaaatcaatttcaataccaccatggctacttctgata

SEQ ID NO: 33433 - DNA, 318 bp, Gossypium hirsutum
  Clone ID: LIB3149-022-Q1-K1-G1
atcaagtaatcagattcggagttcttcgggatcatcatcttcatcattactcaaaagctgtcaagatgattgatgatcaagaccttggcttcttcgcgaatttccttgggatcttcattttcgttcttgttatagcctatcattatgtgatggctgacccaaaatttgaaggcaactgaagattttgcactttttggttgtgtctgcaatggatatttagatgataattttggtagacttgagttgtttcagaaacgaagacgaatcactgttgttaaaaaccttcaacaagttattgatataaatgtcatcttattg

SEQ ID NO: 33434 - DNA, 355 bp, Gossypium hirsutum
  Clone ID: LIB3149-022-Q1-K1-G10
cggacgcgtgggtgaggatgagctgagggatgctgtgctgctagtattcgcaaacaagcaagatcttccaaatgctatgaatgctgctgagattactgacaagcttggccttcattcactccgccagcgccattggtatatccagagcacatgtgctacttccggtgaaggactgtacgaggggctggactggctctcaaacaacattgcaaacaaggcataggtgtgacatgactgagttggcagtcttacaacccttttggattttatgaatgtctgcccccgttttatgtgttattttttatggtttttcacgtttgttgcaaacactgccatttgttacttatagtttaag

SEQ ID NO: 33435 - DNA, 413 bp, Gossypium hirsutum
  Clone ID: LIB3149-022-Q1-K1-G11
gttcattatggaatttgcagagaatctggtgttgaggttaatggaggacccaaaagagagggatagaaaattcagagaacacgtttacactatgaaggatcgatgcgcaaaaaccaaggagatgtggagttatccactgcggccttatgggttttggacatttgagcgccacaatgctcagctccgttgggatcctcagattagccaagtccccggccgcagggatccttatgatgaccttcttcaagacagttatgcgtcctccaccaaacgaaactgaggaatcataagccattagcagatggtttggagcttgatctacaaatgggaagtggacattgaaaccttttttactgttggtttgaattaaaagattctgcttgttttgtagtgtacttttgaacatttcagtt

SEQ ID NO: 33436 - DNA, 387 bp, Gossypium hirsutum
  unsure (1)..(387): unsure at all n locations; Clone ID: LIB3149-022-Q1-K1-G12
cgaaaatctctcccccattttccacagtttagtttttgcagccacaacacagccaaagaaagaagaaaatggcgtcgaacgcggcggttccattctggcgtgcagccggcatgacttatataacctactcgaacatatgcgccaacctcgttaggaactgcttaaaggaaccttacaagactgatgcccttagtcgtgagaaagttcatttctccatctccaagtggacggatggaaagcctgaaaagcctactctccgcacagactcaccttgagaatgagatgcangtttggtcatggaagtttcgaactggaaggattttaatttttttttagtaatttctggtatgtctgaaacgtaagaacagatttcaagctgagatgatg

SEQ ID NO: 33437 - DNA, 356 bp, Gossypium hirsutum
  Clone ID: LIB3149-022-Q1-K1-G2
aacaagtaatcaaattcaagagatctacgggatcattatctatatcaattactcaaaagctgtcgagatgattgatgatcaagaccttggcttcttcgcgaatttccttgggatcttcattttcgctcttgttatagcctatcattatgtgatggctgacccaaaatttgaaggccactgaagattctgcactttttgtttgtgtctgcaatggatatttagatgataattttggtagacttgagttgtttcagaaacgaagacgaatcactgttgttaaaaaccttcaacaagttattgatataaatgtcatcttattgcacaccgcaggggaggacaaaacccgcagcaatacc

SEQ ID NO: 33438 - DNA, 433 bp, Gossypium hirsutum
  unsure (1)..(433): unsure at all n locations; Clone ID: LIB3149-022-Q1-K1-G3
ccgccgttgattattatcttcaaaaatacgctgcggcaactaagtgagttggtgcgaagatgagtcgtggtacagcagcgggacccaaggggaagaagaaaggagcgacctttaccatcgactgtgctaagccggttgaagataagatcatggacattgcctcactcgaaaagttcctccaggaacggatcaaggtaggcggcaaagccggtgctcttggcgactccgtcaccgtcacccgcgacaagaccaaaatcaccgtcacgtccgattccaacttctccaagcgttatcttaagtacttgaccaagaagtacttgaagaagcacaatgtccgggattggcttcgagtgattgcttccaacaaggacagatctgtttatgaactccgctacttcaatattgccgagaatgaangggaggaggaagaatg

SEQ ID NO: 33439 - DNA, 421 bp, Gossypium hirsutum
  Clone ID: LIB3149-022-Q1-K1-G4
catccactctcccagaataccatcaaccgaatagattgctgacagaattaacaagatgcttgcgcgtgctcgagaccaacatcttgtgggttaaccctgactgtgggctcaagactcgcaagtacgcttaggtgaaaccagccctgagcaacatggttgctgctgccaagctgctccgcacccaactcgccagcgccaagtgataggctcccgagatattggaaatcctaatcccataccactccagagagattaaaaagaaaaatggcaaacaagtttcttctatcttatcatttgaataactttgattgttgctgaaatattagctacatgcccttggcgtgcctgtgatttacttatttttgggtttacttatctctaagtatcatgcacctttttgggaatattatatatatgcagt

SEQ ID NO: 33440 - DNA, 435 bp, Gossypium hirsutum
  Clone ID: LIB3149-022-Q1-K1-G5
ctaagattcaggacaaggaggggattcctccataccagcagaggttgatctttgctgggaagcagttggaggatggtcgaactttagcagactacaatatccagaaggagtccactctgcatcttgtccttcgcctccgtggtggtttctaattgggtgtcttctgcttcttgtcgtaattttcatttctatggaactgtgggtgttatataatgaacactgtgttttgtggtgctgaaatggtcagtgaaccacatctttagttactgtatcgaataaagtttgatgttcaaacattattactgtgttatacttaaatcgagcttagctaagtttgtgtttatattttaagtaatattgaatttctgtattatctcttttgtttcatatattctctccgtggcaatattacggtcagtgaggatggcgtgctct

SEQ ID NO: 33441 - DNA, 448 bp, Gossypium hirsutum
  Clone ID: LIB3149-022-Q1-K1-G6
gttttaaagaggggcttgagttttagccaaataaaactccatggctaaacttgttgctactggcttcttggctctcattgccatctccatggttcaaactttggttatggcatcacatggacatggtggtcaccattatgataacaaacgttatggacctggaagtctcaagccttaccaatgtccatctcagtgcacaaggaggtgtagccagacacagtaccataaaccatgcatgttcttctgtcagaaatgttgcaggacatgcctttgtgttcctccagggtattatgggaacaaacaagtttgcccttgctacaacaactggaaaaccaaggaaggaggccccaaatgcccttaaattactcaaaagaagacccttttttttcttttttacattattatccctataaatttcctatttgaaattcaagtcattgaagcataa

SEQ ID NO: 33442 - DNA, 278 bp, Gossypium hirsutum
  Clone ID: LIB3149-022-Q1-K1-H10
ttgaagctaagtaccctgttgtcggccgcgttgtctcctgaaaatttgcacctttcctctatgttgggtgtaatttgtttcgtttttaagtgtctttagactctggttattacttatctatcaattgtgtttggtgttttgcttagctcagagcaatttctaggttaaataaatgggtgaaaattaataaattgagatacttatgggcttgcgttgtgttggtatctcgttgttgtttatgttagagaagtttcatcatcaatggagaaattcatttt

SEQ ID NO: 33443 - DNA, 117 bp, Gossypium hirsutum
  Clone ID: LIB3149-022-Q1-K1-H12
aaaaaaaaaaaaaaaaaaaaaaaaaaaaaatttttaaaaaaaaaaaaaaaaaaaaaaaaaaagaagaaaaaaaaaaaaaaaaaaaaaaaaaaaaaaaaaaaaaaaaaaaaaaaaaaa

SEQ ID NO: 33444 - DNA, 312 bp, Gossypium hirsutum
  unsure (1)..(312): unsure at all n locations; Clone ID: LIB3149-022-Q1-K1-H3
atcaagtaatcagattcggagttcttcgggaacatcatcttcatcaatactcaaaagctgtcaagaagattgatgatcaagaacttgggcttttcgcgaatttccttgggaatcttaatttcgntcttgttatagcctatcattatgtgatggctgacccaaaaatttgaggcaactgaagattttgcactttttggttgtgtctgcaatggatatttagatgataattttggtagacttgagttgtttcagaaacgaagacgaatcactggtgttaaaaaccttcaacaagttattgatataaatgtcatc

SEQ ID NO: 33445 - DNA, 303 bp, Gossypium hirsutum
  Clone ID: LIB3149-022-Q1-K1-H4
gttctagatcagcgagcaggagccctttttttatttttttttttttttttttttttatttttaggggtggattaaattatatgtttttgatttattttttttttattttatttttttgtttcaaaaaaaagtaaacccgacaaaaaaataaataaaaagatttttataaacggtgtttttttatcaaaaaatttttggaaaaattaacttaattttaaaacccccaaaaaaataaaaattttgttattaaaaaaaacaaaccttttttaaaaaaaaaaaaaaaaagggggggccttttaaaaa

SEQ ID NO: 33446 - DNA, 395 bp, Gossypium hirsutum
  unsure (1)..(395): unsure at all n locations; Clone ID: LIB3149-022-Q1-K1-H5
ccgtccgcacaagacaannaggaagacgagggattataaangagaaaacatcaagacgtacgctcctttatttgcttcttccctttcatctaaccttggttttctctactgtcatatcggctaaggactattagtatctaaattctaagttatggttcttgatggcattgtatcttctccccatcggagatcaggatcaatgaggaaacaattcccaaaagatgagttggggagctggtcaacacttgttcagaagcatagattcctcttaacagctttgggactcttagcattcttatgtactatctacctttactttgctgttactctaggagctacagacacatgttcttgcttggaaggaacagagagagcaacgtgtaaactgcagcacg

SEQ ID NO: 33447 - DNA, 465 bp, Gossypium hirsutum
  Clone ID: LIB3149-022-Q1-K1-H6
cgggccgacgacgcgtccgacaaacaaaggaagacgagggattattaatttaaaacatcaagacgtacgccctttgtgggggtcttccctttcatctaaccttggttttctctactgtcatatcggctaaggactattagtatctaaattctaagttatggttcttgatggcattgtatcttctccccatcggagatcaggatcaatgaggaaacaattcccaaaagatgagttggggagctggtcaacacttgttcagaggcatagattcctcttaacagctttgggactcttagcattcttatgtactatctacctttactttgctgttactctaggagctacagacacatgttctggcttggaaggaacagagagagcaacgtgtaaactgcagcacgcatggtcgactctatcccacgggaaactcaaattattttagcatgtttttatggaaaaatcact

SEQ ID NO: 33448 - DNA, 102 bp, Gossypium hirsutum
  Clone ID: LIB3149-022-Q1-K1-H7
gaggtgctttactaagcaaacacccgtgactcaaccgttacttgaagagcaccttgagcgacataaagtcgctcgccaaatgaacccacaagccccggatct

SEQ ID NO: 33449 - DNA, 269 bp, Gossypium hirsutum
  Clone ID: LIB3149-022-Q1-K1-H8
cattaatcctgatgaggccgttgcttatggtgctgcggttcaggctgctatcttgagtggtgaaggaaatgagaaggttcaggatctattgcttttggatgtcactcctttgtcccttggactcgaaactgctggcggcgctatgactgttttgattccgagaaacactaccattcccaccaagaaggagcaggtgttttcaacttactctgataaccaacccggtgtcttgatccaagtttatgaaggtgagagagctccaaccccgg

SEQ ID NO: 33450 - DNA, 417 bp, Gossypium hirsutum
  Clone ID: LIB3149-023-Q1-K1-A10
cttaggtttaaagtcactttacacactcattgcggagggtatggcagatttggaatatctacagccttccattgccgttgttctaggttttattggatgcaaaatgatcttggatttctttggacttcatatatctacggaggcatcacttggtttggttgcaactagtcttagtgccggcgtactgttgagtttagcaaagaaagctgactagctgaaatcaaagtgcgagagcagatgaagggtttatattttgtatgtttgttcttctacgttaagtgagcaagtgagctctaaaattgctgctcaattctttgtttctcacctctcttcatcaatgaaaatgaagattaattatataatcaatgaatgattcatttagacgttgccgggaagttgatgctcgaattcaaagca

SEQ ID NO: 33451 - DNA, 280 bp, Gossypium hirsutum
  unsure (1)..(280): unsure at all n locations; Clone ID: LIB3149-023-Q1-K1-A12
gntagatgctctcctcactgaatttcgctttaacagaactcgcccttggctcaggcctgggggctatactcatgtcaccgtcgaatattacaacgacaaaggtgccatggtgcctattcgtggccacaccatgctcatctccactcaacatgacgagaccgtgactaacgatgagatagctgctgatttgaacgagcatgtcatcaatccggttataccccttaaaggaccttgatgagttaaccatttttcaccttaacccgtcaagccggtttcgtat

SEQ ID NO: 33452 - DNA, 277 bp, Gossypium hirsutum
  Clone ID: LIB3149-023-Q1-K1-A3
tgaataatgtgcaattttagtttctttggttcctttaagactttttatctggttggtttcaaatattggctttgaattatttgtaaagttgtatagactactccacataaagacgaaatgtacaccaaattggaaggataaatgcctttgtataaaatgctatccgttactaataaaaaaaaaaaacaaaaaaaccacaaactgtatatatatataaaaaaaaactgcgggtaagcgagaatagctaagccactaatgtcttgacgaaagttttacc

SEQ ID NO: 33453 - DNA, 407 bp, Gossypium hirsutum
  Clone ID: LIB3149-023-Q1-K1-A4
gttgtttcaaaaatctactggggaggagattccagagtaaaaattcttgatgccattgaagatctaaagcttgattctttggttatgggaagccgcgggcttggaactgttcgaaggattatattggggagtgtgagcaactatgttgtgacgcatgctacttgccctgttaccatcgacaaggaacaatcaagctccagcaagcactgagtagtttacataatattttctagttcgatttcccaaacaataatttgatggacgagtgtatgttgctggatcatgttttaccaagtagcttacgcagtgttacgtttgtttactgaatcttaaagatatatggtacgttgtgagttaatgcactgtattggggacgataatattaatggatatattttggcttggcc

SEQ ID NO: 33454 - DNA, 284 bp, Gossypium hirsutum
  Clone ID: LIB3149-023-Q1-K1-A5
atttttatgaaagtaaactcagctagagctgggggcattcaacaagttgttaatacttgattgaaagcaattatcatgcatgatctaattactataatgttagttttaagcaaataaaagttaatcccctggtgcttaattctgggacaggcatatgcatacagggtttgcctctcagagccttgccttgtactcttttcaacttaatgaattaaccatttggttatttactcttctttttcttctgcttttttttttggctgccgaatgaacggatgctttcc

SEQ ID NO: 33455 - DNA, 235 bp, Gossypium hirsutum
  Clone ID: LIB3149-023-Q1-K1-A6
atcgacaccatagcacattacggtagagcttgtgacatgcaacaagttgttagtactggagtgatagtaattaacatgcatgatctaattactataatgttagtatcaaacacataaaagttaatcccctggcgcttaattctgggacaggcatatgctttcattgtttgcatattagagccttgacttgcactcttttcaactcaatgaattaaccatttggttatttactttt

SEQ ID NO: 33456 - DNA, 208 bp, Gossypium hirsutum
  Clone ID: LIB3149-023-Q1-K1-A7
cttagttgatggatttgttatcctgaatattgatacagcgaatcctacaaacccatccatggaattggggcctgaattcaagaaggttggtaacttcttaagtcgattcaagtcgattccgaacatcattgagcttgatagccttaaggtgactggtgatgtttggtttggcgctgacattgtgctcaaggagaaagtgagtatcgct

SEQ ID NO: 33457 - DNA, 297 bp, Gossypium hirsutum
  Clone ID: LIB3149-023-Q1-K1-A8
aataggtcaataatttattatctttaagatttatacatccagacgccccagaaggatccagaggatggttctttgaattcaggaagccgccacccctaaactggccaaaggagtatattggggagagcgaccttctattttgtgacacatgccactggccccgtgaccatcatgcaaagaacaatcacgctccagcatgcactgagtactgtacataatattttctagtttgatatcccaaacaataatttgatagacgagtgtatattgctagatcatgctttaccaaataactta

SEQ ID NO: 33458 - DNA, 276 bp, Gossypium hirsutum
  Clone ID: LIB3149-023-Q1-K1-B11
gtttagaacatacataattctgtttagatttttaatacgtaatatttgcctgggggcggggatcaaaatcaatgaaagtgcgaattattcacacaggtttgagatgaaattttctggtcgtacgcaactgaaaccgatatcgattcataaggattataacagtgctaacattataataaatttgctttcagatgaccatatctctaagttgcgtatacttgataaatagaatgttgagttttacatattcgatataaacacggcaagacgagtgat

SEQ ID NO: 33459 - DNA, 395 bp, Gossypium hirsutum
  Clone ID: LIB3149-023-Q1-K1-B12
ggtacatggactaatttatctatttttttagtataggagccaaaatgcaatccaacttctcgtataggggtctctatgatacttttactgctcaaacacagagtatcagaaataaaaaacttgatttgttattacttttttttgggggggtttgcaggcttttaagaaggctagaagcatgggactgggagacatggatttttcagctgtgtttgagaccttgaaggttcttaaacattcatcttaatatatcatatggatttataaatgtcatgaaaacacgaacaatgtaggggactatatacttatttagggttttgattcttacttttgaacaaccattcagtacgaaactggaatttttagtgctacaataaataaattcaattatgagg

SEQ ID NO: 33460 - DNA, 295 bp, Gossypium hirsutum
  Clone ID: LIB3149-023-Q1-K1-B2
caaaccaaaggttaaccatgagagctaagtggaagaagaagcgtatgagaaggttgaagaggaagaggagaaagatgaggcaaagatctaagtagtacagtctttgttgttcttcatggatagttatttgatgggtacttttttttttgaaggatttaaagctgttgttttcattttcatggcttaaggttttcgttcttgtatttttgttgaaccattttcatctacttgataaatgttattggagttttaaaggatcgataatgattgaattggaaagagatagtttcttgct

SEQ ID NO: 33461 - DNA, 226 bp, Gossypium hirsutum
  Clone ID: LIB3149-023-Q1-K1-B3
gatgaatcaagagtttcctgtttaggagattcaagattaaaaactcttgatggcaacgtagaaattagtgctctattatttcatatttcgaagccactcgctctgaactgtcatcatgacatactttgaagaccgctactttctctgtttgaacacatactgctgtcattgtcattttgatggctgaagaattatgctactggatgcactggagtagaatttataa

SEQ ID NO: 33462 - DNA, 341 bp, Gossypium hirsutum
  Clone ID: LIB3149-023-Q1-K1-B4
gttggttcaaaagtctactggggaggagattccagattaaaaattcttgatgccattgaagatctagggctagattctttggttatgggaagccgcgggcttggaactgtccgaatgattattttgtggagcgagagcaactatgtcgggacgcatgctacttgccctgttaccatcgtcaaggaacaatcaagctccagcatgcactgagtagtttacataatattttctagtttgatttcccaaacaataacttgatggacgagtgtatgttgctggatcatgttttaccaaatagcttacgcagttttacgttggtttactgaatctaaaaaatatat

SEQ ID NO: 33463 - DNA, 408 bp, Gossypium hirsutum
  Clone ID: LIB3149-023-Q1-K1-B5
gcgaagaagggttcttcaacgacgccttcttgaaaagcaaaaaataaaaaagaagaatctgttccagaacagaagaattcagcttctaaagtggctggtaacgaaatcgacgagatatttgcaggtaaaaagaggaagaaacccgacccgaaagggtccgagaaaccgaacggcgatgaaatttcaaaacccaaatcgtcgaaaaagaagagtaaaaagagtagagaaaccaacagggaaggaggattcaatgagtcttcttctgggccttggaaaaggacagcagatggttttgcaatttacactgaagaagaattgggtattagtaaatctgatgctggaagtacgccactttgtccatttgattgtgaatgctgtttttgataaatgggggtttggttctaattt

SEQ ID NO: 33464 - DNA, 216 bp, Gossypium hirsutum
  unsure (1)..(216): unsure at all n locations; Clone ID: LIB3149-023-Q1-K1-B6
agcgacggggtagctctcatataaagtcacctaaaatcacttctctggccggcatcctacaacattttttttgtgaaaaccccgagcanccccaacctaaaaggcccggaaaaccttaccatttttaaaagttgaaaccctaggaattagaccgaaccctttccccctcccaaaaacccgccaagcaggatggatcaatggacccccccttgaacc

SEQ ID NO: 33465 - DNA, 320 bp, Gossypium hirsutum
  Clone ID: LIB3149-023-Q1-K1-B7
atcgacgccatggcacctaacggggtcgtttccgacaagagtttaatcgtgagtttcggtgagatgctcatcgacttcgtccccaccgtctccggtgtttctttagcggaagctccaggcttcctcaaagcccccggtggagccccagccaacgtggcgattgccgtctcaagactaggcggtaaagcatccttcggcggaaaactccgcgacgatgagttccgtcacatgcttgccgatattctcaagcgaaactgtttcttctgcgcccgaaacttattttgaccctttccttatacactctttaggtttatttacct

SEQ ID NO: 33466 - DNA, 388 bp, Gossypium hirsutum
  Clone ID: LIB3149-023-Q1-K1-B8
aaagagcttcagcttggagaagaccacccttatgtgcatagattatttctggccatttacggaagcttcatggaggctattgatgcgattgacaatggaatcaaccagtttgatactgacaagccaccaaaatatgtgaacaatacacacatatcttctagagttggaagattaaatctagactggacagatcctgatcaatcacctgagaaggagaatgaggctttccaacgagcaatggctctagctggtagtgagttcttagaaagtgtccgatttcatgcaagatcatggctaccagcaaggtcaattgtattggagtgcttggcggaaggatttgacttaaatcctagggggaaattttgggtttggaaaaggtttggccctg

SEQ ID NO: 33467 - DNA, 277 bp, Gossypium hirsutum
  Clone ID: LIB3149-023-Q1-K1-C1
gatgttgttgagtctactggtgtttttactgacaaggacaaggctgctgctcacttgaagggtggcgcgaagaaggttatcatttctgctcccagtaaggatgctcccatgtttgttgtgggtgtcaatgagaaggaatataagcctgaccttaacattgtctccaatgctagctgcaccaccaactgtcttgctccattggctaaggtgatcaacgataaatttggcattgttgaaggtcttatgaccactgttcattctattactgctacacaaa

SEQ ID NO: 33468 - DNA, 248 bp, Gossypium hirsutum
  Clone ID: LIB3149-023-Q1-K1-C10
gcaagaatactttgagattcctcctaagattgtgaatgctaaaagagctcgtcgatgcaagcatcatcctcattgaatgtgggcattacccatccaagttttagctgcaattttctgctcgtttgtaactgtcacccacgtatattctcaaacttataatccacccctccatattcttgacatcccttttaaccaaccatttatcatgtttcaaaacatctatcctttattgagcacattatctacca

SEQ ID NO: 33469 - DNA, 291 bp, Gossypium hirsutum
  unsure (1)..(291): unsure at all n locations; Clone ID: LIB3149-023-Q1-K1-C11
gcaaaatacgtggagaagccggcgaagaatgtgaatgctaaaagtggtcgtcgttgcatccatcaacctcgttgaatgtgtgtattagccatccaggttttagctgaaattttctggtcgtttgtaactgtaaccgttgtagattttcaagttttataactctgctaccattctaatgcctttgtttctagttgacgatatatcaaaaaggaaaaaaaatgtaaaaaagaatgtaaaattttagaaaaaaaatagaaaaaaggaaaaaagagagaatcatctttcatcana

SEQ ID NO: 33470 - DNA, 255 bp, Gossypium hirsutum
  Clone ID: LIB3149-023-Q1-K1-C12
ggaaagccttatggcttctttggagaagaatgaatcaaagatttctccttccactttgtatgctattgcttggggtcttgaaaatggtcctttcatcaatggcagcccacaaaacacctttgttccaaggttgattgatttggctattcaaaagaactggctgattggaggagatgacttcaagaatggcccgaccaaaatgaaatctgtcctcgtggatttccttggtggggctggtatcaaacccacatcgat

SEQ ID NO: 33471 - DNA, 374 bp, Gossypium hirsutum
  Clone ID: LIB3149-023-Q1-K1-C2
taatctctttaggatctcactgcgagattcaacctaatggcgaagaagggttcttcaacgacgccttctagaaaagcagaaaataaaaaagaagaatctattccagaacagaagaattcagcttctaaaatggctggtaacgaaatcgacgagatatttgcaggtaaaaagaggaagaaacccgaccctaaagggtccgagaaaccgaacggcgaggaaatttcaaaacccaaattgtcgaaaaagaagagtaaaaagagtaaagaaaccaacagggaaggaggattcaatgaaccttcttctcggcctcggaaaagaacggcagatgggttttgcaaattacactggaagaagattgggtattaggtaatctg

SEQ ID NO: 33472 - DNA, 211 bp, Gossypium hirsutum
  Clone ID: LIB3149-023-Q1-K1-C3
cggaggcgtggagcctactctttttaagatttaactgtacaatgcaacctatcgcctaagagggggggctgaacaactccttctatataatcccaatatagatactaccaatctattccagaacagaagaattcaacgtattaaatggctaccttcacattcgactagatacttgctggtcaaaaaactaagaaacccgaccctcaaaggt

SEQ ID NO: 33473 - DNA, 269 bp, Gossypium hirsutum
  Clone ID: LIB3149-023-Q1-K1-C4
aaaaaaagaatcttttttattttcaagctgtcattatctgaaggtaaaatatatttcctgaagaaaaaatatttgtaatttatatatttgcattcgctgataatgataccagagaatttacagtgaaagaactctgcttttttgtctacttctctctttgttgaagttctactttacatgaaacatgcctccccacattctctcagtttggctttaaatcttcagacttcaggaaaaaagtttcgttgatgggcgtcttcagtttattt

SEQ ID NO: 33474 - DNA, 280 bp, Gossypium hirsutum
  Clone ID: LIB3149-023-Q1-K1-C5
gttggatcagctattgcttatgggaagctaacgtcggatgcagcactagacccaccaggcttggtggccatagcggtagctcatgcacttgcgttgtttgttggggtagccattgcagccaacatctcaggtggtcatttgaacccagccgtcacctttggtttggccatcggaggaaacatcaccatcttgaccggccttttctactgggttgcccaatgccttggctcaattgttgcttgccttcttctccagtttgttaccaacgggattgagtgta

SEQ ID NO: 33475 - DNA, 161 bp, Gossypium hirsutum
  Clone ID: LIB3149-023-Q1-K1-C7
gtccatctttttcttttaaattcccctttctacctcaattggattggatttggagctcagctggctagctatcagtgtagaccagttgtatttttcaatgattgtcgcaagtgtgtgtttttgtgtacgaccaatgaagcaatcaacaattattttctatc

SEQ ID NO: 33476 - DNA, 387 bp, Gossypium hirsutum
  Clone ID: LIB3149-023-Q1-K1-D10
atgagctttaataattttaagggcgagatcccgaaagagcttgcaaatctacccgagctccgttatctctatcttcaagaaaaccgtttcactgggcgaattccacccgaattgggcactttacaaaaccttaggcacttggatgttggtaataaccatttggttggtaccattcgggagcttattcgtattgaaggctgcttcccagttctacgaaatctatatctgaataacaattatttgaccggaggagttccggctcagctcgcaaatgtgacaaatttggagatattatacctttcatacaacaagatgtctggagtgataccaacggcagtcgccgatattccgaagctaacatatttgtacttggatcataacccattc

SEQ ID NO: 33477 - DNA, 415 bp, Gossypium hirsutum
  Clone ID: LIB3149-023-Q1-K1-D11
ggcaaatctactggatttggtttgatttatgattctgtcgagagtgcaaagaagtacgagcccaaatacaggctgatcaggaacggactcgataagaaggtggagaaatcaaggaagcaaatgaaggaacggaagaacagggctaagaagatccggggagtaaagaagaccaaggccagtgaatcagcgaagaagaagtgaggtaagatgcccggaacggaaaaaggcgaggatcgcgcttatcttaaagccgatgtttctcgagagcgatgcataagtagtctgaagtttttaggtgttcttgaacctatatttttggaaactgagtttggtgttatttgattatttagttatacgctacttatagtatctgattatcctattttgaaatattttagtgttatgcagttttatt

SEQ ID NO: 33478 - DNA, 343 bp, Gossypium hirsutum
  Clone ID: LIB3149-023-Q1-K1-D12
atcggagctttcaagggaaaacaggcttcactctaaccagcacatctacaagccttagtccaagctattgaacgctgagttactatgcaggcaccacagaaagggatgttgtctctaaacactaaaagtacaggctagactccagctgatatgactaaaaaattagctacaatgggtactactactagctctacctaaagtagttcaactacaaacttgactggagacgcgctgacaacaagctcattcagagctggttcagactgaagattctcatttggacttgctacacgagatagtactctatccagagcaacaaatagcttctcttcatctaacatga

SEQ ID NO: 33479 - DNA, 305 bp, Gossypium hirsutum
  Clone ID: LIB3149-023-Q1-K1-D2
ggtggaaaatttgaaagagcttggtggtgggaaagcaagccccaacatgtccaagggttcccctagggattggctagacccacattgcaatgaatcagaatttgagaagccataccctcagtgaatcggagctttccttagcttaagatagttatcggtgcaaagttcgacgttccagcaccatttattataagtctttatcttgtatgcaagcaaattatcgagcttatgtattttgacaataatctatcaaccaagccatttggttttggtactaatgagaagacattgaaagatatatttat

SEQ ID NO: 33480 - DNA, 415 bp, Gossypium hirsutum
  Clone ID: LIB3149-023-Q1-K1-D4
tgttggaaattaactgattcttccttgaatatcattgcggaaacctgttcaaatttacgagctcttgacattggtaacatatccaaactgacagacacttctttcggctatctggccagtggttgtcggtcattgcagtcattgaaactctgccacaatgcattcagtgatgatgctatagctgcatttcttgaaatgtctggggaggttttgaaagagctagcactgaacaatgttgggaaggttggtcttaatacagccttatcacttgcgaggcgttcaagaaatttggttagtctggatctatcttggtgccgaaatctgactcatgaagctacgggcttgattgtagatagcttgttatcgctgagggtgcttaatacttttggatgctctcagattacagacgtctttt

SEQ ID NO: 33481 - DNA, 269 bp, Gossypium hirsutum
  Clone ID: LIB3149-023-Q1-K1-D5
aaaaaaagaatcttttttattttcaagctgtcattatctgaaggtaaaatatatttcctgaagaaaaaatatttgtaatttatatatttgcattcgttgataatgataccagagaatttacagtgaaagaactctgcttttttgtctacttctctctttgttgaagttctactttacatgaaacatgcctccccacattctctcagtttgtctttaaatcttcagacttcaggaaaaaagtttcgttgatgggtgtcttcagtttattt

SEQ ID NO: 33482 - DNA, 406 bp, Gossypium hirsutum
  Clone ID: LIB3149-023-Q1-K1-D6
gtctaccttttcgacaaaataatcacaaggtaatatcttttattcatatttatatttccaaccaatcaattgggataagtatttcatgcaaccttgtaatggtggcaggatgccaccagggcaagagaaattcatagtgataggagatcttaaaggatggggatacgcaaatagcgacatccgtgcataccttgcagctctatctctcgtacaggattattaccctgtaaggcttgaaaagctgttcgtagtccatgcaccattcatcttcatgacagcatggaaaggtgtttaccctttcatcgacccaaaaaccaggacagagatgatattcgttgattacatatcactcaaatcaactctgctagaagaaatacacgagagccaactgcctggtacattgggt

SEQ ID NO: 33483 - DNA, 210 bp, Gossypium hirsutum
  Clone ID: LIB3149-023-Q1-K1-D7
ccgttgacccttcacgggatgttcatgggttatcaagtattcttgtcaaagtattttaagctgcacctttcaaactaaaaaaaaaaaaaaaaaaaaaaaaaaaaaaaaaaataaaactaaaaaaaaaaaaaaaaaaaaaaataaatgaaaacataaatgaaaaaaaaaaaaaaaaagagatatgataaaaaataaagaggggggggccgc

SEQ ID NO: 33484 - DNA, 268 bp, Gossypium hirsutum
  Clone ID: LIB3149-023-Q1-K1-D8
aacaaaaccatccttcatattttaaaaataaataaaacataaccaatattataattcccaggagaatttttttttctttatattttaaaccaaatttattaatatttatccacaataacctaccaaaattaaactctgcttaactgaaaactcttatctttgctaaacttctacttaccacttcacatgtaatacatcgttctgtctttaaaaaaccaatacttcacactagatcaaaaaacaatctcaatctaaatactcctctttc

SEQ ID NO: 33485 - DNA, 269 bp, Gossypium hirsutum
  Clone ID: LIB3149-023-Q1-K1-D9
gctgcaccacaactacagagaatagagttttggggaaaaaaagcgtcgttgttcttgctgcttcttctacttcgctctctctctttctccgaagttcctccttcgttcttttatttattcagtcttgtaaaagatggccgtcggtgaggatatccctcccctcgtctgtgatactggaactggattggtgtttgccggttatgctgatgacgatgctccatgcgcagatcatccctttcttgttttttgaacccctccctcttctgctt

SEQ ID NO: 33486 - DNA, 431 bp, Gossypium hirsutum
  Clone ID: LIB3149-023-Q1-K1-E1
cctaattgtaatcacttgatatattttactttgcgagagtcatgtgggcactcaagttattctctcacttctctcccttcctaatgtgctagctgatctcttaattgagttattaatttattattttaaattctaaaactaaattcattgaaaaaaaaaaaaaaaaaaaaaaaaaaaaaaaaaaaaaaaaaaaaaaaaaaaaaaaaaaaaaaaaaaaaaaaaaagggaaaaaaaaaaaaaaaaaaaaaaaaaaataaaataattttaatagaaaaaaattattttaaaagtaaaaaaaattttatttttgggggggggcccttttaaaagaccaaatttttccccccggggtttggaagtttttatttttttttttggggccccaaaattaatttccggggccgtttttttaaaaggggggagggggaaaa

SEQ ID NO: 33487 - DNA, 313 bp, Gossypium hirsutum
  Clone ID: LIB3149-023-Q1-K1-E10
gaggtgcaaattgcaaaggcagcaaaattaatggctactgaagaggtcaataagcctccttcacttccttcatacccacagctgattatgaacgccattgaagcattgaacgacaagaatggttctaacaagacatcaatatccaaatacattgaatccaagtatggagatttgcctgctggtcacactactctcctttcacaccaccttaatggtatgaaacaaacaggggaacttgtcttcttgaaaaacaattacatgaaagctgaccctaatgcaccacctaaacgtggtcgtggtaggccacctaaac

SEQ ID NO: 33488 - DNA, 133 bp, Gossypium hirsutum
  Clone ID: LIB3149-023-Q1-K1-E11
tacactataacctgtatatagtgtaacctaaattcaagctactggcctgtgagttacaacgcagggactgagaaaaccatgtcgttactaaacattaatagtatacactagattccccttgttacaactgaga

SEQ ID NO: 33489 - DNA, 380 bp, Gossypium hirsutum
  Clone ID: LIB3149-023-Q1-K1-E12
caagggaaaattggattcactccaaccagcacaactacaagccttattccaggctctacaactctgagtttttctccaggcaccacagctgggatgttttctctaaacactacaactacacgcttgactccagctgatatgactaaaaaatttcctccattgggtactactactagctttacctcagctagttcaactacaagcttcactccagttggtctgacaacaagctcaatcgcagctggttcaaactcaagcttttcatttggcctttcaaccgcaaattttacttcctccagtgcaacaaatagcttttcttcatctaacatgacctcaaagcttgcatctccttggagcactggagcattctctaatagtca

SEQ ID NO: 33490 - DNA, 351 bp, Gossypium hirsutum
  Clone ID: LIB3149-023-Q1-K1-E2
cacggttttgcatggttcggtggcggtgtggagattctggttcgagagaagagtagaggatttggcttgggattggctccgacagacggttggtgacatattgttggctttttcttgggtattctttttggtttactcttggagagaaaagtatgactagatttgaatttgtttttgtttgctgcttggtatggtgtacattttggtgaagttgatttgaaattcagtgtaagatgattgggtatgaatcagaatttgaagattcttcaatccgtcttgctatttttttcttattaactatccattaaaatgctaatgattccgtgaaatgaaattcaaggcttctcccca

SEQ ID NO: 33491 - DNA, 425 bp, Gossypium hirsutum
  unsure (1)..(425): unsure at all n locations; Clone ID: LIB3149-023-Q1-K1-E3
cacaaaaacacctattctcttgagtaactgttacaaaattcagcaaatatggaagccaacaggggccagaacggtattcaacagctgctagctgcggaacaagatgctcagcatattgtcaatgctgcaagaaatgcaaaaatggctagactgaaacaggccaaggaagaggcagagaaagagattgctgaatatcgtgctcaagtagagtatgagttcaagaagaaggtggcggagagtagcggatactcggnggctaatgtgaagcggctcgagacggaaacagatgcaaagatcaatcacttgaaaaagaaagctgcagggttttttattgatgtggtacaaatcctttggaaaaatgggacaactgtgaggaactagggggtcttcatgaagactgatggttaaatttctactacattcta

SEQ ID NO: 33492 - DNA, 268 bp, Gossypium hirsutum
  Clone ID: LIB3149-023-Q1-K1-E4
agcgaggagactggtcttgcattgggcttttcttttctgttagttgcgcagggaaactgatgatatatttactagagatatgcttacgaagtgaaatgttcggaatgcgaataagacctcccctttctttgtctggtcattgtgctatgtctgctacttttttcatttatgcattgagatggacaaaatactgatttacaataacatgtgattaaacacaaactaataaagggataatatcttgatacgaatgatgcaagaaccaaat

SEQ ID NO: 33493 - DNA, 93 bp, Gossypium hirsutum
  Clone ID: LIB3149-023-Q1-K1-E5
gacgacctttcctacattatattctcaatgttatatcttttatgcatattaatagtgccggggaatctattgagataattactctatccaacc

SEQ ID NO: 33494 - DNA, 257 bp, Gossypium hirsutum
  Clone ID: LIB3149-023-Q1-K1-E7
gatgaatgccatataaatatcttacaggtttataacacataacatgtgctgaaacccgagggacagttactaaaatgactggataaacgaaaactactgcattatttcttttatactactgacacaaatagcataacggctacagaaagattcttcacaagatagagtgatattgagatgctcgagataagacttatgacgtagctgagggtaataactaagtccctgaaaggtctaggatacacatgccctttttc

SEQ ID NO: 33495 - DNA, 302 bp, Gossypium hirsutum
  Clone ID: LIB3149-023-Q1-K1-E9
ggttggtgtaaaacagtcatgtctaacaatattaagttctgcctaaagcctgaaactgggaaactgtttttaagttgtattattagttgcaaagagatcaatagcagtgatagacccagcgctagaagtggcaaaatctacaaggagaaatatatcggcattcgattagtaataatcggcttgggtttaatctatagatcaagtcgagtgtggccaatctgcccttaaagtacctttggatttcatcttacagtttgcagaactgagctggacagggatccggcttactttttgacttgagt

SEQ ID NO: 33496 - DNA, 321 bp, Gossypium hirsutum
  Clone ID: LIB3149-023-Q1-K1-F1
gcaaaatctattgttgttacaaaaactttcccaatcacgttttacttaaaagctatactgccacaactactactttgttaatttactgcaaaaatgaaggtgacgaagaaaaagagtgatgctactgctcaaagagcatggaggctactgcgtctattcttgttatggactagaaaaagtggggtgctcaggagacggcttatgatggagctaaggttggtgcctaagttcctcaagggtctaggacacacatccccttctcctcctggccaaatctattttaaggaacgccagctttaattcgatgaaacaccaattttc

SEQ ID NO: 33497 - DNA, 176 bp, Gossypium hirsutum
  Clone ID: LIB3149-023-Q1-K1-F10
ctctgctacatcctccggaaaggcatactcaatcaactcctgtttccatgttctgctacttgaatcaattagctctgcaactttactatcgttcaaatttgaatttaaaactggtaatctatcacgcggtaaacctggaatccaataatcacgactgattgaaattttcgtacctc

SEQ ID NO: 33498 - DNA, 354 bp, Gossypium hirsutum
  Clone ID: LIB3149-023-Q1-K1-F11
ggttcttcatccaaggccgaaccttcaacttcatcatcccataggatcatgaactttgggacatggaatcagctggttttggcattgttcggtgggtgggtgatgttcttctaagttcaaagggactttcatttcgagtctaatttatgttcatgttggagagaaaatcatatttgggtttttcaatttacttttgatttttagaaccattttttcatttatatgttatggagagattattatgtgttgaaaagaatgtgagttcttgttttgcagctactattttttttttttaaattgagcttctcaatttacttgaataaagttagcaaatttcaagttctcaaaaataaa

SEQ ID NO: 33499 - DNA, 294 bp, Gossypium hirsutum
  Clone ID: LIB3149-023-Q1-K1-F2
tctagatcgcgagcgccgccctattctttttttttttttttttacttattagcttttttggcttttgggaaagattgccactaaaaaaaataacgtccaagcctatttcaaatacaaatgccacggcttactcaccccggtcgctaaaatatatattaaaacccaggtccaaaactcaacccgtgctcaagaaacggccaatgatggatctatacatgttgcgtaattccctgagcggggtacgagacacatacccttccacccctgatctacaatatagcatggatcaccagc

SEQ ID NO: 33500 - DNA, 248 bp, Gossypium hirsutum
  Clone ID: LIB3149-023-Q1-K1-F3
cggaaaggctgtaaaggtcaaccattcacttaaacatacaggcagtggtgaacaagatgccacctatgaaattaagctaactgatgcatccttgagggaagccgttgccaagacaacgggcttgtgcatcaacagtggatcatggactggaattccaggctattgtcgcttcaccattgccttggaagagagtgaatttgaacaagcattggcttgcctagtcaaatttaaaagcatagtcgataact

SEQ ID NO: 33501 - DNA, 346 bp, Gossypium hirsutum
  Clone ID: LIB3149-023-Q1-K1-F4
cgatattcagagagggatggttttggctaatccagggacaatcactccccataccaagttcagcgccgttgtctatgtgttgaagaaggaagagggtggcagacattctcccttcttcgcaggttataggcctcagttctacatgaggaccactgatgtcactggaagggtggcttccattatgaatgataaggatgaggagtctaagatggttatgcctggtgaccgtgtaaagatggtagttgagcttatcatgcctgtggcttgtgagcaagggatgcggtttgctatcagagaaagacggaagacggttggagccggagttattcagtctattattgagtga

SEQ ID NO: 33502 - DNA, 162 bp, Gossypium hirsutum
  Clone ID: LIB3149-023-Q1-K1-F5
ggggattttgcttggtgggctctggttttgtgtggagaattctatgctcttctgttatttccctttgattgaagagagtcccttcgggaggtttgtttatgacaaggatacttatcacatatcatatttgttgaagtttgaggatgatgatgctatggctgt

SEQ ID NO: 33503 - DNA, 304 bp, Gossypium hirsutum
  Clone ID: LIB3149-023-Q1-K1-F6
ataggccagggattctatcaaacgcaggtgttccaacgcttcccaccactggtttcgctctgcaaagcggcgaaaccaaagccattactgcaccggcatcatggggtggtcggttctggggtagaacccattgctccgaggattccaccgggaaattttcctgccttaccggcgattgtggctccgggaaggtggaatgttctggaaacggggctgctccgcccgcgagtttagctgagttcacattggacggtgctggcggcctcgattttttcgacgtgaggttggccagaggttacaacat

SEQ ID NO: 33504 - DNA, 187 bp, Gossypium hirsutum
  Clone ID: LIB3149-023-Q1-K1-F7
ttagaacggagatgtcaagacagcttgtattgcatatcatctatctatgttgtatcttgggactctataatttatcttaaattctctttcacaagcctgtaaaaaactcactagctgattttattcgtgcaaacttaatgtttgtgttcaatcatggatttgtatctttcacataaaaaaaaagaaa

SEQ ID NO: 33505 - DNA, 140 bp, Gossypium hirsutum
  Clone ID: LIB3149-023-Q1-K1-F8
acggaggaatgcactgacaactacatacagctttataaatcaaaggaattaaataatccagggggcgccttgctttagatccatcttgaccaatgactacagcaaaacggcaaactacgataaatacatctcccacgact

SEQ ID NO: 33506 - DNA, 416 bp, Gossypium hirsutum
  Clone ID: LIB3149-023-Q1-K1-F9
gagatattccagattactgacctacttgttaatatcacaaagcatgtgctgaagccccaggaccgggtactaacagaacatgagaaacaaaggctcttgcagaagtacagcatagaagaaaaacagctccctcgactgttaaaaaaagatgccattgcaagatactatggttttgaaaagggtcaggtgataaaagttacgtatgggggtgaaatcactgagtcacatgttacttatcgatgtgtctggtgatgaaacaaatcaatgctgtcgctgttctttatgtttcttcctgtaggaaaattgagtttgtagttttctgtccgaagtgttttcccgaacctttctatggggcttccgacctttgtttgctgttttatgaacactaattgagttggattcttctttaattttac

SEQ ID NO: 33507 - DNA, 418 bp, Gossypium hirsutum
  unsure (1)..(418): unsure at all n locations; Clone ID: LIB3149-023-Q1-K1-G10
aaccctctcaaaaaacaatcctcttcctgaaagaaacgaaagtcttgaatttatttgcttggggcttgtaaagaaggagaagaaaaaaatggcagatgatagcacagctacctgcgtagatatcctcttagccatcattttgcctcctctcggtgtcttcctcaagtttggttgccaggtggagttctggatatgtcttgtactcaccctgtttgggtacatccctggtattatttatgctatctatgccatcaccaagtagtcctctaatcccatccttctcatctgtggagatttggagtaggattctggttttgtttgaatatgtgtcggntatagtattttatttcaattaatattttgtctgttaatttgatggtgatgtaaaagcttgtggtatgttatgatgatgatttat

SEQ ID NO: 33508 - DNA, 220 bp, Gossypium hirsutum
  unsure (1)..(220): unsure at all n locations; Clone ID: LIB3149-023-Q1-K1-G11
aaaaaaataaaaaaacaatacaattgcagttaaaaacgaaaggcctgacttcaggagccaggggctcgtacacaaggagaagaaaacattggccttttatagcacagctacctgcgaagatatgcgncgagccatcatatagcctcctctgggaataccccggaagttcggatgccaagcggagtgctggatatgccccgtactcaccctggtgggatac

SEQ ID NO: 33509 - DNA, 327 bp, Gossypium hirsutum
  Clone ID: LIB3149-023-Q1-K1-G2
cttgtcgatacttccgacttaagttccaaaaaatcctcgagcatcggttcactcaaagcttccaatttagacagtttgctggatgatttattacaagaaacatcgataacagtaaaccgagggatagattcatcaaagactggcgcaggtaattcaacttcccaaaatttgctcgatgatttattacaaaaaacatcatcgacaattggtaatgccaaacttggttcggataacaatgttcgatcttcttcttcatctttccaatctgtttcgaagtcaaaaatttggatgatttttgattcatggctaagatactatctgatgact

SEQ ID NO: 33510 - DNA, 413 bp, Gossypium hirsutum
  unsure (1)..(413): unsure at all n locations; Clone ID: LIB3149-023-Q1-K1-G3
gttttgtgaaccacagggtccaaaccaagtgaactagggccaggtatgcacaaccagcccacatcaggcacatgaccgtgttaggctgcgaccagaacggagaagaagggtccagccggctctggaaacgcctggtgtgcgcgagaagcacctggggcgcgtgggagaagtgctgaatggtgccaaaaacatacccacaccacgtccaacaagaagttgtggggctttcaattctttccctgaagatttgaaccatgggagttttggtttcaacattgaagcctgtaccaatctttaccattatttaacattgtcatttactcaatagcagacatttctggtccctccccttttgattaacaaatggcattcacatctatattagtcnaaaaaaaaaaaatttaaaaaatagg

SEQ ID NO: 33511 - DNA, 363 bp, Gossypium hirsutum
  Clone ID: LIB3149-023-Q1-K1-G4
gtggtgtcaaaatacacctaatggttatctgatcgatttgcctttagatatctgtggtgtccaaatacacctttaatggttatgcgatcgatttgccttcaaattttcatgtcaacccagtttttaatgtttctaacctgtattcttttgagggtttcaatggagatattgctaaaatctcagaccaggtgcaccgacttcctaaggtttagattgaggtttttgaagatgtgttggatgttaaagaagtgaggtttagaagcggtaataactataggagatttttggatggctaggattagtttttaaggcttaaaatctagggtaagaattaaaccttatttgcaagggctaataaccttg

SEQ ID NO: 33512 - DNA, 263 bp, Gossypium hirsutum
  Clone ID: LIB3149-023-Q1-K1-G5
agctcaagagagttcgtcgtgaattcaaggctaacaagatctcagaggatgattatgttaaagccattaaagaggaaattaagaaagttgttgaccttcaagaagagcttgacattgatgtcctggttcatggagagcctgagagaaatgatatggttgagtactttggtgagcaattatctggttttgctttcacttgtaacggatgggtgcaatcttatgggtctcgctgcgtcaagccacccatcatctacggtgatgtt

SEQ ID NO: 33513 - DNA, 317 bp, Gossypium hirsutum
  Clone ID: LIB3149-023-Q1-K1-G6
gtttcaggatacctgatcacaagtctggctagttggatgtccaatatcttcatcctcatgctgccattgattctaccattggcctgaatccaactcccctattggagctttcagcaacaattggcagcaaggagcttgctttgggtggtgaaattggatttgatacagcttctgcttcttttaccgagtacactgctgggatcaacttgaacaagccagatttctctgttgctcttttgctgactgataaaggtcaggcattgaaggcatcttatatccattctgtcaaccccttcacatgtgttgccgctgaaatg

SEQ ID NO: 33514 - DNA, 381 bp, Gossypium hirsutum
  Clone ID: LIB3149-023-Q1-K1-G7
attcagcctaatatgggcaatattcgctattccgatttgcagaaatgagcagaaattttgagagaagagatgagagcagtttgtgggtgtggctaaaaaagtaaatgagccgcttagaagcacttttttgccggaaaagtagaaattttctgctttttcatcttttggaaagtgctttaaaaaagttactccactgctcattgattttcacccaaaaagcacttttgggtgtaaaagtgcttttcaaagcacttttaggcgtaaaagtgcttttcaactggggcaaagaactggccctaagtctaaaagtgcttttcaactggggcaaaaaattgggccctaatctagcaggctaattactggtgaattggatcaggtttt

SEQ ID NO: 33515 - DNA, 363 bp, Gossypium hirsutum
  Clone ID: LIB3149-023-Q1-K1-G8
ggagcattaaagattacagatggtcaaattgagaataataatgttgcggctgaaacgtacagaatgccctttctgatgcttggtctggatttgccagaaccaccacttttcaaagatgtgatggagaaaaatataatacctcaggtacctttgtttaatatactaaagaagtttgatggtgagatggtaacaactactgttcgtgctccagcaagaatgagatatcgagtcaccatattgccacagtattttatacttcatatgcgccgatttactaagaataatttcttcagaaaaaagaacccaacattggtgaactttccaaagaaaaacctcgagttgaaagactacattcctttgcct

SEQ ID NO: 33516 - DNA, 364 bp, Gossypium hirsutum
  Clone ID: LIB3149-023-Q1-K1-G9
ccttgagtgggtccaccatgagatggagatctatcccatttggctctgcccgcaccgactgttcaagcttcctgtcaagacaatggtgtatcctgaaccaggctttgagcagcatcgcagacaaggcgacacaccatacgctcagatgttcaccgatgttggggtgtattatgctccaagccctgtattgaggggtgaagtatttgatggtgcagaagcagttcgtaaattggagcaatggctgatcaaaaaccacagtttccagccacagtatgcagtgtcggagctcaacgagaaggatttctggaggatgttcgatgctgacctgtacgagcatgtgcgtaggaagtacggagctgtggga

SEQ ID NO: 33517 - DNA, 391 bp, Gossypium hirsutum
  unsure (1)..(391): unsure at all n locations; Clone ID: LIB3149-023-Q1-K1-H1
ctcgccgccgcctgcgtctctctcttcatctctctgaacctaaaagtctttagcttttcgcttcgagagagaccatgttggtttaccaggatctcatctccggtgacgagcttctttctgactcattcccctacaaggaaatcgagaatgggatgctgtgggaagttgagggaaagtgggttgtgcaaggagctattgatgttgacattggtgccaatccttcagccgaagatgctgatgaggatgaaggtgttgatgaccaatctgtgaaaggtggtgacattgttgacactttcaggcttcaggagcaccccctttcgacaagaagcagttgcgtgtcatgaagaagtcatcnagaactgacaccgaactggatgcgaaagcagagtcc

SEQ ID NO: 33518 - DNA, 181 bp, Gossypium hirsutum
  unsure (1)..(181): unsure at all n locations; Clone ID: LIB3149-023-Q1-K1-H10
nctaaattggctatcctccaagtgacttgttatccaagaaagaaacaacagggcttagggagaagcatgatgaaaactgcgactctgtgtttagctggaatgcaataagtggaggagaagtgtgtgtgtgctgtttctttgttatttttcttaaaacgagtaatatcaacatcttcctcct

SEQ ID NO: 33519 - DNA, 419 bp, Gossypium hirsutum
  Clone ID: LIB3149-023-Q1-K1-H11
taggtatcttgctgagttcaagactgctgctgagaggaaggaagctgctgagagcactttgttggcttacaagtctgcacaggatattgctctcggagacctagcgccaactcatccaattaggctgggacttgctcttaacttctctgttttctactatgaaattcttaactcacctgatcgtgcttgcaatcttgcaaaacaggcatttgatgaggctatttctgagttggatacattgggtgaggaatcctacaaggatagtacattgatcatgcaacttcttcgggacaacctaaccctttggacatctgatatcacggatgaagctggagacgagatcaaggaagcttccaaacccgagtcaggagagggacagcagtgatgagttaagttcatatgatatgtactctgtaatt

SEQ ID NO: 33520 - DNA, 282 bp, Gossypium hirsutum
  Clone ID: LIB3149-023-Q1-K1-H2
attgtccatttcttttttgaaattcatcaccgatggcgaccgccatggtcgaagattcgagcttcgaagaggaccagttggcttcgatgaccaccgaggacatcgtccgagcttctcgtcttctagataacgagattcgaattctcaaggaggagatgcaaaggacaaatctcgagttagattcgcacaaagagaaggttaaagagaatcaagaaaagatcaagcttaacaagcaattgccttacttggttggcaacatcgccgagatattagagatgaatc

SEQ ID NO: 33521 - DNA, 354 bp, Gossypium hirsutum
  unsure (1)..(354): unsure at all n locations; Clone ID: LIB3149-023-Q1-K1-H3
caattggccttcaggtcctcatcgactgtggcaagactccacctccaggattccagtgtccagcataaggatagtacccctttttggacaataacatcatgttcatctcatgacaagaagttataattgtcgaaaatttcgagtttccccgtaaagatatattgaggcatgacaagatgtgctgatgtatttcttagtaggtagtgttccgagttcctagggaggagttgtgcttccaagttttctattatgtttttaattagatttaatcgccacttacatttgtggagctgctctttctttcaatagcatcttgatgattcaataaagagtccaaaaataggcattcgttnt

SEQ ID NO: 33522 - DNA, 431 bp, Gossypium hirsutum
  Clone ID: LIB3149-023-Q1-K1-H4
cagaagcttcgggcgttttttgacaagaggatctctcaagaggttgctggagatgctttgggcgaggaattcaagggctacgttttcaagatcatgggaggttgtgataagcaaggatttccaatgaagcagggtgttctaactcctggccgagttcgtctcttgcttcatagaagtactccatgtttccgtgggtatggaagacgtaatggtgagcgcagaaggaagtcagtccgtggatgcatcgttagtcaagacctctctgttttgaacttggttatagtgaagaaaggtgagaatgatttgcctggtctgactgacactgaaaaaccaaggatgagaggttcaaagagggcatccaagatttgaaagctcttctacctttccaaggaagatgatgtccggaagtacgtcttcacttaccggaggac

SEQ ID NO: 33523 - DNA, 418 bp, Gossypium hirsutum
  Clone ID: LIB3149-023-Q1-K1-H5
tgaaaaggcaaagcaagatgatgccctctctggtttaagcgatctactgggagagttgaagggtatggctgtcgatatgggatccgaaatcgagaggcaaaataagagtctgaatggtctccaagatgatgtggatgagctaaatttccgtgtgagaggagcaaatcaacgagctcgccgattgcttgggaagtaacactgcaggtttgagattcaagctgacatgtccggttcactcttctggcattgtgatctcacacagccatattgggggattttattagtatattcggcttcttaccttaccatgtttctcttacgtttcaagcatatcatatgcttaactatggactttcacaatccgagtatgcgcgttgccttttgtatttatttttctgtgtttcaaattaatatatta

SEQ ID NO: 33524 - DNA, 429 bp, Gossypium hirsutum
  Clone ID: LIB3149-023-Q1-K1-H6
ggaagaagaattggtcctgtttggttctcattggtggcctctgaggaccaggaaggaggtgctcccctccctcagattcctgcaaattacctaaggataaaggatggaaatatgcctgtttcttttattcaaaaatacctgatgaagaaattggaccttaccgatgaagctgaggttgaaatcaaatgcatgggacaacctgtgcttcccacactgcagttgtataatttagtggatttgtggctacaaacagcatcgacatcacaacgtgtagctgcatctaggggttcttgtgcaaaggattttgtaatggcattggcatatgctcgaaaagagtcagggcaacaataaagcgttgtttcattcttttcccaccacgtcaataatcttaaatgcaaacattgatgatatgtatgagtcattattgga

SEQ ID NO: 33525 - DNA, 94 bp, Gossypium hirsutum
  Clone ID: LIB3149-023-Q1-K1-H7
ggcacaggaaggagccctgtattttctcgcttggttgactatataattctgcatgaattaggtgttttctatgcttttattagacttctaataa

SEQ ID NO: 33526 - DNA, 297 bp, Gossypium hirsutum
  Clone ID: LIB3149-023-Q1-K1-H8
taaaaagaagaagaagaatgaataaggattttgggatggaattttcaaaatccaaaattagtctccactttagtgtagtgaggctttgtttattttgtttaatgttttggtccctgcatgtattggctgttttaatgttttaatgaaaggaagtttatgctttgtcagatcagagtaatatgttttaatattgaccagcctattaaatttaatgtaaattgataaaaaaaaaaacatatgtggataaaaacagcatacaccatcaaacaggaagatgtaataaaagggaacaatagc

SEQ ID NO: 33527 - DNA, 394 bp, Gossypium hirsutum
  Clone ID: LIB3149-023-Q1-K1-H9
tcaatttgctgtttttaagaaggaagcttctcagagcactgggttgtctttcaaagctgcacaagatatttctctcatcgacctatctccacctcatccaattatgctggaacctgctcttaacttctcttttgtatactatgaaattattcactcacctgatcatgcttgctatcttgcaaaacaagcatattctgaggctatttctggatcggatacattgggagaggaatcctacaaggatagttcattgatcatgcaacttcttcgggacaacctaaccctcttgacatctgatatcacggatgaagctggacacgatatcaaagaaacttccttaccccactcctgagagggacagcagagatgacttaaggtcatatgataaatactc

SEQ ID NO: 33528 - DNA, 396 bp, Gossypium hirsutum
  unsure (1)..(396): unsure at all n locations; Clone ID: LIB3149-024-Q1-K1-A1
ctgatgaacagnggggaatgcctgctccttagactgacgttacttttgatctgaaattgcgcgttgatccaacattgttaaaggtttcacctaaagctgtgttgaacagatcagagagagaactggagtggcatgtgccagaagttccactgaagggtactcctggcaaattgagggtaaggatgcctttggattctgctgacattgatgaagaactagaagttgttggttatgtaaaattttcagtgcaaggagctacttcattgtctggggtctgtctaaagcctgctaccgagggtaagacagatttttatgaagtaaatcatcggtatcagagtggggtttatacatgcaattgaattctgatgagattgttttttccatacaaaatttctg

SEQ ID NO: 33529 - DNA, 135 bp, Gossypium hirsutum
  Clone ID: LIB3149-024-Q1-K1-A10
gaagaatttgcagctgtcagaatgggacatggaaccatcgaaaatgactctctaccggttcgggaacaccttaagcagttttctttggtacgaattaagttactccgaagctgatggttgaattagaaagggtga

SEQ ID NO: 33530 - DNA, 122 bp, Gossypium hirsutum
  Clone ID: LIB3149-024-Q1-K1-A12
gcaactttaaataaacttcaggctagaaaaatgacagtaaagctggatatatacatgaaggtcacacatgcattggcaatagctggtatcatgtctgggggttggatatgttaccaacttta

SEQ ID NO: 33531 - DNA, 330 bp, Gossypium hirsutum
  Clone ID: LIB3149-024-Q1-K1-A2
ggccaagaggaagctcagaggtctcatcgctgagaagaactgtgctccactcatgctccggttagcgtggcactcaactggaacttttgatgttaagaccaagaccggaggtccattcggaaccatgaagcattctgctgagctcgcacatgctgctaacaacggcctagatatcgccgtcagacttctcgagccgatcaaggagcagtttcctaaccttacctacgctgacttctatcaacttgctggtgtcggtgccggtgagattactggtggacctgaaattccctttcattccggaagagaagacaagccttaacccccttctga

SEQ ID NO: 33532 - DNA, 226 bp, Gossypium hirsutum
  Clone ID: LIB3149-024-Q1-K1-A3
gttcggtcttcacgatcggatgcacctccgattggtaacactcgctcgactgaaactgaaaagaaattaatggcatctcgacctgctgattactcacgttggagccgctacttcctcttccatacggagaaaaatttgatgcaagaactggagttgcgtacaaaaaatttcccctgggggtactattcctcgttagctgattataatcttacattatttttttttt

SEQ ID NO: 33533 - DNA, 118 bp, Gossypium hirsutum
  Clone ID: LIB3149-024-Q1-K1-A4
gtgacctacatgaacgaactggaggggataacaccatctttcccctgggggtaatattataggggcggcgccaataacctgtcattaattttttttaggccacttaaaaaaggttggc

SEQ ID NO: 33534 - DNA, 387 bp, Gossypium hirsutum
  Clone ID: LIB3149-024-Q1-K1-A5
atccggagttactagcaccattgactgatgttacttttgttctgaaattgcccgttgatccaacattgttaaaggtttcacctaaagctgtgttgaacagatcagagagagaactgaagtggcatgtgccagaggttccactgaagggtactcctggcaaattgagggtaaggatgcctttggattctgctgacattgatgaagaactagaagttgttggttatgtaaaattttcagtgcaaggagctacttcattgtctggggtctgtctaaagcctgctaccgagggtaagacagatttttatgaggtaaatcatcggtatcagagtggggtttatacatgcaattgaattctgatgagattgttttttccatacaaaatttctg

SEQ ID NO: 33535 - DNA, 374 bp, Gossypium hirsutum
  Clone ID: LIB3149-024-Q1-K1-A7
cttgcattaagtctcaaagatatcactgcatgaaaaaaaaaaaaccagacatggcttccaacactgttgcatccgctgctcttcttcttaccttgaacttgttgttcttcactttggttagctctacctacgtgccttgcccaccaccaccaaagagccacaagcctacccacaaaagcccaccctcggcacctgaacagccaggcacttgccccagagatgcactgaaactaggcgtttgtgctgatttgttgggctcaatgcgcgttgttgttggaccgtcgaagaccaaatgctgctctctcatttcgggtttggctgatctcgatgctgcttgttgcctttgcactgctattaaagctaatgtgttgggg

SEQ ID NO: 33536 - DNA, 376 bp, Gossypium hirsutum
  Clone ID: LIB3149-024-Q1-K1-A8
caacgcctccatcactaacggcaacaagtccatcgagatccgtaatttccttggcgagaagaaggtgcgaaaggtggatatgttggaaggggtatccattgttcgatcagagaaggttaaagacgagatcgtgttggatggtaacgatatcgaacttgtgtcacgctcggcagctttgataaaccagaaatgccatgtgaagaacaacgatattaaaaagttccttgatggtatctatgttagcgagaagggcaggatcgctgaacaagaatgattggtacgggatctcttggttcataacgttataatgctctgctttggttttcaaactttaaattataaagatgttatcttatatttgtttcatctttatggt

SEQ ID NO: 33537 - DNA, 390 bp, Gossypium hirsutum
  Clone ID: LIB3149-024-Q1-K1-A9
tgagaagagagttgagtgtgattgatgggatgtctcaacctctaaaaccggcctccagttacgaatgtacatgatgatcatggtaggttaccatcggagttcatttgttgggtttctattatggatgacagtgtgaactgtgatgaagatgtaaggatgtggatattagatgtatcaaccttatttcttagatttagttgtaactcatttcctcaagagaactgattgtagctaaatagtatatgctaagttgttaacaacagtagatgattgtgtagctcattgtgaacctatgaaatgaaaagaaaacatatgcaacttttctattttatttgtaaacaagttactttgatgtgatttgatcaggggattgaaagaaagatgatgaaa

SEQ ID NO: 33538 - DNA, 306 bp, Gossypium hirsutum
  unsure (1)..(306): unsure at all n locations; Clone ID: LIB3149-024-Q1-K1-B10
gacccacggngggggagaacccaaagtgtgagacaccccctggttttggcgaattttataggccaacgaacagggatccagctggtgaaggaaaatggtctcctacactcattgacaattccagttacaagggtatttggaagccttaagagattccaaaccccaactactttgagcttgaaaagcctgactttgatcctattgctgccattggtattgagatttggacaatgcaaaatgggatattatttgacaatattttgatggccaaaaacgacaaggttgctgagtcatatcgggagacca

SEQ ID NO: 33539 - DNA, 364 bp, Gossypium hirsutum
  unsure (1)..(364): unsure at all n locations; Clone ID: LIB3149-024-Q1-K1-B11
aacgcgtncggcagggggggcaagggaactagaccgcatttttacagtggtgtcgttcgcgctaagttgaggtctaacctgccccctaaatctatgggagatagagtcagagtcttcatgtaccccagcaacatttgagctgtctaaatgcctgacggcattcgatcgatgactcaagtgactgtgccttttcaccaagttttacaaactttgtcgaaatgttttgttttcagacattttgtttctttactaccatagaaactctgcttttggccaaaatgactcttctatctcggattttttgcgtggttgttcatggacttcggaattttgggttatcaaatatttattggactgtattagc

SEQ ID NO: 33540 - DNA, 375 bp, Gossypium hirsutum
  Clone ID: LIB3149-024-Q1-K1-B12
gcgcgttgttgttggaccgtcgaggaccaaatgctgctctctcatttcgggtttggctgatctcgatgctgctgtttgcctttgcactgctattaaagctaatgtgttgggggttaacctaaacgttcctgtttcattgtctttgctcctcaattcctgcgaaaagcaaatgcctgctggttacaaatgtgcttaagctcatttccactggttcctcaccaatgtttgggtttttcttttacgtggtctttttttttcttggcttgtttaatttggtattttgatatgtcaagggttagataaaatggtaaaggtttcttttaccttaaccaatagtcaattctcatctatttatacaatatttgtcatgttagt

SEQ ID NO: 33541 - DNA, 351 bp, Gossypium hirsutum
  Clone ID: LIB3149-024-Q1-K1-B2
gggcaacaaccatcctcgaagtctaaggttggtatatttgtggcattagcaatggtattgcggcgtaaacccgatgccctaattagtgtattgccaaagctgagagaaggatcgaaatatcaaggacaagataagctccctgttattatatggatgataattcaggcatcccgaggagatcttgctgtggggctgtacatgtgggcgcatcacctcttgcctatagttggtggcaagaactgtaatccacaatccagagatctaattttacaactagtggaatggatcttatctgccccaaaagcttggacaattttagtaaatgccgcagttagaaaaagggaacgtttg

SEQ ID NO: 33542 - DNA, 370 bp, Gossypium hirsutum
  unsure (1)..(370): unsure at all n locations; Clone ID: LIB3149-024-Q1-K1-B3
nccgcccaaaaccctaacaatcaagagaggttgagagggagaaagatgacgcagaaaggaaatctcttcaaggggcaaaaaaagcagaaaacaatccctcccaatcgccatggaaaagttcctcacattcgcaaaggagttgaccaagttcataaatcactgcaatgagataaaagcggccaccgttgctaacaaggatggaggccaactaagtattgtgaagccacccccagaatcttctggtaatgtgaaggaatagtaatgatgctttgtcaaatagggctccaaattctaacgcaagaacctttaacatggattagaagagattttttttcccaagtaatgcaacctaaaccagcctttttgtttg

SEQ ID NO: 33543 - DNA, 274 bp, Gossypium hirsutum
  Clone ID: LIB3149-024-Q1-K1-B4
cgtccggtgcgggaaaaatcctaataataaaaagatgttgtaagggataaagatgacatagaatggaggggtattaaagggggaaataaagaataaaataataaatctgaaacaacgttggaaagttcatgagattagaaaaggagtctgctaatttaatgaataaatttaatgagtaaaaaggggatattgttgttaagatggatataggggaacttaatattgtgaatataaccggagaatagaatggtaatgtgaaagaatagaaatgatg

SEQ ID NO: 33544 - DNA, 396 bp, Gossypium hirsutum
  unsure (1)..(396): unsure at all n locations; Clone ID: LIB3149-024-Q1-K1-B5
aagggnngaaccacgcgnncgnttgggttaaatctcaaagttatcactgctttaaaaaaaaaaaaccaaacgtggcttccaacgactgttgcatacgctgctcttcttcttaccttgaacttgttgttcttcactttggttagctctacctacgtgccttgcccaccaccaccaaagagccacaagcctacccacaaaagcccaccctcgggacctgaacagccaggcacttgccccagagatgcactgaaactaggcgtttgtgctgatttgttgggctcagtgcgcgttgttgttggaccgttcaggaccaaatgctgctctcttattttgggtttggctgatctcgatgctgctgattgcctttgcactgctattaaagataatgggttgggg

SEQ ID NO: 33545 - DNA, 228 bp, Gossypium hirsutum
  unsure (1)..(228): unsure at all n locations; Clone ID: LIB3149-024-Q1-K1-B6
gaaaaaaggggngagcacgcggcccaacggctaattactaacttaacaaggtcttttttatcacgaatatccttggcgagacggaggtgcgaaaagtggatatgttcgaaagggtatacattgttcgatcagagaacgataaagaccacatcctgttggtatgtgaccaaatataacttgtttcaccctcggccgctttgattaaccatacatgccgtgtgaagaaca

SEQ ID NO: 33546 - DNA, 286 bp, Gossypium hirsutum
  Clone ID: LIB3149-024-Q1-K1-B7
gttggccaccagttcgatcttataggaagaacattatggctaaccagaagaacaacagtgacgaaatcagtgacagagctagcagtggcagtggcagtggcggtgcaacgtttgtgaaggtttgcatggctggtgcaccatatttgcgtaaagtagatttgaagatgtacaacagctaccaaaagttatccgatgccttggctaagatgttcagttccttcaccatggggagttatggatgtgaaggaatgatagacttcatgaatgagagcaagttgatggatct

SEQ ID NO: 33547 - DNA, 377 bp, Gossypium hirsutum
  Clone ID: LIB3149-024-Q1-K1-B8
gtgcaacaaccatcctcgaagtttaaggttggtatatttgtggcattagcaatggtattgcggcgtaaacccgatgccctaattagtgtattgccaaagctgagagaaggatcgaaatatcaaggacaagataagctccctgttattatatggatgataattcaagcatcccgaggagatcttgctgtggggctgtacatgtgggcgcatcacctcttgcctatagttggtggcaagaactgtaatgcacaatccagagatctaattttacaactagtggaatggatcttatctgccccaaaagcttggacaattttaataaatgccgcagttaaaaaaagggagcgtttggtgcccccggcttcatttgagattct

SEQ ID NO: 33548 - DNA, 298 bp, Gossypium hirsutum
  Clone ID: LIB3149-024-Q1-K1-B9
gagaacccaaagtgtgagacagcccctggttgtggcgaatggaagaggccaatgaagaggaatccagcttataaaggaaaatggtctcctccactaattgacaatcccagttacaagggtatttggaagcctcaggagattccaaaccccaactactttgagcttgaaaagcctgactttgatcctattgctgccattggtattgagatttggacaatgcaagatggtatattatttgacaatattttgatagccaaaaacgacaaggttgctgagtcatatcgggagaccacgtgga

SEQ ID NO: 33549 - DNA, 143 bp, Gossypium hirsutum
  unsure (1)..(143): unsure at all n locations; Clone ID: LIB3149-024-Q1-K1-C1
acgnggtgggggacatggtacacgcctatgatcatgagagggttgcacaatcaaagaacgaacgagatgcacttccatgagatgaatacctcaccaatgtcccgaaccttatcctaagaaacacaatcgatataccctatgct

SEQ ID NO: 33550 - DNA, 204 bp, Gossypium hirsutum
  Clone ID: LIB3149-024-Q1-K1-C10
ttttcaagtacgtgacagttaagaaaagtggtggtggggcaaatattggggaacaagaatcatcaaggggcaattgtattgtgggcaatgggcaacaacattggggaattttattcttctcgggggaaccccatttaacaaatttaaacggtcgattgggtttaagggccaaaaaccgaccagagggtttccacccttcccttg

SEQ ID NO: 33551 - DNA, 353 bp, Gossypium hirsutum
  Clone ID: LIB3149-024-Q1-K1-C11
gcatttggggcaaggtaactagaccgcatggtaacagtggtgtcgttcgtgctaagttcaagtctaaccttccccctaaatctatgggagatagagtcagagtcttcatgtaccccagcaacatttgagttgtctagatgcctgacggcattcgatcgatgactcaagtgactgtgcctttccaccaggttttacaaactttgtcgaaatgttttggtttcagtcattttgtttctttactaccatagaaactctgcttttgtccaaaatgtctcttctatctcggattttttgcgtgtttgttcatggacttcgaagttttgggtaatcaatcatttatggaacttgatagc

SEQ ID NO: 33552 - DNA, 124 bp, Gossypium hirsutum
  Clone ID: LIB3149-024-Q1-K1-C12
attgtgattcctgtgccttacaaagatgcagatactcaagggatatttgatgcctgtgctgccactgtggcaatcctctctgatgctggtattcgggctgaaactgatcttaaagagaactact

SEQ ID NO: 33553 - DNA, 201 bp, Gossypium hirsutum
  Clone ID: LIB3149-024-Q1-K1-C2
gacacagctgaggtttgtgatatcaaattcagcaatgatggcaaatcaatgctattgacaaccacaaataacaacatatatgttcttgatgcatatggaggagagaagcgatgtgggttcaagttaaaaccatcttcaaatacaactattgaggcaaccattacttccgatggggaatatgtgatcttaaggtcaagggat

SEQ ID NO: 33554 - DNA, 226 bp, Gossypium hirsutum
  Clone ID: LIB3149-024-Q1-K1-C3
aaataatctttatggtggggtggggtggggtttagagggttggaaaaagaagaaagatttgagtttgacgtggacgtggatgttcaggtattacagcacaacttaaatctataccacaaattttgacaaacgcataatacatcattatttgggataaccataaccaccgatggctaggaaaacttctcacgcggcgatggctgaaaacaaacgatgatattaacca

SEQ ID NO: 33555 - DNA, 395 bp, Gossypium hirsutum
  unsure (1)..(395): unsure at all n locations; Clone ID: LIB3149-024-Q1-K1-C4
aactgctggtgctgctcttgctactcatattccaagtggccagcttggtttcactgggtccacttgaaccgggaaaaatgttctttgagtgggttgcaaaaagcaaccttaaccccttaccatgggacctgggaggaaaatggcttttattggtttgcaaggatgttgatgtcaccaaggcggttgagctggccaactttgttttgttcttcattcaaggacaatgttgctgggcttgctctcgtacatacgtacatgagagtgtgtatgatgaatttttagagaaagcaaaggcacgtgcattgaaacgtagtgttggcgatccatttgtagcaggcattgaacanggtcctcagattgattcagaacagtttgaaaagatcatgaggtacata

SEQ ID NO: 33556 - DNA, 168 bp, Gossypium hirsutum
  Clone ID: LIB3149-024-Q1-K1-C6
gtcattgaaaaagaacattactaatgtaagttttcgttaggaatgaattcatgtaaatatgctccgaaatgtgtacatttcttattatatttatggatattaggctaatggccagctcctaaaaaaaaaaaaaaaaattattggaaccaaatttttatcaaattaaaa

SEQ ID NO: 33557 - DNA, 374 bp, Gossypium hirsutum
  Clone ID: LIB3149-024-Q1-K1-C7
cattggacaaagtttccatctttttcaccactactgagtcaagtagaggttgatggggggaaatctttggacctgagtaattacccatacatatttatgagatggaaagagcaatacttcgtaaatgttgggacagactgtgggctaaccatagccggattttactatgtttgcttctcttgcagcgatggttctatcagcggcttctattacgatcctaatagcaggtttctgtatttcttcatgtccatttcagaagcttgagctgaaatccacaaatgaaggaagatcaggatacagtttttcatcatatgaactgcagtaaataagaatgtgggatgttgattccaatattatcagggaaatctgatttc

SEQ ID NO: 33558 - DNA, 382 bp, Gossypium hirsutum
  Clone ID: LIB3149-024-Q1-K1-C8
actgggttggtggtatcaaaggaaacagtacatccagtgctgaataaaccaacatcaacaggtcaagtagttcaaggtaaaactaaaaagcaaaggttaaaatctcgaactgatgatgaagttggttcatacagagggactaaagagttccgatcaacaaccctcaaaaagatacctaagttgctacattgtgttattcactatgtagagaatatacacaattatgttagcttgtaatcctgtgtgattttgggaggaaattgtgttttttacattatttgtgtagctgcccaaataattatgtcaagatacaagaaagcatagtgatgaatgacaataaacaattctatttattcgtacaaggaaaactgatttgtaaaac

SEQ ID NO: 33559 - DNA, 341 bp, Gossypium hirsutum
  Clone ID: LIB3149-024-Q1-K1-C9
aaggaagctcttgtagaagagtacagtgttgcatcacaagtttggaagctcaatgcttgcgacttatgtgagattgctagaaattctgtataccagtctgcgtttacgcatatgtcaaagttgcattggctagaccacaaatattttctatgacgtgcagaagggaatgacattcataagacagatgttccaaacatgaggattgcccttcgacatgagacatggatagatgagatgcagtatctctactcatggagagcaagaattccacaaaaaatagatcctgcgatgtaactgaatgtgatacgtgaatcatgaaatttcacgtagtgggacgatga

SEQ ID NO: 33560 - DNA, 377 bp, Gossypium hirsutum
  Clone ID: LIB3149-024-Q1-K1-D1
agccgccgcctgcgtctatctcttcatctctctgaaccaaaaagtctttagcttttcgctgcgagagagaccatgttggtttaccaggatctcatctccggtgacgagcttctttctgactcattcccctacaaggaaatcgagaatgggatgctgtgggaagttgagggaaagtgggttgtgcaaggagctgtcgatgttgacattggtgccaatccttcagccgaaggtgctgatgaagatgaaggtgttgatgaccaagctgtgaaagttgttgacattgttgacactttcaggcttcatgagcaaccccctttcgacaagaagcaagttgtcgtgttcatcaagaagttcatcaagaacttgacaccaaaact

SEQ ID NO: 33561 - DNA, 243 bp, Gossypium hirsutum
  Clone ID: LIB3149-024-Q1-K1-D12
gccactcaagtgggacaaggtccaggcttaattggagctttatcacattgggtctatggctggtttatttgatctgctggctggtaccatattaaggctgttttcttaccaattcccttaaattcctttttggggttggaaattgaataaaaattatatttattccatttaatttgatatgaccgataatgaatggtatattatttacaatttgaaggatattaccggaaattgatttaaggc

SEQ ID NO: 33562 - DNA, 375 bp, Gossypium hirsutum
  Clone ID: LIB3149-024-Q1-K1-D5
cttggcgataacaacaattctagttgccaaatcaacatcagcagcaaagcagaagacaagaagaagaacaagaagaagaagcgtgggggaagcaagagaaagatgacggctgagcaaacctcggctttcaaatcggtgaccgaatgggtttatttagaccggcaccaccaccccaattcttcttcgacggcgggtttatcgtcgtgggtggtggatgattttggtgtgcaaaagagtttggggagagggacggagaaaatggtgtttgaattgcattcccattcgaaacacagagatgggttcttgtcttcttctaagctcgttgagagagctcatggcaatggggtgaaagatcttgctctgacagatcatgat

SEQ ID NO: 33563 - DNA, 388 bp, Gossypium hirsutum
  unsure (1)..(388): unsure at all n locations; Clone ID: LIB3149-024-Q1-K1-D6
attctagcgacggtggacagaaaacgatgggagtgtggctaattttgttggagggtactgggatggagatgttttggccagatctgntatcttactggtaggttttgatgcggcttcaactttagtcattgctcggtgacagattcagtcggtgttggtgcctttacctgacatgcgtgtgtagctgggaaagatgatggggttcatgatacatgcacaggaacatttgatgtgaactcgagcttgtcaagtggaccaaattccaagctgctcgtttcaagagaggatccaattgaaattcgtattgggcctatgaaaagtccaatccttattgggcccctgataaagccccaagtccatgcaatgttttgtatgtagatttttaatg

SEQ ID NO: 33564 - DNA, 366 bp, Gossypium hirsutum
  Clone ID: LIB3149-024-Q1-K1-D7
gcacttgaaaaggctactgtgtcttacgggactgatcttgtgagatttacccagaagaattgcctgaggatatatcccaagggtactcggtttaactcctcaaactacatgccacaaattggttggatgcatggagctcaaatgattgcctttaacatgcacggatatggcagatccctttggttaatgcaagggatgtttagagctaatggatgctgcggttatgtaaaaaaacccgatttgctgatgaatgtggatgcgaacagtgagagagctaatttaccggttcagaagagattaatggttgaagtctacatgggacatggatggcactgagattttaaacacacacactatgacacctat

SEQ ID NO: 33565 - DNA, 386 bp, Gossypium hirsutum
  Clone ID: LIB3149-024-Q1-K1-D8
gcgcgttgaaggtggttccgattgtgcttctgttggttcttttcgcattagcgaatgccaagaaatcagctgatgtgaccgagctgcagatcggcgtcaaatataagcctccatcatgtgaattccaggctcataaaggtgatagagtaaaagtgcactatcgggggaagctcactgatggaaaggttttcgattccagttttgaaagatgtgatcccattgagtttgagcttggtagtggacaagtaatcaaaggatgggaccaaggattgctggcgatgtgcgttggtgagaagcgcaaattgaaaatacctgctaagcttggatatggtgaacaggggttaaccacccaccatcccacgtggagcaacgctaatatttgacgc

SEQ ID NO: 33566 - DNA, 106 bp, Gossypium hirsutum
  unsure (1)..(106): unsure at all n locations; Clone ID: LIB3149-024-Q1-K1-D9
gctcaacgagaacagaaatctcgtgtggaacaanaaggtaaaagctcgtttgattctgatttccagtacgaatacgaaccggggaagcggggcctatcgatccttt

SEQ ID NO: 33567 - DNA, 215 bp, Gossypium hirsutum
  Clone ID: LIB3149-024-Q1-K1-E1
aaatgcaaagacattttagtattggaatgagccaaatccgtccgggcctaacaaccgaaaattaatcccaaaataaaagcccaataaatattattaacaggccacaagtccaaattgcatgacccaaatttaaaacctaaacctaatacaactcaataggccaaaattcaaacccattccttagcccaactaccctgggccaagaacacaaggta

SEQ ID NO: 33568 - DNA, 199 bp, Gossypium hirsutum
  Clone ID: LIB3149-024-Q1-K1-E11
tggaagactaaatgacattgttggaagtgcttattatgttgcccctgaagttctgcatagatcttatagtctggaagcagatatatggagcattggagtaatcacctacatcttgttatgcggaagccggcctttctgggcacgtactgaatctggaatttttcgttctgtgctaagatccgatcccaattttgatgat

SEQ ID NO: 33569 - DNA, 109 bp, Gossypium hirsutum
  Clone ID: LIB3149-024-Q1-K1-E12
tggaaagggcacacagtcgcctatgattaatgatgattactgcttgtgccatttagccacaggtgatatgctcaaagctgcagttgctgccaaaacacctcttgggatt

SEQ ID NO: 33570 - DNA, 152 bp, Gossypium hirsutum
  unsure (1)..(152): unsure at all n locations; Clone ID: LIB3149-024-Q1-K1-E2
atttaatttttttttttaaatttaaaganattttantattgggaagaatagagatatatttggagttaaaaaaaaaaaattaatantaaaatataagagnaatatatattattaataggggaaaaaaagaaattgaatgaaaaaaatttaaa

SEQ ID NO: 33571 - DNA, 235 bp, Gossypium hirsutum
  Clone ID: LIB3149-024-Q1-K1-E3
cacgcgtctgccccgtaagacccacaaaggtttgcgtaaggttgcttgtattggtgcctggcatcctgccagaatctcctttacagttgccaaggcaagtcaaaatggataccaccaccgtactgagatgaacaaaaaagtctacaaggttggcaaggttggtgatgagacccactctgccataactgattatgacaggactgagaaagatattaccccaattggtggggtccct

SEQ ID NO: 33572 - DNA, 394 bp, Gossypium hirsutum
  unsure (1)..(394): unsure at all n locations; Clone ID: LIB3149-024-Q1-K1-E4
ncatttcagggccattgttgtggttggtgatttgcaagggcaagttggggttggagttgggaaagctaaggaagtcattgctgccgttcagaaatcggctgtgaatgctcggaggaatctcattactatacctatgacaaagtacttgactttcccacaccgatccgagggtgactatggggcagctaaggtgatgcttagacctgccgcacctggtactggagtgattgcaggaggtgctgtgcgaattgttcttgaaatggcaggtgtggagaatgctttgggcaaacaaattggaagtaaaaatgcccttaacaatgccagagctacagttgttgctgtgcagaaaatgaaacagttccaggaggttgctcaagaacgaggaatccccatg

SEQ ID NO: 33573 - DNA, 147 bp, Gossypium hirsutum
  Clone ID: LIB3149-024-Q1-K1-E5
gcagttcaaaaggatactgattttttcaattctgatcccaggaaacactcccggaaaaagggcactgttctatatcccaccggcactacgaataacctctactaccgcacgacacaaattgtttgcatgcataacgcccaaaggata

SEQ ID NO: 33574 - DNA, 193 bp, Gossypium hirsutum
  Clone ID: LIB3149-024-Q1-K1-E6
gtcgaccccggtgattctgcttcatcaagtctcttccaggtgaccactaagtcaatgaaggtctggttctctatcacaccagaatgatgatgtttctttacttcctcacgatattatttccctttgccctcaaccccatttgtttaagaatatttggtatttttcttaatgttaagttgtggatgttcttgct

SEQ ID NO: 33575 - DNA, 374 bp, Gossypium hirsutum
  Clone ID: LIB3149-024-Q1-K1-E7
gtttccgtacacttaagctctccaatcccagctttggtgatctgaatcatctaatatctgcaacaatgtctggagttacttgctgcttacgtttccctggccaactcaactccgatcttcgaaaactcgccgtaaatctcatcccattccctcgtcttcacttcttcatggtcggttttgctccactcacttcaagaggctcccaacaataccaagctctaactgtccccgaactcactcaacaaatgtgggacgcaaagaacatgatgtgcgcagccgatcctcgacacggccggtacttaaccgcatcagctatgttccgtggtaaaatgagcaccaaggaagtagatgaacaaatgctaaacgttcaaaac

SEQ ID NO: 33576 - DNA, 272 bp, Gossypium hirsutum
  Clone ID: LIB3149-024-Q1-K1-E8
cgcttgctcatttattattaattttgttaatgatgaggattttggtaaaaaaaaaatatgggaaaatttataaaaaaaaataaataattacatataaaaataacaaataaactaaaaatattaaaaaactaaaaaaaaaaaataataaaataaaataaaaaaaaaattataaataagggggcgtcgcttttataagttcaaagtttatttcccctttattgagatgtaaaagtttttttatgtggctccccaaatgaaatacactggccgca

SEQ ID NO: 33577 - DNA, 144 bp, Gossypium hirsutum
  Clone ID: LIB3149-024-Q1-K1-E9
tcgaggaaacacagcccgtgccacgagtaggtgtagtgctgttcgtgttgaaagggaaatcggtccttctgggtcgccgccgcgcctcaatcggggaatccacctttgctcttcccggcggccacctcgagtttggggagagct

SEQ ID NO: 33578 - DNA, 364 bp, Gossypium hirsutum
  Clone ID: LIB3149-024-Q1-K1-F1
aggatattctaaatcttgtttacatctgcgagtgcaatggccttcctgaggtggcagagtattggaagtaagtcattaagatcaatgactatcagaaaaaccgatttgttaaccgtgttgtttcctcgatgtttaacaccgtttcaaacaaaaagattgctatcttagggttcgcctttaagaaggataccggtgacactagggagacccctgctatcgatgtatgcaaaggactcttgggagacaaaactcgattgagcatatatgaaccgcaagtgaccgaaaaccaagttcaacgggatctttccatgaacaaagttgactgggaccatcctcttcacttgcaacccatgagtcccacgac

SEQ ID NO: 33579 - DNA, 235 bp, Gossypium hirsutum
  Clone ID: LIB3149-024-Q1-K1-F11
ttccactaactgcaaaaatgtgaaggagatggatgaagagagggtttgcagcagcttgaagagatataatatatgattaaaagaagaagaaaatgaatacgattttgggatggaattttcaaaatccaaaattagtctccactttagtgtagtgaggctttgtttattttgtttaatgttttggtccctgcatgtattggcttgtttaatgttttaatgaaaagaagtttatgct

SEQ ID NO: 33580 - DNA, 375 bp, Gossypium hirsutum
  unsure (1)..(375): unsure at all n locations; Clone ID: LIB3149-024-Q1-K1-F3
cggncgaatattcttacagcactggtaatcccatacattttcttgaaccttcctttctttctggtcaacattttggggggagaaagtgggaaatggattggttttattggaagccgtttgcccctggtctttccttccccgttaccaaaatggcttgaaccttctggaaccatggttccttttattagggggggaaccgacctaattttcaggcccaataaggaacgactggatgggggtggggatatgcctaggcataccttgttatctacttcaggaccacatcaaagcatcgggtgggtttcgaaattcattcaccaaagccaatggattatccaccacaatgggcataatatttctgttggttaaccctgc

SEQ ID NO: 33581 - DNA, 391 bp, Gossypium hirsutum
  unsure (1)..(391): unsure at all n locations; Clone ID: LIB3149-024-Q1-K1-F4
ttacagnactgttaatcaaatactttttattgagtttgacttagttgctgtntgggaggttgtggggagaagttgggaaatggattgattttattggagttgttttgtgcttgttcttccctacacgtgacccagattggctggaacttcctggagcattgatactggtgatagtggaggtaccgagcttattttcaagcacaataaggtacgactggattggtgtggagatatgcctacgcatagcttgttatctacttgaagagcacattacagcatccggttggtttcgaaattcattgagcataggcaatggggtatccaacacaattggtataattattgtgttggcttaccctgcttgggctttggacactgacatactgtagat

SEQ ID NO: 33582 - DNA, 380 bp, Gossypium hirsutum
  unsure (1)..(380): unsure at all n locations; Clone ID: LIB3149-024-Q1-K1-F6
cccagaccttagtttctctcggcatccgcttcgctttcctctcccctctcgacgccctccacggcgacattggcgcgctctccgccaccgacatcctcgtcctcttttcgaaatccggctccactgaagaactcctacgtctcatcccctgtgctagagccaagggggtttatatcatttcggtcacctccgtccccaacaatgccttggcaaacgcttgcgatatgaacgtgcatcttccgttggagagggaattgtgtccgtttgatttggcgccggttacttcgacagcgatccagatggttttcggagatacggtggcaatcgcgcttatgggagctaggaactngactacggatcaatacgcggccaatcatcct

SEQ ID NO: 33583 - DNA, 375 bp, Gossypium hirsutum
  Clone ID: LIB3149-024-Q1-K1-F7
ccatgggccctcctggtgaccgcccacgtggtcctcctcgctttggtgacggtgagaggagatttggtgatagagatggctaccgtggaggtccaagaggaggaggtgattttggtgacaagggaggagctccggctgactatcagccttcattcaggggccctggaacaaggcctgcctttggtcgaggaggtggtggttatggtggtgctggacctgcaggcagtgcaggtcttccttgagacgatggtttttcatgacagatagttttgtcagtctatgtggttgttgaagttgatagaagtttgtgttatgcttttcaatttagttgtttgatgcttatgaaatattgctactctctggttcatcccaatg

SEQ ID NO: 33584 - DNA, 230 bp, Gossypium hirsutum
  Clone ID: LIB3149-024-Q1-K1-F8
ccatgggccctcctggtgttttcccacgtttttctcctcgctttggtgacggcgagaggagatgtggtgatagagatggctaccgcggaggtacaagaggaggaggtgattttggtgacaagggaggagctccggctgactatcagccttgatttaggggccctggaacaaggcctgtctttggtcgatgaggtggtgaatatggtggtgctgcacctgcaagcatgaac

SEQ ID NO: 33585 - DNA, 292 bp, Gossypium hirsutum
  Clone ID: LIB3149-024-Q1-K1-G1
gtataccacggatggtggaagttccaggagttgccatacacacttagtacctgcctgcctactggagagggatcggaatcaatgaaatcaataagtgatagtagtatgttgtggcatattcatcaaaattctcatttactaaaatactttatgattgtttggatcttccattcttgttgttacaaacattcaaatatctgattgacttccatgataacagttacacacattcaaacataggcaacaactagaatggaagatccaaacaatcataaagtattttagttgttgc

SEQ ID NO: 33586 - DNA, 402 bp, Gossypium hirsutum
  Clone ID: LIB3149-024-Q1-K1-G10
tcttgacaacacaagaaagctgaagaggccagtttcccagcttcagccccagcagctgagccccatcacgaaggggagtcaaaggaaaagaagggaattctggagaagatcaaggagaagcttcctggtaaacactccaaatcagatgaagaaaaagaaaaggcttgagattcaagttcacataaaaatactgatgggattgtgtgtttcttcaattgttaaaaaaatatctgtttttgttttgaggttgtatttgttgtatatttcatattaagtttcttcttttcccagcatttttagtacaaatcataagaaaaaaaaagtttgctttcggtatgtaagaaatgacatgtttccattctgtctttttgtgattcgaacagtatttaatgaatcaatttc

SEQ ID NO: 33587 - DNA, 333 bp, Gossypium hirsutum
  unsure (1)..(333): unsure at all n locations; Clone ID: LIB3149-024-Q1-K1-G11
ggaactaaaggagaccttgcaggaaataattggacaggggaagcaggttaagctggaacagaagatcgatcctagtattcttggtgggcttgtcgtaaagtttgagcaaaaagtatttgacatgtccattaagactagggcacgacagatggagaagttcttgcgtgagcctatcaactttggttccctctgaaagatgttataaccgccaagtgaccatttcaagttccttgtgcaccaattgggttattccgagaactgcaaagaataattaatggnctttttggtttgcctctggtttcttctactcttgacattatatgatgggatgca

SEQ ID NO: 33588 - DNA, 168 bp, Gossypium hirsutum
  Clone ID: LIB3149-024-Q1-K1-G12
cggtcgaccacgcgtccgaaagaaaaatggcttcttcttgtaatgttgtttcaatggctttactggcttgtttggtgttgaactccttggtttttgttgcccatggtggtgacttttaccaggatttcggacctaacatggtggtgacaaaaagagggcaagaatttt

SEQ ID NO: 33589 - DNA, 193 bp, Gossypium hirsutum
  Clone ID: LIB3149-024-Q1-K1-G2
ttgggcttggtaaaaaggcaagcgggtttcaatcgcccaaatggactgggtttgttcggggggcaacaaatgaggatcttaatgtggttgtaaagcggcctgtttttcagttgcattccagtttcaataacccaccaagggttgtggagtctgctccatttgagttatcagaatcagggtggggcgaatttga

SEQ ID NO: 33590 - DNA, 386 bp, Gossypium hirsutum
  Clone ID: LIB3149-024-Q1-K1-G3
tcgggtttggtccggggaaagaacaaaaatccaattttgattaaccttaaaagggatgccctaaaagaacctttttcaacaatggtagctaagtccaagggaaagcaccgtaggttaattgaaactattgaactccaaatggggtggaaaaactatgatccccaaaaagacaagcgtttcaggggttccgggaagttgccacacattcctcgacctaaaatgaaaatctgcatgcttggagatgcccagcatgttgaaaaggcagagaagataggtttagattatatggatgttgaagcactgaagaagctaaacaagaacaagaagttggtcaaaaagcttgccaagaagtatcatgcttttttggcttctgaatctgttatcaa

SEQ ID NO: 33591 - DNA, 327 bp, Gossypium hirsutum
  unsure (1)..(327): unsure at all n locations; Clone ID: LIB3149-024-Q1-K1-G4
accgggggtggacccacgcgtgcggaggaacagcaccaggtataattaagctaacttataatttgctgtgttgctattagatgcatatttctatattggtaaccatgaattattgcatagagaaattgtgagagttttggtattataaactgagttcaaaactgaagtgaaaacgccagtttattctcatgcatactgcattctcaaaatttaaatatggatattggtttttaaaaaggctatgttcaccaaagtcgaactttggattatgattaaccttaanttaaatgctttttgtttggaatgctggaatgcttggattattct

SEQ ID NO: 33592 - DNA, 90 bp, Gossypium hirsutum
  Clone ID: LIB3149-024-Q1-K1-G5
aaatgggcacaataaaggactttaaactatctcttaacaagcttactttctatgaacttgggatctctatattaaaaatcaatacggata

SEQ ID NO: 33593 - DNA, 208 bp, Gossypium hirsutum
  Clone ID: LIB3149-024-Q1-K1-G6
aatcccacttaataaagtgtgtgaatttgtatggtatcttttttactttctttcaactttgcatctatttagtaaatattaataaggttaaattttgttattagcccctatattatgtaaaagttgtgaatttagtctttatgttctaatttggtaatttataaacattttactctttgaaattttaattgatccaaaagtaagtgtt

SEQ ID NO: 33594 - DNA, 265 bp, Gossypium hirsutum
  unsure (1)..(265): unsure at all n locations; Clone ID: LIB3149-024-Q1-K1-G7
gcggcggaaagnaaacattcatacggttaaaaacaaaaactagcccctgtattttgtaaaagtggaaaaacaaaacggcatcgaccaacatgattaacaataaacattgaacgtcatgaaattataaccgatccgcctgtcaattgttaaaaaaagaaactagctaccgggcaggccatctaaaagatccaaactgacccacccagacatgcaatagaaccgctcttcaataaaggtacctaaaataaattaacaagcccatctt

SEQ ID NO: 33595 - DNA, 114 bp, Gossypium hirsutum
  unsure (1)..(114): unsure at all n locations; Clone ID: LIB3149-024-Q1-K1-G9
aaaaaaaaaaaaaaaaaaaaaattaatattttttttttaacacgttactggcgccncngggggagggnagggaaancaagacaccgaccaacgnnnaacaacgacgtttttctt

SEQ ID NO: 33596 - DNA, 368 bp, Gossypium hirsutum
  Clone ID: LIB3149-024-Q1-K1-H1
ggcaaaaagaaatatatgtttggattggacgccactcgactattaaatcaaagcaagaagcccttaacttgggtctgaaattccttcaaacaaacattctggaaaaaaaactttctttggaggctcctatatatggtattaccgaaagggctggaccacccttctttacatggttttttggatgggaaccctccaaagccaatattccttggaatttatttggaccggaacttacttcccttgaagggaaaaccatcaaggggaactgccccttccaaaattgccctaaaaccgcgctccagggaagctaccccaaatggcttaagaagcaaatctagcagttcaaatggatgggaaagaagtttttt

SEQ ID NO: 33597 - DNA, 231 bp, Gossypium hirsutum
  Clone ID: LIB3149-024-Q1-K1-H2
gatcgctgaggctcaacaacaagagaaggtttcttcggaggttccggcagctgaaaagaaaagatggacccttggcgattttgacattgggaagcctcttggacgggggaagtttggccacgtttatttagccagagaaaaaaggagcaatcatattgtggccctcaaagttctttttaaaagccaactacaacaatctaaaggtaacataactacgtcgagagtggaata

SEQ ID NO: 33598 - DNA, 310 bp, Gossypium hirsutum
  Clone ID: LIB3149-024-Q1-K1-H4
ccgggggtgggacccacgcgtccggctccgtctccgggggaggttacgtcagcgactacaccgtctccagcaactgttgagtcacctccatctccttctgctctgtcaccgaatgccagtcccacgtcaatttctgaacctcctgccggagctccgggaccagcggagaatagtgccgttaggtttggtgctgctggatctgttgcggttggagtgttgatggtcgctatggtactgtaagcatatccagatcttccttctctcgatgatagtataaataaaatttagcttatgtattctccttaagttt

SEQ ID NO: 33599 - DNA, 266 bp, Gossypium hirsutum
  Clone ID: LIB3149-024-Q1-K1-H5
ggattagatgatgcagtagaccataactgtttggataatgatgcagaccgggagcttgtggccttgcccattgaatcacgagacttgagtattcaagatacacagtctccgtctttgacgtaggttatgttggacggtgtagacaaactggaacactgaggcctgatgcatgggagtgccacccgtactctatgatataggcgtacgttatacgtgaagcccttctactatttgggaaatacatttggcaaatcttgcgcctaaaa

SEQ ID NO: 33600 - DNA, 353 bp, Gossypium hirsutum
  Clone ID: LIB3149-024-Q1-K1-H6
catcgatgttatcaagaaggcgattgagaagttgggtctgcgccacaaggagcatattgccgcctacggagagggtaacgagagacgtctaactggtcgtcatgagactgcagatatcaactcattctcatggggtgttgcaaacaggggagcctccatccgtgttggtcgtgacactgagaaggatggaaaaggctacttcgaagacagaaggccagcatcaaacatggatccttacgttgttacatcaatgattgccgagaccaccattctctggaagccttaagaaggggtggaaattgaaaggtgtgaaagacgagaaggaaaaacctattcagattaataaccccctc

SEQ ID NO: 33601 - DNA, 257 bp, Gossypium hirsutum
  Clone ID: LIB3149-024-Q1-K1-H8
ggtgataacacgtctcgtcatggaccatgtagggtgtatgttggtaatggtaattctctgcctgtgttatgctccggtcagtcagctcttattactaagacatgaccactttacatgaagtctttactatatacaccttgaataactaaaaacctgctttctgtgtctaagttcaccagaaacaatcaagtgatgtttaaaatctttccttcacaatgtcaagttcgagacttaaagaccaatgaggggcttcttca

SEQ ID NO: 33602 - DNA, 141 bp, Gossypium hirsutum
  Clone ID: LIB3149-025-Q1-K1-A1
gctttttgctggatcaagattttgttatgtgttttttagggtttcttgaaaaatatcgtatggatagctttgatttggattttgatgctgggatgtagttaatggatttctcccatgtttaagcttattatttcgtttttc

SEQ ID NO: 33603 - DNA, 166 bp, Gossypium hirsutum
  unsure (1)..(166): unsure at all n locations; Clone ID: LIB3149-025-Q1-K1-A10
ccggttgattactggttcattgcagtaagctatgacagtagttacctattgagttttattgattttggtatatgtacttttttagtgaagtggcactaagtagtttttcatttttgaaacgtatgtttgaaccttcttatatataacagtattctagagcggaana

SEQ ID NO: 33604 - DNA, 111 bp, Gossypium hirsutum
  Clone ID: LIB3149-025-Q1-K1-A11
ggagccaccaaccaacttaattgttgggtttgaaaaaagctttgcggttgtgtttctgggaaattattactaaattaataggaggaataagcgaatgccaaggctttcttc

SEQ ID NO: 33605 - DNA, 401 bp, Gossypium hirsutum
  Clone ID: LIB3149-025-Q1-K1-A12
ggagtattcaccccattgaatcggaggggaaacaaggattacctagtaatgcggtcgatgacgatttaccgaatatcacaaagatctatacatagtgtgcttgcgctacttgaaagaaggaacttgctaaccaaatgttctatgatatggaagcatgtaaaaactacatacgtgtatagacacagtgaacgggacttgattgggagaaatcatatgatgaatctaggatatgaaactatgatagcgaatgcttaaaattgactgttggactaaacgatggctaattataagataagcatgtgaatgttcaaccatgggcttccggagtgcaagagacgtttactgggtcttatgtctttgtgtgcgctcatggtaatcgagacaagagatgtggtgtatgt

SEQ ID NO: 33606 - DNA, 260 bp, Gossypium hirsutum
  unsure (1)..(260): unsure at all n locations; Clone ID: LIB3149-025-Q1-K1-A2
gcgggcgaatttgtgatggatcaaaataaaaaaatatttttttttttgnnncangaaaaatatcaaatcgaacgttttgatttaaataaggatcctccgacccaaataatggatttctcccatgtttaaacttattatttcgtttttcaaaaaaaaaaataaaaaaaaaaaaaaaaaaaaaaaaaacaaaacaaaaaagaaaaaattctattttttaaaaaaaaaattaaaataaattggctgcctttttaaaatatcca

SEQ ID NO: 33607 - DNA, 232 bp, Gossypium hirsutum
  Clone ID: LIB3149-025-Q1-K1-A4
aatataaaatgggaatgctttatcatggaaaggtccgtataacacaaaagactttcacagctctaatttgcattctcaaagggaggggggggggatacacaaatggtttcaaaaagcatcaaaattcaagtataatgtcagaaatgcataaccccatatataattttcaatcaactatgctataaagaacctaaacctcctccaatccactgaaactcaaccatcatgactc

SEQ ID NO: 33608 - DNA, 424 bp, Gossypium hirsutum
  unsure (1)..(424): unsure at all n locations; Clone ID: LIB3149-025-Q1-K1-A5
ggaaagctagttcagatcgagcacgccttgacggcagtaggatcgggtcaaacatctcttggaatcaaagctgctaatggggtagtaattgctactgagaagaaattgccttcaatcttggttgatgaaacctctgttcagaaaatacagtgtctgacaccaaatattggagttgtttacagtggtatgggccctgattttcgagttttggttcggaaaagtagaaagcaggcagaacagtatcatagattgtataaggaaccaattccagtaacacagcttgtaagggaaactgcagctgtgatgcaggagttcactcagtctggtggtgtaaggccttttggtgtatctctactggttgctggatatgatgacaatggtccacaattgtatcangtggatccatctggttcctatttctcat

SEQ ID NO: 33609 - DNA, 247 bp, Gossypium hirsutum
  unsure (1)..(247): unsure at all n locations; Clone ID: LIB3149-025-Q1-K1-A6
ggaaagctanttcaaatctaacactttttgttttcaaaaggaacagcacaaacatgtgctcgtatcatttctaataatgacgtcctcaaccctactgaaaaaaaattaccttcaatctttcttgataaaacctctgttcacaaaatacagagtcttacaccaaatattgcagatccttacagagaaatggcccctgactttccaattttgaatctaaaaattataaaacacgcagaacattatcata

SEQ ID NO: 33610 - DNA, 406 bp, Gossypium hirsutum
  Clone ID: LIB3149-025-Q1-K1-A7
cccacgcgtccggttttgtatttcatactcatttagcccctttcattagcatcgaaatcacgccagttttctttatcactgaaaaatgtcttgctgtggtggaaactgtggctgcggttctggctgcaagtgtggcagtggctgtggaggatgcaagatgtacccagacctgaacgttgccgagatgaccacaactgagactctggttcttggtgtagcaccccagaaagcacactttgagggagctgagatggaattcggggctgagaacggctgcaagtgtggagacaactgcacctgcaacccttgcaattgtaaatgattagagaccaaagccaaagctccctggaagcagaaacgcctttgtctttaaaaaataatatgttttggtggttatgtggtttta

SEQ ID NO: 33611 - DNA, 301 bp, Gossypium hirsutum
  unsure (1)..(301): unsure at all n locations; Clone ID: LIB3149-025-Q1-K1-A8
acccacgcgtccgagcaggcnataaaatatttattacattttcttttaaacaccctcaataaaacaaaagggccgcttatatataaaactagtgcagcccccccccacattgtcaaaactagggctgctgtatacacatgaagtttcaaacagcactataaacgatgcataatgtcacaaaaccataaccccccctataataccacatctactattctcttattaacctaaaccccctacaatccactctaactcaaccattatgactgaatcgtcacaaaacacaagctccacatgtgaa

SEQ ID NO: 33612 - DNA, 146 bp, Gossypium hirsutum
  Clone ID: LIB3149-025-Q1-K1-A9
atttataaaaaaaaaaaaaaaaaaaaaaaaaaaaaaaaaaaaaaaaaatttgggtgttaggggccacccacacaaaagcaaaaagaggggagcaagaaaagggggttgcacaagaaacgaggggcgctaaaaacaaaaaaaaagac

SEQ ID NO: 33613 - DNA, 241 bp, Gossypium hirsutum
  unsure (1)..(241): unsure at all n locations; Clone ID: LIB3149-025-Q1-K1-B1
atttcccgatgtgttttcctttttacctttttcttggtcctaaaaacgcctccgatgttgaaaagcgtattctggtatgtgatgctatcaatttcttaaagacaagaatgaccaaaagagtgcatagttgtagtttcccttttccaaaaacgaagaatgtgagtttgctgagtagcaaagatttaataaaagttgagatacttggttnaaaaaaaaaaaaaaaaaaaaaaaaaannnnnng

SEQ ID NO: 33614 - DNA, 335 bp, Gossypium hirsutum
  Clone ID: LIB3149-025-Q1-K1-B10
gtttggtttaccacgacaaacaattggtgcttgagagaatggaaagcgtttacacgttcgggcagcccaaagttggtgaccaaacctttgccggctacatggagaaaaatttgaacaaaaatgggatccaggtttacagatatgtttactggaatgatataagtcctaagggttctttcgaccgtatgttcaaacactttggtacctgcggttacttcaaccgccaatattaagccaagattggtgaaaaaaggccatacttgaactacttctcgctggttggaatcttttccatgcctattaacgccatttattaagggataaaaaactttaca

SEQ ID NO: 33615 - DNA, 405 bp, Gossypium hirsutum
  unsure (1)..(405): unsure at all n locations; Clone ID: LIB3149-025-Q1-K1-B11
gttaaaaggacttgttacgctcagtccagccagattagacagatacgccgaaagatgagggaaataatgactgcccaggcaacatcttgtgatttgaaggaactggttcaaaagttcatccctgagatgattggaaaagaaatcgagaaggcaacatctagcatctatcctttgcagaatgtgtttattcgtaaggtcaaaatcttgaaggctcccaagtttgatcttgggaagttgatggaggttcatggtgactactcagaggatgttggtgtgaaactagagaggcctgctgatgagacaatggctgangctcctgcagaggttgttggagcttgaacgaaaaacaatagtccatgaatgtcttgtttttttatgcttctaggagtttttgctgatcatttt

SEQ ID NO: 33616 - DNA, 199 bp, Gossypium hirsutum
  Clone ID: LIB3149-025-Q1-K1-B12
agatattgggcatgaaactgtaaatatctaaagggagtgccacacaaacccacacgtgcgactgtgatttaaagggggggagagaaaaaacaaacgtgtgaaaaaaaacccagatccgcgatggggaaaaaaatttcagtttatggggggtgaaccacccacgaatgataaaattcacatcgaagcgttcagtacattc

SEQ ID NO: 33617 - DNA, 381 bp, Gossypium hirsutum
  unsure (1)..(381): unsure at all n locations; Clone ID: LIB3149-025-Q1-K1-B2
aaaaagaaaggcggaaacttatcgaaggagcggaaataaaagatgattcaccggaaatggagtttgctaacaggcccagttgtcatcctcggcggcgttgtgggagccaccgtcgtcgctcactttctctttgttgacgatccatatcttaaaccaaagaagaatactgattcaccaccacaaaccaagtagaaagaagccgacggtcgctgttggcatttggagcaaagaaatgcctaggtcgctgtttaaaacatgagttgtttgttgaataatgtcaaatctgtttgttttgtaatttgggttagcttctgttttctctttcttaaataacaactcaactacaaagttcttgaacaaaantaaaaaaaaaaaaaataa

SEQ ID NO: 33618 - DNA, 216 bp, Gossypium hirsutum
  Clone ID: LIB3149-025-Q1-K1-B3
aaaaaatgataccgtttccttactaaaaaattctagttaagagaaactgctggtaaaattcgtgagaattttctgagcaacatcaactggaaaggtattattaattaagtctcaaaaaaataaaagtatctctagatgaccatccgtctatgaaaaaaaaagtttagtcttctttcaccataacgaagaagcccgcaccgatccttctttccaaca

SEQ ID NO: 33619 - DNA, 401 bp, Gossypium hirsutum
  Clone ID: LIB3149-025-Q1-K1-B4
gtacaaggtgttcagtgcttcacctgatcaatcaaggaaggaaatgcgtcaagcttgcttcgattatgtaagccttggtggtgtgttctcaacaagaccaatctccttgctctctggtttgaatcctcgccctatgagtttggtgatgcatttctttgccgcggcaacatatggtattggtcgtttactggttccattcccttcacccaaaagaatctggattggagctagattgatcacgggggcatcaggaatcatcttccctattatcaagtcagaaggagttaggcaaatgtttttcccagcgactgttcctgcatattacagagctccccctcttaagtgagaaacccatacttcctaatctcattagtgttcccccttttctagagtgtgggaaa

SEQ ID NO: 33620 - DNA, 416 bp, Gossypium hirsutum
  Clone ID: LIB3149-025-Q1-K1-B6
gaaaaacttgcttacgttgctcttgattttgagcaagaattggagactgccaagagtagctgtgccatcgaaaagagttatgaattgcctgatgggcaagtgatcacaataggggcggagaggttccgttgtccagaagtactcttccagccatctctgattggaatggaagctgctggaatccatgaaactacttacaactccatcatgaagtgtgatgttgatattaggaaggatctttacggaaacattgtgcttagtggtggatcgaccatgttccctggcattgctgataggatgagcaaggaaatcactgcacttgcccctagcagcatgaagatcaaggtggttgcacctcccgagagaaaatacagtgtctggattggaggatccattttagcatctcttagcacctt

SEQ ID NO: 33621 - DNA, 162 bp, Gossypium hirsutum
  Clone ID: LIB3149-025-Q1-K1-B7
catttatgatcttttaaataaaataaaaatttataaaaaaataaaaactaaaaaatggtgttggtataataaaaaataaatgtgaagtagattaataaaaaagtgattgaaataatattggtgtatattacatttattagaatttctcttcatacctttttt

SEQ ID NO: 33622 - DNA, 401 bp, Gossypium hirsutum
  Clone ID: LIB3149-025-Q1-K1-B8
agagaatcagagccgcagctgccgccatcgttatggtgaagtttcttaaaccgaacaaggcggttatcgtcctccagggtcgatacgccggccgcaaagccgtcattgtcagatctttcgacgatggcacacgtgaccgcgcctatggccattgtttggttgcagggataaagaagtatccgagcaaggttatccgcaaggactccgcgaagaaaaccgccaagaagtcacgcgtcaagtgcttcatcaagctcgtcaattaccagcacctgatgcccacgcgctacaccctcgacgtggacttgaaagacgtggttaccgacgatgctctccagaccaaggacaagaaagtggccgcttgtaaggcaactaatgagaggtttgtagagaggttcaagact

SEQ ID NO: 33623 - DNA, 395 bp, Gossypium hirsutum
  Clone ID: LIB3149-025-Q1-K1-B9
cgtcgaaccaccatttcttcggtgaccgacggttctcaggccagatctagccttcttttacccacagacttccctttaaactccgatctcgacgaagtgaaagggaatcaacagcctaatcgtagggtaagtcctcttttcttttttctttcgctcttttttgatgtaaatgataaagaaatcgataaaaacaggtgaaaagaacagaggattaagaggagaaaaaggtcacctttctcggattttttattgttttctattggatattgcctccatttttcgtaaccttacaattgattcaaagcttggcttttatagccgaagagaaagagaaaaatgctagaaaataaagcataaatacaatattctcccttggtttttggctattctgctgg

SEQ ID NO: 33624 - DNA, 409 bp, Gossypium hirsutum
  Clone ID: LIB3149-025-Q1-K1-C1
gccaagcggtcagcattgtctcgacacagaggagtttaacattgtctgtgacttaaaccaggctatgaatcaggagcgctacaaggatgccgccgacttgagagacaagctaggtcagtttcgagctcaaaggaacttgaagaaatatacgtgacaggtggtgttaataaacccaatttaggttgaatcttttaaggtgtaattgtgtttcatatatcagtctccggctccagtcaatagaccattgacgagttcttattgatgtctcagtcgttccattggcgactccgattgtaaataggaattattggtggaagccgatagactcagcttggcagtggcaacatacggtagcgaagcaatcaagtcgggtatatatatggtatcttctaccatatatgtaaggggg

SEQ ID NO: 33625 - DNA, 400 bp, Gossypium hirsutum
  Clone ID: LIB3149-025-Q1-K1-C10
ctttcatatgcaatttcttcgtgcttttatctgcaaattcaacagctttctgccttttgttctttgggttccatttgtttaatgggtttggattctcatcgtctcccaattggctcatcttcatgtcagctgctggtgctgttctttattccgtaattattgccaatgcacttataatttgtaacttagctttggtttcttcagggatggagaaatcaggtgggtattcagcaattttaagagcttgtgttttaataaagggaagggcttcaactgctttagcattggcagtgccttggaatctggcgttggcagccattgaagctctcttccattaccgcgttgtgagagcctatcatagtggtgatttcaacagtttctcaattgctttagaagtggt

SEQ ID NO: 33626 - DNA, 402 bp, Gossypium hirsutum
  Clone ID: LIB3149-025-Q1-K1-C11
ggagacttttttatcttgcacttccaccatcagtgtatccatctgtttgtaggatgatcaggaaatattgcatgaataaatctgatcttggcggatggactcggatatttgttgagaaaccatttggtaaagatttggactctgcagagcaactaagttctcaaatcggagagttgtttgatgaaccacaaatctaccgtattgatcactatttgggaaaggaattggtccagaacctgttggtacttcgttttgctaatcgcttcttcttgcccctttggaatcgcgacaacattgataatgtacagattgtattcagagaggattttggaactgagggtcgtggtggatattttgatgaatacggaattatccgtgatattatccaaaaccacctattac

SEQ ID NO: 33627 - DNA, 262 bp, Gossypium hirsutum
  Clone ID: LIB3149-025-Q1-K1-C12
ggagacttttctatattttttttccaccattttactatacaactgtttgtgggattatcgggaaatattgcaataataaatatgaccctggcggatggactacaatatattatgagaaaccatttggaaaagattacgactatgcacagcaacgtaacttctcaaatcggacagttgattgatgaaccacaaatatactcgcatagatcactatttgacaaacgaattgtaacagaacctgatggcactaggctttgctaat

SEQ ID NO: 33628 - DNA, 421 bp, Gossypium hirsutum
  Clone ID: LIB3149-025-Q1-K1-C2
aatttgtcataaatcaaacagattttgtcaaatctcgaaatcatcacattaattgcttcgtccaaagaaaacagcttaggaagtcgacttgggggaaaagctccaaggaagcagctagccacgaaggccgctcgtaagtccgctccggcgaccggcggagtgaaaaagcctaaccgtttcaggccaggaaccgtggctttgaaagagatccgtaaataccaaaagagcaccgagttgttgatcaggaagcttcctttccagaggctggtgagggaaatcgctcaagatttcaagactgatttaaggttccaaagcagggccgtcgttgcacttaaggaaccggcggaggcttatttcgttggattgttggaacacactaacctgtgtgcaattcatgctaagagggttactatcatgccca

SEQ ID NO: 33629 - DNA, 425 bp, Gossypium hirsutum
  Clone ID: LIB3149-025-Q1-K1-C3
atacaagctatctctttccttctccaatgattacccttttaagcctccaaaggttaagtttgagactgcctgtttccatccaaatgttgatgtctttggcaacatttgcttggacattcttcaggataaatggtcatctgcttatgatgtaagaaccatactgctatccatccagagtctgcttggagaacccaacattagctcacctttgaacacccacgcagctcaactttggagcaaccaagaagaatataggaagatggttgaaaagttgtacaaacctcctaatgcataacttgagaaaccagaacaggagttttgttatgtttttttcttcttattattaatttttttttcttattgaagaaacgagaacatgaaatgtgtcatttttctacagcatgtatgattttactttactattg

SEQ ID NO: 33630 - DNA, 347 bp, Gossypium hirsutum
  Clone ID: LIB3149-025-Q1-K1-C4
aatcaagccggctgagcatgtcaagaatccgttttttactgcgtggcattgatttgaaaacgtatatatttctatttatactggttccgacctgcatattcggtatatatattcatgggcagaagatttcatacttcctgcgcccgatatgggaatcgccacccaaaccattccatgatatcccacattattttcatgagaatgtatcaatggaggcgctctgcgaacttcatggttggagaattcgtgaatttccaagacgggtgtatgatgctgtgttgcttagtaatgaagaggatatccttaccatacgatggaaagaggtgtacccttacataacgcatttt

SEQ ID NO: 33631 - DNA, 373 bp, Gossypium hirsutum
  Clone ID: LIB3149-025-Q1-K1-C5
aatcaagccggctgatcatgtcaagaatcctttgtatactgcgtggcattaatttgacaacggatatatttatattcatactggtcccgacctgcatattcgagatatatattcatgggcagaagatttcatactttctgcgcccgatatgggaatcgccacccaaaccattccatgatatcccacattattttcatgagaatgtataaatggacgcgctctgcgaacttcatggatggagaattcgtgaatttccaagacgggtttatgaagctgtgtcgcttagtaacgaagtggatatacttaccatacggatggaaagagttgtacccttacataacgcattttgttcttcttgagtctaattcaacat

SEQ ID NO: 33632 - DNA, 411 bp, Gossypium hirsutum
  Clone ID: LIB3149-025-Q1-K1-C6
gcgaaggttctctacgtatccaagatcatattaccttattcatgctaatggtgtctttagcttgtatcaagataagtgtagctttgaagacatccttctggaaatggatcgcattttacggcctgaaggggctgtgatattccgggatgatgtcgatgtcctaaacaaggttaggaaaattgctggaggcatgagatgggacaccaagatgaatgatcacgaggatggtccccttgtgccagagaaaattctagttgcagttaaacagtactgggttggtggtatcaaaggaaacagtacatccagtgctgaataaaccaacatcaacaggtcaagtatttcaaggtaaaactaaaaagcaaaggttaaaatctcgaactgatggtgaagttggttcagacagagggactg

SEQ ID NO: 33633 - DNA, 313 bp, Gossypium hirsutum
  Clone ID: LIB3149-025-Q1-K1-C8
ggtaaatataacagcaccatacgatgttattttcatgttcggattcaccgggtcggaacatttactgcagaggaggatttggtagtatgttattggtaattaaagttatggtgtgtcgctgaatatggtcttttgatgctgcttttgaagattgttgtgttttcgcacattttggatttggctgtttatgctgggggctggaatgcaatggacatctctgtatcttttgttcataaaaacattagtattctttttagattacttgcaaatggtgaatggcacggtcgatagactttatttgattcgagctttt

SEQ ID NO: 33634 - DNA, 341 bp, Gossypium hirsutum
  Clone ID: LIB3149-025-Q1-K1-D1
acgggaaggacttcaggttttgaccctagaagatgttgtttcctaagctgatatattcgtcaccgcaaccggtaacaaggacatcatcatggttgatcacatgaggaagatgaaaaacaatgccattgtttgcaacattggtcactttgacaatgaaatcgatatgctcggtcttgagacctatcctggtgttaaacgcatcaccattaagcctcaaaccgataggtgggtctttcctgaaaccaaaaccggcatcattgtgttggctgaaagacgtctgatgaacttgggatgtgccactggacacccaaggtttgtcatgtactgctcgttcactaacc

SEQ ID NO: 33635 - DNA, 369 bp, Gossypium hirsutum
  Clone ID: LIB3149-025-Q1-K1-D10
gtttgagattaacaggggtttcgccgtcctgcgggatattgcatcaagaagagatcttaagaagttcctctctgtgatcaggggcttgggggtctcgtctattgagggaagttggcgcaacttcttgacactggtctacataatattcgtactactgcacaccgtgccttctgtatgagaagtatgaagacaaggtggacccattggccgagaaagcatggcatgagatcaagaagcatgatgcagtgtttgatgcaaaagtactgagtcagattcccaagagaccattgtaggagaagaagaaagattcgattactggtgaagatgttggtgttgctaggtcctgacatacatatgctagctgtgttt

SEQ ID NO: 33636 - DNA, 189 bp, Gossypium hirsutum
  Clone ID: LIB3149-025-Q1-K1-D11
gccggagataaacagcattttccccgcccttttggaacttaaataaagaggggacctggggggaatactggatgggatcgcggccaccaaattatacattattgcgggcacatccctcaacactatgacacaggcctacacacacttcggactacagatcaccgcgccttatgtgagataagcaacaag

SEQ ID NO: 33637 - DNA, 394 bp, Gossypium hirsutum
  Clone ID: LIB3149-025-Q1-K1-D12
gttcgtctcgtcaagagatgccacaagccctatcgcaaagaatttacgaaggtggcgctccgtacagcgatcggattcgtggttatgggatttgtaggatttttcgtcaagctcatctttatccccattaacaacattattgttggatccggttaggtttgctttcatgttactgactcaacagcacagatcgagagataaattgtctgagatctcgaactaatttcagtatagactttggttttcctctatattcatatttgttggattttggtttagtttttagtgttgaaatggaaactacttgaagcaaatacaatccttgagttttggtccattgatttatgttttttccttgtatcgatgcttatcttgggtaaaaagatcatggatg

SEQ ID NO: 33638 - DNA, 421 bp, Gossypium hirsutum
  unsure (1)..(421): unsure at all n locations; Clone ID: LIB3149-025-Q1-K1-D2
ggtgttgatattgggaggaagaagaagacagcagctaagaaggaagctactgaggacggagaagttgctgccgaggaaactaagaagagtaaccatgtgctaaggaagcttgagaagcgccagaaggaacgtacacttgatgctcacattgaagaacaatttggctctggtagattgttggcatgcatttcttcccgaccaggtcaatgtggcagagctgatggatacatattggagggtaaagagctagaattctatatgaagaaaatccaaaggaagaagggcaagggcgctggagctgcttagatgcagtatttcaaatggtctactctctcatcaatgtggtttttgttgcctttaaattttgttctctntattttcctacaattgaggatatggtacatttttattgtgaacattt

SEQ ID NO: 33639 - DNA, 419 bp, Gossypium hirsutum
  Clone ID: LIB3149-025-Q1-K1-D4
ggaagctttagcaactctggttgtgaacaaacttagaggtgctttgaagattgctgctctcaaagctcccggctttggagaacgcaagagtcagtatctggatgacattgctatccttactggaggtactgttattagagatgaggttgggctttccttggacaaagctagcaaagaagtcttgggtcatgcctctaaagtggttcttacaaaggatacaaccaccatcgtgggtgatggaagcacccaggaagcagtgaataaacgagttgtacagattaaaaatctcattgaggctgcagaacaggattatgagaaggaaaaacttaacgaaaggattgctaaattatctggtggtgtggcagtgatacaggttggagctcaaactgaaacagagcttaaagaaaagaaattgagag

SEQ ID NO: 33640 - DNA, 421 bp, Gossypium hirsutum
  Clone ID: LIB3149-025-Q1-K1-D5
aatcaattcggtcgttatggtcggacaaaatattttaattgttaatttatattaaattgaagtttattattattcgaattaatattcgaattatataataataattttttaatattctacaaaataaaaaaataaataaaaaaaaatgaaaatctagaaatttaatattaatatataaattgcataaaattaaaataaaataaagtaggaaattactaaaaaaatgaatacataaactaaatacaataatagataaaacgagatgcgacttccccctagatattttacactttctcccacaaaaaaacttgtaatgcctactccatttgtaattccatcgattactcgcctatcaaaaaaatgagttagttcggccaatcctcttataccttttgttaaggatattgaataaaacatatct

SEQ ID NO: 33641 - DNA, 415 bp, Gossypium hirsutum
  Clone ID: LIB3149-025-Q1-K1-D6
ccaagttcttgaagaacggtgatgctggtatgattaagatgattcctaccaagcccatgggtgtggagaccttctctgagtacccacccctgggtcgttttgctgtgagggacatgcgtcagaccgtggctgttggtgttatcaagagtgtcgagaagaaggacccaaccggtgccaaggtcaccaagtctgctgctaagaagaagtgaagaggccaaaaggttttagcggtgaagcagattgagtgtttttatctttggttatatgtggtttgaagtttttgcctgttttatgtaggatttttaaagtttgagatgctttggtttgccaaggcatcttagtcaagttttgtgtctgatcttgcggaactatactttgttttttctatatatttgactgattcttttttctaaaa

SEQ ID NO: 33642 - DNA, 308 bp, Gossypium hirsutum
  Clone ID: LIB3149-025-Q1-K1-D7
ggcggggatggtgtcattggactggttaattttattgactttatgaccctttactggaaagggctcggtaagcacttgtggaacgaactggggttttcattgtggaaagagatatcaatgattcggctctttttgggaagcttttcaaggttgttgcatttacgcacgttatgcatttggctgctcaagctggggtcaagtatgcaatggaaaaccctggctcttatgttcatagcaacattgctggtcttgttagtttacttgaaagttgtaaagtagccaattcacagactgcaattgtgtgggct

SEQ ID NO: 33643 - DNA, 346 bp, Gossypium hirsutum
  Clone ID: LIB3149-025-Q1-K1-D9
gcaattttcaactgtgttgttgagataccaaaagggagtaaagtaaagtatgaacttgacaagaagacaggattgattaaaggtgatcgaattttatattcatcaatgggctaccctcataactatgggttcattcctcgcacactttgtgaaaacaatgatcccttggattggttgggtattatgcaagaacctgttctttcttgatggtttctgcgaaccaaaacccttggacttatggccatgattgaacaaggggagaaagatgaccagaacattggaagttggggtgatgattctgaataccaacatttcaccgacattaaaaaactttccccttaaccgc

SEQ ID NO: 33644 - DNA, 144 bp, Gossypium hirsutum
  Clone ID: LIB3149-025-Q1-K1-E1
attagatgatacaccagtgatgaaaataactggaaaagaggtgtgactcgatatgcttattgcagtatcaaattggttacttgagaaccgttataatcggttaccactcgtttgtagcaatgttacctacttttctgtttgcgc

SEQ ID NO: 33645 - DNA, 296 bp, Gossypium hirsutum
  Clone ID: LIB3149-025-Q1-K1-E10
ttgtaggggaactaatgattttatgctgtttaatgaatacaaatacagatggatactcgtggacaatcactacagcatatcacacatatgcataacaattccaatataaatcaaagaagctttctatgaatcaaaacacataattctttcgataattaactgaacaagcagcggtttactgaacaaggaggtgcactatcatttgaagctaaacttaacaacatatacctgcgaactacgactaaaatagtaattctcgatcatgcaatgaactgaactcttgtattacacaaaga

SEQ ID NO: 33646 - DNA, 173 bp, Gossypium hirsutum
  Clone ID: LIB3149-025-Q1-K1-E11
tcgcaataaagctgggagaatgcaagctgtgtatgttagaactgagaaaggtggactttttgaaggtaaacctcatgttagaatttcgagaacatataagcggttctctggtattatgttgcaactgctacaaaaactaaatataactgccgtcggcaagcgtgaaaagcttt

SEQ ID NO: 33647 - DNA, 211 bp, Gossypium hirsutum
  Clone ID: LIB3149-025-Q1-K1-E12
aaaaaaaaaaaaaaaaaaataaaaaaaattattaaaaaaaaaaaaaaaaaaaataaaagggggaaaaattaaatgataaaattgaaataaacttataaaaggaaggtttttattttgttggatatggatacaaaaagtatgtgttaaatgttgtggttaggattgttaaggttttaggagtgataaagtattgggttagatgttactttgt

SEQ ID NO: 33648 - DNA, 419 bp, Gossypium hirsutum
  Clone ID: LIB3149-025-Q1-K1-E2
tataaataacagtgaagctatacgtacagcttataatagttttgcaaggcctgagccatttgttccagaggagcagaaagctgctgggaaagatgacgatgtctaccatttcataagctacataccagttgatggagtactttacgaacttgatggactgaaggagggacccattagccttggtcaatgccctgctagtccaggtgacatggaatggttgaagttggtgcaaccagtaatccaagaacgaattgagagatactcccaaagtgaaataagatttaacctcatggcagttatcaagaacaggaaagagttgtacaccgctgaacttaaggagctccaaaagaagagggaacgcatcttgcagcagttggctaccatacagtctgaaagacccacagacaaaaccagttttg

SEQ ID NO: 33649 - DNA, 394 bp, Gossypium hirsutum
  Clone ID: LIB3149-025-Q1-K1-E3
gttaactagtagagctattttccagacgatgaaaaactatactatttatgcagcttccatcagactacgtatagtgttgggagttatgcttattgctctcatttggaagtgcgacttttcaccgtgcatggtttagatcattgccattctaaatgatggaactattatgaccatctcaaaggacagagtcaagccatctaccttgcctgatagctggaaactgaaagaaatttttgccactggtattgagcttggaggctacttggcattgatgaccgctgatttcttctggattatgcatgataaagacttcttttcggaaaaatttggtgtatgtctgtcatgaagatggatgaccaaatgatgggtgctttatatttacaaatgagcattg

SEQ ID NO: 33650 - DNA, 244 bp, Gossypium hirsutum
  Clone ID: LIB3149-025-Q1-K1-E4
ctcacacgtacgaccacgcgtacggaggatctacattggattctcatcatggctttgatcgtgaatatcgaattgacagggacgttgagcttgacttccatgtggacgattccgaactcactcttaaatgtttgcttgtatgaacaatattctggaagggacttgttttttcgaggtgttaggtgtgataagcatgtcattactatcacccagacggatgaaattttggattattcacatgttc

SEQ ID NO: 33651 - DNA, 63 bp, Gossypium hirsutum
  Clone ID: LIB3149-025-Q1-K1-E5
tcgtctcgaggtcatatgggactgcacaagctttttggtgttttgcttgtgcatgacaatttt

SEQ ID NO: 33652 - DNA, 386 bp, Gossypium hirsutum
  Clone ID: LIB3149-025-Q1-K1-E6
ggcatgccccacaaattctaccatgttcgttttggtcgagtctggaacgtaaccaagcgcgggataagcgtagaggtcaacaagcaggtgggtaaccgtattatcaggaagaggattcatgtcagagtggagcatgttcagacttcaaggtgcactgaggaattcacactgaggaagataaagaatgatcatctcaaggcaaaggccaatgcaaagggtgaggtgattagcacaaagaggcagcctgagggcccaaaacctggtttcatggtcgagggtgcaatgttggaaacggttactaccattacatatgatgttgctaatgatctcaagggcggctactagatctactacgcattttggattatactgggcataacttaagt

SEQ ID NO: 33653 - DNA, 417 bp, Gossypium hirsutum
  Clone ID: LIB3149-025-Q1-K1-E8
ccagcttccggagaagatgatgctactgtttctgagaaacgaagcattccaaggttggactacaaaaggctatatgatgagacatatggcaatgttccttctagttccagtgatgacgaagattggaacgatggcacagcaccaagaaaaaagaagaaacgtaatgctgaagtggctacaacatcagcaaatggaaatgcttctccaactggtagagtctcggtttccaatggtttaaacgaacccacgagagaagcgtgcacctaggagaagcgccaatggtttaaagcagaaccgaggagagcggcatacaactaagagaagtgccaatggtttaaagcagaacccagaagaggatcatacacctagaagacgcactcggaagaaatcaaatgagaagggtactgctaaattacc

SEQ ID NO: 33654 - DNA, 339 bp, Gossypium hirsutum
  Clone ID: LIB3149-025-Q1-K1-E9
ctggaggggaactaatgattacatgctgcataatgaatacaaatactgatggaaagccatggacaaacactacagcatattacacatatgcataacgatttcaatataaatcaatgaagcgttgtatggatcataaacactagattccttcgataatttactgaacaagcagcggtttactgaaacaaggagacgccctctctttaggagctgaacttgacaacacatacctgcgaactcctactaataatgtaagtctcgatcatgaaaagaacagaactcttgtattacacaaagataggggtaataatgctgcggtgcggaattcaatgggataaa

SEQ ID NO: 33655 - DNA, 412 bp, Gossypium hirsutum
  Clone ID: LIB3149-025-Q1-K1-F1
aaaatgccattttcagctccaagttcttcacttcgatccaatttcagtcttcatcagacccggatttctcctccctctctttctcggttcgttcgacgagaactcagcactcttcaaccacttcacagtgcggttgcatcggcttgccttgtttccaagcttccttccgatgctaatagttgtgctgaaggtcgatttgctaactatatcagtcccatctagtagcaagcgcttgtagaggttgagtttacttctttcagagtggcagtgatgcttacttcattctataattcagaactcagcttttcagggaatcaattggctgaatgtgttttattgacctacatttaattaagtggtgggtgtaagtgactcttgtaatcttctcagtttttaatgattttaatttaca

SEQ ID NO: 33656 - DNA, 381 bp, Gossypium hirsutum
  unsure (1)..(381): unsure at all n locations; Clone ID: LIB3149-025-Q1-K1-F10
tttacgcgcccgggcaaggtttggcctccttgtttgaccacaaaaacgcatttttgcaacgcgctagcttgggaaccgncgcaacccaacgcaaaaaacggggcgacggtggataaaggggggacggggaacacaaaagagtaacgcatcgcattgaaaaaaccggacattaccgtgtggtcgggggggcggatacgggaagaaggcgagccgcgtggccagtgtctcaagagggaacacatggtggagaaggggtcaaaaggtgaccaaaagcatgcaattcagggggtgggagcagcacccgcagctggaagcgaacgattgcgcatgagccaacgcgggacccatggggctgccttgagctccaccaaggggaaaagg

SEQ ID NO: 33657 - DNA, 313 bp, Gossypium hirsutum
  unsure (1)..(313): unsure at all n locations; Clone ID: LIB3149-025-Q1-K1-F11
cggtcgacccagcgnccgggccaaggagaaaaccccaagagggctggaaaggggaaggacaaagctaaagagcaaaaactgaagccaagtgatcatgaactaaaggatacaatttgtgaaattcttaaggaagtggacttcaataccgtaagaactgtatactaatataatgactgcagcctttactggacttttcttcacaacatttttggtctggtccgactgctaagactatattggttgtgaggacgtgtttcaatgctcattaagatgccattgataacaattgtaatattgttcacattcattgatt

SEQ ID NO: 33658 - DNA, 332 bp, Gossypium hirsutum
  unsure (1)..(332): unsure at all n locations; Clone ID: LIB3149-025-Q1-K1-F12
tcacactcnccggcgggagaaaccagagaaaaatgaccaagtgttacccaaccgttagcgaggactaccaaaacaccgctcaaaaagctaataggaagctaataggtctcatcgctgagaagaaaagaggtgcactcatgctccgtctagcgagggactcatctggaacttttgatgttaagaccaacaccgagagggcgttctgaaccatgaagcaacctgctgaggtcgctcatgctgcttacaacagactcgatattgtagtcaggcttctcttgccgatcaaagagcagaatcctatcctttcatacgctgacttctattaacttgct

SEQ ID NO: 33659 - DNA, 354 bp, Gossypium hirsutum
  Clone ID: LIB3149-025-Q1-K1-F2
gccaagtttcacaatgatttcctgatgaacacatgattattttctgataaattttagcagaaccaaacattctatagtatcgacttagatcgtgtaattgtttgtatatattggctctaccctttagttttgctgagttgggttagccaaattgtttttgttttgttttgtattgtagggttgtttgttgtttggttttggttttagcatctgatgtacccagaagttatgaccttttgacctttctgtggttttttacgattgtagaaacactcaagtatgtcaaattcactttatttcccttggtttttaaaaaaaaaaaaaaatgagaaaaaaagacctacataaaataac

SEQ ID NO: 33660 - DNA, 258 bp, Gossypium hirsutum
  Clone ID: LIB3149-025-Q1-K1-F3
ccattgtgaaattctcttcctttggatcttttaagcccgggtctttgactcaaaggtcctttaagggtttggttgtaaaagcggctactgttgttgctcccaagtacacctcgattaagcccttgggtgatagagtgttggtgaagatcaaagaaacagaagagaagacagagggtggaattttgctaccaacaacagctcaatcaaagcctcaagggggtgaagtggttgccatcggcgaagggaaagacaatttgg

SEQ ID NO: 33661 - DNA, 341 bp, Gossypium hirsutum
  Clone ID: LIB3149-025-Q1-K1-F5
caagctacctatgacaagcttctctctgaagctcctaaatacaagctcatcaccccctctattctttctgatcgtatgaggatcaatggatcacttgcaaggaaggctataagggaattgatggcaagggggtcgattagattggtgtctgctcattctagccagcagatttacactagggctaccaacacttaggatcatttttccccttaatttagttattatttagaattatatttgctgagtttatcatcattgaatgctttcttttgttatttatttaagacttccctgtagtcactttttttccctctacaatgtttaagcaacaggttcttgat

SEQ ID NO: 33662 - DNA, 101 bp, Gossypium hirsutum
  Clone ID: LIB3149-025-Q1-K1-F6
ggcatgccccacaaattctaccatggccgcactggtcgtgtctggaacgtcaccaagcgcggccatcgcgttgaggtcaacaagcaagtgggtaaccggat

SEQ ID NO: 33663 - DNA, 397 bp, Gossypium hirsutum
  Clone ID: LIB3149-025-Q1-K1-F7
ggcatgccccacaaaaagtaccattttcgttttggtcgcgactggaacagaaccaagcgcgcgatcagttttaatgttaacaagcaagtatctaaccaaattatcaggaagaggattcatgtcaaattgtagcatgttcagcacgaaagatacactgaggaagtcaaactggggaagatttcaaatgatcagatcaaggcaaaggccaaggcaaaggagcgggtgattagcacacataggcagtctgatggcccaaaacctatttacatgatcgttgatgcaattatataaacggtaacttcgattgcatatgatgatgataatgatctcaatggtggctactaaatctactctgatttttggtttattcttggcataacttaaataagctttgcta

SEQ ID NO: 33664 - DNA, 406 bp, Gossypium hirsutum
  Clone ID: LIB3149-025-Q1-K1-F8
aacatacccaattaatatttccattttatattatttctttacttacacaacaaacggcgcggtttttttttataaactaacacccttcaaaaaaaacatttaaatcaaataaggcacatttttaaagaaattttttataaattaaatcatcttgaactttaaaataacctttaaaaaaaacttactgccacttttttcctaaaaatccacaacctaaaaactttaattgacaaacttactacaaaaaataaattccttcttgaacaatcttaacatacataaaaatttacactgtaattccattacatcaaaacatttgttaaaaaaatttgggttcctaatcaaaaaataaatttttaaagaaattatcttgtgaataccattctttttattaaggtttaaaaac

SEQ ID NO: 33665 - DNA, 405 bp, Gossypium hirsutum
  unsure (1)..(405): unsure at all n locations; Clone ID: LIB3149-025-Q1-K1-F9
cgcaaagaaggcaatccattttccccgagtaaaacgccaaagaaaacaaaaaatatgagagaaatcttgcacatccaaggtggtcaatgtgggaaccagatcggggctaagttctgggaagtcatatgcgacgagcatggagttgacaacactggaaaatataacggtgactccgaccttcagttggagcgcatcaatgtctactacaatgaanccagtggtggaaggtatgtcccacgcgctgttctcatggatctggagccgggcactatggattccgtcagatctggtccttttggacaaatctttcgccccgataacttcgtcttcggacagtctggtgctggcaacaactgggccaagggtcattacacggaaggagctgagctcattgattctgttctt

SEQ ID NO: 33666 - DNA, 342 bp, Gossypium hirsutum
  Clone ID: LIB3149-025-Q1-K1-G1
tctgttggcttgtatctcttcacggcctggtcaatgtggccgtgcagatggttacatcttggagggcaaagagctggagttctacatgaagaagatccagagaaagaaggggaagggagctgcttaaaaaattattgcatagttttcagcattcatatcagaatgccgcccttagggtttgcctttcacatttccagaacatttaaagttgtgttagcattgaacttttaatctggatccctgagagttattatttttgtattggaatttagattatctttgaactttataaatgcagcttattttggttggtaaagatgcagatcttctgcttttattttt

SEQ ID NO: 33667 - DNA, 399 bp, Gossypium hirsutum
  Clone ID: LIB3149-025-Q1-K1-G10
tcgggcaaggtcaggccttacgagagggctattatctctgattctggcacctccctctcttctaacccttgttcaccctacctaaaaacccaacccacggtggctcactggtggcggaccaccgagaaatactaccatctcgcctttaagaaatcgtatatttccttgtctttggggaagcagatacttgatgaacactattcgcttggcaagtctctcaagaagaaacaaattgttgagttggcctcaaagggtgaccaaaagcatgctattaatggtgttttaacagcatctgatgttgctcgtgaaaggttttgcatgaccctatgtgggactcatgggtctgccttgagctccaccaagggtaaaaggtctgccaaatttgcttacatttgggtt

SEQ ID NO: 33668 - DNA, 368 bp, Gossypium hirsutum
  Clone ID: LIB3149-025-Q1-K1-G11
tcgggcgaggtcaggctatacgataggggttttatttcggatgcatgcaacgtcatatcttttaaatagtgttaactatatctaaaaaactggccgacggtggataacgggtggacggggaacaagaaatagtaacatatcgtatttgagaaataggatatttccttgtctttggggaagcagatacttgatgaacactattcgatcggcctgtctatcaagaagacacacagagtggagtatggctcacagggtgaccaaaagcatgctatgaatggtgttgtaacagtatctgaagttggagctgaaaggtttggtatgagctaatgtgggactcatgggtttgccttgagctctatcaagggtaa

SEQ ID NO: 33669 - DNA, 162 bp, Gossypium hirsutum
  Clone ID: LIB3149-025-Q1-K1-G12
aaccaaccagacaacgggggaaattcgtgggattttttagcctatctaaaaaaccaaccacacagtatatcaacctaacacggccaaacaaaaaaactaacataactgatcttagaaaacgcatatttccttgtcttcatggaacctgatacttgataaaca

SEQ ID NO: 33670 - DNA, 223 bp, Gossypium hirsutum
  unsure (1)..(223): unsure at all n locations; Clone ID: LIB3149-025-Q1-K1-G2
gtcgcgagcgccgccctttntttttttttttttttttttttttnnnnntttttaacaaataggattgttcttcattataaactaagatccttcaaagaaaaggtttaaatcaaatagtgcagatgttgaaagaaattgatgataaatcaaagcagcttggacatcaaaagaagcctgaagaaaaaggtagtgggacttttttcctaaagatccaaaacctaaa

SEQ ID NO: 33671 - DNA, 419 bp, Gossypium hirsutum
  Clone ID: LIB3149-025-Q1-K1-G3
aggcaacagatgggctgcaatagcatcttacttgcctcaaagaacagacaatgacattaaaaactactggaacactcatctgaagaagaagctgaagaaactccatggaagtgaagtttattgcagagatgggttcacatcatcagctgcatcagaccagatttcacgaggtcaatgggagagaaagttgcagactgatataaatatggctaaacaggctttatcagatgcattgtcccctgagaaatcaagtgatttaactgagttgaaaccttgtcatgggaacacttatgccaaaccagaagggtatgcatcaagcacggagaatatagctaagctgttgaaagggtggatgagaaagaacccattaaagcctgcttcaacaaactctggtgtcactcaacaatcatatgacaaca

SEQ ID NO: 33672 - DNA, 290 bp, Gossypium hirsutum
  unsure (1)..(290): unsure at all n locations; Clone ID: LIB3149-025-Q1-K1-G4
angcggaacatggacatttttaacatatttttttttttaaagaacagacaaggacataaatgactggttttatattaatatgtagaagaacctacaaaaacatctttaaattgaagaatattgctgaaataatattacaatattatctgcataaaaccttaacttacaaggtcaattttagaaaaatttacatactgatattattatggctaaacaaactttaacaaatacattgtctccttaaaaattaagaaatataactttgtagaaaactttttatgggaacaata

SEQ ID NO: 33673 - DNA, 353 bp, Gossypium hirsutum
  unsure (1)..(353): unsure at all n locations; Clone ID: LIB3149-025-Q1-K1-G5
gcttggatgaagcagaaatcacgaaatattgtaaaagaaatcttgcgagtttcaaagtaccgcgagaaagttttcatcacggattccgtgccgaaaacagctactggaaaaatccagaggaggatagtagcagagcatttcttggctcaaacgtctgccgctaaagtacccaaatttggagcttaaattcagcattgcttgtctattgcttaggtacatatttaagcgactgcaatttattgtttgtgtaaaaggggattactaaagcaccatgttacatgtaattctgattagaaattattggaaagtctacattcataaatattttgatcaatnngcnnngggnnggnnng

SEQ ID NO: 33674 - DNA, 346 bp, Gossypium hirsutum
  Clone ID: LIB3149-025-Q1-K1-G7
gctctggacaatccaaacttacatattcgtttatgcgacatcatacctcttctatagcgcggcctaaattcaatatactggccgcccttacacaacctactgactggaaaaacactgccgttaccaaactaaatcttcttgcagcacaacccccactacacagctgccatgatagcgaacaggcccgcaccgttcaaccttcccaacaaaggcacaacctgaatcagtggtcacacacaccttgtgtcagctcattaagctcaaccattatcctgggtacactcatccagaccgctactcttaccatctacctagctccctatcgtttcactttcttcccttactt

SEQ ID NO: 33675 - DNA, 412 bp, Gossypium hirsutum
  Clone ID: LIB3149-025-Q1-K1-G8
ttcccgacagcaatttcttctcattttcgagaacatttttttaaagattttttctatatatgctttgaagatattaatcagaaaaatggcgctggtttctttcatcggaagggttctttttgcgtcagtgttcatcctctctgcttggcaagagttcaatgaatttggcgtcgatggtggtccagcggtgaaggagctgaggccaaagttcaacgtcttctcaaagactgtgtcgtctcacacagggttgcaagtgcctgaatttgatatcaagtatgtggttgctgctgctgtagcctttaaaggtgttgggagtattctctttacctttggcagcaccatcggagcttatcttctggttttgcatcaactcattcttactcccattgtttatgacttctacaattacgag

SEQ ID NO: 33676 - DNA, 363 bp, Gossypium hirsutum
  Clone ID: LIB3149-025-Q1-K1-H10
aaaagaccctttgtgaatgtgctgtttgtttgaatgagtttcaagaagatgagaagctaaggatgataccaaattgcaaccatgtttttcatatagattgcattgacgtttggcttcaaaacaatgcgaattgcccgctttgcagaacgagaatttcgagtagtaccatcaatgcaccaagcttagctccacaagatccaatcattaatggtggtgatgaaagttatgtggtgattgaattaagtgataataataaccatagttcaagcgatgagtcaattagtggttcacctatggagctcaaggatgtggagaaacgaggaaggaagttgcataaagggacaagcatgggggatgaatgga

SEQ ID NO: 33677 - DNA, 387 bp, Gossypium hirsutum
  unsure (1)..(387): unsure at all n locations; Clone ID: LIB3149-025-Q1-K1-H12
gcttccctccaagcctctccctcctgctcatgctgtgagggaggcaaagaatgaaagtgctcgtggtggaagtcgtggtgggcgaagatatggacgtggtggtagtggtagtggtggttacagacgtgattttgcaaatgacgagaacttattcagcaataatgctgtacctgaagatggagagagtggaaaaccctctgaaaggcgtggttatggtggtcctcgaccttaccgtggtggtcgccgtggtggtttcagtaatggggaagatgcagacggngagcgacctcgcagattgtatgaacgccgtagtgggacagggcgcggaaatgagctcaaacgtgaaggctctggtcgtggtaattggggaactcagactgatgaact

SEQ ID NO: 33678 - DNA, 417 bp, Gossypium hirsutum
  Clone ID: LIB3149-025-Q1-K1-H2
cagaaaacggagcagacagtcagataagcatagaaaatggaggctgccagaactgttaaggacgttgcccctcatgacttcgtcaaggcttacgccgcccatctcaagcgttccggcaagatcgagcttccttcatggactgatattgtgaagactggtaaactcaaggaacttcctccctacgatccagattggtactatatcagagctgcttccatggcaaggaagatatacttgaggggaggtcttggtgttggtgcctttaggaggatttatggaggggctaagagaaatggaagtcgccctcgccatttctgcaagagtagtggatctgttgcccgtcacattcttcagcaattgcagaatgtgaacatcattgatattgatcctaaaggtggaaggagaatcacatcaaac

SEQ ID NO: 33679 - DNA, 419 bp, Gossypium hirsutum
  Clone ID: LIB3149-025-Q1-K1-H3
cccacgcgtccgtattactcgacgctttttgattcgttggaggggtcggtgagcagtcaggataaggttatgtcggaggtgtatttggggaaacagatatgcaatgtggtggcctgtgaaggggtggaccgaatcgagaggcacgagtcgctgactcagtggagaaaccggctgagtacggcggggttttcaccggttcatttgggttcgaacgcgttcaagcaagctagtatgttgttggccctgtttgcaggcggagatgggtatggggtggaagagaacaacgggtgtttgatgctgggatggcacaaccgcccactcattacaacttcagcttggaagctcaccaacaaaaccaccgccataagccagtaaaatttatttatttttaatgagtcgactaaatgagtctaagaaga

SEQ ID NO: 33680 - DNA, 417 bp, Gossypium hirsutum
  unsure (1)..(417): unsure at all n locations; Clone ID: LIB3149-025-Q1-K1-H4
caccaccccacatacaacctttgacaccagtctcggaggtttcggagccgccggaatcgccgtctgcgtacttggatacaacagcggaagctgctggtgaagcggcacaggtggaggcggaggaagagatggaagaggaagaagagatcgaaccgccccctgccgctgtgcccttctctggattgtttgcctgtgctgacaggcttgattgggttctcatgatcgttggatcccttgctgctgcagctcatgggactgctcttgttgtttacttacattattttgcgaagatcattcangttcttggacttgggccacaagaacaagggcaagacagaatggatgagcagtttgagaggttcaaagaggtggcaaatacaatgaagcgagctgttttattagttttacatattcgac

SEQ ID NO: 33681 - DNA, 403 bp, Gossypium hirsutum
  Clone ID: LIB3149-025-Q1-K1-H5
cagctatctctactgttgatgtattgaccccgaaggttttcattggtttaatagttggtgccgtgcttccctactggttctctgcaatgaccatgaaaagcgtgggaagtgcagctttaaagatggttgaggaggttcgcaggcagttcaacaccatccctggtctcatggagggtcgtgccaagcctgattatgctacctgtgtcaaaatctcaactgatgcctctatcaaggagatgattcctcctggtgcccttgttatgcttactcccctaattgttggaactttctttggtgttgagactcttgccggtgtccttgctggtgcccttgtttctggtgttcagattgcaatatctgcttccaacactggtggtgcatgggataatgccaagaagtacat

SEQ ID NO: 33682 - DNA, 393 bp, Gossypium hirsutum
  Clone ID: LIB3149-025-Q1-K1-H6
cgtgcccccaaagggacaaaaactccatatcatttgcaaaagcaaaaatactttcgggaagacaactctaggaagagtgactatacaaatagacaaagtcgtgaccgagggagtatacagcggtttattcagcctgaaccatgatagcaacaaagacgggtcttcgagaacgcttgaaatcgagattatctggtccaacatgatttcgaacgaagataggatataaaatgggttcaaagattatttggctacataccagccaccaccatggaaccgggtgccaaaatttaccggtggagggtattatattaatactattcaggaccggttccgggttccatttggttgggtgaaggaaatggtatatatatctatctattccaaggccaagtt

SEQ ID NO: 33683 - DNA, 392 bp, Gossypium hirsutum
  unsure (1)..(392): unsure at all n locations; Clone ID: LIB3149-025-Q1-K1-H7
accgacgcgtacgcangggcccaaacagacaaaaaatttatattttttgcaaaaacaaaaanaaataacggggagcgaggcttttgaacagggactatgcaaacacaaaaaaaagcgaccgaagtacaatacaaaagatgattcaggatgaaccaagacagcaaaacacaatgcatggccacaacgctggaaaggcaaagcatgaggatcatcacgatgtcaaacgatcaaagcataccaaaatgaaggaaagaatatctgctgaagaccaagaatcaccactaaactaattgcagaaacttacattgaaggaagactattaacactatcatggacagcgaccttgttccatgtgctcagataacaaaatcgtgatacaaaactatctatgc

SEQ ID NO: 33684 - DNA, 415 bp, Gossypium hirsutum
  Clone ID: LIB3149-025-Q1-K1-H8
gctcattctactacaagaccgatgaaatggttcaacgggaccctgaacttcaagcctggtggaaggaactccgagaggtgggtcatggtgacaagaaagacgagccatggtggcctaaaatgcagaaccttgaagacctgatacaatcttgcaccattatcatatggatcgcttctgcactccatgcagctgtcaactacggacaatacgcttacggaggctacttccccaaccgcccaacactaagccgaaggttcatgcctgagaaaggcacccctgagtatgcagagcttgaaaagaaccctgagaaggtcttctttagaatcatgtcttcgcagctacagtccctgattgtcattacggtggtcgaaacgctgtcaaaccacgcatcggatgaggtgtatcttggacagcg

SEQ ID NO: 33685 - DNA, 85 bp, Gossypium hirsutum
  Clone ID: LIB3149-025-Q1-K1-H9
tatgaacagatagctataaactatgcttccaaagtttaatgatgattgaattaatcttattttttgttttaagctttgcatattc

SEQ ID NO: 33686 - DNA, 429 bp, Gossypium hirsutum
  Clone ID: LIB3149-026-Q1-K1-A11
cgctactgcccctgttagcaaacctaaatcaccggctccaactgctgcccctaccacttgcccaccaacttcttcaccaccggttgcggctccggagaagtctgcggcggttccagccccatctaaatctgctccgtcttctcctccggctgctgcgccggtgagttctccaccggctccagtacctgtgagctctcctccagccagatcgcctcccgttgctgcaccgacgactccaccagagagctcggcctctcctccggctcctgttacggcaccaactactgctgaggttccggccccagctccaagcaagagcaagagcaaaagcaagaaatccaagaaacaccatgctccggctccttcacctgatatgcttggacctcccgctccaccaactggagctcctggaccgagcctcgatgcttc

SEQ ID NO: 33687 - DNA, 392 bp, Gossypium hirsutum
  unsure (1)..(392): unsure at all n locations; Clone ID: LIB3149-026-Q1-K1-A12
ccgaattcngggcgaccagcgtccggccgcggaaaacttaaacaacccaaacaaacagaaaaaaaaaagggctgctgaagggacagcctttgtccaagactggctgtttttcaaatacgtatccttctggatccatggtgtgctattattactcccctccaattatgattctccaaaagggcaaatccctaattaattttctctctggatctttttccattaatggggttctgcaagagtacctgcatactgttctagttgtaagagtgacgattttatttgctttaaaaactttttgtatgaatttccttttctagacttgtaaaagaaaagatattatgtatgaatcaagaatgccattcgaaccctgcgaatatttggatattatgtgt

SEQ ID NO: 33688 - DNA, 444 bp, Gossypium hirsutum
  Clone ID: LIB3149-026-Q1-K1-A3
cttgttttttacttcgtttctaatttcctcctctcatcccattttccccttaaacttatattgataatatccttaaactttcactttgttgattactttcctgagccaaatatcagtacaatgtcaagcagaagatcacgttctaggcaatcaggtgcttcaaggatcactgatgatcagatcatcgatcttgtttccaagttgcaacagcttatccctgagcttcgtggaagacgccccgacaaggtatcagcttctaaggtcttacaggaaacctgcaactatatcagaagcttacacagagaagttgacggcttaagcgatcggttatctcagctattagcttccacagacaccgatagcgaccaagcagccattatcaggagtttacttatgtaatgatcagatttttggtttttttttcctagattaagtattactcac

SEQ ID NO: 33689 - DNA, 441 bp, Gossypium hirsutum
  Clone ID: LIB3149-026-Q1-K1-A5
ttcagaaagagtttgacattcaaggcaagcccgatgccaagcttctaccatgagggaccaccaccaaaagttgaactgaaaaaaatgccaccaactcgtgcaaagtccccaaagctaggtcgaaggaagagctgcagtggtccagtcagttcaagtcagggagacaaggtaaaaggtacttctcatcacaaaaatcgtcacagtttgggtagtcaaagagaagccattattgccaccacattcagttcagcaaacaaaaagaatcaaaacaatgtccagaatggaaactctcctttggaattcaaagatgagtcttcgaaagcacaagagatgtgtgagttggttccacccgaggcaaatggccacattgacttggacataaatttcctatcttgagtttctggtgagttttctaatttaagggaaacacttattccctta

SEQ ID NO: 33690 - DNA, 386 bp, Gossypium hirsutum
  Clone ID: LIB3149-026-Q1-K1-A6
aaaatatacaaaccttgttcttctattttagctgctcttcacattgagaagctagctttttggtgtgtttgcttagcttcaatccacattttctttgttgcgaagatggttgcacacaaattcaccgttgatttgaataaaccccttgtcttccaggttggtcaccttggagaaagttatcaggagtgggttcatcagcctattgtgagcaaggaaggtcctaggttctttgagagtgatttttgggagttcttgactcgcactgcctggtgggcaattccaaccatatggctgcctgttgtttgctggtgcatttcaatgtccgtacgtatggggcatacactttcccaaatcgctttaatgggtgctttttggcatttttgtgt

SEQ ID NO: 33691 - DNA, 310 bp, Gossypium hirsutum
  Clone ID: LIB3149-026-Q1-K1-A8
gtttggtcaagttgttgaaggtatggatgtggttaaagccattgaaaaagttgggtctagcagtggaaggactgctaagcctgtcgttattgcagattgtggacagctttgttaagaacaagaacaagaacaagaaatggaataatgttgactctggtctatgaatggtgattcatgtctgaaatttatcatttttatgtgttttcttttgctggttactggatttggcttaggttgttctctaagaacatgactgccataaataatgtacgctatttatcatcatatttgaccatataattgagttatt

SEQ ID NO: 33692 - DNA, 416 bp, Gossypium hirsutum
  Clone ID: LIB3149-026-Q1-K1-A9
gcgtcgtcaaaaccccaggagggaagcttgtttatcaaacgacaaagaaaagagctagtggacctaaatgtcctgttaccggcaagaggattcaaggaattcctcatttgaggcctgctgagtataaaaggtctaggttgcctagaaaccgtaagactgtgaaccgtgcttatggtggagttctatctggaagtgctgttcgagaaaggatcataagggccttcttggtggaagagcaaaagattgtgaagaaggtactgaagattcagaagacaaaggaaaagcaatcatccaagtgagagctaggatttgctaatggattgatagtgaatcttggaatagcagtttgaggggatttaagatttggatttatgtttttacatttgttatgaatcatgttctactttttcatctct

SEQ ID NO: 33693 - DNA, 224 bp, Gossypium hirsutum
  unsure (1)..(224): unsure at all n locations; Clone ID: LIB3149-026-Q1-K1-B10
aaaaacagagagagaaggccaatcttttctgttcaatattcnaccgaccgatggtcttccaatcgactgctctcctgcctctccttttgacccatagagtggtcaatcaaggcttcattgaaccaagaagattcgtacgaagtatgggtggcgtgagtacggaggctgtgctggcgtacggaagcgcgggcgtggttgctggagggttcggaagctggggctgc

SEQ ID NO: 33694 - DNA, 426 bp, Gossypium hirsutum
  Clone ID: LIB3149-026-Q1-K1-B11
caaattttgcgagaggaaaagcatttcatcatcagcgaaaaaaagggaattttagtcttcaggggaacgatcgaacgatgtcgtacctactaccgcacctgcactcaagatgggccgtagatcaagccatcttggcagaggaagagcgtctcgtcgtcatccgattcggccacgactgggacgaaacttgcatgcagatggatgaggtgcttgcttctgtcgctgaaacaataaagaactttgctgtgatttatcttgtagacataacagaagtacctgattttaacacgatgtatgagctttacgatccatcgacagtgatgttctttttcagaaacaagcacattatgattgatcttggcactggcaataacaacaagattaactgggcactcaaggacaaacaggagttcatagacatcattg

SEQ ID NO: 33695 - DNA, 405 bp, Gossypium hirsutum
  Clone ID: LIB3149-026-Q1-K1-B3
cagaaaactgccccctttcctccatattccttttctgctagggttagaaaataacccatcattgccgccgtccgaccacctcgccaccatcacatcggtgacccgcgatgcaccaagatggggtcttttagccctcctttctcatgcttatcggagacatgctcccaaaggccgaaagacaaaggctcagtcccccttttgctcgaccacgccgaacggagaagaaagctccgacgacgcggtcacggggcggatctggctctgagggtcaacgaggcagaggtttgccattctggtgcaaacggtgtcaggggggaagagcatcgggcgttagacgtgtcgacggggcacgtgaggcgcgcgacgcttggaagatactagggtttttaggtctgccaaaattgg

SEQ ID NO: 33696 - DNA, 191 bp, Gossypium hirsutum
  Clone ID: LIB3149-026-Q1-K1-B4
gaaaaaaaaaaaaaaaattttttttttttttaaaaaaaaaaattttccttgggtgaacccaggtttaaattttaaaaaaacccgaaaaacccttttccaaaatttataaaaatttttgccccccccaaaataaaaaacgttttggaggaaaaaaataaatatgcaatttttaaactttttttttttttttt

SEQ ID NO: 33697 - DNA, 220 bp, Gossypium hirsutum
  Clone ID: LIB3149-026-Q1-K1-B5
acagatagagatcacaatcacccccctttttttctcttttgacgagaaaacaacccctcaaggacagatgttctttatatttgtcaccaccacatcattataccctcgatgcaccaaaataaatttttttatacctcattaaccaaccttatacaaaacatttcatccaacaacactaagacatacgcccaatcacatcttggcttctatacacacatcg

SEQ ID NO: 33698 - DNA, 343 bp, Gossypium hirsutum
  Clone ID: LIB3149-026-Q1-K1-B6
cccacgcgtccgatagatcgccgtctcgactggcatggccaccaagcagccaaatacaggcctttttgtaggactgaacaagggccatgttgtaaccaagaaggaattggttccacgtccatctaacagaaaaggaaaaactagcaaaagagtccattttgtgaggaacttgataagggaagttgctggttttgcaccgtatgagaagaggattacggagcttttgaaggttggtaaggacaagcgagctctcaaggtagctaaaagaaaattgggaactcacaagagagccaagaagaagcgtgaggagatgtcgagtgttctccgcaagatgagggctcat

SEQ ID NO: 33699 - DNA, 219 bp, Gossypium hirsutum
  Clone ID: LIB3149-026-Q1-K1-B7
gacagactcacaatatggtgtgggggggattattggggcggatccatctttaagagaataaatgtatggctgacattgggtgcaaaggacgagcatgaagcccaaagtgcagttagcacttgggcggccaatctctaggatccaaactgtcatgcgcacgcatacgactacctatctctagtattgtgtcagatgaagtgcactgagcacgcggcatgg

SEQ ID NO: 33700 - DNA, 367 bp, Gossypium hirsutum
  Clone ID: LIB3149-026-Q1-K1-B8
tccacgaaccgtatacacttcgccagacgggtatttgttttctcctgatatgttggcctccattgacaaatgcagaaacgatctggcgtcttctataatcgagaaggccaagaagatatgcagggagcaaggtgataaagaggttaaagtagaggtgataatagagagtggtgatccaagggacgtgatttgccaggctgctgacaagatccatgctgatgtgcttgttatgggaagccatggctatggcttgattaagagggcattcttggggagtgtaagcaatcactgtgcacagaatgtgaagtgccctgttttgattgtgaaaaagcccaaatcttcctcctctgcaactggaaccaaatga

SEQ ID NO: 33701 - DNA, 428 bp, Gossypium hirsutum
  Clone ID: LIB3149-026-Q1-K1-B9
aacccccataccagcaagaatacatctaagtaaatcctctagccgcttcaaaaaacagagaaagaaaaccaatcttttctcttcaatattcgaccgaccgatggtctcccaatcgactgctctcctgcctctccttttgacccatagagtggtcaatcaaggcttcattgaaccaagaagattcgtacgaagtatgggtggcgtgagtacgggggctgtgctggcgtacggaggcgcgggcgtggttgctggagggtacggaggctggggctgctggagcagaggcgttgtccagttcttggctgcggcgcaaaatcctagctagggtttctgctttgatttttttttttgggctgtagggtatttgggtctaagttttgggttgtgttaggtttgggctaagtttgggtattgggtcattgtaataa

SEQ ID NO: 33702 - DNA, 308 bp, Gossypium hirsutum
  Clone ID: LIB3149-026-Q1-K1-C1
gttgggtttcactgtctacccatcaccccaggtctccacatctgttgttgagccctacaacagtgtcctctcaactcactcccttttggagcacactgatgtggctgttcttcttgacaatgaggctatctatgacatttgcaggcgctctcttgacattgagcgacccacttacaccaatcttaaccgtcttgtctcccaagtgatctcctctttgactggttcacttaagttcgatggggccttgaacgtggatgtaacaaaattccagaccaacttggtcccttacccaagaatacacttcatgc

SEQ ID NO: 33703 - DNA, 412 bp, Gossypium hirsutum
  Clone ID: LIB3149-026-Q1-K1-C10
gcacatggatgtaaagtgtttgctgatacccttttagccaatcctgaagccatgggaacatatgaggataatctgaatggaggattgactgtgttctgcccactggatgatgcatttaaagcctttttaccaaagtacaagaacttgactgcttcagggaaagaatcattccttgagttctttggtgtgcctgtttaccagtctttatccatgttgaaatccaacaatggtctcatgaacacattagctaccgatggtgctagcaagttcgacttcaccgtccaaaatgatggcgaacaggtgacactaaagaccaagatcaacaccgtcaaaataaccgggactttactcgacgaacaacctgtggcgatttatacaatcgacaaggtcttgatgcctagagaattgttca

SEQ ID NO: 33704 - DNA, 256 bp, Gossypium hirsutum
  Clone ID: LIB3149-026-Q1-K1-C11
attcgatccttgaaatacatcaaattaattcgaagcagatgctaataagttagtgatgggatggatgaaacttgaaagaatggtcacggccttttcaattttgcttcaatgtaaacatatagtaaatgaaacactagttgtttaagacacaggtatgtagatttgagtgcaataatgataccctgcttcaattattccaaaaaccttccctgccaacttcatcagcctttgaatatttcttaaacatgaatctatt

SEQ ID NO: 33705 - DNA, 354 bp, Gossypium hirsutum
  Clone ID: LIB3149-026-Q1-K1-C12
gactcgatccctaagctagttttgtactaatgggaacagttagtgttgcaaacaaggatatcaatgttagcttagctgaaaaaaagcctagagttgtttttgttttgggtggccctggcagtgggaaaggtacccaatgcgcaaatatagtcgaacactttcattacacccatctcagtgctggagatcttctccgagcagaaattaagtctggttcggaaaatggaaccatgattcagaacatgatcaaagaaggaaagattgttccttccgaggtcacaattaagcttctccagaaagcaatgctggaaagtgataatgacaagttccttatcgatggttttcctcgtaatg

SEQ ID NO: 33706 - DNA, 301 bp, Gossypium hirsutum
  Clone ID: LIB3149-026-Q1-K1-C2
tgggatgcgacattgttgctcctcagcatgtaataaggtaaagcaaaagggaaaaacatgttggcatgattgtagatacatagaactgcgatccccatatttgttctgttgagtttttcattgattctttcgatacatgtcgattttgtgagttggaattcataaaaagtccttgtaatttgcagaggagagaagattgatgcctatggtatcatattcccttctcaataagggactttgacatatatgccatgaattgtaaaaacttggattggaatttgtttctgcattttattttaaa

SEQ ID NO: 33707 - DNA, 103 bp, Gossypium hirsutum
  unsure (1)..(103): unsure at all n locations; Clone ID: LIB3149-026-Q1-K1-C3
ctgaaaacctcaagaaacgcctngagcagctagagaagaccaagactgagaagagaaaaccagttgtagtccctgctaacaagcgaacgcgtgtaaataatgg

SEQ ID NO: 33708 - DNA, 346 bp, Gossypium hirsutum
  Clone ID: LIB3149-026-Q1-K1-C4
ctccttcagcaccgtttttcttattttccattttctgccctcagcattttctcctacatttccctttttttttctattgattgcagaggtggacagacaagtatcaggtaacagacataaacaaatatctccgctgcaatgatgataacattactcttttctagtaatacgggaaagacaatatatatatgtcaaactacagttacatttcggatttaatctttttaccttaaacaagaacattttggttatatttaattttcgatatgtttttattttttgatatgtatcatttaaaactattttagtattttattattaaactatttttatttttgatgtcttt

SEQ ID NO: 33709 - DNA, 444 bp, Gossypium hirsutum
  Clone ID: LIB3149-026-Q1-K1-C5
gttttctgtgacaatgacgaggaagatgatcttcttaaaggcatcaacagttaccgagcttcgttaaacttgacaagcctaacaacaaatgagaacgccgagtgccttgctgatgaactagccgaagaattcaagaaccaaccttgcacaaactccacaggcgccaacactgtcccaggcaccgaaccacagtttgccaactatccaaaccttctagccaaatgccatttgaacgtttccgtcacaagggacggagcagtaatgcctgcttgtgttccgaacctggctccgagtcttgtgctcactaattttacgcagtctcaatactccggaaacctcaatgaaaccaagtatacaggaatcgggatcggttctgaaggagactggattgttgttgtcctaacaaccagtacaactgaaggaaactacgctacggctactact

SEQ ID NO: 33710 - DNA, 413 bp, Gossypium hirsutum
  unsure (1)..(413): unsure at all n locations; Clone ID: LIB3149-026-Q1-K1-C6
aagaggggaaaattagacaacatgtctaagatgaggtacgatcgtaagcctccgcttgctaaatcgcctatccgcgtacgaccccgtcgagtcctccgttccaactcaacctccctgcaaaccccgccaggttctttgacgaaatcccaaaagccggttcgtgcttggacaggcgaagaatcagtgattcgacccgaatatcggtccatttcttgcgagttacaggctttggctacgatggttaaacgtgaagttgggaatggggaaaaggaaaacgctggttttggtgagaccagtgtgggcgccaagtcgactagtctgtttgagagaggcaggttctacgaggagtactcggcgaggagaaacgagaggctnaagagaaggaaaggcgaaaccgggacggagtcaaagag

SEQ ID NO: 33711 - DNA, 429 bp, Gossypium hirsutum
  Clone ID: LIB3149-026-Q1-K1-C8
gtcggagtgacataacggctttggcaaaaggcagagcttatacgcataatctaaacgaaatgaccatttatcaggcattgcaattgggacaagattcaaacactccttatgagatgagaagtcaaagatgtcagatgtgtttgcgcactgatacattgcttaaagtgatggaacaattggcaaaccctggtgttcgacggcttgtcattgtggaagccggcagtaaccgtgtagaaggcgtcgtgtcgcttacggacgtttttaggttcttgcttggttagttagaagtaattgcagataacttttatctagaagcagttttttttgcattggactcccatttcttgtgggcaccataccctgcccctaatgttccatagagactgcaatatttaaaaaccaatgatcatcgaatctcattcaacaatt

SEQ ID NO: 33712 - DNA, 418 bp, Gossypium hirsutum
  Clone ID: LIB3149-026-Q1-K1-C9
tggatgtacaccggcacaacttgcacttgcctgggttcttcatcaaggggatgatgtttctcctattcccggaacaaccaagattaaaaatctagacagcaatatcgaatcagtgaaagtaaagctgacaaaagaagatttgaaagaaatttcagatgcgatcccaatccatgaggttgcagggggtacttatcctgatggtttaaagcaattcacttggaaatatggcaatacaccaccaaagaagagcacctaggtttagaagcaaagtttcatgggtgttgggatgaatggatttcccaagaaactgaagccattgaaagattgatgagttactaaagctttggattgtcattataatggagggttcagtatttatgatgttagtgtgtcatattttgtatcgggttatttttag

SEQ ID NO: 33713 - DNA, 387 bp, Gossypium hirsutum
  Clone ID: LIB3149-026-Q1-K1-D1
gctgagtttaagcatctcaataaccggagttttgctctttgagatcttgtattgcttcaattctaactttgtcatccagcttccataataattggcagggttttggtttggggccgtcttaacaccggaagctcgaaatgttattgaggggaacgtgttccggcagtagttgaagttgctggtgtaacatatgtaactacttaagatgactagcatctttgctctgtaatttatgccatgtctacatgtttataaatctaatgttagtggtagtgatgacattgtatcagcttaatgaatgtaactatgtttttatttaaccctttgggtttcttttttcggtaaaaactaagaattaaattggtattttgtccgctctactaaaaa

SEQ ID NO: 33714 - DNA, 412 bp, Gossypium hirsutum
  Clone ID: LIB3149-026-Q1-K1-D10
aaaatctagggatttgcgggtggagaagactagagcccatctctctgcttcaaagctcctgtccaggtagaattctcttcttcccttgcgttgtgttctttgctgttcaatcgccatggcttcaaagctgattttgaaagaactcaaggatttgcagaaagatccacccacttcttgcagtgctggtccagtagctgaagacatgtttcattggcaagcaacaatcatgggaccctcagatagcccttatgctggaggtctgtttttagttactatccatttccctccagattatcctttcaagcctcctaaggtcgcgtttaggaccaaggtcttccatcccaacatcaacagcaatggaagcatttgtcttgatatcctcaaagaacaatggagccctgcactaaccatt

SEQ ID NO: 33715 - DNA, 348 bp, Gossypium hirsutum
  Clone ID: LIB3149-026-Q1-K1-D12
ccagactctactgagaatattatgccacagggctgattcagaggcatcccagtttgtcaagaagcagtataagatacccaagtcttctgcataggctgtagttcgacccagaatcggcttgaagtaggagaaagcgttgacttgaaatccagcttgacgtaggagaaaatggcaaatatgcatcagcccgtttgtgtgaatataagttcatcactcccttgtaagagaaaacaactggatttgctttcatccttctttatggcatctttaaatcactctgttctctttgtatgtttacataatcacatttgagttgtgtatatgagatggaaaccataccatggccca

SEQ ID NO: 33716 - DNA, 436 bp, Gossypium hirsutum
  Clone ID: LIB3149-026-Q1-K1-D6
agcccttgtatagcagctgatgtctgtgccatagagttcacctaaatgacaggaaatgctgcttttgagggctgatgagatgatgatgcctgccttcggagatgttgtaaatgaggcaaggaccttgtccaggaagcttgcaggcctcgaactttgcatgaggcttcagggacattttctatggtaagatgctcaatcccattattgttgaatgatcgatgaaactttcggagtagatgtcccatggaccaagcttcgaagccgagtggttatgatcacaaccaagcagtggaggttctcagtgcaagttatcaaggtcagtgcaatgacacttctagcattaatccaatgcttggcggtgttaggcgatctcttttcagcttccaccattcatttatagtattttcttcagcaccagagagcggatgtgggacat

SEQ ID NO: 33717 - DNA, 428 bp, Gossypium hirsutum
  Clone ID: LIB3149-026-Q1-K1-D7
cgaagtgggaagcacaaggaaagcctgcaagaactgcacttgtggaagggctgaacaggaggagaaagtacagaagctagaactgagtgctgatcagttgaacaatcctcaatcagcttgtggcaattgtggactaggtgatgcttttcgctgcagtacatgcccatacaaaggtcttccaccattcaagctgggcgagaaggtatctctgtcagggaacttccttgcagctgacatttgaactcccaaatgatggatttttggcccaaaatttaatttttggatacctcaaaacattagatactggtttggtttagtggtttaatgtggaagtttaaaattctacttcattttatagaacatttgatgaaaatacatgcagttcttatgtaagtgttcaagtggatattttatttttatggaaacat

SEQ ID NO: 33718 - DNA, 428 bp, Gossypium hirsutum
  Clone ID: LIB3149-026-Q1-K1-D8
cgatgatgttttattcattcctctctactctgttacagaagtttctgctttccataaagacgccaatggctttggctggccaaacttttgaggatatgctcaaccttttcactaacaatggtggcttgtttggtctcattaaaaaggtcatgacagggaaggtggtgattccaagcagagaagcagcaacctatgtctctgctgttggatatacggacttgagaatggatttagacaaacaaattatatacgggaattctatgtattatccagcacttgcgattatgacttgtaaagctgtttataataatgctgcttacaacaaatctataatcgaaaacaattgggggatggaagtcatcggattctataattattggaacgattacctgaggcaaccggatacccaagtggtgatgttccgaaac

SEQ ID NO: 33719 - DNA, 323 bp, Gossypium hirsutum
  unsure (1)..(323): unsure at all n locations; Clone ID: LIB3149-026-Q1-K1-D9
gtttttcagtttctcattgagtggtgtagctcaccatttctaagttcacaaagtactcagtatcttgaacaattccatgttggtgtgagagtttcctaatctttcttgtattttgctggtggtataaacaatgttgtgtggtatctgatgttactgagcactgtgttttcttgtgaaacttagattttattttatttttaatgtaattcaaattgcagatgattatacggagaacagaactttccttgtttttgaaccctttcgttttctgcttaatgcttaataagtatacaaaaatactgcnnanaaaaaaaaaaaaaata

SEQ ID NO: 33720 - DNA, 423 bp, Gossypium hirsutum
  Clone ID: LIB3149-026-Q1-K1-E10
gccgcctcccacaagctttgaggtgttttttaggttgctcttggaacatctagcagccaaccaaaaatggttctccaaaacgatatcgatttgttgaatcctccagcagagcttgagaagaagaagcacaaactcaaacgtcttgtccagtctccaaattctttcttcatggatgtcaaatgccaaggctgtttcaacataacaacagtgtttagccactctcaaacagtggtggtatgtgggaattgtcagactgttctttgtcaaccaacaggaggaagagctagactcactgaaggatgctctttcaagaagaaaggtgattgatctcatattttgctattttatgattcacaaaaacaaaagaaagtaatctttggatcaaatatgggaatcatatgagtaatctttttcatgtgtttc

SEQ ID NO: 33721 - DNA, 427 bp, Gossypium hirsutum
  Clone ID: LIB3149-026-Q1-K1-E11
aagaggggaaaattagacaacatgtctaagatgaggtacgatcgtaagcctccgcttgctaaatcgcctatccgcgtacgaccccgtcgagtcctccgttccaactcaacctccctgcaaaccccgccaggttctttgacgaaatcccaaaagccggttcgtgcttggacaggcgaagaatcagtgattcgacccgaatatcggtccatttcttgcgagttacaggctttggctacgatggttaaacgtgaagttgggaatggggaaaaggaaaacgctggttttggtgagaccagtgtgggcgccaagtcgactagtctggttgagagaagcaggttctacgaggagtactcggcgaggagaaacgagaggcttaagagaaggaaaggcgaaaccgggacggagtcaaagagtgggcaccatcatg

SEQ ID NO: 33722 - DNA, 392 bp, Gossypium hirsutum
  Clone ID: LIB3149-026-Q1-K1-E12
ggattatattgatctttactatataatcagagttgaccgcaagactcctatagaagatactatggaagaactgaagaagttggtggaagagggaaaaataaagtacattggtatatctgaagctagccccgaaactataaggagggcacacgctgttcatcctcttactgccgtacaacttgagtggtcgctttggactcgtgatgttgaggaagaactaattcccctttgcaggtttgttcttctatcttcaatcatcggtaactttttttttattcgaatatagatatattcaaatttttatatatttggagggatataaatatacccttttgctcaaatatattgaaattcacttattgattggcttttctcaaagtatcaactggttt

SEQ ID NO: 33723 - DNA, 444 bp, Gossypium hirsutum
  unsure (1)..(444): unsure at all n locations; Clone ID: LIB3149-026-Q1-K1-E2
cagaaagtagtcaaaggctttccttatccaagtagctactacaaatgtacaaccccgggatgcaatgtccgtaaacacgtcgagagggcttcgactgatcccaaggctgttataacgacatacgagggaaaacataatcatgatgtaccggctgccagaactagcagccacaacaccgccagtagtaacgcaacacaagtaagaacacagaatatagtaaccgataacaaccacggtgtaaataacagtgtcgattctacgaacgataggcaacgaccggtagcacggttacggttaatagaagacaggatacgtaatgtctctgaattgcagcatggaaaatctgtcatatttcaagcanatgtaaagcttaaaaaagtgtacgtaaagtagtttagtgcgtgcgtgtatatatagagtaatttgattctcttattccatgca

SEQ ID NO: 33724 - DNA, 349 bp, Gossypium hirsutum
  Clone ID: LIB3149-026-Q1-K1-E4
gcagcacttgctccttcttacggtccttctgcattaccggacactgcatcgtcaccgtcttacacgactgtcttcggcaacatccctcaaccgccttcttcatcgccgtcactagggttcccattattcgttacagctgttgttgcatcagccacatggggaataatcaatgccatgatatgaagaaggggacatagttactcgatctctactgtcaaattgtcaaaccattccatttggcattttatttatttttcattcaaatgttatttctagaatttgggttttattcttcggatttgtgattcatttttcggtgatgaaacttgcaaagagaatacgaacagtg

SEQ ID NO: 33725 - DNA, 402 bp, Gossypium hirsutum
  Clone ID: LIB3149-026-Q1-K1-E5
actggataggtacattgcattaaatgaatcatgcaaggctgccttgctttatctgcattgctgtgacttgtactgggtgttgacaccgttgctggatcgaggatagatgctcgagagtgccggggagcttgaatgaaagagcatgctatgcctgaggcactccatgagcttgtaaggattgaggctgccgttgccaacccagatgagaaaaccaggtgccatacatcaggtaacattgaacgtatggcggcgaagattattgttaatgaggagttcgaaccaaggccaaacatttcagcttacggtgatgacgctaatgtaagaggagataaatgatcatcttttgcagaagattgtgaaccgagacctaacatttcggcttacggcggcgatgatgctggt

SEQ ID NO: 33726 - DNA, 254 bp, Gossypium hirsutum
  Clone ID: LIB3149-026-Q1-K1-E6
ggtagtagacattttatttgttatttatagggagagaaggatggatgatgtgtaaccaattcatggctcgtcgtctgatacatacatacgagagtacaaaagggttataattagagaatgagctggacttcagacgaatcattgttgtggattttgagaatgaaaatgtttatgttttgtggtctttctccctttttttagtagggaatcttcattccactcaaaataaaaatataaataacaatataaattat

SEQ ID NO: 33727 - DNA, 364 bp, Gossypium hirsutum
  Clone ID: LIB3149-026-Q1-K1-E7
agcgcgacgagccagcccttttttttttttttttttttttttttttttttttttttttttttttttttttttttttttttttttttttttttttttttttttttttttttttttttttttttttttttttttttttttttttttttttttttttttttggaaaaaaaaaaaaaaaattttttttgggggggtttttttttttttttgggaaaaaaaaaaaaaaaaattttggaggggaaaaaattttttaaaaaaaaaaaaaattttttggggtaaaaaaaaaaaattttttaatttttcaaccccaaaaaaaaaaaaaaaaaaaagggggaattttttttttgtgtttttaaaaaaacaaaaa

SEQ ID NO: 33728 - DNA, 381 bp, Gossypium hirsutum
  Clone ID: LIB3149-026-Q1-K1-E8
gaaccaccatcatttggtgaccagccgcatgcaaacaccgccccgattatgccattgacggtgcttgactacaccttaaaagatttagaacggccgtacggaggaacgaccctgatgacgtggaggccgagcgtggggatttctagtgagaagatgaccttctggtgccattctggcttactccagaagcttctggctttctcaggctgctgagtttccttttgggtgtattgggcctcgggtttgggttattagaattaggttttaggatttatttaattgggtcaaattttatgtaactgggttaagtttatattaagggattttgggtttaagttagtttttgcccaaatatttgtaatcggacattggacttttgat

SEQ ID NO: 33729 - DNA, 371 bp, Gossypium hirsutum
  Clone ID: LIB3149-026-Q1-K1-F12
ctttgttcctcattctctgatccggctctttccgcattcgtcccgccggatttaacaaggtttcaaaccaaaaatgaggggaatccctcaccttccaagggggccatgccggaacccaatccggtcccaagtcttggaaaggggttgggaccaaccccggatttgcccttcccgacccctttcccggaacctccatcctccattggaacgccgttaccgtttactccattaaggctcttgggggaaggttggcccaccccccctggctcttggttcttaaccccgggaccatggttagtgtgagaaccgggccttatggtcagatctttaggcccaataactttgtcttcggccaatctggagctggtaat

SEQ ID NO: 33730 - DNA, 435 bp, Gossypium hirsutum
  Clone ID: LIB3149-026-Q1-K1-F2
cttcaaactcgacttctagcacaaaaatcaacgttgaaattgtgtttccggtctcgtcagactctatgacaaaaacatctacaagtgcatcacctgcacttatatcagtcaaagctggtgatgatgttatactccctgttgtacccggagttgcaagcggtgaaggatgctctattcatggtggctgtgcatcttgtccttacatgaagatgaactctcttagctcgctcttaaacgtttgccaccatttgcctgatgaaagaaacaaccttaaagcatatgaaaccgaacgattcaagtcgcaaaccccacaaggaaaatctattgcagatgttggatgtcagcctatactgcatatgagacactttcaggcaaagaaagaactgtcagaggaacttgtctaccaggttcttggttcacacggtaatgggaaat

SEQ ID NO: 33731 - DNA, 335 bp, Gossypium hirsutum
  Clone ID: LIB3149-026-Q1-K1-F3
ttcagcgaaggggtgctctgagatcacataccaaaatggtgaaggccgttgccgtccttggcagcaatgaaggtgttagcggaactgttttcttctcccaagaaggagatggtccaactaccgtgactgggaacctttctggtcttaagccgggactccatggcttccatgttcatgcccttggggacacaactaacgggtgcatgtcaactggaccccattttaatcctgctggcaaagagcatggtgctccagaagatgagaaccgccatgctggtgatctagggaatgtcacttgtggtgatgatggctgtgcaagcttctccatcaccgac

SEQ ID NO: 33732 - DNA, 160 bp, Gossypium hirsutum
  Clone ID: LIB3149-026-Q1-K1-F4
ccggttgattactggttcattgttgtaagctatgacagtagttacctattgagttttattgattttggtatatgtacttttttagtgaagtggcactaagtagtttttcatttttgaaacgtatgtttgaaccttcttatatataacagtattctagagc

SEQ ID NO: 33733 - DNA, 393 bp, Gossypium hirsutum
  Clone ID: LIB3149-026-Q1-K1-F8
cccatttattttttcaccacagaatgataatcccgaagaagggtggtctaaaactggagggatctctcatgaaacagtctctaatgaaaccgtaatcttatcccatggtttcatatccagaatggattacaatactatgacgaaccttgccgctgctttagaaatagaaggaatcagtgtcttccgtttcgattttgctggaaacagagaaagtgaaggttcatttcagtatgataactattaccgagaagctgatgatttacacactgtaattcaacacttatcaagggaaaatcatgtcttaagtgcaattcttgggcatattaaagggggaaatgtgcgacttctttatgcttataaccatcaagatatacatataattgtaaacaattt

SEQ ID NO: 33734 - DNA, 423 bp, Gossypium hirsutum
  Clone ID: LIB3149-026-Q1-K1-F9
gcacaaatgagtgctgaagggtatgctttgtatgaacaaacaaagcaactagacaccagtgagaacaggttcttcacaggtttgaaaatagcatcagttgggtttctcctatatttcgtccctcagaaactgatgaaaagctttgagagcaaattcccagtatttggattatgcatggatacaagtacaacaggtttaccatgtgataggaacagcagcagttcagagagagcatggccaagacaactaagggaaatggcaaaggctagctttagtaaagatggaagcaaagctccaacagatccttcaagcagcaaaagcaaatggagtgggttgtggggaacaaaaaggagtggcagctcttctttagattcctctttagattacaagtcaaagtccaaatcaaaagggttgtacaaagac

SEQ ID NO: 33735 - DNA, 362 bp, Gossypium hirsutum
  Clone ID: LIB3149-026-Q1-K1-G1
ggcatcgctgaattgaaaaagaaaagttcaaaacccaagcgaccttccatcaaagcccttttcgaggatgaatcggcagcagctgccagtcaacctgtccaagggagctttataaacctcttgcctccacaaatagaagaagccccagagaaccgttcgagaaaatgaatgctgccatatcctcgtgataaccttgtgttccccggtgcttagcgtttgctttttgccacattaacatttcaaagttttaggggcaaaggtccccaaaacaaagtggtttgagatatgggatttggctcttcctgagccagttaggaaattgttcttttctgtaaaaataatatctgaaagtaaatattttt

SEQ ID NO: 33736 - DNA, 369 bp, Gossypium hirsutum
  Clone ID: LIB3149-026-Q1-K1-G10
agacaaaatatggagggattattcccatgaaaccaccactaatctccaaggaccatgaacgtgcgtactgcgattctgctgattgggcacttagaaaagcaaggtgtcgagaagcccaaaggaccacttgaagccctccgaccgaaattcccagcgacacatccacaaacacgatgcaggaaatctacctgtgccccagcagatggtgcaagtggagggagcgctcaaccagacggagggactgccgacgaatgataaactacccctaatcggctgatcttgcgaggactattggcggctactctaatacccagataggtaatgcattatgttacactgtttccatgaataaatacttgatgaaagatg

SEQ ID NO: 33737 - DNA, 418 bp, Gossypium hirsutum
  Clone ID: LIB3149-026-Q1-K1-G11
gcgtcgtcaaaaccccaggagggaagcttgtttatcaaacgacaaagaaaagagctagtggacctaaatgtcctgttaccggcaagaggattcaaggaattcctcatttgaagcctgctgagtataaaaggtctaggttgcctagaaaccgtaagactgtgaaccgtgcttatggtggagttctatctggaagtgctgttcgagaaaggatcataagggccttcttggtggaagagcaaaagattgtgaagaaggtactgaagattcagaagacaaaggaaaagcaatcatccaagtgagagctaggatttgctaatggattgatagtgaatcttggaatagcagtttgaggggatttaagatttggatttatgtttttacatttgttatgaatcatgttctactttttcatctcttc

SEQ ID NO: 33738 - DNA, 425 bp, Gossypium hirsutum
  Clone ID: LIB3149-026-Q1-K1-G12
gggaaagaaaagcagcgtaatgggtgaagaagtgaaagtttttggatactgggcaagcccttacagctacagggcagagcttgctttgaagttgaaaggtgtttcttatgagtacataaatgaggatatctttggcaacaagagcgatttgcttttgaaatacaatccggttcataagaaagtcccggttcttcttcacaacgggaaaccaattgtagagtctcttgttatacttgaatacattgaggaaacttggaagcataatccctatttgccacaagatccttatgacaaagctaccgctcgattctggatcaagttcatcgacgaaaagtgctttcctaccctttggctagctgcatggagcgccgagaatgatcgagaaaaagtgacgaatgaagcttgcgagtatctgaaaacgcttg

SEQ ID NO: 33739 - DNA, 407 bp, Gossypium hirsutum
  Clone ID: LIB3149-026-Q1-K1-G2
gatggctcactctcattctacccaaaacccagtgattgagcagcagagaatgataattccgaacaagcatggtgaaaaactggtgggattattgcatgaaacagagtctaaagagattgtaatcttatgccatggtttcagatccagaaaggattacaatactatgacgaaccttgccgctgctttagaaatagaaggaatcagtgtcttccgtttcgattttgctggaaacggagaaagtgaaggttcatttcagtatggtaactattaccgagaagctgatgatttacacgctgtaattcaacacttctcaagggaaagtcatgtcgtaagtgcaattcttgggcatagtaaaggggggaaatgtggtgcttctttatgcttctaagtatcaagatatacgtata

SEQ ID NO: 33740 - DNA, 303 bp, Gossypium hirsutum
  Clone ID: LIB3149-026-Q1-K1-G3
gatgaggaaaatcatgggtgccaaagttcttttcttctttgctttgctttccttttcagctgtctcggcatttgcacaggatgaggaagaccaaggtcttgttatgaacttctacaaggattcttgtcctcaggctgaagacattatcaaggagcaagttaagctactgtacaagcgacacaaaaacactgctttttcttggctgagaaacattttccatgactgtgctgtccagtcatgtgatgcttcactgctgctggactccacaaagaaagagcttgtctgagaaggagacagacagga

SEQ ID NO: 33741 - DNA, 267 bp, Gossypium hirsutum
  Clone ID: LIB3149-026-Q1-K1-G5
tttttcaagatgaggatgacccacttcttcttttgtacttttacaaagattcttgtactcatgctaaatacattttcaaatagctagttaaactactgtacaagctacacaaaagctctgctttttcttggctgaaaatcattttccatttctgtgctttcaacatatgtaatgctttaatgctaatgtactccacaagaaagagcttgtctgttatagagacagtcatgatctttgtccttatagaaatttcatgttcatttaaac

SEQ ID NO: 33742 - DNA, 436 bp, Gossypium hirsutum
  Clone ID: LIB3149-026-Q1-K1-G6
gaaacatttgaagaggctcaatgcccccaggcattggatgcttgacaagcttggtggtgcttttgcacccaagccatcgtctggtccccacaagtccagggaatgcttgccattgatccttattttgcgaaaccgattgaagtatgctctcacctatagagaagtcattgctattcttatgcagaggcatgttatggttgatgggaaggttaggacggataagacctatccagctggtttcatggatgttgtgtccattcctaaaacaaatgaggacttccgtctactttacgacaccaaagggcgatttcgtctccatgccatcactggcgatgaaaccaagttcaagctctgcaaggttcgatctgtccagtttggccagaacggtattccatacttgaatacatatgatggtcgtactatccgttaccctgat

SEQ ID NO: 33743 - DNA, 376 bp, Gossypium hirsutum
  Clone ID: LIB3149-026-Q1-K1-G7
atgatttccaactcaaccagcgttgctgaggtgttctcccgcattgaccacaagtttgatctgatgtatgccaagcgtgcctttgttcactggtacgtgggtgagggtatggaagaaggagaattctcggaagctcgtgaggaccttgctgcacttgagaaggattatgaagaagtcggtgctgagtcaggcgagggtgatgaggaagatgaagatgagtactaaataagtaatgtttgagtggagggcttgcattttgctacccaatgatttgtttgcttttatcgagtgtttttgcttattctattgtgtgaacttcgactcttcgaagctttgttcaagactctatatggactgcaatagatttgacgagtag

SEQ ID NO: 33744 - DNA, 435 bp, Gossypium hirsutum
  unsure (1)..(435): unsure at all n locations; Clone ID: LIB3149-026-Q1-K1-G8
ctctcagctcttttcttctcttgtgacactgctaatattttttttattgtcgnctccggcgttcgaagatcataaaaaaccggagtcgtttcaaatggctacgagaacggatctagatgggaggccaataaagccgatgacgatatgcatgatcggtgccggaggcttcatcggctcccacctttgcgagaaattgatgtcggagacgccgcacaaggtgctcgccttggacgtttacaatgacaagatcaagcacctcctcgagcctgactctctcccttgggctggccgtattcagttccaccgacttaacatcaagcacgattctaggctcgaaggcctcatcaagatggcagatctcgtgataaatcttgctgccatctgtactccggcagattataatacgcgtccactagacacgatttacagcaattt

SEQ ID NO: 33745 - DNA, 64 bp, Gossypium hirsutum
  unsure (1)..(64): unsure at all n locations; Clone ID: LIB3149-026-Q1-K1-H1
ggcaaatttatactcacttnagcttaatacttcaattgatattgtgaaaggaataattcgtggt

SEQ ID NO: 33746 - DNA, 389 bp, Gossypium hirsutum
  Clone ID: LIB3149-026-Q1-K1-H11
cccacgcgtccggttaaagctctcttctcgttttccttcttgttcagagaggatcaaggatataatactccagaataaacgaagctttgtgcttgagttgcaacagagatctattgaatttaattgtattcttcagaagcatcagaacattagatctgcactggttgaaaggatgccagttttggatgaggcaactttcagtggaaggagagctggctctttgccgacatctgtttcaacttccactgggacagcacgtaatcttccaaatggaattgctaaaccagctgcagctcctgttgcagacttacttgacctaagttcagatgatgcccctgcacctagctcttctggtggtgattttcttcaagatcttcttggtgttgatt

SEQ ID NO: 33747 - DNA, 421 bp, Gossypium hirsutum
  Clone ID: LIB3149-026-Q1-K1-H12
ggtagctcttggaattgttgtcttagaggctattattttcttgttagcccttatggttagggccgccaatgtacctgctgattatgacagtgatgatgagttcattgcaccaaggcaacaaatcagacagcctttaatcaacaggccaccagttccagctacaggtgttcctgttactggcagccttgatcaacgacccagcagaaatgatgcttggagtgcacgaatgagggaaaagtatggtctggatacgtccgagttcacctacaacccttcggagtcaaacaggtaccagcaggcagctccgcaaccagcagaagaaagcagccgttgcaccattatgtgatgatcatctggctggttgggtggtttccgaaggaaggttattgcattgtcgatggagtgacaaacttcatatttt

SEQ ID NO: 33748 - DNA, 427 bp, Gossypium hirsutum
  Clone ID: LIB3149-026-Q1-K1-H2
ggcaaagcaagaaacagatggagacaaagagttagaatcagaacccaaatcttgtaggatacgaagacaacttttttcaagttctgggttgggggaaccagtaggtgatggtgaagatagtggtgctgtgatgcaaacactggttatgggcggtggagaagaaaatggtggtggtaaaatctgtggaggaggaggatcagggggcggcgttggtggtgtcgggtcggggttctttgagagtgatagcactgacgtttactatcagaagatggttgaagccaatcctggcaatccacttttgcttggcaattatgccaagttcttgaaagagattagaggagattatagcagagcagaggagttctgcggcagagcaattctggcgaaccctgatgatggggaaattgtggcactttatgctgatcta

SEQ ID NO: 33749 - DNA, 355 bp, Gossypium hirsutum
  Clone ID: LIB3149-026-Q1-K1-H3
cttggtacgaattccccaacattgggaagattcacagtggtttcttgaaagctttggggatgcagaaacttgtgggttggcccaagtttgtgattccagatcttactcgcaaagcacctttggcttattatgacataagggataggttgaaagaccttttgaagaacagccctgaggcgaaagttatagtgacgggccacagtttgggcggcgccttggctgctcttttcccggcgattttgttttaccacgacgaacagttggtgcttgagagaatggatgggcgttacacgttcggcagcccagagtagtgacgaagccttgccgctacatgagagaattgacaaaatggatc

SEQ ID NO: 33750 - DNA, 429 bp, Gossypium hirsutum
  unsure (1)..(429): unsure at all n locations; Clone ID: LIB3149-026-Q1-K1-H4
gttggcttgtggacggcgtcttcgtttatgttttctcgcggccatcacaagggtctctctggcactttttctcgtctatataaactcaagcagagtcgctcttagaacccatcttcatagcattttctagagagaaagagagagtttcttattagctgctgcggaaggtttattttctttactaaagaataaaagctttttctgcagtagcgttcaagtttttaccaatccaaaatttcaatttaaagaaaaaggagaaaacagaaatggctctctctttcgcaaacgctaagcttttctctactttcgttgtcgatggaatctctaacgttatctccagacgaggatatgcggcggcgtcacaaggaattgtgtcgagtggaataagaggaggagcangaaggagcgctgctgctgtagtcaagaaaa

SEQ ID NO: 33751 - DNA, 294 bp, Gossypium hirsutum
  unsure (1)..(294): unsure at all n locations; Clone ID: LIB3149-026-Q1-K1-H5
gaggaggtgttanataagcttaatacacatctttataggtagcagcgccaaagacacttgctagcctgttctacaagggctgntggatttacacactgccatctgnctctgtactactatcatatccaaccttttgaatatcaatattataatccccatagctcttcacgtcctcatcgactgtggcaaaactccacctccagggttccaatgtccagcacaatgatgaaaaacataaaaaccccatgttcttttttctttcgaagtaacaaatatgttcatgtctcactatat

SEQ ID NO: 33752 - DNA, 266 bp, Gossypium hirsutum
  Clone ID: LIB3149-026-Q1-K1-H6
atgttgttcttcaaatcactgaggtagaggcttataggccaaatgattcagcttgtcatggtagatttggagtcactgcaagaacagcccctgtttttggtcctggagggcatgcttatgtttatctttgctatggacttcatacgatgctcaatgttgttgctgccaaaaaagagctggggctgcagtgttaatacgtgcttcccttcggtgtgggggttggaaaactattccagaccgcgggggcaagaaaactgaaaagcctt

SEQ ID NO: 33753 - DNA, 347 bp, Gossypium hirsutum
  Clone ID: LIB3149-026-Q1-K1-H7
atctaatatagaaagagatatacgtattcagtatagagatcaatcagactttgaatacattgcacagcaatttggagtttttgaagaatggaaggacggtgtaccaaggacagcgtataaaggagtagtggttttcaggtaccacccaccaagacgtgtatttctggttggtcctgactctctacagcagcttgggattgaaaatgcttgaactgaaaaggttagcgaccatgtctggttttgattgtttccatttattttatgatcacacagtaactgaatttggtataatagcaaatttaggaggaattagtgacatacagagtttcagcatgttttagtttttg

SEQ ID NO: 33754 - DNA, 405 bp, Gossypium hirsutum
  Clone ID: LIB3149-026-Q1-K1-H8
cttcttttatgttttttttttgccatcacaaaggtctctctggcacagattctcttctatataaactcaagcacaccccctcttagaacccatcttcatagcattttctagagagaaagaaagagtttcttattaactactgcgaaaagtttattttctttactaaagaataaaagctttttctgcaatatcgttcaagtttttaccaatccaaaatttcaatttaaagaaaatggagaaaacagaaatggctctctctttcgcaaacgctaaacttttctctactttcgttgtccaatgaatctctaacgttatctccagacgaagatatgctgcggcgtcacaaggaatttgtgtccattggaataagacgaagagcatgaatgatcccttcttctttattca

SEQ ID NO: 33755 - DNA, 261 bp, Gossypium hirsutum
  Clone ID: LIB3149-026-Q1-K1-H9
aatgtcccactttccctcagcttgcttcttaatgtctgctcaaagaaagtaccctctggcttccaatgtcgctaaatcagttctctaaattctttctcttcttagtgctgcgtggttttgatgttcttaaggtctagtttgcagtgatcaatgttttcttggtaactggttgtttaatttacgttgttgtagtgttgtttccttttggattgatactgaataaatgtaacactatatgaaaaagaagtttaatttctttgg

SEQ ID NO: 33756 - DNA, 343 bp, Gossypium hirsutum
  Clone ID: LIB3149-027-Q1-K1-A10
catactctatcttcttctttccaagaaatcgatcccgaggatgatatcaagctagccgaaaagaatcaaaaggaaaaagagggcaacatctctcttccgccgtttgggttagcaacttacaagatgcaaggggacgtgtggttgtcctcctccggttgtggaggaggggaccaagaaaggctattgtcacttttgggtgttgccgattcgtggctaaagcaactaagcgttcaacaccatgacttcaactatttctcgggtattcgacatggctaaaaaagccctctacatccctaataaacatggaaaaaagttcactcatcactcatttatcatcaaaagc

SEQ ID NO: 33757 - DNA, 345 bp, Gossypium hirsutum
  Clone ID: LIB3149-027-Q1-K1-A11
gagaaatcaaggaaagaatcaagaaaactaaggatgaaaagaaggcaaagaaagcagaagtagcggcaaagcaacaaaagactcagggcaagggtaacgttccaaagggtggagcaccgaaaggccccaagcttggtggcggtggtggaaagcgttaagttgctaaagttattatctgtttttccctagccagataaaaatagggttagtatgtttattttgaagccaattttatggagttaatggcattgatggccatgatgtttttgcatttatgcttgatcctatactatgaacccagtgttggaagttttgtgatgaagtgcttttatggattttgaattt

SEQ ID NO: 33758 - DNA, 368 bp, Gossypium hirsutum
  Clone ID: LIB3149-027-Q1-K1-A12
cttgctcttcctcctcctccatggaagccccccctcaaggttacaggagaaatgtgggtatttgtctcatcaattcctccaaaaagggtgggattgatgacaatgaagatccaaaagttgcagccctcagagaattaaaggaagaaacaggtgttagctcagctgaaattctcgcagaggtaccttattggctgacatacgacttcccaccagaagtcagggcaaaactgaaacatcagtggggatcagactggaaaggtcaagctcaaaagtggtttctccttaaattcacggggaaagaagaagaaatcaatcttctgggtgatgggagtgagaaacctgagtttggtgaatggtctttgatgaca

SEQ ID NO: 33759 - DNA, 405 bp, Gossypium hirsutum
  Clone ID: LIB3149-027-Q1-K1-A2
ggcccctctcctccatctccaataaagcctcctactgtttgcgataattattacagctgtcccgaaagcaatacctgctgctgtgtctacgagtactatggctactgctttgcttgggggtgctgcccacttgaggctgccacttgctgtgacgaccactacagctgctgtcctcatgactatcctatctgcaacttaaatgaaggcacctgcttgatgagcaagggtaacccaatggcagtgaaggcactgaggcgcactcctgctacgcctttctgggcccatggaagtgttggcgtaaagaacaatgcttaaagagaagcctgggattttatgcagaaaatgatactacagggagaagggaacagtgcttgaccgatctcctctgttttgtcatactgcaat

SEQ ID NO: 33760 - DNA, 405 bp, Gossypium hirsutum
  Clone ID: LIB3149-027-Q1-K1-A3
tgaactgggaggaacatataacccaggactcagagcagtgggagtggcagatgactgtatctaagctatttgaagaacggcctatatggcccaaggaatctgtaactgagcgcttgcttcagaaaggtctaaaatttagccatttggtgcttaaaaggcttctacttggggttgcttactacttctcaaatggaccatttcggagattctggatcagaaaaggatatgatcctcgcaaagatcctgagtctcgcatatatcagagaactgattttcgtgtacctgaaccattgcggaactatgcagatgctagcgtggctaacaatttgacgcataagtggggagatttatgttcattccaagtatttccttacaaattccagatgattttacaactatttgaac

SEQ ID NO: 33761 - DNA, 403 bp, Gossypium hirsutum
  Clone ID: LIB3149-027-Q1-K1-A4
ctctccatttccaccgacaaaagctggtttctggctgtgcagtcgaagtttttctcctcaggaaatggtttaacggtaccatcctggtgctcaataaccaaagtttcattctctacgtcagcattgaatgccgaattgaaggtttttattcgtcagtaacactactttctgtattcacagtttctatctacttctaatatccttttatatatatatatttcacattggatagtggtcattgtattcttagggattgaaccatttgttattattgttgttagacttataggtagattttgtacttcagtgttcatgtttcaccctgattcttgattgtgtggtttggcaatgaagattcaagccatattgtatttgtaaaaacttggaaagcttgcttgatgtc

SEQ ID NO: 33762 - DNA, 406 bp, Gossypium hirsutum
  Clone ID: LIB3149-027-Q1-K1-B1
cgacatcggccttcttgcaaacaatgtcgatatgaacaagagggctggtgagttgactgcacaggaactggacaatctcatgaccattgttgccaaccccaggcagtttaaaattccagattggtttctgaataggcaaaaggattacaaggatggaaagtattcccaggttgtttctaatgctctcgacatgaagttgagagatgacttggagcgtttgaagaaaatcaggaaccaccgtgggctgaggcactactggggcctccgtgtccgcggtcagcacaccaagactactggtcgcagagggaagactgttggtgtctctaagaagcgttgagtgcatatacatatatattctgaggcagaatttatttccttgcttttaggcactgtttgcatgaagaca

SEQ ID NO: 33763 - DNA, 397 bp, Gossypium hirsutum
  Clone ID: LIB3149-027-Q1-K1-B10
ttcttcttcttcaaacataagattttcaaagaagccaagggtggatgagagtgagaaccttactctcaacagtataagacaggccttaattcgacaagaagatagcataatatttagccttttggagagagctcagtactgttataacccagacacatataagcaagattcattctccatggatggatttcatgggtctttgtctttggttgagttcatggttcgggaaaccgaaaggctccatgctcaggttggcagatataaaagtcctgatgaacaccctttcttcccatcatatctacccgagccaatgctttcacctttgcaatatccaaaggttttgcattactgtgctgcttcaattaacataaacaataaggtttggaatatgtatttt

SEQ ID NO: 33764 - DNA, 404 bp, Gossypium hirsutum
  Clone ID: LIB3149-027-Q1-K1-B11
gaaaaagctttttgtgacttatccttcctctcacaagcatatgtattttacaaattatcacaaacccaagatattagtttttataaattcaaacctatccttcaatatcatggaacatctctttttcttaaaaatgaaataaaagattattttgaagaacggggagtatctcattccatattaagacatcattatgggttgagacagaaaatagtttggcattctggaatgaatgaatggaaaaactggttaaggagtcgttatcaatacgatttagttcagaatagatggctaaaattaggaccaggacaatggcgaaatagagtcaatcaacactatctggctcaaaataaacatttaacaaaatgggattcagatgaaaaaaaaaaaaaaagggcgggcgc

SEQ ID NO: 33765 - DNA, 407 bp, Gossypium hirsutum
  Clone ID: LIB3149-027-Q1-K1-B12
atttgttggaggacttgactcagatgttagtgatgatgatcttaggcaacctttttcccagtttggtgaggtcatctccgtaaaaataccacccgggaaaggatgtgggtttgtgcaatttgcaaacagaacgaatgctgaggaagcaatccatagtttgaacgggatgaccataggccagcagactgttcgtctttcttggggtcgtactataggaaacaagcagcagtggaatggaggacatcattgagggcaaggcgatggtggttatggctacggctatgctgcagcaccaaatcatgatccaaacacgtatactggggctgctgctactggttcttcttaagaggggtgcatgacaatcatgaatggcttgtaatctgaacttgcaggacaagttttcaagt

SEQ ID NO: 33766 - DNA, 402 bp, Gossypium hirsutum
  Clone ID: LIB3149-027-Q1-K1-B3
gagcaaaccagggtgctacccagcctaaacccgagcaagagagtatactccagcatgcacagcagcagattgctttgcagaggctaattttgcaaccacaaggtgtgccgacaaaggttgtgtgtttgactcaagcacttaatgttgatgatctcagagatgatgatgagtacgaggacattgtggaagatatgagacaagagggtggaaaatatggtgcattggtgaatattgtcatcccacgcccaaatccgaatggagaacctgccccaggtgtcgggaaggtatttctggaatactcggatgttgaaggttccaaaaaggctcaagctgcaatgaatggtcggaaattcggcggaaatcaagttattggccgttactatccagaaaacaagttcgcac

SEQ ID NO: 33767 - DNA, 251 bp, Gossypium hirsutum
  Clone ID: LIB3149-027-Q1-K1-B4
gggatctggtgactgtcaaaaaggacagattgaatgctgttggagctgcaatatatcaaaagccagctttcaacgactgctactacaaaaggtctaaaaatgcacctccactttgtgaagaatctgatgatcctaatgcagcctggaatgtatcccttcaggcatgcatgcataaagtgcctgaagattcaacagagcggggatccctttggcctgggcaatggccagaaccggttggaacaaccctccat

SEQ ID NO: 33768 - DNA, 404 bp, Gossypium hirsutum
  Clone ID: LIB3149-027-Q1-K1-B7
gagattccgttgtccagaagtcctcttccagccatctctcattggaatggaagctgctggaatccatgaaactacctacaactctatcatgaagtttgatgtggatatcaggaaggatctctacggtaacattgtgctcagtggtggttcaaccatgttccctggtattgcagaccgtatgagcaaggagatcactgctcttgccccaagcagcatgaagatcaaggttgttgcaccaccagagagaaagtacagtgtctggatcggaggatctatcttggcatcactcagcaccttccagcaaatgtggatttccaagggtgagtatgatgagtcgggtccatccattgtccacaggaagtgcttctaaatttacaagtcatttaatggtgagttacattttc

SEQ ID NO: 33769 - DNA, 224 bp, Gossypium hirsutum
  Clone ID: LIB3149-027-Q1-K1-B8
agggaagtcggcaaaatggatccgttacctcgggaaaaggattggctctgagggctgggcacgggggtcccagtcccgaacccgtcggctgccggcgcactgctcgacctgctcccgcgcgagagcggttcgcccctggccggccggggaacgaactggaaccggttccttgggggcccttcccgggcgaacaacaattgaattaaaactgggtccggcaaagg

SEQ ID NO: 33770 - DNA, 79 bp, Gossypium hirsutum
  Clone ID: LIB3149-027-Q1-K1-C1
ctcgggatatacacttttgtaagatacacctatgggttttttaatttccacataataaaaacaagttttttgtgggggg

SEQ ID NO: 33771 - DNA, 374 bp, Gossypium hirsutum
  Clone ID: LIB3149-027-Q1-K1-C11
caagaaatggatcgtagaagtgcatttgcagttgctttgatttgctttgtggtaaccgctgtcggtggtcaatctccggcagcctcacctactaaagctccgccggccgcggctactcctgctactgctcccgctactgcccctgttagcaaacctaaatcaccggctccaactgctgcccctaccacttccccaccaacttcttcaccaccggctgcggctccggagaagtctgcggcggttccagccccatctaaatctgctacggcttcttctcctccggctgctgctccggtgagttctccacctgctccagtacctgtgagctcttctccagccaaatcgcctcccgttgctgcaccgacgactccacc

SEQ ID NO: 33772 - DNA, 408 bp, Gossypium hirsutum
  Clone ID: LIB3149-027-Q1-K1-C2
ggaaaagtgagagcatatgttttaggagctttgtaagcatttcaagaaatcaataaaaaatctccctcacggagaatttccagtaaaactattctcaggaggcttatagccaaaatctaggatttaggagattcaaagagtttctgaaaattttcagagatcttttctggaggcgttgatacggcttggtggtaagacccgagaggcggcagtaaattccagtagccatccgcttgaaaagagaaaatcaccagaaacaggagaatcattccaaccaaacaaatccagaagaacgatggaaggtataaaaaacttaaattttatacaggagtcatatctgaggattcagagtaatctgaaatatttatctgaggaacggcagtgccgtactatctctatgataaacta

SEQ ID NO: 33773 - DNA, 373 bp, Gossypium hirsutum
  Clone ID: LIB3149-027-Q1-K1-C5
cgggcacacgcaatggagccgtagacagtcaagtgaaatccaatccacgaaataatttgatctatggacagcatcgttgtggtaaaggtcgtaatgccagaggaatcattaccgcaaggcatagagggggaggtcataagcgtctataccgtaaaattgattttcgacgaaatgaaaaagacatatatggtagaatcgtaaccatagaatacgaccctaatcgaaatgcatacatttgtctcatacactatggggatggtgagaaaaaatatattttacatcccagaggggctataattggagataccattgtttctggtacagaagttcctattaaaaagggaaatgccctacctttgacccgtatgccctt

SEQ ID NO: 33774 - DNA, 395 bp, Gossypium hirsutum
  Clone ID: LIB3149-027-Q1-K1-C6
ctggaactcacgttgatgcccctagccacttctttcaaaagtattatgaggagggctttgatgtttccacacttagcctgcaacacttactggtcctgttctagtagttgatgttccaagaaacaagaacattactgctgaagttatgaagtcgttgaatattccccggggagtccatcgtgtgcttttcaaaacacttaatacagacaggaggttgatgcatagaagagagtttgcttcagacttcacagggtttaagaaggatggggcgcaatggttggttgataacaccgacatcaaactcgttggaatcgattacctatctatttctgcttatgttgatgctgcccctactcatcatatacttctgaaaagtagggaaaatcgtatagtcg

SEQ ID NO: 33775 - DNA, 396 bp, Gossypium hirsutum
  Clone ID: LIB3149-027-Q1-K1-C8
taaaaacacaaaggacagtgatgaacaccacaaactagaaacttcacctgtgttgcttgaaaaggttgattatagtaaccgtggttctgattcagattccaagggaagtgataagcgcagaactaagcacaaggatggtaagagaaagcataaacggtccgagaggcgtaaagtcacttcagacgacgatgattctagttatgattccgaaatcgatgacaggaaagaagctaagaggaggaaaaaggaagaaaagagattaagaaaggaagaaaaacgtaaacgtagcgaggaacggcgtcgcaaaagaaaagcacggcgtgcagagaagctcaaaacaaaacgtcacgacgatgattctagttcagatggagagcatgcaggaactggaaagtc

SEQ ID NO: 33776 - DNA, 384 bp, Gossypium hirsutum
  Clone ID: LIB3149-027-Q1-K1-D1
gggaaagtggggttagcccaaatgcttcgaggaggtgttataatggatgttgtcacccctgaacaagctcgtatcgctgaagaagccggagcttgtgccgttatggctcttgaacgagtcccggctgatatccgagcccaaggtggtgtggctcgaatgagtgacccacaactcattaaggaaattaagcaagctgttactatccctgtcatggctaatgctcgtattggtcatttcgttgaagcccaaattcttgaagccattggtattggttatgttgatgaaagagaagttcttacacccgccgacgaagagaaccatttcaacaaacataactttaggatccctttcgtttgggatgtcggaatttatgtgaaagcactt

SEQ ID NO: 33777 - DNA, 404 bp, Gossypium hirsutum
  Clone ID: LIB3149-027-Q1-K1-D10
aagcgaaagcttatctcttttcgtctctgaatctgatcaatcaacacctgaaaaggaaaacttacaaacaactactactagtctactacccagcactagaagcagctcgtagccagccatggatgaagagtacgatgtcatagttctaggaactggtctcaaggaatgcatcctcagcggtcttctttctgttgacggactcaaggttctgcatatggataggaatgattactatggaggagagtctacatcactcaacctcattcagctctggaagaagtttagaggaaatgataagcctcctgctcatttgggctctagcagagattataatgtggacatggtccctaagtttatgatggcaaatggcactcttgtgcgtgttcttattcatacggatgtta

SEQ ID NO: 33778 - DNA, 399 bp, Gossypium hirsutum
  Clone ID: LIB3149-027-Q1-K1-D11
cagcaactgaaaagggggtgcaacttggtggtgagatacccattgaattggacattaagaaaggctgggacaaaggcatgccgattgtggtatcaacacctgattccgctgtcttcaaggcttaccatgatgtagctcaaactgttgtcatgagacttgaggatctggcaaaggcatgaaaatactcttgaggttggtcagtgaagtttgcttgtgccaaccatcttcattcccgtgttttcgtggtggtgctttgttcatcctgatataaataatttttaagtttgagcatttttggtcatgcgatgacaatattaagcatttgggaccatagtgattaagaaacttatttgatgaattacacactctgaccactttatctaggagcatacgatttac

SEQ ID NO: 33779 - DNA, 402 bp, Gossypium hirsutum
  Clone ID: LIB3149-027-Q1-K1-D12
cagcagctgagatggggttgcaacttgttggtgagatacccattgaattggacattaggaaaggctgtgacaaaggcatgccgatagtggtatcagcacctgattccgctgtctccaaggcttaccatgatgtagctcaaactgttgtcatgagacttgaggatctggcaaaggcatgaaaatactcttgaggttggtcagtgaagtttgcttgtgccaaccatcttcattcccgtgttttcgtggtggtgctttgttcatcctgatataaataatttttaagtttgagcatttttggtcatgcgatgacaatattaagcatttgggaccatagtgattaagaaacttatttgatgaattacacactcagaccaggttaactaggagcatacgatttacagt

SEQ ID NO: 33780 - DNA, 387 bp, Gossypium hirsutum
  Clone ID: LIB3149-027-Q1-K1-D2
gtttcttggattgcacacccaataagggaatgcctactgaatcagaccgtttcatgatggatccagttagttttgcagtagattttgcaaaaaattggtctcaccctagtcacattgtattgtttgattcagaggagaggcacttgaaggattttctaatttcacattcttttagagaggttagaaggttcttccatgctcactttaaggtggaccgggatcttcaagcatccgttgttgtatacgcttgctgacacgtaaaagtttttaaaacctgttttcgaatctagccttgatctttctgagccttttttgtttccagatgatggaattcatttattctttttagaaattttgtttttttttaaaaaagaatttgaaccttgg

SEQ ID NO: 33781 - DNA, 409 bp, Gossypium hirsutum
  Clone ID: LIB3149-027-Q1-K1-D4
gcaggagcaaaactctgataagacactttggaaacttggaactcttcctgttggccttttagctttctacgggctgacagaaccacttgatcggagatggcatgtgttaggtttaggttacgatcttaacatcgacaaccgcctgatcgagagtgcagcagtcattcacttcaatggaaacatgaagccatggctaaaactagccatcggaaggtataagcctctatgggaaaggtacataaatcttagccacccatatctccaagaatgtgtcacaagttagacaaatgtgctctgtgctctatttttggttccaattgctcgacctccaatgatataaacccatgaaaaggccgatcgcggaaattcttttttgacattgttaggagatttgacatatcttttttgt

SEQ ID NO: 33782 - DNA, 390 bp, Gossypium hirsutum
  Clone ID: LIB3149-027-Q1-K1-D5
ctttcattacagtaaatggtatagctaatttccttgttttgctcaatcaggggaacgagattcctaacaattttctttattgctggaacaagtcttaaccaacatcaagatcaaagtactgcactaagttatatatgcaatcattgcaatactttggcttcatctaaagcctgaaccagccctctgttgtacattgtttcttcttcttttctaatctttttcctttgattaatgagatgtgatgatgatttggcattattttctcaccaggatgaattatgttttagaaattctaatactttgtgtgtctgtgtgtgtttttttatgtattaaattacatattgaatcaatgtttacgtattaaatttaaattcattaatttttatattt

SEQ ID NO: 33783 - DNA, 407 bp, Gossypium hirsutum
  Clone ID: LIB3149-027-Q1-K1-D6
ctggaactcacgttgatgcccctagccacttctttcaaaagtattatgaggagggctttgatgtttccacacttagcctgcaacacttactggtcctgttctagtagttgatgttccaagaaacaagaacattactgctgaagttatgaagtcgttgaatattccccggggagtccatcgtgtgcttttcaaaacacttaatacagacaggaggttgatgcatagaagagagtttgcttcagacttcacagggtttaagaaggatggggcgcaatggttggttgataacaccgacatcaaactcgttggaatcgattacctatctatttctgcttatgttgatgctgcccctactcatcatatacttctgaaaagtagggaaatcgttatagtcgaaggtctaaacc

SEQ ID NO: 33784 - DNA, 391 bp, Gossypium hirsutum
  Clone ID: LIB3149-027-Q1-K1-D7
aagatttcagctggtgtccttggtggagcaaccgcaatttgggtcctttttgagttgattgaataccacctacttgctttaatctgtcacatttcgatactctgtcttgcactactgtttttgtggtccaatgctcataccttcatccacaagtccccacctcgcatccccgaaattcatttgccagaggagccattcctccaagttgcctctgcattggcaattgaacttaaccagggattgaaacttctgcgagatattgcatctggaagaaatctgaaggagttccttatggttatagctgcattctgggttctgtcaattgtggggagttggtgcaacttcttgaccttgttctatatatgtttcgtattgctgcacacggtacctg

SEQ ID NO: 33785 - DNA, 343 bp, Gossypium hirsutum
  Clone ID: LIB3149-027-Q1-K1-D9
gttaaaggttgcctctagacataatactgcaataaaatatagaacgaaaagacagtatctgaaagtatatgggtcaagttgtaatatatttttacaacgaagtaggtgagtactccgaggattgtacctaatacaggcgagcgctagatcaattttaacctaaatactaaaagatctagttagtactttaaataaattatactatgagagcataaaagaggggttttttaagtgttcagaataagaaattaaaataacatatagtaaataaaattaggagatagaagagtaaatgaaatcttgattatgggtgattagcttgcttcgataatcctcatcgact

SEQ ID NO: 33786 - DNA, 222 bp, Gossypium hirsutum
  Clone ID: LIB3149-027-Q1-K1-E1
agcaagcgtacgactgtttgactaagtctaggccatagtagagagtggaagactgatgggaagaatgaagaatgcccaatgcaatgcccaaggatattcacttggagcttcagacgaggtagatgacaaacctattctacctgcaaaagtccatgataagggcgaagcataatgagtctccattgttgtcgtcactgatgacgatgttgctgacaagtctaa

SEQ ID NO: 33787 - DNA, 402 bp, Gossypium hirsutum
  Clone ID: LIB3149-027-Q1-K1-E10
ccctaatctcttcttatcaaggaaatagcggttgctgatcatctctggattctgtatttcttgatctctcgtggatctgatcatttatttgctggattattgtatatctttcaggatcttggatttcaatttccttgtattgaagaaaaaagatggctcgtacgaagcaaactgctcgcaaatcaaccggagggaaggctcccaggaagcagctcgccaccaaggctgcaaggaaatctgcgcctacgaccggcggagtcaagaagcctcaccgctaccgtcctggaaccgtcgcccttcgtgaaatccgtaaatatcaaaagagcactgaacttttgatccgcaagttacccttccagcgtcttgttcgtgaaattgcccaagacttcaagacggatttga

SEQ ID NO: 33788 - DNA, 317 bp, Gossypium hirsutum
  Clone ID: LIB3149-027-Q1-K1-E12
aaaataatattccatcttcataccttttaaccgccggccgactttcacttctacggcgatatcattttttacgtcaagagctactctcagcaaaatttgtcacagatggcttcttccttacgagcattcttgaacagtccagttggtccaaaaacaactcacttttggggacctgttgccaaatggggattagatcttgctggactggtggacatgaataagcccccagaaatgatttctagcaacatgacttcagcaatgagtgtctattcaacaatgatcatgaagatagcatggatggtacaaccacgaaacaa

SEQ ID NO: 33789 - DNA, 404 bp, Gossypium hirsutum
  Clone ID: LIB3149-027-Q1-K1-E4
gcgatttacatgaaggtgaatgggggaaagtcggtaccattgtccattggagttatgtgcatgatggaaaggctaaaaaggcaaaggaagtagtggaagcagtataccctgataagaatttggtcactttcatagtgatcgaaggagatctaatggaagagtataagagctttgtaatcacgattcaagttttgcccaagagcgagggtagtggcagcgtaatgcactggactttggaatacgagaagctgcacggtgggattgcgcattctgagactctgctgcaattcgttcaagatatctctaaagacattgacgcccaccttacccaagcaagcttaacagtatcaaatgttggctattgttgccgctacttgaagcactgttcatctatttaatgaata

SEQ ID NO: 33790 - DNA, 223 bp, Gossypium hirsutum
  Clone ID: LIB3149-027-Q1-K1-E5
atttttagctgttgaagttgtaatcttgctttactgccatttaaccttctgtggttaactgaagtatttttgtttaatatgttatttcaagaaaaaaattgtttgacattgttctgtgctgaaatgcacttattgcttcaaatatagagacttgatttctttagtgaaaaaaaaaaaaaaaaattcaatattaaaaaaaaaaaaaaaataattataataaaat

SEQ ID NO: 33791 - DNA, 166 bp, Gossypium hirsutum
  Clone ID: LIB3149-027-Q1-K1-E6
atttttagctgttgaagttgtaatcttgctttactgccatttaaccttctgtggttaactgaagtatttttgtttaatatgttatttcaagaaaaaaattgtttgacattgttctgtgctgaaatgcacttattgcttcaaatatagagacttgatttctttagtg

SEQ ID NO: 33792 - DNA, 378 bp, Gossypium hirsutum
  Clone ID: LIB3149-027-Q1-K1-E9
ggcgacctttaccacccctattcaactttaaacaggaattatctggggcttcaccggagctcataaataagttgattcctgatcacgtgaaacggcaaataggacttcaacatttcatgcatccgcctgggacatgagacttcaaaaccgttttcaaattcgatgtctgtagtttgatgcgtgacacaaaaagaattactatctttggattatcataggttgatttgaggcctatccggcatcattttgtacgcttccataacacatacagcctttggtagtgtggtggctgccttctctcgatccatatatgtcaatgatgtctctcttgctcttggattctatgagtctactttttttcaaaaaggcttttttttt

SEQ ID NO: 33793 - DNA, 326 bp, Gossypium hirsutum
  Clone ID: LIB3149-027-Q1-K1-F1
gcgctcatcacaaaaaatttctagatcccaatatacccaatgccagatagctgccaagaagcacaagccagaaaacacaatatgtgctccggccacaccttcgtaactccaaatacccggtttgttatagtcccccctgtaatactccaaccgccccatgaattggtattcctaaacgagtcatgaagggtataacgaacataccttgtctccacattggatcaagaacgggatcggagggatcaaaaacggctaattcatatagagccattgaaccggcccaaccagcaaccagagccgtatgcattatatgaacagaaagcaag

SEQ ID NO: 33794 - DNA, 163 bp, Gossypium hirsutum
  unsure (1)..(163): unsure at all n locations; Clone ID: LIB3149-027-Q1-K1-F10
gggaaagggacgcngaaaccgcaacgtcaagggaaaccaccgcaaagagaacaacgaagcaacacaaggaaaaacaagggggcaacacaacccaacggcgaggaacaaagaaacacgggaagccacaggacacaaagagcgaagaaaaagcacgcgaggagac

SEQ ID NO: 33795 - DNA, 402 bp, Gossypium hirsutum
  Clone ID: LIB3149-027-Q1-K1-F11
tacaatcgaaacccttaggcggcgactactcgagcttcataacacccgaagcttttaactatggcggatgtagagacggaggttgcgacggccggtgtgcccaagaagagaacattcaagaagtttagcttccgaggtgtcgatttggatgctctccttgatatgtccactgatgagcttgtcaagctcttccctgctcgagctcgcagaaggttccagaggggtttgaagagaaagcccatggctctaattaagaagcttcgcaaggcgaaaagggaggctccacctggtgagaagccagaaccagttagaacccacctgcgtaacatgatcattgtacccgaaatgattggaagcattatcggtgtgtacaatggcaagacattcaaccaagttgaaatc

SEQ ID NO: 33796 - DNA, 405 bp, Gossypium hirsutum
  Clone ID: LIB3149-027-Q1-K1-F12
gttgctaaacacagtagtcctgtgtgttgttcgaagcctccatgtgcaattgaaggttgcctatcaaagggttttgcagggctctaatcaagtaactcgattttgcagtttgatcgataaaaaagacttcaattctctattacatagatagagcttgcaccctccgagttacaattatagaaaaatgtatcctttgcaagcctatgatttagatatattcatatctctgcaactcgtattttttggacgattttgtgggttaatctcctatttttatctatgaacgtttgtgatgtctgatgcaatatccctgtcctctagatctgttgcaactaaaagaaatatatatgatttgctatatctcttcagtttctttttgctgaaggttgagactgaagagtaagt

SEQ ID NO: 33797 - DNA, 400 bp, Gossypium hirsutum
  Clone ID: LIB3149-027-Q1-K1-F4
cctagacctcttccctcatttaaccgatcctcaaaagaccaatccctagccgccgtactatcgccacaaacagtggccgacggtgaataaatctctccctttctaacctcatttagttcaagatctagcaccttcaatcacaaagcataaaaaagaaagcctcaacctctgttggatttggttttaatggaggaaaaactccgacggtataccaaagcctcaacctctgttggatttggttttaacggaggaaaaactctgacggtataccaatcagttcaggttcgattgacgaggagatggtcatacggaggtgcacgtggtggcgcgcatgaaggtcttacggcactggtctagctagggttcgctaaaatgtttttaggttttgggctgaaatttt

SEQ ID NO: 33798 - DNA, 375 bp, Gossypium hirsutum
  Clone ID: LIB3149-027-Q1-K1-F7
atcttgggttaccgtcagatcttcacggcgaaccccgataatgtccagcatatactcaaaacccgttttaataattacccaaaaggtgagttcttcattaatgttttctttgattttctcggcaacggaatatttaacgccgatggggaagcttggaagttcgagagacaggtttcgagtcacgagtttaatactaggtctcttcgtaagtttgtagaaaccgtcgttgatgctgagcttaacgaccggttggttccgatgttatccggcgctgttaccggcaagacagtgcttgatttgcaagatgttcttcagagatttgcttttgataatatttgcaagattgcttttgggtatgacccagaatgtctttta

SEQ ID NO: 33799 - DNA, 380 bp, Gossypium hirsutum
  Clone ID: LIB3149-027-Q1-K1-F8
cccacgcgtccgggcctagtcaagcccgtcattggttcacccccagtgatgccatgctgttcccttctcgatggcctcgtcgatcttgaagctgctgtttgcctttgcaccgctatcaaagctaacatcttaggcatcaaccttgacattccagtttctcttagcttgctcctcaatgtttgctcaaagaaagttccttatggcttccaatgctagtttaagtcaatgatttttcccctacattctttctcaacttctttatggtttgggtttgggtttttttcgagttatgatgccataacttcattgttttaatgtggtttcatttgtaaatttaatttccttcggggggatagatatagaataaggttaatactttt

SEQ ID NO: 33800 - DNA, 204 bp, Gossypium hirsutum
  Clone ID: LIB3149-027-Q1-K1-F9
gaaaccgggacgaccagcgccgggcgacaaaccaccccaggaacggaaacagaaaaacaggggcgaaccgggcggaaaaaagagagcccgacacgagaaacggaaaaggacgcaacaagcacgcacccgcaggacaagagacgcaaaaccggggcaaaacgaaggaggagcagaggcgagacacaaaaagaaagacaaaccggg

SEQ ID NO: 33801 - DNA, 373 bp, Gossypium hirsutum
  Clone ID: LIB3149-027-Q1-K1-G1
cacctatccaatagcagctccagctcttctagtgacgaggaagaaggtgaaggcggagagaagaagaagaagaagaaaaaggagaagggaaagaaagaacaggacagtgcagtcccagtggagaagtgcgatgaggtagcaacagttcaccactcagagacgccggaaaagaagggtttcatggataagatcaaagacaaactcccaggacagcataagaaagatgaagaggacaccacccaaccaccagctgctgctgccccaattgagaacgaccaccatgaaggagagacaaaagagaagaagggatttttggtgaaaatcaaggagaaaattcctggttaccactccaaaacagaggacgagaaggaaa

SEQ ID NO: 33802 - DNA, 407 bp, Gossypium hirsutum
  Clone ID: LIB3149-027-Q1-K1-G10
gggagcgtatatttcctcggttataaaactttcataccagaggaaggtgatgattctggtatgtctagtgaagaagaaagcgaggaggaggaagatgaggagcttcctgtcgctgctgctgctgctgcagtaaatggaaaagctaagccagatgcaaaaacagccaaggctaatgctgggaaacctgatgctgttaaacaatctggcaagatagcagaacctagcaataacaggaaatctgaggatgaagatgatgatgatgagtccgaggatgagagtggttctgatgaggaagatgattctggtgacgatgatgagtctgacgagatgtctatggatgaaagttcagatgacgaggatgaggagacacctatgaaggtcgagtcaagcaagaagatacctgtcga

SEQ ID NO: 33803 - DNA, 403 bp, Gossypium hirsutum
  Clone ID: LIB3149-027-Q1-K1-G11
cgatttggttgaaatggtcttcgcaaaaggagatcccgggatcgccgccttatatgataatctccttgtttctcaagaactatggtcattcggagagcggttgaggactaactatgaagaaactaaaagccttctcctacaaattgccgggcacaaggatcttctcgaaggtgatccgtacttgaagcaaagactacggctccgagactcatacataacaacactaaatgtctgccaagcctacacactcaaacgtatccgtgacccgagctacgacgtcaagttccgtccacatatctccaaagagatcatggaatcaaacaaatccgcggatgaactcgtgaaactaaacccgacgagtgaatacgcgcccggtttagaagacaccctcatcttgaccatg

SEQ ID NO: 33804 - DNA, 410 bp, Gossypium hirsutum
  Clone ID: LIB3149-027-Q1-K1-G12
gcaaagtttataatagaggcagcaaaccatcctacagatccagaagcagatgagattctatcaaagaaaggagtaataatactacccgatatatatgcaaatgcaggaggggtgactgtcagctactttgagtgggttcagaacatccaaggtttcatgtgggatgaggagaaagtgaaccaggagctgaagaaatacatgactaaagcttttcataacatcaagaacatgtgccagtcgcacgactgcaatctccggatgggtgcatttacacttggggtgaaccgtgttgcccgtgcaactatcctgagaggatgggaagcataaacgcctcccttccggcttttatttctcttagtttatagtctccattgaaaagcacaagcaataactttcaagaattcttagct

SEQ ID NO: 33805 - DNA, 387 bp, Gossypium hirsutum
  Clone ID: LIB3149-027-Q1-K1-G3
tcgcatcaaccatgaagagacttggctgctcagattcattgagtgctttgatgtcaatctgcccaacttcagatgaacgtagtccaagaaacaacaatgtttacagtcgagagtttcagtcgatgttagaaggattcgatgaagaaggttgttttgaagaattaacagtcggccatggcgggggtgccaagaagagacgattaagtgtggatcaagtgaaggcattggagaagaattttgaagttgaaaacatactcgaacccgacagaaaatcgaaactagctcaagaacttgggttggagccacgacaaagttgctgtctggttttaaaacccacgtgctagatggaaaacaaagcatttggaaagagattatggaggtcttaag

SEQ ID NO: 33806 - DNA, 314 bp, Gossypium hirsutum
  Clone ID: LIB3149-027-Q1-K1-G4
gggagcgtatattgactcggctataaaactttcataccacaggaaggtgatgactctgggatgtctagagaagaagaaagcgaggaggacgaagatgaagagcttcctgacgctgcagacgctgctgcagcaaataggaaaagctaatccagaagcaaaaacagtcaaggctcaggctgataaaccaagatgctgctaaacaatctggcaagatagcagaacctaacactaacatggaaatttgaggatgaacatgaagatgacgattaccacgatgagagtggttgtgacgaggaaaatgatcctggagacta

SEQ ID NO: 33807 - DNA, 378 bp, Gossypium hirsutum
  Clone ID: LIB3149-027-Q1-K1-G5
gtgagcatgcaggtattgactttgttaggctgccatgcaagcatttctactgctggaaatgcatggaaacttattctaatatgcatatctctgacgccaccataaccaagctgcaatgccctgaagctaaatgtggtggtatggtccctcctgctttattgaaacagttgcttggcgatgaagggtatgaacgatgggaatcccttatgctacagaaaacacttgaatcaatgtcagatgttgcatattgcccaaggtgtgaaacaccttgtatagaggatgaagagcaacatgcacaatgctccaagtgcttctttagcttttgtaccctttgtagggagcgccgtcatgttggcatagcttgtatgacaccagaaa

SEQ ID NO: 33808 - DNA, 395 bp, Gossypium hirsutum
  Clone ID: LIB3149-027-Q1-K1-G6
ttgttggtatgggcccggacaaaaatgggcttttacatgagattaactaggagaataaaggcacttgagtggagaacacgtggctatccgtttgtgaggacgtccttcttcgcatcaccgggaagtggctttacttgctgataggacatcaactctgttgtgggtgaaatacgaggcacattccacatgtgtgatactaagatttcaatcacgttatagttctgaaaggctgcaaacacttcgatctcgggacagtgctacaagctaaaatacgtgctgtttccgtagtgccaaggaagtgctttatcgggtttttccatcctgaggggatggatgagggacaacttgactttttgcattgtgcaatgtcattcgataacatctgggacgagatt

SEQ ID NO: 33809 - DNA, 384 bp, Gossypium hirsutum
  Clone ID: LIB3149-027-Q1-K1-G7
gaggcagccatgtttgggtggaccattgctctttgtctaactgcaacgatgggctgatcgacgccattcatggatccaccgccatcaccatttctaacaattacttgacccatcataacaaggtcatgctattgggacatagtgacacttacaaacaagataagaacatgcaagtcaccattgcctttaatcactttggagaaggccttgtacaaagaatgcctagatgtaggcatggatactttcacgtggtgaacaatgattacacgcactgggaaatgtatgcaatcggtggcagtgctgatcctacaatcaacagccaaggcaatagatttcttgcaccaaatgatgcagacaacaaagaggtgacaaaacatgaggatg

SEQ ID NO: 33810 - DNA, 408 bp, Gossypium hirsutum
  Clone ID: LIB3149-027-Q1-K1-G8
gaggcagccatgtttgggtggaccattgctctttgtctaactgcaacgatgggctgatcgacgccattcatggatccaccgccatcaccatttctaacaattacttgacccatcataacaaggtcatgctattgggacatagtgacacttacaaacaagataagaacatgcaagtcaccattgcctttaatcactttggagaaggccttgttcaaagaatgcctagatgtaggcatggatactttcacgtggtgaacaatgattacacgcactgggaaatgtatgcaatcggtggcagtgctgatcctacaatcaacagccaaggcaatagatttcttgcaccaaatgatgcatacaacaaagaggtgacaaaacatgaggatgcgccgcaaattcaatggatgcatt

SEQ ID NO: 33811 - DNA, 256 bp, Gossypium hirsutum
  Clone ID: LIB3149-027-Q1-K1-G9
gtgattcatctagggctttcaattgcaggaagcaaattttgattcttgattttaacatcgtgacgctgttagtgtaaacaataaaatcattttattctatgtaagtttgtcattacattgatgagttcaaaaaaaaaaaaaaaaaaaaaaaaaaaaaaaaaaaaaaaaaaataaaaaaaaagggaggataatttaaaggttcctgcgctgtacgaacgctctaatgcgacgtcataggattttcatatagggtcac

SEQ ID NO: 33812 - DNA, 409 bp, Gossypium hirsutum
  Clone ID: LIB3149-027-Q1-K1-H10
gggaagctaaggccaaccctttttgatatgtttggcgaagatgcaagccccaaagtgaagaagtttatgaacatcattatgaccaaactgcaggggagtggcgatgacggtgaagggggtggtttcatggggaaggttgggaatctggcactacagtttcttaaacaaaagctggatgatgacgaaggatacggtaaaccggcacttgagactgaagtgagtagcaagcaagaggcttatgcaggagctggtaagcactctcttcctgacagtggaattcttatcagcggctgccagaccgaccaaacttcagcggatgccagcccatcagggaatgcaagcaaagcttatggagcacttagcaatgctattcaaaccataattgccgactcagatggctcaattacta

SEQ ID NO: 33813 - DNA, 188 bp, Gossypium hirsutum
  Clone ID: LIB3149-027-Q1-K1-H11
gtttcattgccactggtggagaagcaatttaagttcccacatttgacagtgcttagtgaaactttggtccagtatttgggtttgcttctgggaaatacccacattgaggctggttgtttagtttgagattgatctttttccttttctgtatgataagtgggtgtgccaatttcaaagattttaacttt

SEQ ID NO: 33814 - DNA, 401 bp, Gossypium hirsutum
  Clone ID: LIB3149-027-Q1-K1-H12
ctcaactgcagttgtggagccttacaatagcgttctgtccactcattcgcttcttgaacacacagatgtggctgtgctcttggacaatgaagcaatttatgacatatgtcggagatccctcgatatcgagagaccaacttacaccaatttgaaccggttgatttctcaaatcatatcgtccttgacaacttctttaaggtttgatggagccattaatgtggacattacagagttccaaaccaatcttgtgccttatcctcgaatccacttcatgctctcttcttatgcgcctgttatctcagctgagaaagcataccatgaacagttatcagttcctgagatcacaaacgctgtgtttgagccctcaagcatgatggcgaagtgcgatcctaggcatggga

SEQ ID NO: 33815 - DNA, 205 bp, Gossypium hirsutum
  Clone ID: LIB3149-027-Q1-K1-H2
gcatttgggatgcttattgtaactggactttaataagtaaacatttattcattttttttgtttctgattttaaggcccgggtaaatttgggttattacaattattggtcaaaatatacttttattatgtattagtttataatttcatcattttttaaatgataaacagtttttttttctataaaaaaaaaaatatattaccatat

SEQ ID NO: 33816 - DNA, 410 bp, Gossypium hirsutum
  Clone ID: LIB3149-027-Q1-K1-H4
gtttcttaggtgggctttgcgccctcctggttattacaagagctggcatattggggtccgtgctaagacatcaaagaagcttgttgccttcattactggtgtgcctgctagaataagggtgcgtgatgaagttgtgaaaatggcagagatcaatttcttatgtgttcataagaagctgagatcaaagagacttgctcccgtgatgattaaggaggttactaggagagttcatttggagaatatttggcaagcagcttatactgctggagttgttcttccaacaccaattactacttgccaatactggcataggtcactaaaccccaagaagcttattgatgttggcttttctaggcttgggcctaggatgacaatgagccgaaccattaaactctacaagttacctgatc

SEQ ID NO: 33817 - DNA, 51 bp, Gossypium hirsutum
  Clone ID: LIB3149-027-Q1-K1-H7
catttacagtgacctttctttttctagtggatttggtaaatcatttgccct

SEQ ID NO: 33818 - DNA, 360 bp, Gossypium hirsutum
  Clone ID: LIB3149-028-Q1-K1-A1
ggaatgcaagattggaattatgcctggatacattcacaaaccaggtcgtgtaggaattgtttctcgatcaggcactttaacatatgaagcagttttccaaacaactgcagtaggtctggggcaatcaacctgtgtaggaattggtggggatccctttaatggaaccaacttcgttgattgtgtgacaaaattccttgctgatcctcagacagaaggcatcattctgattggtgagatagggggcactgcagaagaagatgccgctgcactgataaaggaaagtgggactgaaaagcctattgttgctttcattgctggactcactgcttcttcaggacagcgtatggggcatgctggagc

SEQ ID NO: 33819 - DNA, 401 bp, Gossypium hirsutum
  Clone ID: LIB3149-028-Q1-K1-A10
gtgaaacctccaatcaagttgccaccggttgttcctccaatagttaagccacccattgacctccctccggttacagtccctccaattaacctccctccagggacggttcctccagtaactaagccaccaagtgggaaaccctgcccaacaccaccaaccaaggacacttgccccattgacacactgaaattgggtgcttgtgtggatctgctgggagggttggtgcacattggactaggtgacccggttttgaatcaatgttgtccggttctttcaggacttgccgagctcgaagctgcggtctgcttgtgcaccaccctcaaacttaaggttctcaaccttaaaatttatgtgccactggctcttcaactccttgtcacatgtggggaaaacaccccttc

SEQ ID NO: 33820 - DNA, 82 bp, Gossypium hirsutum
  unsure (1)..(82): unsure at all n locations; Clone ID: LIB3149-028-Q1-K1-A11
ttaaatggcaaaccattttaaaattgggatattacatttaatcttccttgtttnaaaaaaaaaaaaaaaaagaagataaaaa

SEQ ID NO: 33821 - DNA, 164 bp, Gossypium hirsutum
  Clone ID: LIB3149-028-Q1-K1-A12
gaatgtttaactgccaaccattctttatatttttatattacattaaatcctccttgatgaggaatcatttaaagaatgtgccgtcctaataaactcaaagatttccaattcgatcccaaattattgttacaataagaagaatcaaccattcttcattaaaatta

SEQ ID NO: 33822 - DNA, 356 bp, Gossypium hirsutum
  Clone ID: LIB3149-028-Q1-K1-A2
gccgaaaaatatgatggtcggagaaactcaccgtcttaatccgacggtccatgttccaccatggcctaacctcgacgatgatcaaacggccgagatttactctccactcaactacaatgcagccgatagtcacttcaacaacaacggcggcaacccggttcatttccatgaagcgttagcagcgttacaacgttacttgccgtcgaacgaaccggactttgtctacccagattccgatcttccggttctcgaaaacgcggattcttcggtcgacgcttactcgtgcgatcatttcaggatgttcgagttcaaaatccggaagtgtccacgtggccgagcccatgactggaccgagt

SEQ ID NO: 33823 - DNA, 430 bp, Gossypium hirsutum
  Clone ID: LIB3149-028-Q1-K1-A5
gggttcacaacaataccgagctttaacgatccccgagctaactcaacaaatgtgggattccaaaaacatgatgtgcgcggctgatcctcgtcatggaaggtacttaacagcctcggcaatgtttcgaggcaaaatgagcaccaaggaagttgatgaacaaatgatcaatgtccaaaacaagaactcttcgtactttgtggagtggattccgaacaatgttaaatcaagtgtttgcgacatcccaccaactgggttgacgatgtcatcgacgtttatggggaactcgacatcgatacaagagatgtttcgacgtgtttcggaacagttcacagtgatgtttatgaggaaagcatttttgcattggtatacaggggaagggatggatgaaatggagtttactgaggctgaaagtaatatgaatgatttggtt

SEQ ID NO: 33824 - DNA, 418 bp, Gossypium hirsutum
  Clone ID: LIB3149-028-Q1-K1-A6
ggcactttggaaaggtgcaggccccaccgtagtcagagccatggcattgaacatgggaatgcttgcctcttatgatcaaagtgttgagttttgcaaggattcgcttggcttaggagaagctgctacggtgctaggtgcaagtactgtttcaggtttctttgctgctgcttgcagtttgccttttgattatgtcaaaacacaaattcagaaaatgcaacctgatgcttcgggaaagtatccatatagcggctctttggactgtgccatgaaaaccctcaaggctggaggaccattcaaattttacaccgggttccctgtatattgtgttaggattgctccgcacgtcatgatgacttggatattcctcaaccagattcagaaggcagaagaaaaaatagggttgtagagcgtggtcact

SEQ ID NO: 33825 - DNA, 337 bp, Gossypium hirsutum
  Clone ID: LIB3149-028-Q1-K1-A7
cgcaaataagtcagttaaggagataattgaagaacttaaaaaacatcaacaaagtacagaagcttcagtggtcgagtgggcaaatgaagctctgcagggtctcggaaagggtgctccattttctcttttcttaacacacaactatttctctagagttgcatctggatatggtaaacagaacaacgaatttacgatgctaaaaggcgtcatgaaaactgaataccgtgttgccttacggtcttctctgcggaatgattttgctgaaagcgtccgtgcagtcttgattgacaaggataagaatccgaagtggaaccctgccaccttagacgaagttgac

SEQ ID NO: 33826 - DNA, 345 bp, Gossypium hirsutum
  Clone ID: LIB3149-028-Q1-K1-A8
cacagttaaggggactatggatgttaaggccttggctgaggctttgaaggacaagctgaagaagcatgttgagattgtagctcctaagaaagagaaggatggcaacaaggagggcggcgacggagggaagaagaagaacaagggtggtggtgaagatggtgggaacgaagctaatggtggcaagatggaagggaaccgaatggagttcatgcttccaccccaatttggacacatgcctggttacattccgggttatcccggatacgggcacccagcttacgcgtatggaaacccgtatccgcacccacacgggcatggttaccctgggtatgtgccaagttaccc

SEQ ID NO: 33827 - DNA, 66 bp, Gossypium hirsutum
  Clone ID: LIB3149-028-Q1-K1-A9
catgctgaatctgaaatgggaatgggactcgccctgtaccttaacattaaacgctgtgggtgttat

SEQ ID NO: 33828 - DNA, 347 bp, Gossypium hirsutum
  Clone ID: LIB3149-028-Q1-K1-B1
atttggtgatcagggttaccaagttaccaagaagtcggatgtcaataaaagtggttatcttcatcaccatgaggaacctggcgccggtgatttatatcgtcgtcaagcttctcctcatagtgctgtttcttcgttttctagtggtagagtcaagagagaaagagaggttagcagcgaggaattagaggtagagaagaattcgtctagagttagtgatgaagacgaagacggtgttaatgcaaggaagaaactcaggctcaccaaagaacaatctgctcttctcgaggaaagcttcaaacagcatagcactctcaatcctaagcaaaagcaagctttagcaaagcaat

SEQ ID NO: 33829 - DNA, 427 bp, Gossypium hirsutum
  Clone ID: LIB3149-028-Q1-K1-B10
caaacacttcttattaccgacgatctcttcaggaattcggacgtaattacgaggcaaaagtatgtcagtttggtgaactccgttaagaattcggggggcactgctcacattttttcgtctatgcacgtatcaggggaacaactggcacagctgaccggcattgcggcaatccttcgtttccctcttccggatctggaagacatcgaaatgtagggtaccattttctgcatatgttcgagtttccggcgtcgagattttatactgtactcgtatttctccccctttttctttcatatatatatatataatgcgttaatcagtatttgaactgtatcatatctagaaacagctagtatttaatcaactctagaagtgtaacattatttcattcagtgtgttatggaaaaaaaatattttaatatttttt

SEQ ID NO: 33830 - DNA, 422 bp, Gossypium hirsutum
  unsure (1)..(422): unsure at all n locations; Clone ID: LIB3149-028-Q1-K1-B2
gaaaggatctcggagactcaccaaagcacgaaagccaggatctttcagaaaatggattcctattcgaagagtgcataaccgcatggataagctcacactaacccgtcaattttggatccaattcgggattttccttggggggtatcagtaaggaattggaatgtaataatattgattcatataggaggaaaaggttctctattgattcaaatgctgtacctatgggatagggatagagaaagaggaaaaaccgaagatttcacatagtgcttttgatcgaaaaatcaatctgatttatttcgtacccctcgctcaatgagaaaatgggtcagattctataaggatcaaacctatgggacttaggaatgatggaagggaataaaantaaaaaaaaaaaagaaatctaaaaaagagggggaaaa

SEQ ID NO: 33831 - DNA, 353 bp, Gossypium hirsutum
  Clone ID: LIB3149-028-Q1-K1-B3
gttttcctccgccgttagtaaaagcttggaagaagactaacgtggtgcaaaaaatgggccccaagcgaggtggaaaggtggccgtcccagccaagaagaaacaagagaaggttgtcaatccattgtttgagaagcgtccaaagcagtttggtattggaggggctctacctccaaagaaggatttgcatcggtttgtgaagtggccaaaggttgtccgcattcaaaggaaaaagagaatccttaagcagaggttgaaggtcccacctgcattgaaccagtttaccaagactcttgataagaaccttgcaacaagtttgtttaagttgcttctcaagtacaggccagaggacaag

SEQ ID NO: 33832 - DNA, 403 bp, Gossypium hirsutum
  Clone ID: LIB3149-028-Q1-K1-B4
atagatgcaaattgcgctaatctggatcaggctgtatatatagcgaacgcggtgtcatgtattgattctgagaacattccatggaggctccaaaaggcccaactttatagactttcgaatgcagatgctacagccgcatgctcaccgattatggtctgaagtggttcttataacaggacaagattagatccttcctcggatatagtgaatgaattggggctgcactgacaattgacaaattacgggtaagctgctttttggtggttttccttgttggtaagtggcatttttcaaatgggtttttcagtgatgaagagttaagagaaggactgaagtggttggccgataaatcacctctacaacctgttcttagcagtgtgaagatgcgcgaacttgtcatgtc

SEQ ID NO: 33833 - DNA, 216 bp, Gossypium hirsutum
  Clone ID: LIB3149-028-Q1-K1-B6
gcagctagctacaaaagccgcgcgtaagtccgctccggcgaccggtggagtgaagaagcctcaccgtttcaagccaggaactgttgctttgagagagatccgtaagtatcagaagagcactgaactgttgatcaggaagcttcctttccagaggttggtgagggaaatcgcgcaagatttcaagaccgatctgaggttccaaagcagcgccgtcgc

SEQ ID NO: 33834 - DNA, 384 bp, Gossypium hirsutum
  Clone ID: LIB3149-028-Q1-K1-B7
tgaagatccaagtattttctctctctttttctctctcatttttgtttctctagtggtttttgttaaagattatacctttacttcgtttctactcaaaaaatcttttttttttgcttgtttgcagacttgtgtcctcaaagttaacatacactgtgatggatgtaagcacaaagtgaagaaaatcttacaaaagattgaaggggtttttaagaccaccatagattctgagcaaggtaaggtaacagtgttgggaaatgtagatcctaatgttctaataagaaagcttgcaaaatcagggaagcatgcagagccttggggttctgcaaaagctaacaacaatcaagcacatcttgcccaccagttcaagaacatgcagatgcttga

SEQ ID NO: 33835 - DNA, 341 bp, Gossypium hirsutum
  Clone ID: LIB3149-028-Q1-K1-B8
ctagccccgaaactataaggagggcacacgctgttcatcctcttactgccgtacaacttgagtggtcgctttggactcgtgatgttgaggaagaactaattcccctttgcagggaactcggaattgggattgttgcatatagtccccttggtcatggtttctttgccggtaaagcaaaggaggatacctctaatagttctctggaagtgtacccaaggtttcaaggagaaaacttggagcaaaataggatcctatattcgaaagtagagaagttggctgaaaagcatggatgtacaccggcacaacttgcacttgcctgggttcttcaccaaggggatgat

SEQ ID NO: 33836 - DNA, 277 bp, Gossypium hirsutum
  Clone ID: LIB3149-028-Q1-K1-B9
tacatcagcttgagaggcgtacaacaatgtgctgaccactcattcactccttgagcacactgatgtcgctggtcttttggattacgaagcaatatatgacatctgcaggcgttctttggacattgaacgacccacttatacgaatcttaaccgtcttgtctctaaggttatctcatttcttaccgcatcttttaggtttgatggagccctgaatgtggatgtgactgagtttcagactaaccttgttccatattccaagatccactttatgctttct

SEQ ID NO: 33837 - DNA, 366 bp, Gossypium hirsutum
  Clone ID: LIB3149-028-Q1-K1-C1
aaaagtcgaagctgggtttcaccgtctatccttcacctcaggtttctacatcagttgtagagccttacaacagtgtgctgtccactcattcactccttgagcacactgatgtcgctgttcttctggataacgaagcaatatatgacatctgcaggcgttctttggacattgaacgacccacttatacgaatcttaaccgccttgtctctcaggttatctcatctcttaccgcatctttgaggtttgatggagccctgaatgtggatgtgactgagttccagactaacctggtcccatatcccaggatccactttatgctttcttcttatgcccctgtcatttcagctgagaaggctaccatgagca

SEQ ID NO: 33838 - DNA, 383 bp, Gossypium hirsutum
  Clone ID: LIB3149-028-Q1-K1-C11
aatctatcagctgctaactgctacaagtctgagcatttgaagaagcctgagaattgggcgttggttgagaaggccaagtacttctatattgctggatttttccttactgtatctccggaatccatacagcttgttgctgaacacgctgctgcaaagaacaaggtgttctcaatgaatctttctgctccatttatttgcgagttcttcaaggatgcacaagagaaagcactaccgtatatggactttgtctttggcaacgaaactgaagcaagaaccttctcaaaggttcatggctgggagactgatgatgttgcagagatagccctgaagatttcacagtggccgaaagcttcttgaacatacaagaggactactgttattac

SEQ ID NO: 33839 - DNA, 425 bp, Gossypium hirsutum
  Clone ID: LIB3149-028-Q1-K1-C12
atggtgctggaatcggccctggtgtctatgacatccactctcccagaataccatcaaccgaagagattgctgaccgaattaacaagatgcttgctgtgcttgagacaaacatcttgtgggttaacccagactgtggtctcaagactcgcaagtatgccgaggtgaagccagccctgaacaacatggttgcagctgccaagctgctccgcacccaacttgcgagtgccaagtgagaggcatatccaaggtcggacatcatcctttatatcgaagatgatccagaggaaatttgtcttaaatcatttgaataactgtgtgttggaagtatttgttaggcgtatcatatgcccctctttgaggccaattgttttccttttcttttttgggtatttcccctctaaatattttgtatttttggggatata

SEQ ID NO: 33840 - DNA, 260 bp, Gossypium hirsutum
  Clone ID: LIB3149-028-Q1-K1-C2
aaaggaggaggagaaaagccagttgcagcacagcctgcggcagctgtgcaatcagccgtgggttccaagaagtcaaagaagtaaaaaaaaaaaaaaaagtaagatttcttactgaagagtactgatcgaacgtgacttttagatatttagtaatgtcttaagtaattttgttgagccaatgttgtgtttttttgggttgatatgaacttttgttcttttaggcggattaagctttaaatgtttattattattatcagttt

SEQ ID NO: 33841 - DNA, 393 bp, Gossypium hirsutum
  Clone ID: LIB3149-028-Q1-K1-C3
tgattattcaacgaaactacatgtgatcctggaagtcctcttaaaggcaatggcacggtcactaaacttggaggagaaccagtttttgcaacaatatggagaccaagcaacaatgcaagcaagatttaacttctatcctatatgtccaagaccagatcaagttcttggggttaaacctcatgcagatggatcagtaatcaccatgctgttgcaagacaaagaagtggaaggtcttcaagtcctgaaagatgatcaatggtttaatgttccaatcatacctcaagctcttcttatcaacattggagatcaagcagagataatgagcaatgggatattcaagagcccagtacaccgagtggtaacaaactcaaagagggagaggattactctagc

SEQ ID NO: 33842 - DNA, 395 bp, Gossypium hirsutum
  Clone ID: LIB3149-028-Q1-K1-C4
ggatttcttccagtgcgaagagcagcagccatggttctcaagacggagctttgccgatttagtggtgccaagatataccctgggaaaggcatcagatttgttcgtggtgattcccaggtcttcctcttttccaattcaaaatgcaagaggtacttccacaaccgcctgaagccatcaaaacttacatggacggccatgtacaggaagcaacacaagaaggacattgcccaagaagctgtgaagaagaggagacgtactgcaaagaagccatactccagatccattgtgggtgccaccttagaggttatccagaagaagaggagtgagaaacctgaagttcgtgatgctgccagggaagctgctctccgagaaatcaaggaaaggatcaagaagac

SEQ ID NO: 33843 - DNA, 412 bp, Gossypium hirsutum
  Clone ID: LIB3149-028-Q1-K1-C5
cggaggcatgacaacggaagaatatcggtgccatttcagcatatgggcattagctaaagctccgttgttgattggctgtgatgtgaggtctatggataatgtgacatttgaattggtagccaataaagaggttattgatgtcaatcaagataaacttggtgttcaaggtaaaaaggtgaagaaagaaggggatcttgaggtctgggcaggcccattggctaacaatatggtagctgtggtgttatggaacagaggatcttcctcagcaaacatcacagcttattggtccgatataggccttaagccatcaacggttgtcgattctcgagacttgtgggcgcattcgacggagacgggtgttgaagatgagatatcagcggaagtggattctcatgcatgcaaaatgtacact

SEQ ID NO: 33844 - DNA, 361 bp, Gossypium hirsutum
  Clone ID: LIB3149-028-Q1-K1-C6
cgaacgctgttgacgctgtgtagaaatgccgttcagaaggtacgttgagatcgggagagtcgctctcgttaactacagcaaagactacggcaagctcgtcgtcatcgacgatgttgttgaccagaacagagctgtagtgtgatcccccagatatggagaggggccaagtgaactctaacaggcacaaaatgactgattttgccaatgtgattcctagcgtaccaaagaagaagacactgattgaagcaatggaaaaagctgatgttaaaaacaagtgggagaatagctcatggggtaaaaagctgattgttcaaaagaagagagcatctctcaatgacttcgacagattcaagatcatgtt

SEQ ID NO: 33845 - DNA, 362 bp, Gossypium hirsutum
  Clone ID: LIB3149-028-Q1-K1-C7
gacattttatggatgttggggtgcactgctagtacgcagcttcttaggaagcacttagtatgaaaaattagtgggaaaataatggatggaagaaccctacatgaaaaaattccgatttatgttgtatatttggccgatagaaacctatctagttctatgtggatcgattcttcttttctggcatcggtcgatgtaatggactattcattacttgttggggtggatgaggagcgcaaagagctggttttgggaattatcgatttcatgagacaatatacttgggacaagcacttggagacatggggtccggcatcagggatactatgtggccccgcgaatgcctccccaacaatttttttttc

SEQ ID NO: 33846 - DNA, 356 bp, Gossypium hirsutum
  Clone ID: LIB3149-028-Q1-K1-C9
gaaaatgcctggcaggatgggaggaagcaaaagaaagatccgaaagctcaagattgtgaaaatcgacaatgagcttcgagttgtgatgatcaaaggtgctctccctggtaagcccggaaatctgctacgtataaccccatctaagattgttggaaagaacataccaaagagctagtttcatgtattggactcatttcattttagctagtatttcagttgtgggaacttttgatatattcattggtgtatgagtttaagtcgaaatttaccttttcttttattgagttgattcctgaatttggaaatggcttctcaatttgtgaactacttaaattgatcagtcaattctacttgtc

SEQ ID NO: 33847 - DNA, 340 bp, Gossypium hirsutum
  Clone ID: LIB3149-028-Q1-K1-D11
tggttccccaatcaccatattccttgtatcctccccaatattcttcacaaatgggagggcaaatcgggttgaaggagacagacgaaattataggcatgaaagctaacaggagacgggtagatgattcctttacagttccttggatcagccctcaatccactagctccaagagatctaagcgtctctggtaggatcagattttcaaagtacaaaaacttcaacttctcttatacttggacaacatcattgccctttctttgcattttctcatttcttgctaatttagatttcagtgtgatgtttacctttcccccctactctaatagagccggtttcgttt

SEQ ID NO: 33848 - DNA, 362 bp, Gossypium hirsutum
  Clone ID: LIB3149-028-Q1-K1-D12
aggagatatggccaatattgggaaagaaatttggagttagagtgcctaaagagacgtgtatggaggaattttggtatacgagggccatgggagacaagaaaagggtatgggaagaaatagtggagaaggaaaggttggtggagactaatatggaagagttggcaaattggcaattcatggacatcttgcttaggttccgagccaaactgttggggtccagagctaaagttgatgggctaggttttacaatgagatgcaacacatttgattcaatcttgtattggattgatgtcatgagacatgaaaacttcattccctaggcattttctttacaaaaataaattaaagaaaatatgagttat

SEQ ID NO: 33849 - DNA, 246 bp, Gossypium hirsutum
  unsure (1)..(246): unsure at all n locations; Clone ID: LIB3149-028-Q1-K1-D2
cgacccagacgaaccaagagcacgaacgcgagcaaacaacgccaaaggtttcagaaagcggcacgaacagccaagagaccggccgacgngaaacaacggcgggaccggaaaaaaccaagaggaacccaacacaaggggcggggagccaaaacaccnanaggaagcagacgcaagagcgaaaaggcccgcaccgaaaggccgcgccaacaggggagacaacaaaaaggcgaaagcgacccgcccaga

SEQ ID NO: 33850 - DNA, 393 bp, Gossypium hirsutum
  Clone ID: LIB3149-028-Q1-K1-D4
ggggtcgttatttaccagtcaaggggcgccgtgtggaaagaggagatggtttcacaagtggggcctccaggttacgatccacctacagatacaaacctgaaaaccaggtcagcaaaaggaattgaccgaaggaaagagaaacgggtacaggctgctcttgaaaagggtaagaactcagaagcagtggctggtgatgagattaaaggagacggtttaactgaggaagatttagatcatggatccgaatctattaaatcattgacttctcagatgacagatcttgctgtttttcaaaatcttgtttcaacctctcctctctcaaactcagtggatgcctcagatgctgtgacaccagctcaagatctcgataaaaaatccgggcacttaaaaaga

SEQ ID NO: 33851 - DNA, 325 bp, Gossypium hirsutum
  unsure (1)..(325): unsure at all n locations; Clone ID: LIB3149-028-Q1-K1-D5
gttagactaaatagttttttggtatgatgatcaatgtctctttaatgtttgttttacagtccgtgaagagcaatccctttccttctgggtttatggttgtttctcctgacaatatcatttttaatgttcgaagttgtgttctttttagaactgcaatgtgcttttattactttacctannaaaaaaaaaaaaaaaaaaaaaaaaaaaaaaaaaaaaaaaaaaaaaaaaaaaaaaaaaaaaaaaaccccnnnnaaaaaaaaaaaaaaaaaaaaaaaaaaaaaaaaaaaaaaaaaaaaaaaagggggggggccgttttaaaggatcc

SEQ ID NO: 33852 - DNA, 336 bp, Gossypium hirsutum
  Clone ID: LIB3149-028-Q1-K1-D6
gaaatgctcggtaaccctctgaatttcagtggtggagctaggtcatcggctccaacaccatccaactcatccattttcaagaccgttgctcttttctccaagaagaaggccgctcctccaaagcccaaggctgctgctgtcgccccggccgatgaagagctggctaagtggtacggtccggacagaaggattttcttgcctgaaggtctgttagacagatcggagatcccagagtacttgaacggagaagttcccggagactatggatacgatccgtttggtctgagcaagaagccagaagactttgcaaaatatcaagcatatgagttgatacac

SEQ ID NO: 33853 - DNA, 342 bp, Gossypium hirsutum
  Clone ID: LIB3149-028-Q1-K1-D7
cttaaatgtcaaggctgaagacaaaggcacaggtaaatcagagaaaatcacaatcaccaacgacaagggtcgtttgagccaggaggagatcgagagaatggttcgtgaggccgaagaattcgcagaggaggacaagaaggttaaggaaaagatcgatgctcgcaacagcctcgagacttacgtttacaacaaaaaaccagattaatgacaaggataagcttgctgacaagctcgaatccgatgagaaggagaaagttgaaacggctgtgaaagaagccctcgagtggctggatgacaaccagaatgccgaaaaggaagactttgaggagaaactcaaagaag

SEQ ID NO: 33854 - DNA, 330 bp, Gossypium hirsutum
  Clone ID: LIB3149-028-Q1-K1-E10
gtaaaacaatgaaatgggtgtgagagagagagagagagaggcaacccaagatgaaagtaaggctttgaatctggtggaaaaggaaaattgccagagtgagatgcacattacgatgagaatattagatgcttatttagatatctttaattgggggccaaccaccatgcaagatggaacttgtctgcgcctccatcagatatgtaatttacttgcaagacatgggttcaatttttgggcattgctcttgaaacctacgtctactttaagcttcttgcttgcccgaaatatttatatgaggagaatcctttgaaatgctcattttattattaa

SEQ ID NO: 33855 - DNA, 402 bp, Gossypium hirsutum
  Clone ID: LIB3149-028-Q1-K1-E11
agtcaccaaggcgaaaaacttgaaccaaggaccagcatgaaatgcttttctatctctaaactcaccaccaaatctttgtctttgaagtttccgctatccttattccccaactaccccgcatcatcggcggttgccgctgctgcccgatttccaagcctttctcctcgttcaatccggttctctatttgcagtgacgcctcgaggtcgtcgaggggaggtgtttctttatctagtcgtgatcggaacttgttcaccatggctggtgctgatgagtttgtcaaaggaaatgttcacccgaacggcgttgctgtcatcactctagatcgtcccaaagctctcaatgccatgaatttagatatggatatcaagtacaagcaaattcttgatgaatgggaatcggat

SEQ ID NO: 33856 - DNA, 271 bp, Gossypium hirsutum
  Clone ID: LIB3149-028-Q1-K1-E12
agtttccaaggcgaaattcttgcaccaagtatcagcacgaaatgcttctctatctctggggtcaccaccaaaaggttgccgtcgaaattaccgctatccttatttcccagctaccccgcattatctgcggttgccgctgctgcccgattcccaagccttcctccttgttcaattctgatctctatttgcagggacaccttttggtagtctaggggaggtgtttctttatattagtggagaacggaactggttcaccatggctggtgctgat

SEQ ID NO: 33857 - DNA, 363 bp, Gossypium hirsutum
  Clone ID: LIB3149-028-Q1-K1-E2
gagagcactacctgttctgaagaaggcttatggtgacagcatgcataaggtactgcatgtaggcccagatacttgttcagtggtctctaagttattaaaagaagatgatactcaagcctggggtgtggagccatatgacttagatgatgctgatgctggttgcaaaagtcttgtgcataaaggcatcgtgcgtgtggcagatatcaagtttcctcttccataccgtgcaaaatccttttccctagtcattgtgtcagatgccttggattacttgtctcctaggtaccttaatagaactctttcagaactggcgagggtatcatctgatggtgttattataattttctggtatctaggtcagca

SEQ ID NO: 33858 - DNA, 345 bp, Gossypium hirsutum
  Clone ID: LIB3149-028-Q1-K1-E3
gttggtggttgagcccattgccacaaccgccataacatgcggcgatgtgacaagcaaagtggccggttgcttatcatacttgcagaacggagggaacgtgccgaaggcttgctgcgacgggatccggtccctgaacatgatggctcgaaccacccctgaccgccaaaccgtgtgtgggtgcttgcaaactgccgctaaggctgtcaaaattaaaggcaacttggctgagaccctcccggccaaatgtagtgtcaacatcccttacaagatcagcacttccactaactgcaaaaatgtgaagtgagatggatgaagagagggttttgcagcagcttgaaggagata

SEQ ID NO: 33859 - DNA, 386 bp, Gossypium hirsutum
  Clone ID: LIB3149-028-Q1-K1-E4
cccgacccacgcgttcgggagaacagtgaaacgggtgtgaaagaaaaagacatagccggaggccctcataaagcttgtgctgattgacgctggcgaaaggaaccccgatgagaaaaccaagtgccatacatcagggtacattgagcttaaggaagagaagattattgttaatgacgactatgcacgatggaccttcgttgcattttcatgagatgtcgcttttacttacagggcttgggtttgatctttgggcgatgattttgaaccgtaactctactttttgcttcttgcttggttgaaatatttatataatgagattcctttgaaatgttcattattattaattattggcattgttgttaaggcttgtatgcaaaattttatga

SEQ ID NO: 33860 - DNA, 171 bp, Gossypium hirsutum
  Clone ID: LIB3149-028-Q1-K1-E5
ccggaccggatcgccggcgttgtctgtctcatcattatttaagtctgttagcttatagtatcttgcaaagaagaataagtatttaaagatgtaaacgtttgttcgcttcttttacatggaaaatctactgttatcatatttcatacttacaagcaataaaattaattatat

SEQ ID NO: 33861 - DNA, 366 bp, Gossypium hirsutum
  Clone ID: LIB3149-028-Q1-K1-E6
aacagccctctttgacgagtgtttcgaagctaataaagaaggatgagaggcaaccctaaaccgaacaccattaggacgggatggacagccaaaggaagtgtcacctatggaggcaatcctgtgcctaccagcggatacatatgtaacggggcaagatatgagtgttgacggcgggatgagcgtgaatggcctctcctttcctaaggaaatcatgaaagaaacaaagagccatgaactcaagtatgtaagatgaaaatcgagatgaattggacatgggtaagccatgagaaaagaataaaaaaacaagtttgtcaacccggaaaggcaaaagacgcaacatacactaaaaaatgcccttaatggccg

SEQ ID NO: 33862 - DNA, 371 bp, Gossypium hirsutum
  Clone ID: LIB3149-028-Q1-K1-E8
ggaggctgcagtgcttaagaagtttaagtctctgaaacacgtgccaatttggaagcaggagaggcccaaaagcataagagggggggatgaactgaagatatacagagtatatcctgttggcttgacacaaagacaggctttatataccttcaagttcaaaggggatgctgatctcaggagccacattgaaaacaacccttgtccaaagtttgaagtcatttttgtctagattgaaggtcacattatctcaactttacaaatagttgacagattccccatctcagtgctgtttgctgaaaatagttcctgaaagatcaaggcaacctcatgcgggtgttaagaatatcatatatatgtatcattgatgagct

SEQ ID NO: 33863 - DNA, 223 bp, Gossypium hirsutum
  unsure (1)..(223): unsure at all n locations; Clone ID: LIB3149-028-Q1-K1-E9
agtggtagatgttttgtaatgttcttgccccattagaaagtgtggaaataaatgaggatattttgggccaaaaaaaaaaaaaaaaaaaaaaaaaaaaaaaaaaaaaaaaaaaaaaaaaaaaaaaaaaaaaaaaaaaaaaaaaaaaaaaaaaaaaaaaaaaaaaatgaaaaagnttaaaaataataataatgaaacnttaaattaaattcaatggccgaggttt

SEQ ID NO: 33864 - DNA, 401 bp, Gossypium hirsutum
  Clone ID: LIB3149-028-Q1-K1-F1
gcgagaaatggggagaatgcgacagtatttggcaatgaaaacggatcctgttgctcaagaattgatcagttccgatatcaaagaactcaagctggctgcgattaaattgatggatgatgcaactaaacttggaggtcttggttttggaacttcttttcttaaatgggtcgcctcattttctgctatttatttattaatcctggaccgaacaaactggagaacaaacatgttgacctcacttttggtaccttacatcttctttagtcttccttcaggattgttcagatttctaaggcgggatgttggaaaatggattgccttcattgctgtcgttctaagactgttcttccccagacactttccagactggctggagatgccaggatcaatgattctttact

SEQ ID NO: 33865 - DNA, 286 bp, Gossypium hirsutum
  Clone ID: LIB3149-028-Q1-K1-F10
gtcgcgctaatcatattattgctagaccatgcaggctgaacgagagggatacagttcactctctagatatggtacgctggcgttggccttgtaactctgaacgactggactcccgagtcggttcatgacgcatgagggccaagcttctatctatgcccatcgctttgctgataaagctcgaatgccccacggaataccgtagagaactcttgctctagaatctgttcgccaaactactgttattaattataagggtttcgcccgtggtctatcagcattgatgtat

SEQ ID NO: 33866 - DNA, 261 bp, Gossypium hirsutum
  Clone ID: LIB3149-028-Q1-K1-F11
cgtaaactaagcttattattgccattattttccagcctgaagagcatgattaactggaagctctcgatatggttgccgagcgtcaaccttccgatgttcagtagtccgcacctaccccttttttaatgccgctgacgttcctagcatctttctaaccctttctcttgactaaatacgaggcaacatccgcagtaaaccctaaaggactcctacgctaggtgcttgtatctatactcatgatactaacttgaacagtatcgc

SEQ ID NO: 33867 - DNA, 428 bp, Gossypium hirsutum
  Clone ID: LIB3149-028-Q1-K1-F12
caatgatctaaatagctgtgcacataaccattgttcacagtttgaaactgctactgcaatggccttcattagctggtttacttcattaccatcatttctcttgaacttttggtcgctggcatcccggtaaacaggtaacatggaaaaaaagaagtcgatgggagtattcagatcatttcagaatgccatccaaagcatttttttattattatcccaagtatattccttcatagctttctcagatgccttgaagatacaagaacttggttttgtgattttaaagttgtatagtttgtattctataaattggtcttgtgagaaaaatatctggggcattggacattatgaataccgccagttgcatcttttggagattgaatgattcgatcacattattgtaaaacatgtataatttttaatactagatg

SEQ ID NO: 33868 - DNA, 373 bp, Gossypium hirsutum
  Clone ID: LIB3149-028-Q1-K1-F2
cgcttggaaaggggagacccttcaggaatactggtggtgtactgagagagcccttgattggggtcctactggtggacctgatctgatcgtcaatgatggtggtgatgctactttgttgatccacgaaggtgttaaagctgaggaagtttatgagaaaactggtcaactcccagatccggcttcgactgataacgctgagtttcagattgttttaaccattatcagagatgggttgaaagcagatcccaagaagtatagaaggatgaaggagagattggtaggtgtttctgaagaaactacaactggagttaagaggctttatcagatgcaggccaacggtaccttgttgttccctgccattaatgtcaatgac

SEQ ID NO: 33869 - DNA, 63 bp, Gossypium hirsutum
  Clone ID: LIB3149-028-Q1-K1-F3
gagagagcttgcggagcttaactaagccttttttttctacacccacaaggcactgcatggggg

SEQ ID NO: 33870 - DNA, 424 bp, Gossypium hirsutum
  Clone ID: LIB3149-028-Q1-K1-F4
gtagctgtccgggacgcattccggagacgagtaatggtggcgaacgtgacatctctgggtgggttcgacacatgttactcggtcccaatcaatgcaccgaccataacatttatgttttcgggcatgaacgtgacattgccacaagagaacctactgctccacagcacagcaggcagcatcacatgtctggcgatggcaccggcaccagcgctgaatgtgatcgccaatatgcagcagcagaaccatagggtggttttcgatgtgccaaattcgagggtgggggtcgcccgtgagcgatgttcttaaaaagtgtggggtctttttcttctaacttttgggaaacagtgttggtgttgattaaaagcagaatatatctgattaataatgaaagtcaaatttttggtagtatatatttacttgtact

SEQ ID NO: 33871 - DNA, 392 bp, Gossypium hirsutum
  Clone ID: LIB3149-028-Q1-K1-F6
gataaatcatgcgtttggcacgccgctgatttcgctgatgggaatttgaaagaagagatgttctgtatcagatttgcttctgttgagaattgtaagaccttcatggagacagttcaagatgttgctgaaagtcagggaaagaaagaggaaaataaagacgctacagtcactgctgatctcctcgacaagttgagtgttggagaaagtaaaagtgacggtaaagaagaagatacggtcgttgcctccgacaccaaggaagccgtcaaagatgaagcaaaaacagaggaagataagaaggatgaggctgcttcaaaagcatagacctgaaagagaaagcaacaatatactcgagtaagtttattataaaaaaattaatatttagtggtttaagg

SEQ ID NO: 33872 - DNA, 392 bp, Gossypium hirsutum
  Clone ID: LIB3149-028-Q1-K1-F7
gatttatcatgcgtttgtctacgccgctgttttcgctgatgggaatttgaaagaagagatggtctgtatcagatttgcttctgttgagaattgtaagaccttcatggagacagttcaagatgttgctgaaagtcagggaaagaaagaggaaaataaagacgctacagtcactgctgatcttctcgacaagttgagtgttggagaaagtaaaagtgacggttaagaagaagatacggtcgttgccttcgacacctatgaagccgtcaaagatgaagcaaatacagaggaagataagaaggatgaggctgcttcaaaagcctacacctgtaagagaaagcaacaatttactctgagtagtttattttaaaaaaattaatatttattgggttaag

SEQ ID NO: 33873 - DNA, 399 bp, Gossypium hirsutum
  Clone ID: LIB3149-028-Q1-K1-F8
caaaatcggcaaccgaagacgtgaagattgatttgtttgaagatgatgatgagtttgaagaatttgagattgatgaagagtgggaggataaggaagaaggaaaggagattacacagcaatgggaagatgactgggatgatgatgatgttactgacgatttctctttacaactgaggagggaacttgagaataacactgagaacaacaactaagctggacttatgcattcctctgcactgaactcgtctgaatcggggttttttttttttcgtttgattttcttttccatgcaaagcgaatgaaggaatgagctgtaactctttatgcttggatgtactggtagaaacttaaaatgcaaaaactggtttgatggttctttaaaatatagacatttgattt

SEQ ID NO: 33874 - DNA, 411 bp, Gossypium hirsutum
  Clone ID: LIB3149-028-Q1-K1-F9
caaaatcggcaaccgaagacgtgaagattgttttgtttgaagatgatgatgagtttgaagaatttgagattgatgaagagtgggaggataaggaagaaggaaaggagattacacagcaatgggaagatgactgggatgatgatgatgttactgacgatttctctttacaactgaggagggaacttgagaataacactgagaacaacaactaagctggacttatgcattcctctgcactgaactcgtctgaatcggggttttttttttttcgtttgattttcttttccatgcaaagcgaatgaagggatgagctgtaactttttatgcttgggatgtactgggtagaaaacttaagaaggcaaaaaactgggtttgatgggttcttttaaaaatataaaacatttgaatttt

SEQ ID NO: 33875 - DNA, 265 bp, Gossypium hirsutum
  Clone ID: LIB3149-028-Q1-K1-G1
gatggatgatgatgggtttttgtctcccaaaggacgtagtttcaacgattgtgtcattgatgtggatgctgaggaattatgctctgctttgaaagatgtggcttcctcaagtagaaaaacaactgggcagtctggtggttggacttcttctgatgatgaggctgatcctatggatcatgatgaagaagatcagaatggtaagagttttaaggagcaaaggaaagcacactatgatgagtttttgaaaataaaggaactgcgacgt

SEQ ID NO: 33876 - DNA, 391 bp, Gossypium hirsutum
  unsure (1)..(391): unsure at all n locations; Clone ID: LIB3149-028-Q1-K1-G10
ggtgatgcgaccctctcatcatcacattcactttatttaggcttcctctttttttttttttttcttttataagtctcaaagaaacttagaccccttcgtattctccgctcataccccaaatccccataccccttctgttcaacagcaaagatggcgactgtgcgagatacctcctctagtatcgtgcaagcttcgatcccgaaccgatttacgagtgcgattgtgaaggcgccgacttctcttggatcttttaagaacatctccaaaccttttggcttgaaatgttcctccaatcacaaaacatttatgggggcttataagattaaactcgtangaccccatggtgaggtgagcgcgtttttagcccctgtcgatcaatacattttatatg

SEQ ID NO: 33877 - DNA, 385 bp, Gossypium hirsutum
  unsure (1)..(385): unsure at all n locations; Clone ID: LIB3149-028-Q1-K1-G11
caaagaaattactcttcgggttattatcagctttatttcgacacagataatgtgctttgccttgtctacaaaggtccagagttttcaagtgtttattggccaagtccatggctattgagatgggaagctggaagatccacattcaataacaccaaaatagctgttttagactctttgggtaatttcagttcaactgataatttcaccttcttgtcagctgattatggtttaaacatctcaaggatgttgaaaatggatttggatggtaatcttaggttatatagtctaagtgaagatacaaaagcttgggttgtttcatggcaagcctttcttcaccatgtaaggttcatggatgttgtggaccaaacagnatatgtatttattc

SEQ ID NO: 33878 - DNA, 325 bp, Gossypium hirsutum
  Clone ID: LIB3149-028-Q1-K1-G2
cccacgcgtccggcttcgctttctcgaattttccttctccgtttatcccttttttctaaattttcttccgacagaaatcaattttgttttcccctttttcttcggggtaaaaagaacctttctcatataaatcattgattagctcgaatttcgatccattatggctgcgaagattcttgccaacttaattgtaatgggctcaggtatattggctcgggccgttgttcaggcataccgtcaagcactttcaaatgccgccaaatctggtgttacccatgagacactacaaaacgcagtccgtagaggtggcaaagtcatgaccgag

SEQ ID NO: 33879 - DNA, 361 bp, Gossypium hirsutum
  Clone ID: LIB3149-028-Q1-K1-G3
aggaaagcccctgcatccaaccaagggtgtattgcctcaagaagtccatctccgggtggcacattaaagcgcataagaaaaggccgaggcttcactgaccgatattcctttgcacgtcggtaccgcacaccttctcctgaacgttccccgcctagatcctatgcttatggtggaagaaatgttccacaaagaaaccatgatagatattctagctacagaaatcattctgatcgatcaacacgaagacgctatataagcccgccaagaagccgcagtccccctagatatgaaggccgaaaaagtaggagtacttgtcgcagcccaattcattaccggagaagatacagagatcatagtgaga

SEQ ID NO: 33880 - DNA, 338 bp, Gossypium hirsutum
  Clone ID: LIB3149-028-Q1-K1-G4
tctaactgcggtaaatgttgccctaaggataagtcaatcaagaggtttcttgtgaggaacatcgtggagcaagctgctgtcagggatgtccaggaagcctgcgtctatgacacgtacactctgcccaagctgtatgtgaagatgcaatactgtgtttcatgtgcgatccattcccacgttgtgagggtccgatcccgcactgacaggaggaaacgtgacccgcctcagcgcttcattagacgcaaggatgatatgccaaagcccggtcagcctggtcaggctcctcgtactggtgttgcggctcctgctcttgcataaggcttttgaagtttaagatg

SEQ ID NO: 33881 - DNA, 384 bp, Gossypium hirsutum
  Clone ID: LIB3149-028-Q1-K1-G5
gttcgacaaggacggagatggttgcattactaccaaggagttgggaactgtgatgcgatcacttgggcagaaccccactgaggcagaactgcaagatatgattaatgaagtcgatgctgatggaaatgggaccattgattttcctgaattccttaacctgatggcaagaaaaatgaaggatacagactctgaggaggagcttaaagaggcattcagggtgtttgacaaggatcagaatgggttcatatctgcagccgagctgcgccatgtcatgacaaaccttggtgaaaagcttacagatgaggaagtcgacgagatgatccgcgaagctgatgttgatggtgatgggcagatcaactacgaggagttcgtcaaagtcatgat

SEQ ID NO: 33882 - DNA, 286 bp, Gossypium hirsutum
  unsure (1)..(286): unsure at all n locations; Clone ID: LIB3149-028-Q1-K1-G7
gggcaaactccaaaggtagccaagcaagacaagaagaagaagcccagaggtcgtgcctataagcggatgcaatacaatcgccgtttcgtcactgccgttgttggctttgggaagaagcgcggacccaactcgtcagagaagtgaggccggacatgtaggagtcttacattatattgataattttctagcttcattagcattacattgttatgatttagtttggagtctttctttgctttaagaaaactataacatcggtatctgttgttttgaaatatttnanana

SEQ ID NO: 33883 - DNA, 368 bp, Gossypium hirsutum
  Clone ID: LIB3149-028-Q1-K1-G8
catagtgcttggacttgttgcagttgggttgttttcatttttccttttcaagttgtggcaaaagaagaaacgagacgaacaatatgcccgtcttttgaagttgtttgaagaagatgatgagctcgaggtcgagcttggcctgcgggactagcagcacattgagaactgagctcgtcctaattgaggcttaaatggcaacaatggcttgtgtgttgtttaggaatctcatttttgtgaaggacaatgtcaggattttaggcatatgctgtggtgaggtctgataatttttcaaccttaaagttgtactatttgtaatgatatgttggaatttattatgaatttaagttttttgtggatgcttagaaatg

SEQ ID NO: 33884 - DNA, 317 bp, Gossypium hirsutum
  Clone ID: LIB3149-028-Q1-K1-G9
ggaaaatgcttaacgcaaaagcttcttaaaaagaagcctaagaagggttcaaagaatgccaagccaatcactaaaacagaggagtgtgaaagtttcttcaacttcttcaatcctcctcaagttcctgaggatgatgaagacattgatgaagatactgctgaggagctacaaaatcaaatggaacaagattatgacatcggatcaacaattcgagacaagattattccacatgctgtgtcatggtttacaggagaagctatccagggagatgagcttgatatagatgacgatgaagaagatgacgatgatgatgatga

SEQ ID NO: 33885 - DNA, 337 bp, Gossypium hirsutum
  Clone ID: LIB3149-028-Q1-K1-H1
ccgaaatcaaagaagaatatttgagggaggaggagaaaacatcgaacaagattaaaccgaaacaaattaggaaaattctatggattggtggcataagatgatcttccctgttcgaagactctggtttgttgattcttctcgcgataaggctcgcaaaaatggacccgcgttgttgaagcttcacgatgatgtgcacacacgtggatacgaacatgtgcatgtgacgtgggaaatgccgcgaaaatcggaatcggagctgctggctgctaacaacaatcccaagcgcaagcaccgcccagctttctggagagatttcgtttggtcttctaaccacact

SEQ ID NO: 33886 - DNA, 64 bp, Gossypium hirsutum
  Clone ID: LIB3149-028-Q1-K1-H10
aaataaaaaaatttattttaaaccttttatttttaaaaacaaaaaaaaaaaaaaaggggggggt

SEQ ID NO: 33887 - DNA, 354 bp, Gossypium hirsutum
  Clone ID: LIB3149-028-Q1-K1-H12
gctcgatccacatatcgaggatcaatttgcaagtggtcgtttgttggcttgtatctcttcaaggcctggtcagtgtggccgcgctgatgggtatatcttggaaggcaaagagctggaattctacatgaagaagatccagagaaagaaggggaagggagctgcctaaaaattttgttatgtgagcttttaacatatcatgtcagaatctcctctctgctacttttatctttttacaggacattcaagattgtattagtttttgaactttttagtttgaatgtcaactagtgggttggtgtgtaatgttgaacaatataatatttgtgtttgaattttgatattcttgaactttat

SEQ ID NO: 33888 - DNA, 272 bp, Gossypium hirsutum
  Clone ID: LIB3149-028-Q1-K1-H5
acacgtgcgaagaagtaagggagaaagctgaagaagcactatcggctcaaatgaaattaacagcaatttgggaaataagagctcgtcagaaagggtggagagaaaaggtcgccaaatctaatgcatttccttatttcatttaagtaacttcattataatgtcttattttattgatatttttatatttaatctagtttttattatttaaaaaaaaaaaaaaaaaaaaaaaaaaaaaaaaaaaaaaaaaaaaaaaaaaaaaaaaaagggcgaag

SEQ ID NO: 33889 - DNA, 90 bp, Gossypium hirsutum
  Clone ID: LIB3149-028-Q1-K1-H6
taaaaaaaatggtatgaaattccaactcaaccaacgttgctgaggtgttctcccgcattgaccacaaatttgatctcatgtatgccaggg

SEQ ID NO: 33890 - DNA, 372 bp, Gossypium hirsutum
  Clone ID: LIB3149-028-Q1-K1-H7
gtcgtattccatctgctgtcggttaccaaccaaccttggctactgatcttggaggtcttcaggaacgtattaccaccaccaagaaaggttctatcacttctgttcaagccatatatgtgcctgctgatgacttgacagatccagctcctgcaacaacctttgctcacttggatgccacaactgtgttgtcccgacagatctccgagcttggtatttatcctgctgtggatcctttggattctacatctcgtatgctctctcctcatattttgggtgaggaacactacaacactgctcgtggtgtccagaaggttctccaaaactacaagaacttgcaagatattattgctattttgggaatggacgagctta

SEQ ID NO: 33891 - DNA, 358 bp, Gossypium hirsutum
  Clone ID: LIB3149-028-Q1-K1-H8
ggcggatgccatttgctggcgtgttccagccaacctcggctactgatctaggtggcttgcaggaacgtattacctccaccgagagcggttctatcactattgttcaagctcatatatgttcctgctgatagacacgacagatgcaactcctgcatacacctttgctcaatcgaatgccacatcgtgtgggtccggactgaactacaagcttggtatttatcctgctgtggatactctgaattatacatgtcctatgctctctcctcatattctgcgtgaggaacacttctacactggtcgtggtgtccagaaggttcttcacagctacactatcgttccagaatttattgcttttttg

SEQ ID NO: 33892 - DNA, 99 bp, Gossypium hirsutum; identical to SEQ ID NO: 29711
  Clone ID: LIB3149-028-Q1-K1-H9

SEQ ID NO: 33893 - DNA, 400 bp, Gossypium hirsutum
  unsure (1)..(400): unsure at all n locations; Clone ID: LIB3149-029-Q1-K1-A1
agtgtaaatacattcattcccagtacttctccagcatttgttatcttttaccctaccgagaaatggcaaaatccatttttgcattaccaattttgcttggattatgctatctggctactgatgtaagtgccttcacggcttctgggtggaccaaagcacatgctacattttatggaggcagtgatgcctcaggaactatggggggagcttgtggatatgggaacttgtattcagctgggtatggaaccaggactgctgctttaagcacagccttgttcaatgatggagcttcatgtggacaatgctacaagatcatgtgtgattaccaagctgaccctaaatggtgcataaaaggaacatncgtcaccatcacagccacaaacttttgccctcctaactt

SEQ ID NO: 33894 - DNA, 362 bp, Gossypium hirsutum
  Clone ID: LIB3149-029-Q1-K1-A11
gagatgagaaagaggcaatcaggacctggcgatggcgttttgtttcggacctttctaggactctccgataaccggacccgctagcacccggcgtcagcttttggaccggctttttcctcttctcttcctcgggccacggtttttgctaaggttacttcgatggtgaccaatgattatatcaccatgaacgggaacgggtttagcaagagggcagaagagttcatcaagaggtaccacgaactcgaggttaaagaaaatcagtgcagctcttcgctcgttaaacacatcaaagctcctgttcacctggtttggtcattagttaggaggtttgatcaaccgcagaagtacaaaccatttgttag

SEQ ID NO: 33895 - DNA, 413 bp, Gossypium hirsutum
  Clone ID: LIB3149-029-Q1-K1-A12
cttcactgtttgggatgttggtggtcaggacaagattcgtcctttatggaggcactatttccagaatactcagggtctcattttcgtggtggatagcaacgacagggaccgtgttgttgaggcaagagatgagttgcacaggatgttgaatgaggatgaactgagagatgctgttttgcttgtatttgccaacaagcaagatcttcccaatgcaatgaatgctgccgaaataactgataagcttggtcttcattctctccgtcagcgccactggtatatccagagtacgtgtgcaacttctggggaaggcctctatgagggccttgattggctttccagcaacattgctagtaaggcatgagaaaggatcagtgtattggttgttagttagacttgttgaaactctggcaact

SEQ ID NO: 33896 - DNA, 232 bp, Gossypium hirsutum
  Clone ID: LIB3149-029-Q1-K1-A2
ttcccaatgtgagccaatggtataactgtgtgtctttccatctcgctgctagcttccctgggaaaggcgtggcgtttcacttgctggcaaagctgatccagctcatttggtgaacttaagcttccggctgcggtggccaccgatgatacctggaaccttgttgcggttgaaccgggggaggataaaaaggcacctaaggaagaaaaaccggttaaaaggccttttattaaaa

SEQ ID NO: 33897 - DNA, 387 bp, Gossypium hirsutum
  Clone ID: LIB3149-029-Q1-K1-A3
agcaaagcggcgaagcgatttgcaatctcaactcaccgtttctcacgattggattctccttaaaatcatggctgctcagattagcaagaagcgcaagtttgttgcggatggagtgttctacgcggagctaaatgaggttttgacaagggagcttgctgaggatggatactccggagttgaagtcagagttactcctatgcgtactgagatcatcatcagagctactcgtactcaaaatgttcttggtgagaagggtagaaggattagagagttgacttctgttgttcagaaacgattcaagtttccggagaacagtgtggagctctatgctgagaaagttaacaacaggggtctttgcgccattgcacaggcccgagtcctgcgata

SEQ ID NO: 33898 - DNA, 180 bp, Gossypium hirsutum
  Clone ID: LIB3149-029-Q1-K1-A5
caccttttggtttgtcagtttcttgaagcattttatccactagtgtgtgctacttagattttatgttcctagtattcgacatctataatgctacagctttcatttggatagatactgtgcctagaactgaatgttaagtttatgttttcttattttaaataaaatttaagatatttgttt

SEQ ID NO: 33899 - DNA, 408 bp, Gossypium hirsutum
  Clone ID: LIB3149-029-Q1-K1-A8
tcctcttgctgagacttctagcaaccaattagtagctgctgatgcaaagttgaactttgatgataatgctgcctttcgtcaaaaggagatatttgctctccgtgatccatctcaagaggatcctcgggaggttgctgctgccaaagctgatttaaattacattgggttagatggagaaattggttgcatggtgaatggtgcagggttggcgatggctacaatggatataattaaatttcatggaggaactcctgccaattttctggatgtaggtggaaatgcttctgaaggccaggtggtcgaggcatttaagattttgacttctgatgataaagtgaaagccattttggtgaatatatttggaggaataatgaaatgtgatgtgattgcaagtgggatcgtcaatgc

SEQ ID NO: 33900 - DNA, 369 bp, Gossypium hirsutum
  unsure (1)..(369): unsure at all n locations; Clone ID: LIB3149-029-Q1-K1-A9
ntccggtcagcgacgtgataaccttatggctgaggaaggaggtaaatttgtcgtcaatgcatatattggaaaatacctgtcctactcccttgaccggctttgagaggaaaatgatgccattggtttggcaattggagccacataacccagggaccttactgtaccatgacgagatttatctggtgttcattttgcaatggaattcctacatgcaaatactaaaagcttgcttgatagtgatctccaagatgagcaactacatatcatctaagggcaagaaagtagtattcatcggtggaggtgacactggtacagattgcattgggacatctatacggcatggatgcaccaccattgtaaatattgagt

SEQ ID NO: 33901 - DNA, 423 bp, Gossypium hirsutum
  Clone ID: LIB3149-029-Q1-K1-B1
cgaaaaattcggcggtgatggaggctcgacgatggtggtgacgaaccaggtactgactgcacactgactttcggcgctgatggagggttgctggaacgatgggaactgaagtggcgtgactcttgggctgactgcgatgctgcggcgcgagggtttcccaagaaaccctaagtctcctgattcttcaagtttgggctttgttgggctactgcttattgggtttgggtgtaaacaggttttgggtagtttagctgggtcatgggtgtaacgggttattgggttagtttagtgtgtcttgggtaggactagtctactaggctttgggttaatgtggttgggcctgtaaatggactataataaaataaacatttggttttttattttttggttttgggggtatttaattatgggcccggacaaaaa

SEQ ID NO: 33902 - DNA, 336 bp, Gossypium hirsutum
  Clone ID: LIB3149-029-Q1-K1-B10
tttgaaatcttcacacttcccccctcccctgctcttcgccgaaaggcttatgcgcaggccttcaaccacccaaaagtcgccggcgaccggggaagtaaggccctctcgatggcgcaaacatgaggcgtggtgttgaagttgtggagaacgagaggcgtgaaacatatgcgaaaacatggagcgggacatatggggatggagtaagtggaggtatgggcaatggtacagggcaagtaggccgacagtcaagcatagggatgatggctaggcttttttattctagtcttctgcgtttttcttttgttcttaaatgctatggggtatgtgttaaaaggg

SEQ ID NO: 33903 - DNA, 198 bp, Gossypium hirsutum
  Clone ID: LIB3149-029-Q1-K1-B12
tcgcctacgcgtgcgtgattgtcaaatttattctatatgattagaatgatattttaagtatgtgataatggacaaagaaggatgaattttttgaatgtcaacaagccttgttatacatggagagataatcctatcttataggagaattttttaaatacactatctggctatataagataatgacagtatattcaaaat

SEQ ID NO: 33904 - DNA, 433 bp, Gossypium hirsutum
  Clone ID: LIB3149-029-Q1-K1-B3
gtcaatttgagcattccttgggttattattggtcattctgagaggagacttattttgaaggagtcaaatgagttcgttgcggataaggttgcttatgcacttgctcaaggcttgaaggtgatagcttgtattggggaaacacttgagcaacgtgaagcaggatctactgtggcggttgttgctgaacaaactaaagcaattgcagcaaaaatatcaaactggactgatgtcgttttggcatatgagcctgtgtgggctattggaaccgggaaggttgctactccagctcaagctcaggaagtacattgtgagttgaggaaatggcttcaggctaatgttagtcccgaagttgctgcatcaacccggattatttatggagggtccgtcactgctgcaaactgcaaggaactagcagctcagcctgatgttgatg

SEQ ID NO: 33905 - DNA, 423 bp, Gossypium hirsutum
  Clone ID: LIB3149-029-Q1-K1-B5
ggaaggcattccacctgaccaacaacgtcttatcttcgccggcaagcaactcgaagatggccgcaccttacccgactacaacatccagaaggaatccactctacaccttgtcctccgtctcaggggaggtgcgaagaatagaaagaagaagacctacaccaagcccaagaagatcaagcacaagaagaagaaggtcaagctcgctgtcctccagttttacaaggtggatgagtccgggaaggttcagagactgagaaaagagtgccctaatgcggaatgtggcgccgggaccttcatggctaaccattttgataggcactattgcggtaagtgtgggctcacttacgtttaccagaatgctggtggggattgaataaagtccgcttctacctttcgttagtgtcctgcaaaaattgaatttat

SEQ ID NO: 33906 - DNA, 404 bp, Gossypium hirsutum
  Clone ID: LIB3149-029-Q1-K1-B6
cccacgcgtccggtacatcttcgctttgagattagatccaaaattcccctttcatcttatttccgattccccaatttttcctgaaaccctaatcctaatcccggattcctctcgtctacatcgtctagcaaatggcaaccgaggagccggcagtcgtggcagaccccgcaccggagacggaggaggacaagactgctgagaccaaagctacttcaaaatctggcagagcaaagaaaaccaaagaacccaaaaccaagaaagctgcagctcctcggaaaccacgggctgctcctactcatccaccttacgaagagatgatcaaagatgcgatcgttactttgaaagagaggacaggttcaagtcagtacgccattgctaagttcattgaagagaaacagaagaat

SEQ ID NO: 33907 - DNA, 380 bp, Gossypium hirsutum
  Clone ID: LIB3149-029-Q1-K1-B7
agcagaatcagaatcagggtttgaaaaaaatgcagatcttcgtgaaaaccctaacagggaagaccataaccctagaggtcgaatccagcgacactatcgacaatgttaaggccaagatccaggacaaggaaggtattccaccggaccagcagagattgatcttcgctggaaagcagctcgaagatggccgtactcttgctgactacaatattcagaaagaatcaaccttgcatctggttctgagacttcgtggaggcattatcgagccttcttcgatggcattggctaggaaatacaaccaggacaagaagatctgccgcaagtgttatgctcgtctgcacccccgtgccgtgaactgcaggaaaaagaagtgtggacac

SEQ ID NO: 33908 - DNA, 304 bp, Gossypium hirsutum
  Clone ID: LIB3149-029-Q1-K1-B9
gaaggtattgatttcataaagtcttttgtataatctcttaagagaagagacttgaaaaaaggtgtagttttttcatccatggataatgtatatttcctttgttaaaaaaaaaaaaaaaaaaaaaaaaaaaaaaaaaaaaaaaaaaaaaaaaaaaaaaaaaaaaaaaaaaaaaaaaaaaaaaaaaaaaaaagaaaaactttaaaaaaaaaaaaaaatactaaaattttacttaaaaaaaaaaaaactttcaaactattaccaacaaaaataaaaaaatctaatcttccattggccttttcctttt

SEQ ID NO: 33909 - DNA, 260 bp, Gossypium hirsutum
  Clone ID: LIB3149-029-Q1-K1-C1
aagaaaactttaccaatgaggctattttgaccaaggtagtcaatattgtttcggattatattttcagtgctattggtatgcatagataacaatatgttttggtgtactatttcgtatttaccgttgtttttattatataattactggttaaactttatatgtaatagtaaatatatcatattatgtttcatattattttttaggaaaaaaaatattaatttaataatataaaaaaattataattataattttattttttt

SEQ ID NO: 33910 - DNA, 184 bp, Gossypium hirsutum
  Clone ID: LIB3149-029-Q1-K1-C10
atggataagcgcacactaacccgacaatagtggatccaattcgggattttccttggggggctggcatcaatgcattgaaatgtaccgatactgattcgcacatgaagaaaaggaagtgcagagattcaaatgacggacgtatgggacagggataaagaaagaggaaagctcgtaaaggcgacat

SEQ ID NO: 33911 - DNA, 417 bp, Gossypium hirsutum
  Clone ID: LIB3149-029-Q1-K1-C11
tcgcccatgcagattcggaatgtgttcaactccaattcatgtcacatcttcccagttgatcgcaagtgacatctttcctgtgcctgtggtgaaggcaatcctttttcctggagccattacaaatggccttgccaagaattggactgttccgagctgggacaacttgttaaacatgtataacttaactagtataaaggaatcctctgcattacccgatctccagcgcttagaggttctagctggaagctacttttgtgtggcaggagcactcgtgggacttctaaaacccggaagaatgagcatgtttgggacactactcgtaatatggggtcttgtcaaggaagggatcataggaaaaccggcaaataccgatcctacaaaagctgtatatgtatatccaacaatggtgcttgcact

SEQ ID NO: 33912 - DNA, 427 bp, Gossypium hirsutum
  Clone ID: LIB3149-029-Q1-K1-C12
gaacaaaagaatatcagggaagggcaaaggcaagttaaagaaaaattcggaatcatcgaatccgagtgcgaggaattgaagagggaaactaggctcataatccagcaaagtgccagaactcaggttaaacttgctcttatgttccgcatactgaaagcaagggaagccggcgagttgaataccgctgccactctcactgaaatgctccgtgaaatagtaggaagagagagggaggaaagcaaagctgacatctgaatgactatggtaagcttcctcggtgcagctgctccaaatgttaagaactagaagtgtgtgacaattaagcgcgtgttatctttcagcattgccgttttgttattaagtactgctaatctacgtcgtttcatgtttggtatgttaaacttagaacttatcaaaccttttttct

SEQ ID NO: 33913 - DNA, 181 bp, Gossypium hirsutum
  Clone ID: LIB3149-029-Q1-K1-C2
gtgaaatcccagaatctggttggtgatttataaagtcatacatatatgtgtttcttcccttaaaagggcattctttttttaggtcatgttataggagggagtattcatttgtaaatctcattttccagcatctctggatgaatgcttgattttatcttcttaaaggaattcatattcattg

SEQ ID NO: 33914 - DNA, 409 bp, Gossypium hirsutum
  Clone ID: LIB3149-029-Q1-K1-C3
gatactgcttaccagaaggcttatttgtctggctgacaattatggggagtttagtttagccggtgaagtggatcttgtttagctgaattgaaacattcatgttctggtcccacaatggtgtctgttacattgtttgctcatccatgttgatcattgccaacaagttctagtcttggcttaatgacaaaattgcaattctggttcaggtttgagtctcatttgcgggttcttgtttaggttaattttgatcatagactggaaatctgttggttatgtttttgtaatgtttgattatttttattattaaaaatattaattatcatttgaagttaagctgggcatatttgtatttttggccctttgctaaagaagcaaaattatgcttttcactttgtgtatctgatttcac

SEQ ID NO: 33915 - DNA, 313 bp, Gossypium hirsutum
  Clone ID: LIB3149-029-Q1-K1-C5
atgcagatccggaatgtgttcaactcctattcatgttggatccaattcggtgatctgccttggcaggtatcatgtgcgaagtggtgaaggcaaacctttgtcctggagccattgcaaatggccttgccaagaataggactgttccgagctgggacaacttgttaaacatgtataacctaactagttcacatagtgcttttgatcgaaaaatcaatctgatttatttcgtacccctcgctcaatgagaaaatgggtcagattctataggatcaaacctataacccctgaagaatgagcatgttggggacactac

SEQ ID NO: 33916 - DNA, 283 bp, Gossypium hirsutum
  Clone ID: LIB3149-029-Q1-K1-C6
gtacaggaattagtgccggtattgtcctaatggagcttgtaatcttttgttattcataaatggaagtcggagtccttgccatgaaggttgaacttgaatctcgttgtgtgtagttttactagtgcaattcatcaccttatcatattattagattggtaatatttttgtgtaattttttatgtatgcattgaaactcataataattagagaaatcatttttgacgaaaaaaaaagaaataaaaaaaaaaaaaaagtttgaatgactaaagaaatctaacttagt

SEQ ID NO: 33917 - DNA, 427 bp, Gossypium hirsutum
  Clone ID: LIB3149-029-Q1-K1-C7
gagatattaaattctcccgagagggcttgtcatctggctaaacaagcatttgatgaggctattgctgagcttgatagccttaatgaagaatcttacaaggatagcacccttatcatgcagcttcttagggacaacctcaccttgtggacctcggatctgccagaggaaggaggtgagcaatcaaaagcagatgaacctcaggctgagagttaattggatgaaagagtattcttttaagactgggcttgtcgagataggaaaggggcttgctgctagagtgacctgctttcaactcatggtagtagtaccaggatttgttacctatgacatggttcgatttgtttatcagatgttttcagactgttgttctgtgttctcttctgtttaaacataattgaatcggttacactttatagtctttatgact

SEQ ID NO: 33918 - DNA, 272 bp, Gossypium hirsutum
  Clone ID: LIB3149-029-Q1-K1-C8
gagatataaaattctcccgagagggtttgtatacggctaaacaagcattagaagaggctattgctgaacttggtagccttaacgaataatcttacaaggatagcacccttatcatgcagcttcttatggacaacctcaccttgtggacctcggatctgtcacaggaaggaggtgagcaatcaatagctgatgaacctcaggctgagagttaattggatgaaagagtattctcttaagactgggcttgtcgagataggaaaggggcttgctgc

SEQ ID NO: 33919 - DNA, 419 bp, Gossypium hirsutum
  Clone ID: LIB3149-029-Q1-K1-C9
gagaaaactcttattttttgcatcaagacattaacaaagcttgtccatcggctttctcaagaggaacttctggctcagctaccttcatttttaccggttcttttttgcgcattcagcaatcaaagcgctgaagttcgcaagactgttgttttctgcttggtcgacatttacgtcatgctcgggaaggcgttccggccatacctgcaggatctcaatgggacccagttgcgtctggtgactctttatgccaacagaatttctcaagccagaactggaacttgtgttgaagctattaatttgccagcagtctgaatctgtgaatttaggggttcttttatgtaattctttatttaattaattttcctttttcatatatttgtctttggtgttcttgtgattttgagtttggaatagaaagg

SEQ ID NO: 33920 - DNA, 422 bp, Gossypium hirsutum
  Clone ID: LIB3149-029-Q1-K1-D10
atcacaggatcagcctacttgtgcagatgccaccaccaatggaccagatgaagttgctgggactgagcagaccgaggaggatgcatctgccgttgatgtgaaagagcggctaaagaaggtggcgtctatgaagaagaagaaatctagtaaagagatggatgctgccgcaaaagctgccgcacaagaagcagctgcaaggagtgcaaggctagctgcagcaaagaagaaagagaagaaccattacaaccaacagccagtgcggtaaaaacaaatcccgttcttatatatatatatatttgagatatgaacatgtattttattgttgttcatatgacaatatgaaataaacagtgggctttggttcagtgaaaatggtgacattttagttggatttgaatgaactaaaacgaaaattttaaatt

SEQ ID NO: 33921 - DNA, 448 bp, Gossypium hirsutum
  unsure (1)..(448): unsure at all n locations; Clone ID: LIB3149-029-Q1-K1-D11
cctcggattagaaaccgccggcggtgtgatgactgttttgatcccaagaaacactaccatccccaccaagaaagaacaggtcttttcaacatactccgataaccaacccggtgtattaatccaagtttacgaaggtgaacgaacaagaacaagagataacaacttattaggcaaattcgaactctccggcatcccaccagctccacgaggtgtaccgcaaatcaccgtgtgcttcgagattgacgccaacggcatcttaaacgtttcagccgaagacaaaacaaccggtcaaaagaacaaaatcaccatcacgaacgataaaggaagactttcgaaagaagagatcgaaaagatggttcaagaagctgagaaatacaaatcttgagacgaagaacacangaagaaagtggaagcaaagaacgcatgggagaattacgcttacaacatg

SEQ ID NO: 33922 - DNA, 442 bp, Gossypium hirsutum
  Clone ID: LIB3149-029-Q1-K1-D12
gactaaaggaggaaaaatcaagttgactgtttattacgtggatgatgacgtagacgtcgacggtgggatgacggtaacggaatggagtgacggtggtgaagggaggtgctgcggggagtggtgggagagttgggaaagagtgttgaggtttatgaatggtgaagcagttttgtattgtttttatgattttgattgggtttatattgtaattttgttatgttatagtttggattatgtttgttgttttgttgttattttttttgattttgtttttttattttttattattttttttgtttatgtttatatttatattatttttttatttttttttttttattatttttttttttttgttatttatttttttatttttttattctttaagttatgattttatagttatgttgttttttttttgttttatttttatagtcttttt

SEQ ID NO: 33923 - DNA, 221 bp, Gossypium hirsutum
  Clone ID: LIB3149-029-Q1-K1-D5
gtctgctatttgttatgtgaattgctccgttatttctacgtttagaggacttctataacttatttttcttacaaattctattaccaattatataaacctaagctatggcttctatctcggaagtatttttttgggttaaaaaaaaaaaaaaaaaaaaaattaaaaaattaaaaaataaataaataaaaatatttttaataaattaaaaaataaataatagg

SEQ ID NO: 33924 - DNA, 431 bp, Gossypium hirsutum
  Clone ID: LIB3149-029-Q1-K1-D6
ataataataatcccatggaaaaaagtgggaaagaggacacccagaccaagcaaaccactaaacctgtcaaacatctcatcaagaaaattattaaaaagtttcatgcttcttcagggaaagaagaaactaattccttttcaacaaagaaaaagctccaaaaggtcataaaactgttccacagaaaaatccaccctgaaaactctatagctcaaagagagtctaagatgaatactgctccttatagtgacaatgactatactggtggagacaacatgcggtttcctcagggatcaagatctaaggcaggattaggaaacaacaagaagaagaccatctctaaactgcctcaatacgggcttactggctgtactgctgcaacttgaaatggggagcactggattaaaacagatgcagactatttggtgttggag

SEQ ID NO: 33925 - DNA, 330 bp, Gossypium hirsutum
  Clone ID: LIB3149-029-Q1-K1-D7
acctgtatggtgaccattaattgtttgaatttctcttctactggaaaacccttggatgctggtccgctaccttgaacgctggagtctgtcatgctgccggctgagcccaaggccacaaccagtcctatcgatgctatgatgtgacacgcgaagaggacgatcgattatcgtacttacgtaacagacgggccgtctcttactctctatgatatgggatccggatcctgctcacgattgcttcaaccacccctggccggcataccggatgcgtctgcttgcgaactgcctgtgaggctcttccaaaacaaggcaatttgcctgagacgctat

SEQ ID NO: 33926 - DNA, 427 bp, Gossypium hirsutum
  Clone ID: LIB3149-029-Q1-K1-D8
cctgaagtttcgatgcctaatgttccaggaggcatgctttctgttccatatgatatgggcagcatgccaatgcgtgatgcaccactttctcaaccaattccaattggagctttggcctcagctcttgcaaatgctactccagaacagcaaagaacgatgctgggggagaatctctatccacttgtcgagcagctggaacccgatgcagcagccaaagtaacagggatgcttctggagatggaccagacggaggttttacacttgctcgagtcaccagaagctctaaaagccaaagttgcagaagcaatggaagttctgaggactgtagcacagcaacagcagcaagctggtggagctgctgatcagctggcttcattgtctttaaatgataaccttgtttcatgagttggtagtagtgttggcctat

SEQ ID NO: 33927 - DNA, 298 bp, Gossypium hirsutum
  Clone ID: LIB3149-029-Q1-K1-D9
cttttgcagaagattttgaaccgagacctaacatttcggcttacgggggcgatgatgctggtcttaaaggacagaaagaatcattcactaaagatttcgatccacagccaaatatctccgcttacaataactaattaaaagcgaaacccaagtaccattggcttagacccacatcttccattaatttcgtcatcagattgtgtgtgaagctttatgttttatatttgtgaaaaaaataagtgggttgttatgaatcacactgaagcggcgcattaaacgcggaggatgtggagaatac

SEQ ID NO: 33928 - DNA, 383 bp, Gossypium hirsutum
  Clone ID: LIB3149-029-Q1-K1-E1
gtgatttcattagaagcgctttgtttgcgagctagccgacgcaccgtcccttcctcctccgcagtttgcttctaaagttcatcaattccaatctggacttttaggtaaaaatcttgtggctgacgtggataaagggaagttgctgcaatgggcgttcaagattatgcagagtcaaagttgaagccatctgttgatttaactggatctgcaaaagaatgtagtaacgggccatctattggtgttatagacatcggtgtcagtcaaagtgcctttcttttccgagttgcattgccggggatcaggagcgatcaaagtaagttaaaatgtgagatccaacgtgatggaaaggttctgatacagggtatagtaacgcaaggcagtga

SEQ ID NO: 33929 - DNA, 431 bp, Gossypium hirsutum
  unsure (1)..(431): unsure at all n locations; Clone ID: LIB3149-029-Q1-K1-E12
cgctcgcttccccatctacagggtttacaaagggattgaggcagctgtaaccaatggctcccaaggttgagaagaagggagatgcaaaggcacaggccttgaaggctgcaaaagcagtgaaatctggagccacttttaagaagaaggccaagaagatccgaacaaaggttacgtttcacaggccaaggaccttgaagaaagataggaacccaaagtatccacgcattagtgccccaccaaggaacaagcttgaccattaccagattctcaagtttcccctcacaactgagtcagccatgaagaagatcgaggacaataacactttagtatttattgttgacatccgtgcagacaagaagaagatcaaagatgctgtgaagaagatgtatgatattcangccaagaaagtgaacaccttgatcaagcccgat

SEQ ID NO: 33930 - DNA, 220 bp, Gossypium hirsutum
  Clone ID: LIB3149-029-Q1-K1-E2
catgtagattagaaagcagattccattaggtaaaatttgattcttttggtacaaaacctgaaacaggaaagtccttttttttttttttttctataaagttctaaagtttggttttattcataatgagaaggaattttggacccacgcatccccaccaaattgtaataaaagtaagtgtaggttagttttcctcgtaaaaaaaaagctcttcttttatttt

SEQ ID NO: 33931 - DNA, 383 bp, Gossypium hirsutum
  Clone ID: LIB3149-029-Q1-K1-E3
cgtttgtcttagatctcagaagatggcccgtaccaagcaaactgcgcgtaagtcgactggtgggaaggctccaaggaagcaacttgctaccaaggctgcccgtaaatctgccccaaccaccggtggtgtgaagaagcctcatcgctaccgtcctggaactgttgctcttcgtgaaattcgaaagtaccagaagagtactgagcttcttatcaggaaattgcctttccagaggcttgttcgtgaaattgcccaggacttcaagactgatttgcgtttccagagcccatgccgttcttgctcttcaggaagctgcagaagcataccttgtgggtctctttgaagacaccaacctgtgtgcgatccacgccaagcgtgttactata

SEQ ID NO: 33932 - DNA, 300 bp, Gossypium hirsutum
  Clone ID: LIB3149-029-Q1-K1-E4
cgtttgtcttagatcttataagatggcccgttccatgcaaactgcgcgtaagtcgactggtggggaggctccaaggaagcaacttgctaccaaggctgcccgtaaatttgccccaaccaccggtggtgtgaagaagccttttcgctaccgtcctggaactgttgctctttgtgaaattcgaaagtaccagaagagtactgagcttcttatcaggaaattgcctatccagaggcttgttcgagaaattgcccaggacttcaagactgatttgtgtttccagaaccaagccgattttgcttt

SEQ ID NO: 33933 - DNA, 399 bp, Gossypium hirsutum
  Clone ID: LIB3149-029-Q1-K1-E9
gctttactgagctccatctctctgtctctctcccatttacctccatggctgtctcttttaaaatgtgtgtgagtatcgggctatttgtggggcttatgatgctggggctggtaagctcagcttaattcgatgagctttttcaacccggttgggctatggatcacttcatctatgaaggagagctccttaagctcaaactcgacaactattctggtaatattcacccttttttgctctccaaggacccacctacttatgttcattgactccctgtttttcattacaatatggtactttcaactttttttttttttgttaacatgcccgcttatttattaatgaaaatggtgggttttggtgatatcaagtgctggctttgcatcaaaaagcaagtattta

SEQ ID NO: 33934 - DNA, 421 bp, Gossypium hirsutum
  Clone ID: LIB3149-029-Q1-K1-F10
aattttctcccttactaacaacataaaccctgaaatgtcggacgacgatcatcatttcgaatccaaggctgatgccggcgcctccaaaacctatcctcagcaagccggtactatccgtaagaacggctatatcgtcattaaaggccgtccctgcaaggttgtggaagtttccacctccaagacggggaagcacggtcatgctaagtgtcacttcgttgggatcgatatcttcactggcaagaagttggaagatattgttccctcctcccataactgtgatgttccgcatgtcaatcgtactgactaccaattgattgacatttctgaggatggatttgtgagcttgctgactgatagtggtgatactaaggacgatctcaggctcccaactgatgagaacttgttgaaacagatcaaggat

SEQ ID NO: 33935 - DNA, 390 bp, Gossypium hirsutum
  Clone ID: LIB3149-029-Q1-K1-F11
ctttcaagtacccccactggagttgagacacctgatgttattgaccttcgtaaacagcagagaaaggagcctgagaggcctctttaccaagtgcttgaagaaaaaaaagagaggatggctcctgggactttacttggcacaactcacacatatgtggttaacactggcacccaagacaagtcagcagccaaaagggttgatcttctgaagggtcaaaaatctgacagggtggaagtcagtttacagccagaggagttggaagttatggacaatgtgttgcctgcaaagtatgaagaagctagggaagaggagaagctacgcattcagcgagaggactttagtgatatggtggcttgaaatgagaaaaaaaggaagcgaaagatgcaggag

SEQ ID NO: 33936 - DNA, 355 bp, Gossypium hirsutum
  unsure (1)..(355): unsure at all n locations; Clone ID: LIB3149-029-Q1-K1-F2
cttatctctctggttctgcatttcggttccgctcactctcttaggaggatacttcggtacccgagctgaacctatccaataccctgtacgaaccaaccaaatcccacgagaaatccctgcacgcaaatatccatcatggctacttgttctcggtgctggtacccttccatttggaaccctcttcatcgaactcttcttcatcctttcaagcatttggctcggcaggttttactatgtcttcggtttcttgcttatcgtccttctactcctcatcatcgnttgtgctgaagtatctgttgtcctcacttacatgcatctttgtgtcgaggattggcgatggtggtggaacgcattc

SEQ ID NO: 33937 - DNA, 414 bp, Gossypium hirsutum
  Clone ID: LIB3149-029-Q1-K1-F3
cggaactggatgatgcgttcagtgcggcaacggcgttcgtggcggctgccgcggctgatcggttgtcgcagaaggttccgaacgaggtgcagatgcagctttacggtttgtacaagattgccaccgaagggccttgcactgctccgcagccttccgctttgaaaatgacggctcgtgctaagtggcaagcatggcacaaattgggtgctatgcctccagaggatgcaatgcagaaatacattgatgttgtgacagagctatatccatcttgggctgctggttcagctatgggcaaaggtggggctgataatgcttcaagtaaagatgtcaaaggaccaatgggaccggatttcagctcttttgtgtatgaagaggaatctgaaaatgatttgaaaatggatgctttccacactt

SEQ ID NO: 33938 - DNA, 150 bp, Gossypium hirsutum
  Clone ID: LIB3149-029-Q1-K1-F4
tggaatcccggccgacccacgcgccgcggaactggatgaagcttaagtgcggtattgcattcgaggaggatgacctgctgaacggggcggagaatgcacgaacgaggtgcaactgcactataccgtagtacaacatgccacagataggcc

SEQ ID NO: 33939 - DNA, 261 bp, Gossypium hirsutum
  Clone ID: LIB3149-029-Q1-K1-F6
ggaggagaaagctgcaagagcatatgatctagctgcactcaagtattggggaccctccactcacatcaatttcccattggagaattaccaaaaagaacttgaagaaatgaagaacatgacaagacaagagtatgttgctcacttgagaaggaaaagcagtggattttcaaggggagcttcaatgtacagaggagtgacaagacatcatcaacatggaagatggcaggctcggataggaagaatcgacaaggaatccataac

SEQ ID NO: 33940 - DNA, 413 bp, Gossypium hirsutum
  Clone ID: LIB3149-029-Q1-K1-F7
ctgaagggagctagtgagcgtggtgctaaaagaattcgtgttcatattctcaccgatggtcgtgatgtattggatggttcaagtgtagcctttgtggagactcttgagagtgaccttgcaaaattacgtgagaatggtgttgatgcccggattgcatctggtggaggccgcatgtatgtcacaatggaccgttatgagaatgattgggacgttgtgaaacgaggatgggatgctcaggttcgtggtgaagcccctcacaagtttgcaaatgctgttgaagctgtaaagaaattaagggaaaatgccaatgaccagtacttacctccctttgttattgttgatgagaatgagaaagctgtgggtccaatagaagatggtgatgctgttgttacttttaacttccgagcagatcg

SEQ ID NO: 33941 - DNA, 402 bp, Gossypium hirsutum
  Clone ID: LIB3149-029-Q1-K1-F8
gttaagtttgctgaacttttgaccaagattgacaggcgatctggtaaggagcttgagaaggaacccaagttcttgaagaatggtgatgctggtatgattaaaatgatttccaccaagcccatggttgtggagaccttttctgagtacccacccttgggccgttttgctgtgagggacatgcgtcagaccgtggcagttggtgttataaagaatgttgagaagaaggacccatccggtgccaaggtcaccaagtctgctgtttataagaagtgaaccgtgctggttaaatctaatgaagtttccgcagatggagtattttattatcataataatagtttgatagactttatcatttatgatatagcttgggcttttgcttggttttgcatgttatagtgtgtt

SEQ ID NO: 33942 - DNA, 357 bp, Gossypium hirsutum
  Clone ID: LIB3149-029-Q1-K1-F9
gattataaaatatttataaaaacctcaataatataaaagcttaactttgaagctgcattaaatagttccacaactttttcctgtctagcccacgcgtccgtcttctttcactcagttcgacaacaccaaggccggttccaaagccaagaaccttgaaaaagtggcaaacgagacgactcagaagacaagccgagggagagagaaagaagggaagactcagcgaactcgaaagaacatttacagaggaatcaggcaaaggccatgggggaaatgggcggctgagataagaaatcctcacaaaggtgtccgagtctggctcggtacatacaacacggctgaagaagcggctcgagccta

SEQ ID NO: 33943 - DNA, 373 bp, Gossypium hirsutum
  unsure (1)..(373): unsure at all n locations; Clone ID: LIB3149-029-Q1-K1-G1
gcttgcagcagcttggaatattcttacacctgttctgcaatggatagaccagaataatatagcaccagagctgtacgagctcggaggtagaggaccagttggctcatactatctttgggctaaacatggggtttggtgggcagatgactaaaagggaatagcctgttgttgttcgagtttgagataacaaaacaggtaatttggctcgttacgatgtaaatcatgtaaaacaagagtatgttatgtatctgttttttggttttgctgctatacgaaaatggcaactgtgtatgattggatacatgccagaaagggaacaatgctcttttgcttgtgcatggctacaacaattccacattccanattgattaac

SEQ ID NO: 33944 - DNA, 104 bp, Gossypium hirsutum
  unsure (1)..(104): unsure at all n locations; Clone ID: LIB3149-029-Q1-K1-G10
gacccacgcgnccggaagaaggcacaaagcaggagccaacggacgccaaagaaggcaaaggaaccaggggaaaaggcgccaaagaagagcgggacacgagccag

SEQ ID NO: 33945 - DNA, 425 bp, Gossypium hirsutum
  unsure (1)..(425): unsure at all n locations; Clone ID: LIB3149-029-Q1-K1-G12
cggcgagcgaaccgggaaaagcccagcttgagaatcggtcgccatcggcgtccgaattgtagtctggagaagcgtcctcagcgacggacccggcccaagtcccctggaaggggcgccggagagggtgagagccccgtcgtgcccggaccctgtcgcaccaagaggcgctgtctacgagtcgggttgtttgggaatgcagccctaatcgggcggtaaattccgtccaaggctaaatacgggcgagagaccgatagcgaacaagtaccgcgagggaaagatgaaaaggactttgaaaagagagtcaaagagtgcttgaaattgtcgggagggaagcggatgggggccggcgatgcgccccggtcggatgtggaacggcgagaagccgtccgncgatcggctcggggcgtggaccgacgcgggtcatg

SEQ ID NO: 33946 - DNA, 416 bp, Gossypium hirsutum
  Clone ID: LIB3149-029-Q1-K1-G2
tagtagtggctctagcttcaatgcctcgattcctgatttccttcaagacagacgttttaatactcctcctacttcttcttcagcttcgttactaagagaccatggactccttcaggatattgttccaacacagatgaggaaagaggcaaaggaacagtaagacagtacgggttctttttttatatgtaattatatggttgctggtatgtagtttcctaatcctttactaactgataaagaacccaattcactatatctttttttattcaatctattatcatctgtataaaatcacctgtctctttatagtgtttttgcaggagaagtggtcttgtacttgggttttcttgtggctattattcctttgtatttaagggagaattcatttatggaaatattgggggttttttattatt

SEQ ID NO: 33947 - DNA, 349 bp, Gossypium hirsutum
  Clone ID: LIB3149-029-Q1-K1-G3
gtggaaggtttgtcccacgcgccgtgctcatggatcttgagcccgggaccatggatagtgtgagaaccgggccttatggtcagatctttaggcccgataactttgtcttcggccaatctggagctggtaataattgggctaaggggcattatactgaaggagccgagcttattgattcttttcttgatgttgtcagaaaggaagctgagaattgtgattgtctccaaggttttcaagtttgccactctcttggagggggaactggttcgggtatgggtactctgttgatttctaagatcagagaagaataccctgatagaatgatgctcacgttctcagtctttccatc

SEQ ID NO: 33948 - DNA, 346 bp, Gossypium hirsutum
  Clone ID: LIB3149-029-Q1-K1-G4
cttcgcgtctcacctacccactccttttcctccttcaaaccaatgtttctccccaatccttcccctaactaacaaacaataaaccagacaacccccccccccctttctcatctatggcctgcgccactaacgctatctctctttctctctcttccaaccccaactccaaattgtcctctgacttcatccccaagcttaataagcccgtcaatgtttctcttcgcgcttccacttccgctgagttgaatcccggacgactttttctctccagacccattggactcagtcgcaggatttgcgccaatgcaacttcggtgatggatcagtcagttggggaaaggagctc

SEQ ID NO: 33949 - DNA, 144 bp, Gossypium hirsutum
  Clone ID: LIB3149-029-Q1-K1-G5
gagaaaattagttagatggatccagacgcagtagccaaggcgttcgtcgagcactactacacgacgttcgatgcgaaccgggccggtctagccaatctctaccaggacggttcaatgttgaccttcgagggtcaaaagatccaa

SEQ ID NO: 33950 - DNA, 234 bp, Gossypium hirsutum
  Clone ID: LIB3149-029-Q1-K1-G6
ggttgggtcggcatgatgtcttcctccatcggaccgccttcaggcggcggtccgcagatttgttttgtgttggttcggatcaggggcggcgcgcgccggtaacggcgcgtcggcgctgtatcagtacttcatgacgacgaggcgcgtctgcgtgaattcgagcatcccgtgcttgccgtcgtcgccgccgaagcccgagcgttttcagccggcgtggaagccctggtacgggtc

SEQ ID NO: 33951 - DNA, 387 bp, Gossypium hirsutum
  Clone ID: LIB3149-029-Q1-K1-G7
ctcattctttacccggaacacaaataaacactaagaacaagacaatggcaccaaaagctgagaagaagccagctgagaagaagccagctgaggagaagaagacggtagctgagaaagcccccgccgagaagaagccaaaggcaggcaaaaagcttcccaaggaaggcggagctgcggccggagacaagaagaagaagagggccaagaagagtactgagacctacaagatctacatcttcaaggtcttgaagcaagttcaccctgatatcggtatctcaagcaaagctatgggaatcatgaacagcttcatcaatgatatctttgaaaagcttgcccaagaagcgtctaggctcgcaaggtacaacaagaagcctaccatcactttca

SEQ ID NO: 33952 - DNA, 410 bp, Gossypium hirsutum
  Clone ID: LIB3149-029-Q1-K1-G8
gggtgggggtggtgccggcggcggcggtaagaatatggggcagatgggccaaatgggtggtcagatgggtcacatgggtccaatgggtggtcagatgggctataacatgggccaaatgggaaaccatccgatgaaccagatgagtaattttgctgcagtgcaaggactaccagcagcaatgaataatggtggtgggtattatcaagggatgggaccaggaaatccttataatcagcctcaatatatggcagccatgatgatgaaccaacaacgtgcaaatggagggatgtatccacccatgatgtatgctcatcaaccatatccccaaccaaattatggaccttcacccatgcaatcacccccatttgaatcttatgctcattacttcagtgatgaaaacgcaaacagct

SEQ ID NO: 33953 - DNA, 90 bp, Gossypium hirsutum
  Clone ID: LIB3149-029-Q1-K1-G9
gttaaatgctcaaagtagtatccaacttttgtctaatttttcaaatcaacctttttaaaagtcttcaaataagagctttacacgtgcttt

SEQ ID NO: 33954 - DNA, 250 bp, Gossypium hirsutum
  Clone ID: LIB3149-029-Q1-K1-H11
accaaacgtatgaaactcatctttgagatacatgattatgagtttagcaggactgcccgcgatactaagcaaaccacctttacatcctgagagaaacacactgccgaaggcaagactgtacctggggcggaggccaatcatgctgattccgatactgcgggtgccgggactaccttcatccctaattcatcattaaatgaatgggttgctgaagaaccacctgttgctcccgacggtgctgatgcataaa

SEQ ID NO: 33955 - DNA, 431 bp, Gossypium hirsutum
  Clone ID: LIB3149-029-Q1-K1-H12
ccctgttgctgaagacatgtttcattggcaagcaactattatgggtcctccagatagcccgtatgccggtggggtgtttctagtcaccattcatttccctccggattatccatttaaaccacccaaggttgcattcaggacaaaggtatttcaccctaatattaacagcaacggtagcatttgccttgatattttaaaggaacagtggagccctgccctcaccatatccaaggtgttgctgtcaatctgctcactcctgacggatccaaatcctgatgaccctttggtgccggagattgcccacatgtacaaaacggataggaacaagtatgagacaaccgctcggagctggacccaaaaatatgctatgggttaaagtgctactacgtatgtaataagagggcttcattccctgtgactttggtctttaa

SEQ ID NO: 33956 - DNA, 220 bp, Gossypium hirsutum
  Clone ID: LIB3149-029-Q1-K1-H2
atttgaaatattttatattatcctcacccactacaaatgatgacgagaatgataaagaaatgaggtctataatcgctactttgttgtttgtttccctagttttgtgttcatcatttattcaactctcctttgcctcacctgctgctgctccttcacctgctcctccaagttactgtgatgggaagtgcggagagaggtgtgccaaggctgaaatgaaaag

SEQ ID NO: 33957 - DNA, 383 bp, Gossypium hirsutum
  Clone ID: LIB3149-029-Q1-K1-H3
ccggactccatacagcttgttgctgaacacgctgctgcaaagaacaaggtgttctcaatgaatctttctgctccatttatttgcgagttctttaaggatgcacaagagaaagcactaccgtatatggactttgtctttggcaacgaaactgaagcaagaaccttctcaaaggttcatggctgggagactgatgatgttgcagagatagccctgaagatttcgcagtggccaaaagcttctggaacatacaagaggactactgttattactcagggtgcagatccggtaattgttgccgaggatgggaaagtgaagcaattccctgttattttgttacccaaggaaaaagcttgttgatacaaatgggtgcaagtgatgccttt

SEQ ID NO: 33958 - DNA, 352 bp, Gossypium hirsutum
  Clone ID: LIB3149-029-Q1-K1-H4
aaaaaacatggccaaagttctgtaggtcattgcactatgtgagcttacagctttggttagtgctacacgcattctgaataatcaattggtggcagaaggctatgtgtactgtgatacttgccgcgctggttttgaaacccctaagactagaagcctatctgatgccatggttaggttggtatgctccgacaggaagagcggacaagttgtcttcaaaaaggagggatacaccgacaaaaccggaaaataccagattcgtgtattcgaggatcacttggatcagatctgtgatgcacttcttgtgaagagcttccagcttggttgtgccacaatgttccccggtcgtgaacgt

SEQ ID NO: 33959 - DNA, 208 bp, Gossypium hirsutum
  Clone ID: LIB3149-029-Q1-K1-H5
gctactcgttagtgtggttgttactgatgaagccaatgaaggagctcaactaatggagagagctgttaagaactaactggtagacaaactggaagcgatgcatgctgaggcggatcctcaaccacataggataacactgacattgaagatgacatatggcatgctccatagtgacatccataaggaaatcgccgaagtggtggcaaag

SEQ ID NO: 33960 - DNA, 406 bp, Gossypium hirsutum
  Clone ID: LIB3149-029-Q1-K1-H7
gaaagagagagtttcttcttcgctgctgcggaaggtttattttctttcccaaagaataaaagctttttctgcagtagcgttcaagtttttaccaatccaaaatttcaatttaaagaaaaaggagaaaacagaaatggctcgctctttctcaaacgctaagcttttctctactttcgttgtcgatggaatctctaacgttatctccagacgaggatatgcggcggcgtcacaaggaattgtgtcgagtggaataagaggaggagcaggaaggagcgctgctgcggtagtcaagaaaacaggggaagagatgtctggcggagctaaagagaaggtttcatgggttcccgaccccggtaccggatgctacagacccgagaactgtgccaacgagatcgacttggggagc

SEQ ID NO: 33961 - DNA, 355 bp, Gossypium hirsutum
  Clone ID: LIB3149-029-Q1-K1-H9
cgctgttgcccaatttccttttgcaaccgtcggtgggcgtattcccggcttaatcaaatctggagacatgtttgtaggcagaactagaaagaatttgggtttagaaccttaagctacacacacacacatacacatatatatttgccattgtatttcctcatttccacctttaattcctttttgcttataatgtttcacattttttgcacccctctgttggctgtttcatttgtatgttgttttgctttgtgcttttaaatagattctcaataagatttgatggtaggggcatgtatgtttatttgttagaacagttcaattcttttgcaatgaattatttagacaagttgtaagt

SEQ ID NO: 33962 - DNA, 346 bp, Gossypium hirsutum
  Clone ID: LIB3149-030-Q1-K1-A10
ccgcatactctatcttcttctttccaagaaatcgatcccgaggatgatatcaagctagccgaaaagaatcaaaaggaaaaagagggcaacatctctcttccgccgtttgggttagcaacttacaagatgcaaggggacgtgtggttgtcctcctccggttgtggaggaggggaccaagaaaggctattgtcacttttgggtgttgccgattcgtggctaaagcaactaagcgttcaacaccatgacttcaactatttctcgggtattcgacatggctaaaaaagccctctacatccctaataaacatggaaaaaagttcactcatcactcatttatcatcaaaagc

SEQ ID NO: 33963 - DNA, 348 bp, Gossypium hirsutum
  Clone ID: LIB3149-030-Q1-K1-A11
ccggagaaatcaaggaaagaatcaagaaaactaaggatgaaaagaaggcaaagaaagcagaagtagcggcaaagcaacaaaagactcagggcaagggtaacgttccaaagggtggagcaccgaaaggccccaagcttggtggcggtggtggaaagcgttaagttgctaaagttattatctgtttttccctagccagataaaaatagggttagtatgtttattttgaagccaattttatggagttaatggcattgatggccatgatgtttttgcatttatgcttgatcctatactatgaacccagtgttggaagttttgtgatgaagtgcttttatggattttgaattt

SEQ ID NO: 33964 - DNA, 393 bp, Gossypium hirsutum
  Clone ID: LIB3149-030-Q1-K1-A12
ccgcttgctcttcctcctcctccatggaagccccccctcaaggttacaggagaaatgtgggtatttgtctcatcaattcctccaaaaagggtgggattgatgacaatgaagatccaaaagttgcagccctcagagaattaaaggaagaaacaggtgttagctcagctgaaattctcgcagaggtaccttattggctgacatacgacttcccaccagaagtcagggcaaaactgaaacatcagtggggatcagactggaaaggtcaagctcaaaagtggtttctccttaaattcacggggaaagaagaagaaatcaatcttctgggtgatgggagtgagaaacctgagtttggtgaatggtcttggatgacaccagagcaaatagttgagcatg

SEQ ID NO: 33965 - DNA, 348 bp, Gossypium hirsutum
  Clone ID: LIB3149-030-Q1-K1-A2
ggccctctcctccatctccaataaagcctcctactgtttgcgataattattacagctgtcccgaaagcaatacctgctgctgtgtctacgagtactatggctactgctttgcttgggggtgctgcccacttgaggctgccacttgctgtgacgaccactacagctgctgtcctcatgactatcctatctgcaacttaaatgaaggcacctgcttgatgagcaagggtaacccaatggcagtgaaggcactgaggcgcactcctgctacgcctttctgggcccatggaagtgttggcgtaaagaacaatgcttaaggagaagcctgggattttatgcagaaaatgatac

SEQ ID NO: 33966 - DNA, 433 bp, Gossypium hirsutum
  Clone ID: LIB3149-030-Q1-K1-A3
tgaactggaggaacatataacccaggactcagagcagtgggagtggcagatgactgtatctaagctatttgaagaacggcctatatggcccaaggaatctgtaactgagcgcttgcttcagaaaggtctaaaatttagccatttggtgcttaaaaggcttctacttggggttgcttactacttctcaaatggaccatttcggagattctggatcagaaaaggatatgatcctcgcaaagatcctgagtctcgcatatatcagagaactgattttcgtgtacctgaaccattgcggaactatgcagatgctagcgtggctaacaatttgacgcataagtggggagatttatgttcattccaagtatttccttacaaaatccagatgattttacaactatttgaactggatgatgattacattcaacaagagata

SEQ ID NO: 33967 - DNA, 388 bp, Gossypium hirsutum
  Clone ID: LIB3149-030-Q1-K1-A4
cctccatttccaccgacaaaagctggtttctggctgtgcagtcgaagtttttctcctcaggaaatggtttaacggtaccatcctggtgctcaataaccaaagtttcattctctacgtcagcattgaatgccgaattgaaggtttttattcgtcagtaacactactttctgtattcacagtttctatctacttctaatatccttttatatatatatatttcacattggatagtggtcattgtattcttagggattgaaccatttgttattattgttgttagacttataggtagattttgtacttcagtgttcatgtttcaccctgattcttgattgtgtggtttggcaatgaagattcaagccatattgtatttgtaaaagcttggaaa

SEQ ID NO: 33968 - DNA, 344 bp, Gossypium hirsutum
  Clone ID: LIB3149-030-Q1-K1-A5
ccctcaaatgttactttgattccctccagtccaattatgacactattctcaaagaaaatgagaagctcatatgtgaggtagcttacttgactgaaaaactacaagccaaagatgtggcaacagaagcaatagcacgtgaaaaggatgaagggatagcagctgagatggcctgcgccctccaattcagtatgaaggtggaggaccgtcttatgagcggcagtgtctgaagcgcggtggtggatgaggatgccccacagctggtggacagcggcaatttctactttgcaagcgatgaatactccatatgcattggccctttcgatgggggtcattcagaagatgag

SEQ ID NO: 33969 - DNA, 390 bp, Gossypium hirsutum
  Clone ID: LIB3149-030-Q1-K1-A8
aaaaccggcatcattgtgttggctgaaggacgtctgatgaacttgggatgtgccactggacacccaagttttgtcatgtcctgctcgttcactaaccaggtgattgcccagctcgaactatggaaggagaaggcaactggaaaatatgagaagaaggtttacgtattgccaaagcacctcgacgagaaagttgctgcacttcacctcggcaagctcggagctaagctcactaagctcactaaagatcaagctgattacattagtgtgcctgttgaaggtccttacaagcctcctcattacaggtactgagagaagagttgatgagtttttatcaagaaagaaaaaacatccggatggtttgattggttcttggtttactgaaatttcatg

SEQ ID NO: 33970 - DNA, 287 bp, Gossypium hirsutum
  unsure (1)..(287): unsure at all n locations; Clone ID: LIB3149-030-Q1-K1-A9
tttgcttagctagaaaagaaaagaaaagaaaaagaaaatgaaaaagatgattagagataagaaaagatggattgattggattagataggttgtggggagggagtggggggcaaagtgcatgtgcaagtgcaagtgcatgtgcaagttcaagttcaatgcttaaatgcaaatgcaaatgggtagggtgtgggtgggggtggggtgcanaagcatgtgtgggatgtcagttgcttttgaatacatgtgatactggcataactatatatattttgctttctaaacagcac

SEQ ID NO: 33971 - DNA, 353 bp, Gossypium hirsutum
  Clone ID: LIB3149-030-Q1-K1-B1
cgacacggtcttcttgcaaacaatgtcgatatgaacaagagggctggtgagttgactgcacaggaactggacaatctcatgaccattgttgccaaccccaggcagtttaaaattccagattggtttctgaataggcaaaaggattacaaggatggaaagtattcccaggttgtttctaatgctctcgacatgaagttgagagatgacttggagcgtttgaagaaaatcaggaaccaccgtgggctgaggcactactggggcctccgtgtccgcggtcagcacaccaagactactggtcgcagagggaagactgttggtgtctctaagaagcgttgagtgcatatacatatata

SEQ ID NO: 33972 - DNA, 439 bp, Gossypium hirsutum
  Clone ID: LIB3149-030-Q1-K1-B10
ccgttcttcttcttcaaacataagattttcaaagaagccaagggtggatgagagtgagaaccttactctcaacagtataagacaggccttaattcgacaagaagatagcataatatttagccttttggagagagctcagtactgttataacccagacacatataagcaagattcattctccatggatggatttcatgggtctttgtctttggttgagttcatggttcgggaaaccgaaaggctccatgctcaggttggcagatataaaagtcctgatgaacaccctttcttcccatcatatctacccgagccaatgcttccacctttgcaatatccaaaggttttgcatcactgtgctgcttcaattaacataaacaataaggtttggaatatgtattttgcagagcttctaccaagattggtagaagctggagatgat

SEQ ID NO: 33973 - DNA, 382 bp, Gossypium hirsutum
  Clone ID: LIB3149-030-Q1-K1-B11
ccggaaaaagctttttgtgacttatcctccctctcacaagcatatgtattttacaaattatcacaaacccaagttattagtttttataaattcaaacctatccttcaatatcatggaacatctctttttcttaaaaatgaaataaaagattattttgaagaacggggagtatctcattccagattaagacatcattatgggttaagacagaaaattgtttggcattctggaatgaatgaatggaaaaactggttaaggagtcgttatcaatacgatttagctcagaatagatggctaaaattaggaccaggacaatggcgaaatagagtcaatcaacactatctggctcaaaataaacatttaacaaaatgggattcagatg

SEQ ID NO: 33974 - DNA, 441 bp, Gossypium hirsutum
  Clone ID: LIB3149-030-Q1-K1-B12
tccgatttgttggaggacttgactcagatgttagtgatgatgatcttaggcaacctttttcccagtttggtgaggtcatctccgtaaaaataccacccgggaaaggatgtgggtttgtgcaatttgcaaacagaacgaatgctgaggaagcaatccagagtttgaacgggatgaccataggccagcagactgttcgtctttcttggggtcgtactataggaaacaagcagcagtggaatggaggacatcattgagggcaaggcgatggtggttatggctactgctatgctgcagcaccaaatcaggatccaaacacgtatactggggctgctgctactggttcttcttaagaggggtgcatgacaatcatgaatggcttgtaatctgaacttgcaggacaagttttcaagttaatcagattcattaattaagtaggatggg

SEQ ID NO: 33975 - DNA, 368 bp, Gossypium hirsutum
  Clone ID: LIB3149-030-Q1-K1-B3
gagcaaccagggtgctacccagcctaaacccgagcaagagagtatactccagcatgcacagcagcagattgctttgcagaggctaattttgcaaccacaaggtgtgccgacaaaggttgtgtgtttgactcaagcacttaatgttgatgatctcagagatgatgatgagtacgaggacattgtggaagatatgagacaagagggtggaaaatatggtgcattggtgaatattgtcatcccacgcccaaatccgaatggagaacctgccccaggtgtcgggaaggtatttctggaatactcggatgttgaaggttccaaaaaggctcaagctgcaatgaatggtcggaaattcggcggaaatcaagtta

SEQ ID NO: 33976 - DNA, 423 bp, Gossypium hirsutum
  Clone ID: LIB3149-030-Q1-K1-B4
ggatctggtgactgtcaaaaaggacagattgaatgctgttggagctgcaatatatcaaaagccagcttccaacgactgctactacaaaaggtctaaaaatgcacctccactttgtgaagaatctgatgatcctaatgcagcctggaatgtatcccttcaggcatgcatgcataaagtgcctgaagattcaacagagcggggatccctttggcctgtgcaatggccagaacggttggaacaacctccatactggttgaattctcagatcggcgtttatggtaaggctgctcaagaggatttcactgcagactacaatcactggaaaactgttatctctgagtcgtatttgaaagggatgggaatcgactggtcttctgtgagaaatggcatggatatgaaagctgtttatggagggtttgctgc

SEQ ID NO: 33977 - DNA, 378 bp, Gossypium hirsutum
  Clone ID: LIB3149-030-Q1-K1-B5
aaattaaaaaaaaaatttatattaaaaaatttttttaaaaaaaaataaaaaaaaaataaaaagaaggaagtataaaaaatttttttttattataataaaaaatatgaaaacaaatataaaagttataaatatattttaaaaaataaaaaaaaaaaaggggggggccctttttgggggtcccaattttttttccgggggtttgcagggttttattttttttttggggcccctaaatttattttcctgggccgggtttttaccccgtggggctgggaaaacccttggggtcccccatttttttggctttggggcaattccccttttccccgttggggtaaataaaaaaagggccccccccatttccctttcccaaaattt

SEQ ID NO: 33978 - DNA, 118 bp, Gossypium hirsutum
  Clone ID: LIB3149-030-Q1-K1-B6
agctaaccaaggtgctatcaatcccaaattttttttagagagtatcactccaacacgcacagctggggattgttttccagaggctcgaattgcaacctcaaggtgtcccaacaaaggt

SEQ ID NO: 33979 - DNA, 339 bp, Gossypium hirsutum
  Clone ID: LIB3149-030-Q1-K1-B7
agattccgttgtccagaagtcctcttccagccatctctcattggaatggaagctgctggaatccatgaaactacctacaactctatcatgaagtttgatgtggatatcaggaaggatctctacggtaacattgtgctcagtggtggttcaaccatgttccctggtattgcagaccgtatgagcaaggagatcactgctcttgccccaagcagcatgaagatcaaggttgttgcaccaccagagagaaagtacagtgtctggatcggaggatctatcttggcatcactcagcaccttccagcagatgtggatttccaagggtgagtatgatgagtcgggt

SEQ ID NO: 33980 - DNA, 386 bp, Gossypium hirsutum
  unsure (1)..(386): unsure at all n locations; Clone ID: LIB3149-030-Q1-K1-B9
agattccgntgtccataaatcctcttcctttcatctctcattggaatggaagctggtggaatccatgaaactacctacaactctatcatgaagattgatgtggatatcaggaaggatctctacagtaacattgtgctcaccggtggttcaaccatgttccctggtatcgcataccgtatgagcaaggagatcactgatcttgccccaagcagcatgaagatcaaggatgttgcaccgccagagaaaaagtacagtggctgtatcggatgatctatcttggcatatgtcagcaccttccagcggatgtggattttcaaggatgaagttgatgagttcggttcttccattgttcacaagaagtgcttctattattgcaagccaattta

SEQ ID NO: 33981 - DNA, 359 bp, Gossypium hirsutum
  Clone ID: LIB3149-030-Q1-K1-C1
gtatacattttgtagttacattggttttttaaatgcaaataataaaatgatttttgttggtatgtttacctttactagtgaggttaggctggttgtagggattgcccaaccggtgacttggaacccttatagaatcatcctcttttcattcacccttgtctggttacagctcaagttgtcatatacacattgttagtgagatatgaagtacagccgaattagccatcgcagaccacaaatgagggtgcaaaaatattgtttttggtggttggttggcaggtttagggatggaatgcttctgagattcatattgtatgacaatgacagacaatgttaaggcttccatttatagggatgga

SEQ ID NO: 33982 - DNA, 387 bp, Gossypium hirsutum
  Clone ID: LIB3149-030-Q1-K1-C11
tccgcaagaaatggatcgtagaagtgcatttgcagttgctttgatttgctttgtggtaaccgctgtcggtggtcaatctccggcagcctcacctactaaagctccgccggccgcggctactcctgctactgctcccgctactgcccctgttagcaaacctaaatcaccggctccaactgctgcccctaccacttccccaccaacttcttcaccaccggctgcggctccggagaagtctgcggcggttccagccccatctaaatctgctacggcttcttctcctccggctgctgctccggtgagttctccacctgctccagtacctgtgagctctcctccagccaaatcgcctcccgttgctgcaccgacgactccaccagagagctc

SEQ ID NO: 33983 - DNA, 387 bp, Gossypium hirsutum
  Clone ID: LIB3149-030-Q1-K1-C12
tccgcaataaatggatcgtagattagcatttgcatttgctctgatttgctttgaggtaaccgctggcggtggtcaatctccggcagcctcacctactaaagctccgccggccgcggctactcctgctactgctcccgctactgcccctgttagcaaacctaaatcaccggctccaactgctgcccctaccacttccccaccaacttcttcaccaccggctgcggctccggagaagtctgcggcggttccagccccatctaaatctgctacggcttcttctcctccggctgctgcttcggagagttcttcacctgctccagtacctgtgagctctcctacagccaaatcgccttccgttgctgcaccgactactccaccagaaagctc

SEQ ID NO: 33984 - DNA, 414 bp, Gossypium hirsutum
  Clone ID: LIB3149-030-Q1-K1-C2
ggaaagtgagagcatatgttttaggagctttgtaagcatttcaagaaatcaataaaaaatctccctcacggagaatttccagtaaaactattctcaggaggcttatagccaaaatctaggatttaggagattcaaagagtttctgaaaattttcagagatcttttctggaggcgttgatacggcttggtggtaagacccgagaggcggcagtaaattccagtagccatccgcttgaaaagagaaaatcaccagaaacaggagaatcattccaaccaaacaaatccagaagaacgatggaaggtataaaaaacttaaattttatacaggagtcatatctgaggattcagagtaatctgaaatatttatctgaggaacggcagtgccgtactatctctatgataaactatctcgat

SEQ ID NO: 33985 - DNA, 283 bp, Gossypium hirsutum
  Clone ID: LIB3149-030-Q1-K1-C3
gccggaaaggagagcaagaattagacccgtttcatccaagaaataacaaaaaactgggggacgaaattacagcaaaccatctcagaggcttaagccaaaaactaggattaggagatcaagagttctgaaaattacagagaactttctggaggcgatgatacggcttggaggaagacccgaaaggcgggagaaaaaccagtagccatccgcttgaaaaagagaaaatcaccagaaacaggagaatcattccaaccaaaacaaatccagaagaacgatggaaggt

SEQ ID NO: 33986 - DNA, 350 bp, Gossypium hirsutum
  unsure (1)..(350): unsure at all n locations; Clone ID: LIB3149-030-Q1-K1-C5
tttgatctatggacagcatcgttgtggtaaaagtcgtaatgccagaggaatcattaccgcaaggcatagagggggaggtcataagcgtctataccgtaaaattgattttcgacgaaatgaaaaagacatatatggtagaatcgtaaccatagaatacgaccctaatcgaaatgcatacatttgtctcatacactatggggatggtgagaagagatatattttacatcccagaggggctataattggagataccattgtttctggtacagaagttcctataaaaatgggaaatgccctacctttgaccgatatgcccttaggcacggncatacataacatagaaatcacac

SEQ ID NO: 33987 - DNA, 364 bp, Gossypium hirsutum
  Clone ID: LIB3149-030-Q1-K1-C6
tggaactcacgttgatgcccctagccacttctttcaaaagtattatgaggagggctttgatgtttccccacttaacctggcacccttactgggcccggtctaatagttgatggtcccagaaacaagaacattactggtggagttattaagtcggtgaatatttcccggggaggccatcgtgtgcttttcaaaacacttaatacagacaggagggtgatgcataaaagagagtttgcttcaaacttcacaggggttaagaaggatggggcgcaatggttggttgataacaccgacatcaaactcgctggaatcgattacccatctatttctgcttatgttgaggctgcccctactcatcatatac

SEQ ID NO: 33988 - DNA, 411 bp, Gossypium hirsutum
  Clone ID: LIB3149-030-Q1-K1-C8
taaaaacacaaaggacagtgatgaacaccacaaactagaaacttcacctgtgttgcttgaaaaggttgattatagtaaccgtggttctgattcagattccaagggaagtgataagcgcagaactaagcacaaggatggtaagagaaagcataaacggtccgagaggcgtaaagtcacttcagacgacgatgattctagttatgattccgaaatcgatgacaggaaagaagctaagaggaggaaaaaggaagaaaagagattaagaaaggaagaaaaacgtaaacgtagcgaggaacggcgtcgcaaaagagaagcacggcgtgcagagaagctcaaaacaaaacgtcacgacgatgattctagttcagatggagagcatgcaagaactggaaagtcttgttcaggtgatga

SEQ ID NO: 33989 - DNA, 267 bp, Gossypium hirsutum
  Clone ID: LIB3149-030-Q1-K1-C9
tattaacacaaaggacattgatgaacaccatattctacaaacttcacctgtgttgcttgagaaggttgattatagtaaccgtggttctgattcacattccaagggaagtgataagcgcagatctaagcacaaggatggtaagagaaagcataaacggtccgagaggcgtaaagtcacttcagacgacgatgattctagttatgattccgaaatcgatgactggatagaagcttattggactgaaaaggtagaaatgagatttagaaa

SEQ ID NO: 33990 - DNA, 382 bp, Gossypium hirsutum
  Clone ID: LIB3149-030-Q1-K1-D1
gtgaagtggggttagcccaaatgcttcgaggagtgtgttataatggatgttgtcacccctgaacaagctcgtatcgctgaagaagccggagcttgtgccgttatggctcttgaacgagtcccggctgatatccgagcccaaggtggtgtggctcgaatgagtgacccacaactcattaaggaaattaagcaagctgttactatccctgtcatggctaaggctcgtattggtcatttcgttgaagcccaaatccttgaagccattggtattgattatgttgatgaaagtgaagttcttacacccgccgacgaagagaaccatatcaacaaacataactttaggatccctttcgtttgtggatgtcggaatttaggtgaagcac

SEQ ID NO: 33991 - DNA, 425 bp, Gossypium hirsutum
  Clone ID: LIB3149-030-Q1-K1-D10
tccgaagcgaaagcttatctcttttcgtctctgaatctgatcaatcaacacctgaaaaggaaaacttacaaacaactactactagtctactacccagcactagaagcagctcgtagccagccatggatgaagagtacgatgtcatagttctaggaactggtctcaaggaatgcatcctcagcggtcttctttctgttgacggactcaaggttctgcatatggataggaatgattactatggaggagagtctacatcactcaacctcattcagctctggaagaagtttagaggaaatgataagcctcctgctcatttgggctctagcagagattataatgtggacatggtccctaagtttatgatggcaaatggcactcttgtgcgtgttcttattcatacggatgttacaaagtatctttacttc

SEQ ID NO: 33992 - DNA, 404 bp, Gossypium hirsutum
  Clone ID: LIB3149-030-Q1-K1-D11
cagcagctgagatggggttgcaacttgttggtgagatacccattgaattggacattaggaaaggctgtgacaaaggcatgccgatagtggtatcagcacctgattccgctgtctccaaggcttaccatgatgtagctcaaactgttgtcatgagacttgaggatctggcaaaggcatgaaaatactcttgaggttggtcagtgaagtttgcttgtgccaaccatcttcattcccgtgttttcgtggtggtgctttgttcatcctgatataaataatttttaagtttgagcatttttggtcatgcgatgacaatattaagcatttgggaccatagtgattaagaaacttatttgatgaattacacactcagaccagtttagctaggagcatacgatttacagtct

SEQ ID NO: 33993 - DNA, 374 bp, Gossypium hirsutum
  Clone ID: LIB3149-030-Q1-K1-D12
cagcagctgagatggggttgcaacttgttggtgagatacccattgaattggacattaggaaaggctgtgacaaaggcatgccgatagtggtatcagcacctgattccgctgtctccaaggcttaccatgatgtaactcaaactgttgacatgagacttgaggatctggcaaaggcatgaaaatactcttgaggttgggcagcgaagtttgcttgtgccaaccatcttcattcccgtgttttcagggtggtgctctgttcatcctgatataaataatttttaagtttgaacatttttggtcatgcgatgacaatattaagcatttgggaccatagtgattaagaaacttatttgatgaattacacactcagacca

SEQ ID NO: 33994 - DNA, 385 bp, Gossypium hirsutum
  Clone ID: LIB3149-030-Q1-K1-D2
gtttttggattgcacacccaataagggaatgcctactgaatcagaccgtttcatgatggatccagttagttttgcagtagattttgcaaaaaattggtctcaccctagtcacattgtattgtttgattcagaggagaggcacttgaaggattttctaatttcacattcttttagagaggttagaaggttcttccatgctcactttaaggtggaccgtgatcttcaagcatccgttgttgtatacgctgactgacacgtaaaagtttctaaaacctgtttcgcaatctagccttgatctttctgagccttttttgtttccagatgatggaattcatttattctttttagaaattttgttttttttaaaaaagaatttgaacttgag

SEQ ID NO: 33995 - DNA, 407 bp, Gossypium hirsutum
  Clone ID: LIB3149-030-Q1-K1-D3
gttcttgtattgcacacccaataagggaatgcttactgaatcagaccgtttcatgatggatccagttagttttgcagtagattttgcaaaaaattggcctcaccctagtcacattgtattgtttgattcataggagaggcacttgaaggattttctaatctcacattcttttagagaggttagaaggttctttcatgctcactttaaggtggaccgtgatcttcaagcatccgttgttgtatacgctgactgacacgtaaaagtttttaaaacctgtttcgcaatctagccttgatctttcttgagccctttttgtttccagatgatggaattcattttattcttttagaaattttgttttttttaaataagaattttaccttttgaaaaaaaaaccatagctgctg

SEQ ID NO: 33996 - DNA, 422 bp, Gossypium hirsutum
  unsure (1)..(422): unsure at all n locations; Clone ID: LIB3149-030-Q1-K1-D4
caggagcaaaactctgataagacactttggaaacttggaactcttcctgttggccttttagctttctacgggctgacagaaccacttgatcggagatggcatgtgttaggtttaggttacgatcttaacatcgacaaccgcctgatcgagagtgcagcagtcattcacttcaatggaaacatgaagccatggctaaaactagccatcggaaggtataagcctctatgggaaaggtacataaatcttagccacccatatctccaagaatgtgtcacaagttagacaaatgtgctctgtgctctatttttggttccaattgctcgacctccaatgatataaacccatgaaaaggccgatcgcggaaattcttttttgacattgttaggagatttgacatatcttttttggtagntntttttttt

SEQ ID NO: 33997 - DNA, 396 bp, Gossypium hirsutum
  Clone ID: LIB3149-030-Q1-K1-D5
tttgattacagcaaatgtgatagctaatttccttgtttagctcaatcaggggaacgagattcctaacaattttctttattgctggaacaagtcttaaccaagatcaagatcaaagtactgcactaagttatatatgcaatcattgcaatactttggcttcatctaaagcctgaaccagccctctgttgtacattgattcttcttcttttctaatctttttcctttgattaatgagacgtgatgatgattcggcattattttctcaccaggatgaattatgttacagaaattctaatactttgtgtgtctgtgcgagtgcttttatgtattaagatacatattgaatcaatgtctacgtattaaatttaaattcattaatgtttatatataagacat

SEQ ID NO: 33998 - DNA, 373 bp, Gossypium hirsutum
  Clone ID: LIB3149-030-Q1-K1-D6
tggaactcacgctgatgtccctagccacttctttcagaagcattatgaggagggctttgatgtttccacacttagcctgcaacacttactggtcctgtgctagtagttgatgttccaagaaacaagaacattactgctgaagttatgaagacggcgaatattccccggtgagaccatcgcgtgcttttcaaaacacttaatacagacaggaggttgatgcatataagagagtgtgctttagacttcacagggcctaagaatgatggagcgcacaggttggttgataacaccgacatcaaactcgttggaatcgattacctatctatttctgcttatgtagatgctgcccctactcatcatatacttttgaaaa

SEQ ID NO: 33999 - DNA, 382 bp, Gossypium hirsutum
  unsure (1)..(382): unsure at all n locations; Clone ID: LIB3149-030-Q1-K1-D7
aagatttcagctggtgtccttggtggagcaaccgcaatttgggtcctttttgagttgattgaataccacctacttgctttaatctgtcacatttcgatactctgtcttgcactactgtttttgtggtccaatgctcataccttcatccacaagtccccacctcgcatccccgaaattcatttgccagaggagccattcctccaagttgcctctgcattggcaattgaacttaaccagggattgaaacttctgcgagatattgcatctggaagaaatctgaaggagttccttatggttatagctgcattctgggttctgtcaattgtggggagttggtgcaacttcttgaccttgntctatatatgtttcgnattgctgcaca

SEQ ID NO: 34000 - DNA, 414 bp, Gossypium hirsutum
  unsure (1)..(414): unsure at all n locations; Clone ID: LIB3149-030-Q1-K1-D8
gaaagtcttcactccctaggatctagcagtcattccatatagaaattttattccctcttccaattctccaccacaacccacttcggaggagaccttttgctgcccagatgctcttttaggtaaaagaaggtaaattttccaattctgcacttagaaaattcgaattcgaaaaatattttgctttaagaactctggccagtaaagaatttaggtaattaaaaatacaccaaccttgtttggctaataatgcaatattgaattggctaaaaatttggaaacccaaacctccattctcttttcaaaaacaaatatttttccacgagcactagtgaatacctttttttccccttgcccttgtgccacanatacttagcaataatatcttccactttatcatataaaggttttggtaat

SEQ ID NO: 34001 - DNA, 416 bp, Gossypium hirsutum
  Clone ID: LIB3149-030-Q1-K1-D9
ttaaaggttgcctctagacataatactgcaataaaatatagaacgaaaagacagtatctgaaagtatatgggtcaagttgtaatatatttttacaacgaagtaggtgagtactccgaggattgtacctaatacaggcgagcgctagatcaattttaacctaaatactaaaagatctagttagtactttaaataaattatactatgagagcataaaagaggggttttttaagtgttcagaataagaaattaaaataacatatagtaaataaaattaggagatagaagagtaaatgaaatcttgattatgggtgattagcttgcttcgataatcctcatcgactgttacctcaggtttctcgtcaatcaactagtcgctaccctagcaggatctttcaatctttcactaatataacga

SEQ ID NO: 34002 - DNA, 358 bp, Gossypium hirsutum
  Clone ID: LIB3149-030-Q1-K1-E1
agcagcgtacgagtgattgaatcagtcgatgtcaatgtacatattctcatactgagtggaagaatgaacaataccttctacaatgcccaaggatatgcagttggatcttcactcgtactagatgacacaccatatctacctgcaacagtccttgagaaaggcaacgctaaatgagtctctatttagctccccactgatgacaaggttgctgacaaggctgatactgatgctaacaccacggtagtgacaccataagggatcatagactggtatatgggatcggatatcatacctgactccatcgaaacctttaacgcgacttaggacactatctagaacattatcttgaatggaccaa

SEQ ID NO: 34003 - DNA, 428 bp, Gossypium hirsutum
  Clone ID: LIB3149-030-Q1-K1-E10
ccctaatctcttcttatcaaggaaatagcggttgctgatcatctctggattctgtatttcttgatctctcgtggatctgatcatttatttgctggattattgtatatctttcaggatcttggatttcaatttccttgtattgaagaaaaaagatggctcgtacgaagcaaactgctcgcaaatcaaccggagggaaggctcccaggaagcagctcgccaccaaggctgcaaggaaatctgcgcctacgaccggcggagtcaagaagcctcaccgctaccgtcctggaaccgtcgcccttcgtgaaatccgtaaatatcaaaagagcactgaacttttgatccgcaagttacccttccagcgtcttgttcgtgaaattgcccaagacttcaagacggatttgaggtttcaaagtcatgcggttctggca

SEQ ID NO: 34004 - DNA, 343 bp, Gossypium hirsutum
  Clone ID: LIB3149-030-Q1-K1-E11
ccctaatctcttcttatcaaggaaatttcttttgctgatcatctctggattctgcatgtcgtgatctttcgaggatctgatcatttatttgctggattattgtatatctttcatgatcttggatttcaatttccttgtattgaagaaaaaagatggctcgtacgaatcaaactgctcgcaaatcatcctgagggaaggcttccaggaagcagctctccaccaaggctgcaaggaaatctgctcctacgaccgtcggaattaagaagctctatccgtttccgtcctgtaactcgctccctttcttaaatccgtaattctttaatatagcactggccttttgatc

SEQ ID NO: 34005 - DNA, 425 bp, Gossypium hirsutum
  Clone ID: LIB3149-030-Q1-K1-E12
aaaatattattccatcttcatcccttttaaccgccggccgtctttcacttctccggcgatatcattttttccgtcaagagctactctcagcagaatttgtcacagatggcttcttccttccgagcattcttgaacagtccagttggtccaaaaacaactcacttttggggacctgttgccaattggggatttgttcttgctggactggtggacatgaataagcccccagaaatgatttctggcaacatgacttcagcaatgtgtgtctattcagcattgttcatgaggtttgcatggatggtacagccacgaaactatcttctgttggcatgccatgcttcaaatgagacagtacagctctatcaactttcacgttgggctagagctcaggggtatttgtctgagaagaaagaggaagcctcatc

SEQ ID NO: 34006 - DNA, 239 bp, Gossypium hirsutum
  Clone ID: LIB3149-030-Q1-K1-E2
agcagcgttcgagtgatggatttagtcgttgcctttgtacagagtgtcagactgagtggaggcgggatcaatgcccactgcaaggcccaaggatatgcacttggatcataacacgaacatgaacacacaccttaactatctgcaaagcccctggagaaaggaaacgctaaatgagtctctattgtgctccccaatgatgacgaggttgctgacaattctgacactaatgcgaacaccaa

SEQ ID NO: 34007 - DNA, 443 bp, Gossypium hirsutum
  Clone ID: LIB3149-030-Q1-K1-E4
gagcgaccgcgatttatatgaaggtgaatgggggaaagtcggtaccattgtccattggagttatgtgcatgatggaaaggctaaaaaggcaaaggaagtagtggaagcagtagaccctgataagaatttggtcactttcagagtgatcgaaggagatctaatggaagagtataagagctttgtaatcacgattcaagtttcgcccaagagcgagggtagtggcagcgtagtgcactggactttggaatacgagaagctgcacggtgggattgcgcatcctgagactctgctgcaattcgttcaagatatctctaaagacattgacgcccacctcacccaagcaagctaaacagtatcacatgttgctattgttgccgctacttgaagcactgttcatctatttaatgaataaagtgacttcctttctcatgtattttgatctg

SEQ ID NO: 34008 - DNA, 223 bp, Gossypium hirsutum
  Clone ID: LIB3149-030-Q1-K1-E5
atttttagctgttgaagttgtaatcttgctttactgccatttaaccttctgtggttaactgaagtatttttgtttaatatgttatttcaagaaaaaaattgtttgacattgttctgtgctgaaatgcacttattgcttcaaatatagagacttgatttctttagtgaaaaaaaaaaatacaaaaataaataaaaaaattaaaaaattttaaaattaaaaaata

SEQ ID NO: 34009 - DNA, 166 bp, Gossypium hirsutum; identical to SEQ ID NO: 33791
  Clone ID: LIB3149-030-Q1-K1-E6

SEQ ID NO: 34010 - DNA, 55 bp, Gossypium hirsutum
  Clone ID: LIB3149-030-Q1-K1-E8
ggatgattaatcgagcttttgtggaaattgtgtttgagaaccaatgaaaaacatt

SEQ ID NO: 34011 - DNA, 420 bp, Gossypium hirsutum
  Clone ID: LIB3149-030-Q1-K1-E9
gggcgacctttaccacccctattcaactttaaacaggaattatctggggcttcaccggagctcataaataagttgattcctgatcacgtgaaacggcaaataggacttcaacatttcatgcatccgcctgggacatgagacttcaaaaccgttttcaaattcgatgtctgtagtttgatgcgtgacacaaaaagaattactatctttggattatcataggttgatttgaggcctatccggcatcattttgtacgcttccataacacatacagcctttggtagtgtggtggctgccttctctcgatccatatatgtcaatgatgtctctcttgctcttgtattctatgagtctactttttgtcaaaatgcttttttttttagttgtgtacatgtaacatgttagatactaaaaaagtagat

SEQ ID NO: 34012 - DNA, 425 bp, Gossypium hirsutum
  Clone ID: LIB3149-030-Q1-K1-F1
gcgtcatcacaaaaaatttctagatcccaatatacccaatgccagatagctgccaagaagcacaagccagaaaacacaatatgtgctccggccacaccttcgtaactccaaatacccggatttgttatagtcccccctgtaatactccaaccgccccatgaattggttattcctaaacgagtcatgaagggtataacgaacataccttgtctccacattggatcaagaacgggatcggagggatcaaaaacggctaattcatatagagccattgaaccggcccaaccagcaaccagagccgtatgcattatatgaacagaaagcaagcgaccgggatcattcaatacgacagtatgaacacgataccaaagcaaacccatggaaatacccctttatcaacgaaaaataaacactatgtaacttta

SEQ ID NO: 34013 - DNA, 163 bp, Gossypium hirsutum
  Clone ID: LIB3149-030-Q1-K1-F10
gtgaaagtgacgttgaaattgcaatgttaagggaaaccattgcaaatagtttaatgaatcaatatttgtaaaaacaattttgtatcataacctaatttctagtaataatgaaacttgttatgtcttatgttactattttttattaaaaatcattcgtttagat

SEQ ID NO: 34014 - DNA, 418 bp, Gossypium hirsutum
  Clone ID: LIB3149-030-Q1-K1-F11
tacaatcgaaacccttaggcggcgactactcgagcttcataacacccgaagcttttaactatggcggatgtagagacggaggttgcgacggccggtgtgcccaagaagagaacattcaagaagtttagcttccgaggtgtcgatttggatgctctccttgatatgtccactgatgagcttgtcaagctcttccctgctcgagctcgcagaaggttccagaggggtttgaagagaaagcccatggctctaattaagaagcttcgcaaggcgaaaagggaggctccacctggtgagaagccagaaccagttagaacccacctgcgtaacatgatcattgtacccgaaatgattggaagcattatcggtgtgtacaatggcaagacattcaaccaagttgaaatcaagcctgaaatgatta

SEQ ID NO: 34015 - DNA, 417 bp, Gossypium hirsutum
  Clone ID: LIB3149-030-Q1-K1-F12
gttgctaaacacagtagtcctgtgtgttgttcgaagcctccatgtgcaattgaaggttgcctatcaaagggttttgcagggctcttatcgagttactcgtattttgcagtttgatcgataaagaagacttcaattctctattacatagatagagcttgcaccctccgagttacaattatagaaaaatgtatcctttgcaagcctatgatttagatatattcatatctctgcaactcgtattttttggacgattttgtgggttaatctcctatttttatctatgaacgtttgtgatgtctgatgcaatatccctgtcctctagatctgttgcaactaaaagaaatatatatgatttgctatatctcttcagcttctttttgctgaaggttgagactgaagagtaagtcttgaaaacag

SEQ ID NO: 34016 - DNA, 437 bp, Gossypium hirsutum
  Clone ID: LIB3149-030-Q1-K1-F4
cctagacctcttccctcatttaaccgatcctcaaaagaccaatccctagccgccgtactatcgccacaaacagtggccgacggtgaataaatctctccctttctaacctcatttagttcaagatctagcaccttcaatcacaaagcataaaaaagaaagcctcaacctctgttggatttggttttaatggaggaaaaactccgacggtataccaaagcctcaacctctgttggatttggttttaacggaggaaaaactctgacggtataccaatcagttcaggttcgattgacgaggagatggtcatacggaggtgcacgtggtggcgcgcatgaaggtcttacggcactggtctagctagggttcgctaaaatgtttttaggttttgggctgaaattttgggttagggttagattagtttaataatcgggctttgg

SEQ ID NO: 34017 - DNA, 376 bp, Gossypium hirsutum
  Clone ID: LIB3149-030-Q1-K1-F7
gatcttgggttaccgtcagatcttcacggcgaaccccgataatgtccagcatatactcaaaacccgttttaataattacccaaaaggtgagttcttcattaatgttttctttgattttctcggcaacggaatatttaacgccgatggggaagcttggaagttcgagagacaggtttcgagtcacgagtttaatactaggtctcttcgtaagtttgtagaaaccgtcgttgatgctgagcttaacgaccggttggttccgatgttatccggcgctgttaccggcaagacagtgcttgatttgcaggatgttcttcagagatttgcttttgataatatttgcaagattgcttttgggtatgacccagaatgtctttta

SEQ ID NO: 34018 - DNA, 411 bp, Gossypium hirsutum
  Clone ID: LIB3149-030-Q1-K1-F8
gaccacgcgtccgggcctagtcaagcccgtcattggttcacccccagtgatgccatgctgttcccttctcgatggcctcgtcgatcttgaagctgctgtttgcctttgcaccgctatcaaagctaacatcttatgcatcaaccttgacattccaggttctcttagcttgctcctcaatgtttgctcaaagaaagttccttatggcttccaatgctagtttaagtcaatgattttcccctacattctttctcaacttctttatggtttgcgttcggttttttttcgagttatgatgccataacttcattgttttaatgagttttcatttggaattataatttctacgtgggggatagatatagaataaggttaatacctttcttcaagtgttgcttgaaagttttttataac

SEQ ID NO: 34019 - DNA, 247 bp, Gossypium hirsutum
  Clone ID: LIB3149-030-Q1-K1-F9
gggcgagcgttaccacctatactaaactgttatcaggaatcatctggggcttccccggagctcctttattaatagattcctgaacactgaaaacggcattatatgtcttcaacgttttatgcattcacctggtacatgacacccttgaaccgtcttcaaatttcaagtcagtagtttgtggcggctcacagaaagaatcactttgtttggattattataagacgactagaggcctatccggcatcat

SEQ ID NO: 34020 - DNA, 377 bp, Gossypium hirsutum
  Clone ID: LIB3149-030-Q1-K1-G1
cactatccaatagcagctccagctcttctagtgacgaggaagaaggtgaaggcggagagaagaagaagaagaagaaaaaggagaagggaaagaaagaacaggacagtgcagtcccagtggagaagtgcgatgaggtagcaacagttcaccactcagagacgccggaaaagaagggtttcatggataagatcaaagacaaactcccaggacagcataagaaagatgaagaggacaccacccaaccaccagctgctgctgccccaattgagaacgaccaccatgaaggagagacaaaagagaagaagggatttttggtgaaaatcaaggagaaaatttctggttaccactccaaaacagaggacgagaaggaaaaagag

SEQ ID NO: 34021 - DNA, 410 bp, Gossypium hirsutum
  Clone ID: LIB3149-030-Q1-K1-G10
gggagcgtatatttcctcggttataaaactttcataccagaggaaggtgatgattttggtatgtctagtgaagaagaaagcgaggaggaggaagatgaggagcttcctgtcgctgctgctgctgctgcagtaaatggaaaagctaagccagatgcaaaaacagccaaggctaatgctgggaaacctgatgctgttaaacaatctggcaagatagcagaacctagcaataacaggaaatctgaggatgaagatgatgatgatgagtccgaggatgagagtggttctgatgaggaagatgattctggtgacgatgatgagtctgacgagatgtctatggatgaaagttcagatgacgaggatgaggagacacctaagaaggtcgagtcaagcaagaagatacctgtcgagtc

SEQ ID NO: 34022 - DNA, 395 bp, Gossypium hirsutum
  Clone ID: LIB3149-030-Q1-K1-G11
cgatttggttgaaatggtcttcgcaaaaggagatcccgggatcgccgccttatatgataatctccttgtttctcaagaactatggtcattcggagagcggttgaggactaactatgaagaaactaaaagccttctcctacaaattgccgggcacaaggatcttctcgaaggtgatccgtacttgaagcaaagactacggctccgagactcatacataacaacactaaatgtctgccaagcctacacactcaaacgtatccgtgacccgagctacgacgtcaagttccgtccacatatctccaaagagatcatggaatcaaacaaatccgcggatgaactcgtgaaactaaacccgacgagtgaatacgcgcccggtttagaagacaccctcatct

SEQ ID NO: 34023 - DNA, 432 bp, Gossypium hirsutum
  Clone ID: LIB3149-030-Q1-K1-G12
gcaaagtttataatagaggcagcaaaccatcctacagatccagaagcagatgagattctatcaaagaaaggagtaataatactacccgatatatatgcaaatgcaggaggggtgactgtcagctactttgagtgggttcagaacatccaaggtttcatgtgggatgaggagaaagtgaaccaggagctgaagaaatacatgactaaagcttttcataacatcaagaacatgtgccagtcgcacgactgcaatctccggatgggtgcatttacacttggggtgaaccgtgttgcccgtgcaactatcctgagaggatgggaagcataaacgcctcccttccggcttttatttctcttagtttatagtctccattgaaaagcacaagcaataactttcaagaattcttagcttacccctccaaagcttttttta

SEQ ID NO: 34024 - DNA, 298 bp, Gossypium hirsutum
  Clone ID: LIB3149-030-Q1-K1-G2
gaactggacaccctggaacgtcgtttggagcttcttgaagttcaagttggaactgcttccgctaacccttctcttttcagtacgtgattcatatttaaaagttgtatttgtttccatatctttgtcgtgattttgttcctctcctagttttcggcgttgtaggaaaacaaagttttcttctttttctttttgtctatataataaccttggcgattagtgaacttttgctcttcgtttctttcgaatctgtcatatttgtaagacattagcatcttgctgttgaatttttctttcattc

SEQ ID NO: 34025 - DNA, 138 bp, Gossypium hirsutum
  Clone ID: LIB3149-030-Q1-K1-G3
ctcaaccatgaagagacttggcagctcagattcattgagtgctttgatgtcaatctgcccaacttcagatgaacgtagtccaagaaacaacaatgtttacagtcgagagtttcagtcgatgttagaaggattcgatga

SEQ ID NO: 34026 - DNA, 395 bp, Gossypium hirsutum
  Clone ID: LIB3149-030-Q1-K1-G5
tgagcatgcaggtattgactttgttaggctgccatgcaagcatttctactgctggaaatgcatggaaacttattctaatatgcatatctctgacgccaccataaccaagctgcaatgccctgaagctaaatgtggtggtatggtccctcctgctttattgaaacagttgcttggcgatgaagggtatgaacgatgggaatcccttatgctacagaaaacacttgaatcaatgtcagatgttgcatattgcccaaggtgtgaaacaccttgtatagaggatgaagagcaacatgcacaatgctccaagtgcttctttagcttttgtaccctttgtagggagcgccgtcatgttggcatagcttgtatgacaccagaaattaagcttcgtgtcctgc

SEQ ID NO: 34027 - DNA, 393 bp, Gossypium hirsutum
  unsure (1)..(393): unsure at all n locations; Clone ID: LIB3149-030-Q1-K1-G6
tggtggtatgggcccggacaaaaatgggcttttacaagagattaactaggagaataaacccacttgagtggagaacacgtcgctatccgttggtgcggacatccttcatcgcatcaccgggaagtggctttacttcttgataggacatcaactctgttgtgggcgaaatacgaggcacattccacatgtgtgatcctaagatttcaatcacgtatatagtactgaaaggcaggcaacactttgatcttggacaggtctacaagctaaaatacttgctgtttccgtagtgccaacgaagtgcttcatcgggtttttccattctgaggcgatggatgagggacaacntcgactttttgcattgtgcaatgacaatcgataacatctgggacgaga

SEQ ID NO: 34028 - DNA, 406 bp, Gossypium hirsutum
  Clone ID: LIB3149-030-Q1-K1-G7
ggaggcagccatgtttgggtggaccattgctctttgtctaactgcaacgatgggctgatcgacgccattcatggatccaccgccatcaccatttctaacaattacttgacccatcataacaaggtcatgctattgggacatagtgacacttacaaacaagataagaacatgcaagtcaccattgcctttaatcactttggagaaggccttgtacaaagaatgcctagatgtaggcatggatactttcacgtggtgaacaatgattacacgcactgggaaatgtatgcaatcggtggcagtgctgatcctacaatcaacagccaaggcaatagatttcttgcaccaaatgatgcagacaacaaagaggtgacaaaacatgaggatgcgccgcaaagtcaatggaagc

SEQ ID NO: 34029 - DNA, 431 bp, Gossypium hirsutum
  Clone ID: LIB3149-030-Q1-K1-G8
ggaggcagccatgtttgtgtggaccattgctttttgtctaactgcaacgatgggctgatcgacgccattcatggatccaccgccatcaccatttctaacaattacttgacccatcataacaaggacatgctattgggacatagtgacacttacaaacaagataagaacatgcaagtcaccattgcctttaatcactttggagaaggccttgttcaaagaatgcctagatgtaggcatggatactttcacgtggtgaacaatgattacacgcactgggaaatgtatgcaatcggtggcagtgctgatcctacaatcaacagccaacgctatagatttcttgcaccaaatgatgccaactacaatgaagtgacaaaacatgaagatgcgccgcaaagtcattggagccattgaattggatatcaaaagggatt

SEQ ID NO: 34030 - DNA, 189 bp, Gossypium hirsutum
  Clone ID: LIB3149-030-Q1-K1-G9
ggtgattcatctagggctttcaattgcaggaagcaaattttgattcttgattttaacatcgtgacgctgttagtgtaaacaataaaatcattttattctatgtaagtttgtcattacattgatgagttcaaaaaaaaaaaaaaaaaaaaaaaaaaaaaaaaaaaaaaaaaaaaaaaaaaaaagggagga

SEQ ID NO: 34031 - DNA, 291 bp, Gossypium hirsutum
  Clone ID: LIB3149-030-Q1-K1-H1
aaaaaaataaaaaaatttttttttgtctagcatttattatgggtccttcaaataatctcggtgcgggtattgagattttagatacctttcattatcctccagatatatccatttaaaccacccctggttgcattcaagacaaaggtattttaaccctaatattaacagctacggattcatttgccttgaatttttaatggaacagtggagctcctgcccttactatattcaatgtgtttctgtcaaattgctcactccttgactgatccaaatcctgattgaccccttttg

SEQ ID NO: 34032 - DNA, 410 bp, Gossypium hirsutum
  Clone ID: LIB3149-030-Q1-K1-H10
tgggaagctaaggccaaccctttttgatatgtttggcgaagatgcaagccccaaagtgaagaagtttatgaacatcattatgaccaaactgcaggggagtggcgatgacggtgaagggggtggtttcatggggaaggttgggaatctggcactacagtttcttaaacaaaagctggatgatgacgaaggatacggtaaaccggcacttgagactgaagtgagtagcaagcaagaggcttatgcaggagctggttagcactctcttcctgacagtggaattcttatcagcggctgccagaccgaccaaacttcagcggatgccagcccatcagggaatgcaagccaagcttatggagcacttagcaatgctattcaaaccataattgccgactcaaaaggcttaattacta

SEQ ID NO: 34033 - DNA, 188 bp, Gossypium hirsutum; identical to SEQ ID NO: 33813
  Clone ID: LIB3149-030-Q1-K1-H11

SEQ ID NO: 34034 - DNA, 426 bp, Gossypium hirsutum
  unsure (1)..(426): unsure at all n locations; Clone ID: LIB3149-030-Q1-K1-H12
ctcaactgcagttgtggagccttacaatagcgttctgtccactcattcgcttcttgaacacacagatgtggctgtgctcttggacaatgaagcaatttatgacatatgtcggagatccctcgatatcgagagaccaacttacaccaatttgaaccggttgatttctcaaatcatatcgtccttgacaacttctttaaggtttgatggagccattaatgtggacattacagagttccaaaccaatcttgtgccttatcctcgaatccacttcatgctctcttcttatgcgcctgttatctcagctgagaaagcataccatgaacagttatcagttcctgagatcacaaacgctgtgtttgagccctcaagcatgatggcgaagtgcgatcctaggcatgggaagtacatggcatgctgnctgatgta

SEQ ID NO: 34035 - DNA, 243 bp, Gossypium hirsutum
  Clone ID: LIB3149-030-Q1-K1-H2
gatttgggatgcttattgtaactggactttaataagtaaacatttattcattttttttgtttctgattttaaggcccgggtaaatttgggttattacaattattggtcaaaatatacttttattatgtattagtttataatttcatcattttttaaatgataaacagtttttttttcaaaaaaaaaaaaaaaaaaaaaccacaaaaaaaaaaaaaaataaaaaaaaaaaaaaataaaaaaaca

SEQ ID NO: 34036 - DNA, 376 bp, Gossypium hirsutum
  Clone ID: LIB3149-030-Q1-K1-H4
tttcttaggtgggctttgcgccctcctggttattacaagagctggcatattggggtccgtgctaagacatcaaagaagcttgttgccttcattactggtgtgcctgctagaataagggtgcgtgatgaagttgtgaaaatggcagagatcaatttcttatgtgttcataagaagctgagatcaaagagacttgctcccgtgatgattaaggaggttactaggagagttcatttggagaatatttggcaagcagcttatactgctggagttgttcttccaacaccaattactacttgccaatactggcataggtcactaaaccccaagaagcttattgatgttggcttttctaggcttgggcctaagatgacaatga

SEQ ID NO: 34037 - DNA, 162 bp, Gossypium hirsutum
  Clone ID: LIB3149-030-Q1-K1-H5
acatcaaagaagcttgctgccttcattactggtgtgcctgctagaataatggcgcgtgacgaagttgtgaaaatggcacacatcaagttcatatgagctcataagaagctgagatcaaagagacttgctcccgtcatgattaatgaggctactacgagagtt

SEQ ID NO: 34038 - DNA, 52 bp, Gossypium hirsutum
  Clone ID: LIB3149-030-Q1-K1-H7
gcatttacagtgacctttttttttctagtggatttggtaaatcatttgccct

SEQ ID NO: 34039 - DNA, 422 bp, Gossypium hirsutum
  Clone ID: LIB3149-030-Q1-K1-H8
ggtggaaatcccaaacaacaagagagtggaattctctctgcagtacatccatgggattggtcgtacgagggctcgtaaaatcctatgtgatctccaaatggagaacaaaatcaccaaagatttgtcagaggaagagctcattacgattcgtgatgaagtctccaaatatatgattgaaggcgacttgaggaggttcaatgctcttaatatacggcgattgaaagagattcagtgttaccgaggggttcgccatattcagggattgccttgtagaggacagcacaccaaaaacaattgccggactttgaaaggtaagagagttgccattgctggtaagaagaaagcccctcgttgatcttaaccgtttttgtttcgatgaagtgaatcatgtttaattttatgtttgattcaaaatgaatgca

SEQ ID NO: 34040 - DNA, 296 bp, Gossypium hirsutum
  Clone ID: LIB3149-030-Q1-K1-H9
ggtggaaatcccaaacaacttgagagtggaattctctctgcagtacatccatgggattggtgggacgagggctcgtaaaatcctatgtgatctccaaatggagaacaaaatcaccaaagatttgtcagaggaagagctcattacgattcgtgatgaagtctccaaatatatgattgaaggcgacttgaggaggctcaatgctcttaatatacggtgattgaaagagaatcagtgttaccgaggggttcgccatattcaggggttgcccttgtgaggacagcacaccaaatacaatt

SEQ ID NO: 34041 - DNA, 343 bp, Gossypium hirsutum
  Clone ID: LIB3149-031-Q1-K1-A1
tagatctcccgcctgagaaggtgtttctatttcaaaaagctgctctttacaagtgcaacatgatgggaaagcctgcagtggtcactcgtgttgtggacagtatgacagacaacctaagacctactcgtgctgaagcaactgatgttgccaatgctgtgttggatgggagtgatgcaatacttttaggggcagaaaccttgcgtggactataccctgttgagactgtctctacagttggaaaaatttgtgctgaagcaaaaaaagtttttaatcaagatttatactgtcagaaaactgtccaaaatgttggagaaccaatgagtcatctggaatccattggttt

SEQ ID NO: 34042 - DNA, 380 bp, Gossypium hirsutum
  Clone ID: LIB3149-031-Q1-K1-A10
ttcaaatctttattttttttcaagatccgatagaagaacccgacctggtgatccgaaatggcggcgtatagagcagatgacgactacgactatttgttcaagctagtattgatcggagattcgggggttgggaaatcgaacttgttgtcgagattcacgaaaaacgagtttaatctggagtcaaaatccacaatcggagtagaatttgctacccgaagtattcgggtcgatgataaggtcgttaaggcccagatttgggacaccgctggacaagaaagataccgggcgattacaagtgcgtactaccgaggagctgttggtgcattgcttgtctatgatgtaactcgacacatcacatttgagaatgtcgagagatggtt

SEQ ID NO: 34043 - DNA, 395 bp, Gossypium hirsutum
  Clone ID: LIB3149-031-Q1-K1-A11
caaaacacatcactgcccttgcactcggatcataccaatcaatcaaaatccccaaaaaaatattaaaaaaatgagctctcagattttcagatctgcttctagagccgccaggtctctcctttcagcatccaaggcttctcgcttttactctgaagggcgagctgtagctgccgctgcagcagtttcacttggcggtaaagtgcctcttttggcttcagcttatggaagtactgcttctgccaatgcatctagagcatggctttcaggagtttttgctcttccagtggcagcttacatgcttcaggagcaggaggttcatgctgcagagatggagcgcaccttcattgctatcaagcctgatggagtgcaaagagggctgatttcagagatcatct

SEQ ID NO: 34044 - DNA, 305 bp, Gossypium hirsutum
  Clone ID: LIB3149-031-Q1-K1-A12
aaaaaaaaaaaaataaaaaaaaaataaaaaaaataaaaataaataaaaaaaaaaaaaaaaaaaaaaaaaaaaatgaaaaaaaaaataaaaaaaatataataataaaaataaaaaattatttaatttaaaaaataaaatgaaataaaaatattaatataaaaataagggggggggccgttttttgggtcctagtttattgtcgggggggtgggggtgtttggtttttttttttgggcccccttattttttctttggggccggtgttttacatcggggggtgggggaaatccggggggttccctatt

SEQ ID NO: 34045 - DNA, 160 bp, Gossypium hirsutum
  Clone ID: LIB3149-031-Q1-K1-A2
acgcatacagttggggctcttaaagtctctggattagaaaaaaggacatgttcccgtcttcgttgcagtgggagaccaaagtataactcctccgatttatgcgtgtctccggtgggacaggttcctggcaagagggcactttagcagtgacccaatgggc

SEQ ID NO: 34046 - DNA, 349 bp, Gossypium hirsutum
  Clone ID: LIB3149-031-Q1-K1-A3
cttcactccacatttcacactctttttcaactttctcttcttctctttgttttaaagaggggctggagttttagccaaagaaaactccatggctaaacttgttgctactttcttcttggctctcattgccatctccatggttcaaactttggttatggcatcacatggacatggtggtcaccattatgataacaaacgttatggacctggaagtctcaagccttaccaatgtccatctcagtgcacaaggaggtgtagccagacacagtaccataaaccatgcatgttcttctgtcaaaaatgttgcaggacatgcctttgtgttcctccagggtattatgggaacaaa

SEQ ID NO: 34047 - DNA, 251 bp, Gossypium hirsutum
  Clone ID: LIB3149-031-Q1-K1-A4
gcctgtgtgctatactcaacttgttccacttaaaagctagttaccctggtatggttttgcgtgcctgttagatggcgtcaaatagaacggcttcacttgccctcttttttcgactcagcatcctgtaattctccctggtgagtgcatcgtggttcctgtgcttcacataaccgcttacctatgcctgtgccaatgccaaacgcctctccctgccgaccttttatggcgtgggccctatagatgctcttaaa

SEQ ID NO: 34048 - DNA, 379 bp, Gossypium hirsutum
  Clone ID: LIB3149-031-Q1-K1-A5
tgttcaattaggagagagatcaaggttggcttggctaggtgttgaggtggatccactggttcagtcagatgacctcttgaaggcttataacagaccttctgaggatgggaccagatcctcctctaaatggtttatatcaaagactgccattgtttctggtcttggacttcttggcatcagacaaggaaatgctgaatctgctgccaatgaagaaacgagagctccaaaggcccggataaagaggattgtgaggaagaaggtaactgcaagctctgcgtagttaattgacataaattcgattgctgtccaattttgctgcttgactgagagaatacaattcgaaagagaacctcttgctaagatttttgtcttggtgctg

SEQ ID NO: 34049 - DNA, 418 bp, Gossypium hirsutum
  Clone ID: LIB3149-031-Q1-K1-A7
cggtcccgaattggagttccgggccagacccacgcgtacggttgtctctcttaagtcttaccataaaacagagcagagaaggttaaacccaaagtttgaaaaccatcaaaaatggttcaaaggctcacttaccgtactcgccatagctacgctaccaaatccaatcaacaccgtgtcgttaagacccctggtgggaaattggtctatcagacaactaataaaagagcaagtgggcctaagtgtcctgtcactggcaagagaattcagggtattcctcacttgagacctgctgaatacaaaaggtctagattgccaaggaaccgccggactgtgaatcgtgcttatggtggtgttttgtcctgcagtgctgttagaaagaggataattcgagccttcttggtggaagagcagaaaattg

SEQ ID NO: 34050 - DNA, 388 bp, Gossypium hirsutum
  Clone ID: LIB3149-031-Q1-K1-A9
gaatatttcaactaaggttccatcaccctaaaagagacctctgtttcctgtgccattgacgaacgaagcaaaaatgaagaaagtttgtctttttctagctattttagtgctggtgttctgcaattcaatggctacatcaatcgaaaccaacagcaccgtctttgtcatcacggactttgacgatttggagttcttgatggattcgcacttcggtcgtatccttcaaagcaatggaagcgtgagccgtatgtccctcaatgctggtcaggcagtggcaaattgtggaagaggtcggccttacgatagctgcctcccgaacccaaaccgcccggttacgccgcaaaattgtgggtcttacaaccgtgcctgcggcaggtgaaaggccgtg

SEQ ID NO: 34051 - DNA, 262 bp, Gossypium hirsutum
  Clone ID: LIB3149-031-Q1-K1-B1
aaaagacaaaaaagagaaaaaaaaaaaaaaaaaccgaaaaaaaaaaggaagagaaaaaaaaaaaaaaaagagaaaaaaaaaaagaaaaaggaaagaaaagaaaaaaaaaaaaaaagaaaaaaaaaaaaaaaaaagagaaaaaaaaaagaaaaaaaaaggaacgaaaaaaaaaaaaaaaacaaaaataaaaaaaaaaaggaaaaaaagaaaaagaggaaaaagagaaaaaaaaaaagaaaaaagaaaaagaaaaaaggaagaa

SEQ ID NO: 34052 - DNA, 349 bp, Gossypium hirsutum
  Clone ID: LIB3149-031-Q1-K1-B10
aaaataaattagaaaacgaattttttctaagaagagcttttttttttttttttttgaaagcaaggaagaatactactgtgaaagaaggcagcaaaaggaaaggaaaggataggatttgtagcgttcaagagggcgcttatctatctcagaaatagcagtaattaatttttgaggaaaaaatggcggcagcagcagcatcagcttccatgtcggccaccgccgtcttgattccacgtgttcctgcagccgttagaacaacccactgttccgccttgccgcctgtccctcctcgcgttttcaccgcttccttttcctcgtccgttaaactaactccagaatcccggaggtt

SEQ ID NO: 34053 - DNA, 358 bp, Gossypium hirsutum
  Clone ID: LIB3149-031-Q1-K1-B11
gaggaactggatctggaatgggaacactgttgatatcgaagataagggaggaatacccagataggatgatgctgactttctcggtcttcccatctcctaaggtctctgatacgggtggagccttacaatgccactttgtctgttcaccaattggttgaaaatgctgatgagtgtatggttcttgacaatgaggccttgtatgacatctgtttccgcacacttaagctaaccactcccagcttcggtgatttgaaccatttgatatctgcaacaatgtctggagttacatgctgcttgcggttccctggtcagctcaacttcgatctcaggaaacttgccgtgaatctcatcccctttt

SEQ ID NO: 34054 - DNA, 378 bp, Gossypium hirsutum
  Clone ID: LIB3149-031-Q1-K1-B12
gaagagccaaaggaagcggagcctgcggcggtggtagtcgaggaacctgaagcctcagttgaagttgaaaccaaggaggtggtagaagaaccaaaggctgttactgaggagccagtagtagaggaggctcctaaggaaacaatgccagaaccagttgccgaggagatcaaggaaaccactgaacaaaccgttgaaaccaaagaaactacagagtctagtgaggcagcagcagaagcacccaaagaggaagttaagaaggaagaagaagcaaaaccagctgaagtggaggagaaagttgaaacaaaaagctgatccagcagagaagactgagtaaataataaagcttttgtgatgaaaatgcgggtgtcaatggaagtg

SEQ ID NO: 34055 - DNA, 385 bp, Gossypium hirsutum
  Clone ID: LIB3149-031-Q1-K1-B2
ctcgaaccacccctgaccgccaaaccgtgtgtgggtgcttgcaaactgccgctaaggctgtcaaaattaaaggcaacttggctgagaccctcccggccaaatgtagtgtcaacatcccttacaagatcagcacttccactaactgcaaaaatgtgaagtgagatggatgaagagagggttttgcagcagcttgaaggagatataatatatgattaaaaagaagaagaagaatgaataaggattttgggatggaattttcaaaatccaaaattagtctccactttagtgtagtgaggctttgtttattttggttaatgttttggtccctgcatgtattggctgttttaatgtttttaatgaaaggaagtttatgctttgtcagatc

SEQ ID NO: 34056 - DNA, 383 bp, Gossypium hirsutum
  Clone ID: LIB3149-031-Q1-K1-B3
cggttgtgttatgtgtgaggctgtgatagaatggaacatctgattgtgttgatggcaaatttgggataggtagctttgacatattgtaatggcgatccagtagtttagatttttgtctcaccgtaatttagttataaatcttcttccaacttaaaagctgaataacttcacgttcaaagccaagaagcaatcttttgttgtgaacctcttgattaagtagaaatttcgatgcagagtgatcaacagttttactccccaaaagcagtgcccagacttgcagatcacgtggatgataattacattcacatgccggttccttctgcttttggtacagttttttctccatgtgctaagccattgccacccctccatggcattgagtt

SEQ ID NO: 34057 - DNA, 362 bp, Gossypium hirsutum
  Clone ID: LIB3149-031-Q1-K1-B5
ctctctctactatgctcgacttctttcacttaaatgcaagtcttcttgctcgggctttgtgagccagagagatgggttcaaaaagaacggcttcactagccctgtcgtttgcactcaacatcctgtctttttacccggtgagtgctcgtggcttctgccctttcctcaaccccaaacctttacctaatccaatgccaaaccccactccctccccatattcttctggcaagcgccctagcagatgctcttagacattgggtctctgcctgtttcgtcgcattgcttgctcaacgtctccattgttacgccctctgttcaaccatgctgctctatcattcaaggtcccgctgattttgaagctt

SEQ ID NO: 34058 - DNA, 220 bp, Gossypium hirsutum
  Clone ID: LIB3149-031-Q1-K1-B7
gcacgcgccacgcgtgacggaatgtgggtaagacggttcgtgcgtgggttctaacaaaccgccgctattgctgcggagatttaatgctacttggctgagaccctccctgccaaatgtagtttctacatctccttacatgatcattactttcactatcctcaaatatcttaagtgtgatggacgaagagagggcattgctgctgctggtaggagatttaat

SEQ ID NO: 34059 - DNA, 319 bp, Gossypium hirsutum
  Clone ID: LIB3149-031-Q1-K1-B8
gaaggctgcccttaaccagcaatcaaaaaccaggttgattggtccaaactgccctggcatcattaaacctggggaatgcaagattggaattatgcctggatacattcacaaaccaggtcgtgtaggaattgtttctcgatcaggcaccttaacatatgaagcagttttccaaacaactgcagtaggtctggggcaatcaacctgtgtaggaattggtggggatccctttaatggaaccagcttcgttgattgtgtgacaaaattccttgctgatcctcaaacagaaggcatcattctgatcggtgagatagggggcact

SEQ ID NO: 34060 - DNA, 303 bp, Gossypium hirsutum
  Clone ID: LIB3149-031-Q1-K1-B9
gccgaatatctgcttcaacagctatttcgtgcgaagaatatacatttaagggagggggaaacttttaagggagtagtagaaaatcatttggtttttgaagagcccttaaaagagcaaattgatgggctctatcaaatctgttgtgatctcattctaaatggggccaacagtagctactttctaaaaattgtggaattttatggatccacgcttggtatgtatcctagcccaagaaaaaaggaacgaggggaagaatcgacaaggaatccataacaaaaaaaaaattgtgattgtaataaaata

SEQ ID NO: 34061 - DNA, 299 bp, Gossypium hirsutum
  Clone ID: LIB3149-031-Q1-K1-C1
cttcgatattttttttcttcacctccattgacaaacaaactgagatctctgtttatatttcgaaactgttagtaacaaagcaatggatcaagatattgatcgtgtgaagggaccttggggacccgaggaggatgagtcattgcgtaagctggttcagctccatggtccgagaaactggtcgttgatatcgaggccaatccccggccgatcggggaaatcatgcatgctgcggtggtgcaaccagttgtctcctgaagtcgcgcaccgtcctttcacggcggaggaagatgagatcatta

SEQ ID NO: 34062 - DNA, 367 bp, Gossypium hirsutum
  Clone ID: LIB3149-031-Q1-K1-C10
caattataagttaaaagggcacatcacagaatggcatcttcaccccttcaattctccactccatttcgcactctcctattatcatcgccgtcgttacgaaaatcccctcgtcttcctttccatccttcattattctcgccgccccttactcagaagaccctcactttttcgattgggactagagccgtttcggggtccgggaagttttattggagagccaaggcgtcgatggccgggaccgccatggagaaagggaaagggaaagggaaagtcgaagtttttgattccgaggagaatctttcggtttcgctcgctaaatacaccggccgatctagccgctaagttctccaaagagaaaggacagttt

SEQ ID NO: 34063 - DNA, 382 bp, Gossypium hirsutum
  Clone ID: LIB3149-031-Q1-K1-C11
ggcaaagctaagttcagccaaggatggtatgaattcacagtggagaacaatttaggggaaggagatgtttgtgtcttcgagctgcttagatcgagggagttcgtgcttaaagtgactgtattccgtgtaatggacggcgcctgactaatgcaccgatctcaatacaatgccaactaagttaaaaccggctgcttgagtggaccatccgatacgcaactctttttcaggtgacatgttgactgagcctatgaaagtgaaatacaaaaaattttgtggcttgattaactttgtaaatagattgttcattgaaattgacgttgaactggatttgaaaaatggggttttaagcttgattatcatctggttgattgggttaaaattt

SEQ ID NO: 34064 - DNA, 387 bp, Gossypium hirsutum
  Clone ID: LIB3149-031-Q1-K1-C12
caaggactcaatcatggactcaactgtgaattgcagggagaatggtggactgtttgatgtatcccatatgtgtgggctgagccttaagggaaaggactctgtttcattccttgaaaagctcgtcattgctgatgtagctggccttgcccccggaactggaactctaactgtttttacaaatgagaaaggaggggcaatcgatgattcagtgattactaaagtgaaagatgatcacatatatctggttgtgaatgcaggctgcagggataaggatctggctcacattgaagagcatatgaaagcattcaaggccaaaggtggtgatgtctcgtggcacatccatgatgagagatctcttctagctctccagggtcctcttgctgcccc

SEQ ID NO: 34065 - DNA, 395 bp, Gossypium hirsutum
  Clone ID: LIB3149-031-Q1-K1-C2
gctgcactaaaagtagtcggtggaaccttggctgatcatagatttttattccttggtgctggagagttgaaggacagggacatctctcaaaccctttctgtttaataccattacaaccttaattgttgaaggctggcactggcatcgcagaacttatagctcttgaaatttcaaaacagacaaacatgccacttgaagaagctcgcaagaagatttcgcttgtggactccaagggattgattgttaaatctcgtattgactcacttcagcatttcaaaaagccctgggctcacgatcatgaaccaatcaagaaacttgtcgatgctgttaatggaatcaaaccaacagtgctgattggaacatcaggagtaggaaggacatttactaaagaagtg

SEQ ID NO: 34066 - DNA, 328 bp, Gossypium hirsutum
  Clone ID: LIB3149-031-Q1-K1-C4
cacctctgatttacagcctgttcgtaaaaacttcccaacatatcttgggaggccctggaaggaatactcgaggactgtggtaatgcaatcaacaatcagtgacgtgattcaacctgctggctggcacgagtggagcgggagtttcgccctgaaaacactgttttatgccgagtaccagaacactggggccggtgcctcaacttctgcgagagtgaaatggggagggtacaaggtgatcactagtgcaagtgaagctcaggcttttactcctggcaggttcattgctggaggaagttggttaagctctacaagctttccttttcgctct

SEQ ID NO: 34067 - DNA, 171 bp, Gossypium hirsutum
  Clone ID: LIB3149-031-Q1-K1-C6
gacctttctacctgtacttttgactcacatcgctcttctctcactgcacatttgccatccagcaggttcgttgagacataccgagatcctctacattaatactgtgtattctcatacaagcttggcttaagcatttacttgctaccctttggtagtatgctatttttctcg

SEQ ID NO: 34068 - DNA, 390 bp, Gossypium hirsutum
  Clone ID: LIB3149-031-Q1-K1-C7
cgccgctcaatctctccttttggttcacaacgctcttcacgcacggtaaaaatgccgttcaaaaggtacgttgagatcgggagagtcgctctcgttaactacggcaaagactatggcaagctagtcgtcatcgtcgatgttgttgaccagaacagagctctagttgatgccccagatatggtgaggggccaaatgaactttaagaggcttcaattgactgatttcaaaattgacattcctcgtgttccaaagaagaagacactgattgaagcaatggaaaaagctgatgttaaaaacaagtgggagaatagctcatggggtaaaaagctgattgttcaaaagaagagagcatctctcaatgactttgaccgattcaagatcatgttggcc

SEQ ID NO: 34069 - DNA, 385 bp, Gossypium hirsutum
  Clone ID: LIB3149-031-Q1-K1-C9
aacatctctcaaaaagacccatagatgaaagggaaatggaaaggttcgaagagaaaactagggttgccagctgcccttctactgtgctcactctcattccttgctggattgtttgttcccacttttttctttcaggatgttccaatcattaaacccaagccgagaatgctcgaggcagtgcaggagaagacgtttcgtgatccgatggcaaatggagtaactggggagagttcgattgaatctattccatttcaggttttaagttggaaaccacgagcttactattttcccaactttgcaacttcagaacaatgtgaacatgtaatagaaatggcaaaggtgaaccttaaaccatctggtttggctttgcgcgagggagaaactg

SEQ ID NO: 34070 - DNA, 193 bp, Gossypium hirsutum
  Clone ID: LIB3149-031-Q1-K1-D10
gtaaatggcgatcttagcttatggtcagcaactgcaacacaggttgggactggtcgtgtagggctcatgtagctgactgtatcggtactgtgcgttctatgcaaaggctgccaatgatcatctagagtttctggcaagctaaacgctgatgcagcagtagaccaactacatcgttgttgcgattgaatacacc

SEQ ID NO: 34071 - DNA, 217 bp, Gossypium hirsutum
  Clone ID: LIB3149-031-Q1-K1-D11
gtggctcaaatcaccatacttaccgtcatgttttactttaccgcccagctacttagatccacggctgggttgcttttcactgaaggcgtggacatggtcgtctcgacagttatacatccacggtcttggatctacagaacgagctcttcaaggactgtgttttctgatcaccatcacatttacattggtttacacagtttattcaaccactcttgac

SEQ ID NO: 34072 - DNA, 118 bp, Gossypium hirsutum
  Clone ID: LIB3149-031-Q1-K1-D12
acgctagctacaccaccatggtgagagacagttaaacatgtaccccacaaaaactgtgatccatggtaggcgctccctctctcatgagcacaaatcgtctctcgaccacttacatcaa

SEQ ID NO: 34073 - DNA, 394 bp, Gossypium hirsutum
  Clone ID: LIB3149-031-Q1-K1-D3
cattaaacaaaccactcccacattaaatattgttgctgaaacaatggcgttttcagctctgacaggtaagcttgaggcagatgtagagattaaggcttctcctgagcagttccatgaaatgtttgcccacaaaccgcaccacgtgcaccatacttgctatgacaagattcaaggatgcgatttacatgaaggtgaatgggggaaagtcggtaccattgtccattggagttatgtgcatgatggaaaagctaaaaaggcaaaggaagtagtggaagcagtagaccctgataagaatttggtcactttcagagtgatcgaaagagatctaatggaagagtataagagctttgtaatcacgattcaagtttcgcccaagagcgagggtagtggcagc

SEQ ID NO: 34074 - DNA, 396 bp, Gossypium hirsutum
  Clone ID: LIB3149-031-Q1-K1-D4
gttcttgggcaacagaacagggcaaccatacattcttcagaccaatgtgttcactggtggcaaaggagacagagaacaaaggatttacctttggtttgacccaaccaaagaataccactcctactctgtcctctggaacatgtatcagatagtgttctttgtggacgacataccaatcagagtgttcaaaaactgcaaagatttgggagtgaggttcccattcaaccaaccaatgaagatatactccagcttatggaacgccgatgactgggccacaaggggtggtctcgaaaagaccgactggtccaaagccccattcatagccgcatacaagagcttccacatcgacgggtgcgagtcgtcggtggaagccaagttctgcgccacacaaggaaa

SEQ ID NO: 34075 - DNA, 386 bp, Gossypium hirsutum
  Clone ID: LIB3149-031-Q1-K1-D5
cggagtcgaactcgtcactgatcagaagctcaagactccagcaaagcttgaaactattcatgtaatggatcagatgaaagaacttggggtactggtcgggaaaggtggattctatggcaatgtgtttagaattacccctcctctctgtttcactaaggaagatgcagatttccttgtagatgcgatggattacaccatggagaagatgtgaagcacccgacttaaaacgtggatgaatgaagatacgatgtttattcataaagttgctttaattagtgctccctatcgtaagtgaaaaaaagaatcatcggtgcacacagattttcagattgaataagtttcaaaaaattggtagctatggttttgaaaaagctgtttgatgagtc

SEQ ID NO: 34076 - DNA, 239 bp, Gossypium hirsutum
  Clone ID: LIB3149-031-Q1-K1-D6
gtggccaaatcaccatacttactggcatgttctactggatcgcccagcttcttggatccactgctgcttgctatctagctcaaggctgtgactggtgcggcgacaagtatccatccacggtctcggagctgcagttcgagctcttcaaggagtggtgttggtgatgatcatcacatctgcatcggtttacacagtgtgttcgaccacacctgaccgattatatggatcacgccacacca

SEQ ID NO: 34077 - DNA, 365 bp, Gossypium hirsutum
  Clone ID: LIB3149-031-Q1-K1-D7
atctcaaatacatcacagatcacttcaggttcaaatttgccaatgagagacttaaaagaacagcaagatactattcatcgaattggcggacatgggcagccgtgaatatacaacttggctggcggcgttacagaacgaggactcgaggtccgatgatttctgctgccgaaaacggcaacagcagtgaccgccggttgctgcaatacgctgccatgtttatgtcaataaggccacatgatcatctagaataaagaaaagccaattgccttctgcaattcatttgctcattatgtaatcctgactgtcatttaataaagtctttcattcaccatggaaaccattttgaacatagttgttttgctcat

SEQ ID NO: 34078 - DNA, 392 bp, Gossypium hirsutum
  Clone ID: LIB3149-031-Q1-K1-D8
acaaaattgtagatttcattaagtttgatgttgggaatgttgtcatggtcactggaggaagaaacagagggcgtgttggagtgattaagaaacgtgagaagcataagggtagcttcgagacaatccacatccaagatgctgctggacacgaatttgctactcgtttaggcaatgtcttcacaattggtaaaggaacgaagccatgggtgtcactttcaaagggcaagggtatcaagttgtccatcattgaggaagccaggaagaggcttgcggcccaagctactgtctaaattttatgattaaagatataatatctggaattgttttttgtcaaatgaattaatctgtttggtggtcctttgtgtttgcttttgtaggatttatgttttgtt

SEQ ID NO: 34079 - DNA, 363 bp, Gossypium hirsutum
  Clone ID: LIB3149-031-Q1-K1-D9
gactaatcggacgtagaatctgcctaaaccatcatttccagagtgaatattcaaatatcatctcttggatactgacatcttgttgttaacgagtaaaatgcagctgcggcattggtgttggttgtttaacagttttgtctggatttcaggttactgaagtcttgagtgtttcattgactggtattattctgcaattattgcactagattttgatatatgttttaatatgtttgcctttttaagtgcttacctctgtaaaatcttatgttatagtatttaatctacatttgactagcgggatatatgaaattgcatccttattaaatggttaaaaaaaattatacttattttaaatttaatatt

SEQ ID NO: 34080 - DNA, 378 bp, Gossypium hirsutum
  Clone ID: LIB3149-031-Q1-K1-E1
gtacttttaactctaagccaagaaagcaagtcactagggttttaagagaagatcaaaatggcgtcaaaaagatcagcttccatggccctctttttggcactcaacattctcttcttttccctggtcagtgcttgtggttcttgctattcacccacccctaaaccaaagccaaacccaaaccccaaccccacccccactccatcttcacaaggcaaatgccctagagatgcccttaaattaggtgtatgtgctaatgtgcttggcttatccaagcccgtcattggttcacccccagtgatgccatgctgttcccttcttgatggcctcgtcgatctcgaagctgctgtttgcctttgcaccgctatcaaagctaacatc

SEQ ID NO: 34081 - DNA, 314 bp, Gossypium hirsutum
  Clone ID: LIB3149-031-Q1-K1-E11
aaaattgtttcctcggcaaacaatcgattagtgaaatagcttctgcagacaatgggatacttgtatgttttctgctgaattccatgattttggtcatggttggggaaaagtgtctccaaactttttatttttcacttttgttttaaaaattacccaaagcaaattcaagaattatttttttactccgagcatacattttgacttgaaattttttggtgtatatgttaagaacatttgccctttatggcacaattttcaggttttattttgcacaatttattttggaattagatttagccactgcattgacatgc

SEQ ID NO: 34082 - DNA, 238 bp, Gossypium hirsutum
  Clone ID: LIB3149-031-Q1-K1-E2
gagccagctgatggtctagctcctgtttggaacaaagatgttaggttctaccgcgtcaaagattcttcaggtagtccaattgcctatttctattttgatccatactctcgtccatcatagaaaagggaaggtgcatggatggatgaggttgcttcccgaagtcgtgtactgtcaaggactggtaccacgccctggttgcctatttgccaatatggtgtgcatttaaactccaccattt

SEQ ID NO: 34083 - DNA, 297 bp, Gossypium hirsutum
  Clone ID: LIB3149-031-Q1-K1-E4
aaagctgtcacgtcatcgttggggatggtgaagttggtacccttcgtgaagtcagcgtcatctcgggcctccccgctgccaggagcacagagcgcctcgagatccttgacgacgagcgtcatgttatcagcttcagcgtcgttggcggagaccataggctagctaactacaggtcggtgacgaccctccacccttccacttctgggaacggaacggtggtggtggaatcctacctggtggacgtgccgctgggtaacaccaaagatgacacctgtgtgttcgtcgacacaattgttc

SEQ ID NO: 34084 - DNA, 346 bp, Gossypium hirsutum
  Clone ID: LIB3149-031-Q1-K1-E5
ctgagacttagccagatgactcttcagagaggatggaataacaaatcaaagcttctcgtgtgttgaattgtcatcgctgtctggtaaaaatttcaccttaaattctatcctggcaaaatggttgaggatttgttctgccagacaggtgtatgagaaacttctagaagctgctcaaccttgatgcattttggtaatatctttgtgttcagattctgtggcaaatcatataatccattgtttctcgagtcctttcacttgtatcataggtgtacactggattttttcttggatgaattgtcttaacttcagactatagtttatttttttcagaccattatatcttttt

SEQ ID NO: 34085 - DNA, 391 bp, Gossypium hirsutum
  Clone ID: LIB3149-031-Q1-K1-E6
ctccgccatcttcaataatttcttccgttgatctttgttagagattagctttttaatttttcattatgggaaagatcaagatcggaatcaatggatttggaaggatcgggcgtttggttgcgagagttgctctccaaagcgatgatattgagctcgttgctgttaacgatcctttcatcaccactgaatacatgacgtacatgtttaagtacgacagtgttcacggtcaatggaagcatcatgagcttaaggtgaaggactcaaagacccttctctttggtgaaaagcctgtcacagttttcggtatcagaaaccctgaggaaatcccatgggctgaggctggagctgagtatgttgttgagtctactggtgtttttactgacaaggacaa

SEQ ID NO: 34086 - DNA, 384 bp, Gossypium hirsutum
  Clone ID: LIB3149-031-Q1-K1-E7
ctcctccatcttcaataatttcttccgatgatctttgttagagattagctttttaatttttcattatgggaaagatcaagatcggaatcaatggatttggaaggatcgggcgtttggttgcgagagttgctctccaaagcgatgatattgagctcgtcgctgttaacgatcctttcatcaccactgaatacatgacgttcatgttgaagtacgacagtgttcacggccaatggaagcatcatgagcttatggtgaaggactcatatacccttctctttggttaaaagcctgttacagcttttctgtatcacattcccttgggaaaattccatgggctgaggctggtgcgttgtattccgttttataaactggcgtttttaagcg

SEQ ID NO: 34087 - DNA, 380 bp, Gossypium hirsutum
  Clone ID: LIB3149-031-Q1-K1-E8
caggaatttattgagactactaaggagccaggtcttatatttttggcggccaagtttgatgggattttaggacttgggtttaaggagatttcagttgggaaagctgtcccagtgtggtacaacatgctcaaacagggtcttatcaaggaaccagtattttcattttggcttaaccggaacgtaggggaagaagtgggtggtgaaattgtgtttggtggggttgatccagaccattacaaaggaaaacacacatatgtccctgtaacacaaaagggatattggcagtttgatatgggtgatgttcttattggtgacaaaccaactggattttgtgctggcggctgtgcggcaattgcaaattctggaacttctttgctcgc

SEQ ID NO: 34088 - DNA, 392 bp, Gossypium hirsutum
  Clone ID: LIB3149-031-Q1-K1-E9
atgaaaatggaactcgatgacagcatcggagtgagcggagagaatgtaaaacctttatcaagcgagtttgctgctgcacttaagacagtgttccaactatacgcgacttacttggatgcattcggtcctaacgaaacctacttgcgaaagaaggtagagaatgagttgggatcaaagatgatctacctaaagatgagatgtagtggcctaggttctgagtggggaaagattaccgttcttggtacctggggactctatggatcttatgtggaacaaagagcttatcactaaattgatgagacatttgatgcgaactctttttatcgttctgttttagatcatgtttatgaatatgctgagacaaggtgttctcctagaaaaccttggagttt

SEQ ID NO: 34089 - DNA, 370 bp, Gossypium hirsutum
  Clone ID: LIB3149-031-Q1-K1-F1
gttcaagtttcctggtcgtcaaaagattattgttagcaggaagtggggatttaccaagtacaaccgtgctgattatctgaagtggaagtctgagaacaggatcatgccagacggtgtcaatgcaaagcttcttggatgtcatggtcctttggctaatcgtcaacctggaagagctttcctctctggatcagcctagactctcaactatccagcaaatttttaagttctctccaaaagctttctggtgaactcatttctggtttatcattacaggtgggttgcagatcttcctttagtggattttcaggtttaaaatatttggtttaatgaattgtttgtcacaccattttttatgggattgtaatttatt

SEQ ID NO: 34090 - DNA, 392 bp, Gossypium hirsutum
  Clone ID: LIB3149-031-Q1-K1-F11
agtgagatgaagaggtgttgtgagagcttaaatgtcgctcttaataactatttgacacccgatgattatctaagtctgcatgtttggaggaagtcgcaaaggttgaagaatgcttgttacgatttgggttgtccacgcaagaattaccattcatgccatacattgttcgccaactgacaatctttttgttggtccacctctaaagaagaggtagagtcaaaagattgtgaaatagaattttggaggggtggtcaagtgacagaggaaggtctgaagtggttgattgacagatgatttaaaaccattgttgatctaagagctgagactgtaaaagacaatttttaccaatcaaccttggatgatgcttttttatctgagaaagttgatttttt

SEQ ID NO: 34091 - DNA, 393 bp, Gossypium hirsutum
  Clone ID: LIB3149-031-Q1-K1-F12
aaaaaattacactaagaacaaaagcatattctttggtttcacagcgtttaggttttacggaagccaaagaataaaaaaaaaatcccttcgtcctcttaacgctaaagctcggttaaacgattttcagtcaaaaaaagggaaatcgattttttttttttgttgtaatcggcgaaaaagatgcattcgactcatctgctactcgaagagccaatcaggattttggagaagattaagaaattgctttcagtcaaagaactaaattctataaaagaagacaaaatgacaaaagaaaaaaaaaagaaaaagagtgtgttttggaacatatattttgggcttttttggaattaagtaggttcaaatacagttgttaagggagacaaaagcttttagatt

SEQ ID NO: 34092 - DNA, 377 bp, Gossypium hirsutum
  Clone ID: LIB3149-031-Q1-K1-F3
gtgaagttcttggacgatcagaaccggttcattatgaggaacgtgaagggaccggttcgtgagggagatatcctcacattgctggagtctgagagagaagctaggaggcttcgttgaagggttatctttatactttctggggtttatgcttgttttgaattgtctaccgtattgcttttgaattacgtttagtaggtattcgtatatcgagacttgcgatttgggagaatggttgctgcttaaacctggattttatgatgattatgttgaaatgaactgaattggttttgagttttggttatatttttgcctcccattttgagaaaaatgttcggattagatttgtttgtctgaatgatcacttgttatgattatgt

SEQ ID NO: 34093 - DNA, 375 bp, Gossypium hirsutum
  Clone ID: LIB3149-031-Q1-K1-F6
gaagaaaaaaaaaatggcaggaagattgagcaatgtagcatcaaagatcatgggcggaaacggcatcgtttcacgctccgctgcctcctctctccgtctccgttccggcatgggtctccctgttggcaaacatattgtgcccgacaagcctcttcctgtaaatgacgagctaatttgggacaatggaactgccttcccagaaccttgcatagatcgaatcgctgatactgtcggaaagtatgaggcattggcttggatgtgtggtggtttgagcttctttgcatcgttgggattcttagcttggtggaatgataaagcctctaagattccatttgcacctaaagtatatccatatgacaacctgcgagtggagct

SEQ ID NO: 34094 - DNA, 386 bp, Gossypium hirsutum
  Clone ID: LIB3149-031-Q1-K1-F7
caagagagcagcatcagtcgcggcggcggcagttctacccagggtctgttttctaaacaaccatcaaacagaaatgaagttcaatattgcaaatccgactactggctgccagaagaagctggaaattgacgatgaccagaaactccgagccttctttgacaagaggatctcccaagaagtcagtggtgatgcccttggtgaggagtttaagggctatgtgttcaagataatgggaggctgtgacaagcaaggttttccaatgaagcaaggagttctgacttcaggtcgtgttcgtcttttgcttcacagaggtactccctgctatcgtgggtatggtaggagaaatggagagcgaaggtagtaggcaggtcgcggatgcattgtta

SEQ ID NO: 34095 - DNA, 388 bp, Gossypium hirsutum
  Clone ID: LIB3149-031-Q1-K1-F8
gtggaactgagaaccaccttgttctttgggatctccgacctcttggattgactggcaacaaggttgagaagctttgtgacctctgcaacatcactgttaacaagaatgctgtttttggtgacagcagtgcattggctccgggaggtgtacgaattggtacacctgccatgacttcaaggggtttggttgagaaggactttgaacagataggcgagttcctccaccgagccgtgacaatcactttgaacatccaaaagcaatatggtaagcttttgaaggacttcaacaaagggttggacaacaacaaggagatccaagagctgaaggttgatgttgagaagttcgcatcctcattcgatatgcctggcttcaagatgtccgaaatgaa

SEQ ID NO: 34096 - DNA, 313 bp, Gossypium hirsutum
  Clone ID: LIB3149-031-Q1-K1-G10
gttttagttctaaagacaaaggtttgtatgaccggatctctgatcctgttaagaagacaagtatagcgtgtttttacgggaacagctatgctatatagtggacatgacaaaactacatggtgcatttacagacgacgttgattcggaatatgaaaatgtgaaaaagaattggaagatcaggtaatgtgagggatatgaatacggaattcaccgattatcgattgccaactcgatattcggatcaagaagcaatgggacgcgaccacttacatatttatctacagagcattgtcagtggtattcgctcgaattg

SEQ ID NO: 34097 - DNA, 391 bp, Gossypium hirsutum
  Clone ID: LIB3149-031-Q1-K1-G5
gggccacccgcatatatgcgaatgtctcggctatgagctcgagatggcgttcctatacgctgcaggcgctgcgggttataccagcataataccggagcggtggaagcctgtggcatttgatattgcagggcacagccaccagatctttcatgtgtttgttgttctcgcggcacttgctcattgtgttgctacccttgtgattatggattttcgtcgggaatctgcaacctgtgcgtattagcattctactgttaggtaaacaatgttttgatgatcagggggatttcctagttctcccagtttttggcttaataaattctatcacttccaacaacatttttcttaacaaactggcactggtgaccttcaaaaatatatttgattggccatc

SEQ ID NO: 34098 - DNA, 329 bp, Gossypium hirsutum
  Clone ID: LIB3149-031-Q1-K1-G6
aacattttctcctacttgtatctgagttcttttctaggaggaactgagaattggagaacttaatcaccacctatagttttccatttgattattgataatatattttccatttctattgtatgatttgaatgtttgtagtttctatcatgaaatctgtacagctttccacttcttttccataggaaaagattttgctgccattgtacattaattgttcttacatccctgaattctgaacctttatttttcttttgattaaacaaaaaaatatatattatgatatttaaaaatattactatttgtattgttatttatataatcgtattttt

SEQ ID NO: 34099 - DNA, 260 bp, Gossypium hirsutum
  Clone ID: LIB3149-031-Q1-K1-G7
aacattttctcctacttgtatctgagttcttttctaggaggaactgagaattggagaacttaatcaccacctatagttttccatttgattattgataatatattttccatttctattgtatgatttgaatgtttgtagtttctatcatgaaatctgtacagctttccacttcttttccataggaaaagattttgctgccattgtacattaattgttcttacatccctgaattctgaacctttatttttcttttgatttat

SEQ ID NO: 34100 - DNA, 380 bp, Gossypium hirsutum
  Clone ID: LIB3149-031-Q1-K1-G8
gctacactcagtgccagctcgccagcacttgctcctttgacgagttctagtccagaattaaattccattgcaccaccaattgccaacaaacgaagtgaaattcctactttgccatatcaaagtgcttctcaggttgcatcctctgtcatcggggtttcaaattctattcatgtggaaacatctacacaatcattggtaacccctggtcagctcttgcagtcaggatctactgttgttccttcatctcagcctgcagtaactgcacataaagatgtggaagtggttcaagtgtcctcatcatttatcgcctgaaccatcaatacctgttgtctcagaagctcaacctccattattgtcattacctgtttcttcacatgttg

SEQ ID NO: 34101 - DNA, 386 bp, Gossypium hirsutum
  unsure (1)..(386): unsure at all n locations; Clone ID: LIB3149-031-Q1-K1-G9
cacaagtcgagatcacaagattggctaaatatggaagagatggatccagagggagttccactaaatggttaattgatttcagagggaataaacttctgacactaaactgttttagtgcttgcagcaagagccattctcttgtaaaaacaatgacagaaatatagcttttaggtctttttttgattcaggaaatatagttcagagctccttgatattgtctttttgagctttcataatttttttaccttatgttgttctggaaacaacttgcaactaaaatggctatgaaaattgaaaatccaaattgtaagaataagacaatttataattacaagttgcatctcgttccattttaccccnnnnnaaaaataaaaatatttttaaaa

SEQ ID NO: 34102 - DNA, 401 bp, Gossypium hirsutum
  Clone ID: LIB3149-031-Q1-K1-H12
ctgcagtaggaaaggaccaaaagggtttaatctgctgtgcacgttgtagctcaccacccaaactttaacaatggccgtcggtaagaacaagaggatttccaagggaaagaagggaggaaagaagaaagcagctgatccatttgcgaagaaggattggtatgatatcaaggctccatcagtttttacgagcagaaatgttgggaagactcttgttacccgtactcagggtaccaagattgcttcagaaggactcaaacacagagtgtttgaggtttcactgggtgatcttcaaagaggtgatgaggatcatgcttacagaaagattcgtttgagagctgaagatgttcaaggaaaaaatgttttgaccaacttctggggaatgaaatttacgactgacaagc

SEQ ID NO: 34103 - DNA, 362 bp, Gossypium hirsutum
  Clone ID: LIB3149-031-Q1-K1-H2
gaaatctggaggattctacccacatcagctttagtaaagttcgcagttcctaaaacccgcgcatcatctgtcactgagattttctcccttttacccactctctagcacaaccctttctgcaagtcctttcgttgccgatatactctgccaggtataagaagatcaagaactaaagaaatcaaatttagatcggggaaaaatgaaagtggtcgactagttgccctgttccattttacatcgtccgagattttagattcaagtttcaagctcggggatcgtcagcaaagtctatcacactattgaccgcttttggtatttataaagttgcattttggaactatggcatgtgtaggctgcaatat

SEQ ID NO: 34104 - DNA, 388 bp, Gossypium hirsutum
  Clone ID: LIB3149-031-Q1-K1-H3
cttgcttcgccatagcttgcatattgttggggaagttaagcttgctgttcaacattgcttagtagccaatcatggtgttcaacttgaggatttaagtagggttcttagtcatcctcaggctctagctcagtgcgagaacacgttaacaaagataggcttgagtagagaagcagttgatgatactgcccttgcagcaaagcatgtggctctccacaaactaaaagatactggagctgttgcaagttcttcggctgcaaagatatatggattgaacatccttgctcaaaatattcatgatgattgtgataatgttactcgatttctaattctggccagggaaccaattattcctggcattcagaattcattcaagacaaagttatgtttt

SEQ ID NO: 34105 - DNA, 267 bp, Gossypium hirsutum
  unsure (1)..(267): unsure at all n locations; Clone ID: LIB3149-031-Q1-K1-H4
ntcttttttttttttttttttttttttttttttttttttttttttttttttttatttttttgtttttttttttttttttttttttttttggaaaaaaaaaaaccaagacggccccgggggggagccttttgggggatttaggaagggggggggcggatttgaccaaaaaaattggttattgggctattttttcttttaccgggcttggttggctggttttttaaaaatgtgccgtctccagtgcaacaattcatccttttttttttg

SEQ ID NO: 34106 - DNA, 156 bp, Gossypium hirsutum
  Clone ID: LIB3149-031-Q1-K1-H6
gcagacctggaaaccttgagcgaatctttgttcttagtttccgattttggatatgggtacacgtacgttgggtctgggctgctgtatttgcttcctattgttttctgcattgagttttagtgtctatgctttacattattggatctttaattgata

SEQ ID NO: 34107 - DNA, 305 bp, Gossypium hirsutum
  Clone ID: LIB3149-031-Q1-K1-H7
gtcgggtccatccattgtccacaggaagtgcttctaaatttacaagtcatttaatggtgagttacattttctgttagttggcttttcgtgtcgtgtgtcaagtgaactcaaggtcgggttgatgtgggaaatggattattgaaagagggttgtactttgatcttgatgtaatattagcctttcattctgctgtgatttgtgatgcccgctggtgtcactgtgatagagatgatgggtctttggagctggtggtcggcagacagtgggtgtatatttccatcctttccatgcatttttcaaccatg

SEQ ID NO: 34108 - DNA, 256 bp, Gossypium hirsutum
  Clone ID: LIB3149-031-Q1-K1-H8
acgcgaagttgcggcatatcctttttagtactccctactgtaaagatgaacaaggagaggctcatgaaaatggccggtgcattccgtaccggcgggaagggtagcatgagaagaaagaagaaggctgtccacaagacatcttccacagacgacaaacggttacaaagcaccctcaagagaataggagtcaatgctattcccgcaatcgaggaatgtaacatcttcaacgactatgattttatccagtttattaatc

SEQ ID NO: 34109 - DNA, 198 bp, Gossypium hirsutum
  Clone ID: LIB3149-031-Q1-K1-H9
tcgggagagaaccggagctactgtcgtcgccgccgccatggtgaagtttctgaaatccaacaaggccgtgatagtcctccaaggccgattcgctgggcgcaaagcggtgatcgttagatccttctacgatggaacacgtgatcgcccctatggccactgtttggttgcagggataaagaattaccccagcaaggtcat

SEQ ID NO: 34110 - DNA, 383 bp, Gossypium hirsutum
  Clone ID: LIB3149-032-Q1-K1-A1
ggggacaggacatagaaagccaagagatgcttagacaaggatacactcatgccttcttgatgacgttcgaaaagaaagaagattacactgcatttaccagccatcccagtcacattgaattctccgccacttttgttactgccattgacaagttcgtggtgcttgatttcccttcggttcttgcaaaatctccggcttgatctgcaagaaagaaaaaagctacccaggaatttaagtgttttgagtatttgttatgtttaatctctctgttgtttgcatctctatgttttctgcttatgtgttatggctttctgccattgctatcaattccccaataatcacaatttgtattattgatatgcaaaaattcacatgcatttttc

SEQ ID NO: 34111 - DNA, 428 bp, Gossypium hirsutum
  Clone ID: LIB3149-032-Q1-K1-A10
aaccatttaaattctctgaacctacgcaagctgctatagcaaatggaattgctggaatgactgcatctctgtttgctcaagctgtttttgttccaattgatgtgattagtcaaaagttgatggtccaaggatactcaggccatgcaaagtacaacggaggtctagatgttgctcgtaaggttttaaagtctgatggaatccgaggattatacagaggatttggtttgtcagtcatgacttactctccatccagtgctgtatggtgggctagttatggttctagccaacgtgttatctggaggttcttgggccagggcacagacctaaaagaagtaacttctaatctatcgacatattggcagtgcaagctgttggaggaatcattgcaggtgctacagcttcctgcatacaacttcattggacacttt

SEQ ID NO: 34112 - DNA, 430 bp, Gossypium hirsutum
  unsure (1)..(430): unsure at all n locations; Clone ID: LIB3149-032-Q1-K1-A11
caccagattggattccataaagcaagctatccttctctttgtcaattccaagctctctatcaaccccgaccaccgcttcgctttcgccactctctccaaaaccgcctcttggcttagaaaagagtttagtagtgatgttgagtctaccattggtgctgttcgagcactctcggctaccactgtctctactgggcaagcagacctcaccaatttattccgcttagctgctcatgaagccaagaaatctcgtgcccagaaccgcattttaagagtgattcttatatactgcagatcatcaatacgaccccatcatcaatggcctgtaaaccagaagctcttcactctggatgtgatgtacctncatgacaagcctggacctgataatngtccccaggcaagttacgatgcactggttgatgcactngaacat

SEQ ID NO: 34113 - DNA, 401 bp, Gossypium hirsutum
  Clone ID: LIB3149-032-Q1-K1-A12
tccacatcggtcactgggataaacaacactgaatatgaaataacaagagggaaggaattaaaccgcattgctggagtgggaaagacttgcaactttgtgaaggctgacttcatgaagatggcatttcctgacagcacctttgacgcaatttatgcaattgaagctacttgccatgctccggatgcgtatggctgctacaaggagatttacagagtactaaagccaggacagtattttgctgcatacgagtggtgcatgacagattcatttgatccaaataactcagaacatcagaaaattaaggctgaaattgagattggtgatggtcttccggatatcaagttgactggacagtgcctggaagctctaaaacaggcttgttttgagataatttgggagaa

SEQ ID NO: 34114 - DNA, 382 bp, Gossypium hirsutum
  Clone ID: LIB3149-032-Q1-K1-A2
attttgtcagtggtgaagataacttggtcatcttgcttctaaatgccagggtattggtatgctgcttgaagggctttttggttctcttgttggtactactgcatctgtggaaaatgtgggccttcttggacttacacatataggaagcagaagggttgtgcagatttcaactgcttttatgatatttttctccatatttgggaagtttggtgctttttttgcctctattccattgccaatatttgctgccatttactgcattttgttgggcattgttgctgcttctgggatcacattcatacaatttgcaaatagtaactctatgagaaacatctatgttttgggtgtctctctattcctggggttatcaattcctcaatac

SEQ ID NO: 34115 - DNA, 323 bp, Gossypium hirsutum
  Clone ID: LIB3149-032-Q1-K1-A4
aaaaaaaaaaaaaaaaaaaaaaaaaaaaaaaaaataaaaaaaaaaatttaaaataatataaaggggggaaaataaaaaaaaaaaaaaataaataaagaaaaaaggtaacaaaattaataattcggggcgttcccttgtggggctcttttttttcctccctttttcgtcgccgtttttggttttttttggggctcttataattcgttgaatctcggggttttttctcccctttttggctttgaaatactttccttattttccattttatgcccctttggtggaattttttctttttttttccccccttttctttttttttggtg

SEQ ID NO: 34116 - DNA, 199 bp, Gossypium hirsutum
  Clone ID: LIB3149-032-Q1-K1-A5
tgtcaatttcaagctctctatcggccccgaccaccgcttcgctgtcgccactctctccaaaaccgactcttggcttagaaaagagtttagtagtgatgttgagtctaccattggtgctgttcgagcactctcggctaccactgtctctactgggcaagcagacctcaccaatttattccgcttagctgctcatgaagcc

SEQ ID NO: 34117 - DNA, 428 bp, Gossypium hirsutum
  unsure (1)..(428): unsure at all n locations; Clone ID: LIB3149-032-Q1-K1-A6
gccaggttacaggctcaattttctcaaatgcgaccagttacaatgtcaccttcagttgctcctcgtatgccaatgtacccacctggtggtccaggtcttgggcagcaaatattttatggtcaagcacctccagcaatgtttccgcagcctggatttgggtatcaacagcagctcgtccctggtatgaggcctggtggagctcccatgccaaatttctttgtaccaatggttcaacaaggccaacagggtcagcgtcccggtggtagaagggctggggctggtcagcaaagtcagcaaccagttccattaatgcagcagcagatgctaccgcgagggcgggtctatcgctatccaccagggcgtggtctacctgatgtttcaatgcctaacattgctggaggcatgctttctgntccatatgatatggg

SEQ ID NO: 34118 - DNA, 282 bp, Gossypium hirsutum
  Clone ID: LIB3149-032-Q1-K1-A7
gctgaacgtggagatgatgaacaggaaggtgaacaatattgatgctactatcgcaatatcatttattttgaagatgatgggttgaccctgggggggtatcctgttctttcttattcgggtgaggtttctcaaattatgcctatggaataaatttagacatgtttgcttgtcatttttttgttgttagaaacgctagtcttttacttatgatgctgcataagaacatgaatagccttactcgctgcggttgagccagcaggtgaaaaatgtgctgattcgggc

SEQ ID NO: 34119 - DNA, 241 bp, Gossypium hirsutum
  Clone ID: LIB3149-032-Q1-K1-A8
gatgaaggtggagataattaacaggatcgttaacaatattgatgctactatcgcaatggggggtattttgaagaggatgggttgaccctgtgagggtatcctgttcttttattatttgggtgaggtttatcaaattatgcctatggaataaatgcagtcatgtttgtttgtcattttatcgttgttagaaatgcttgtcttgtatttatgatgctgcattagaacatgaatagtcttactt

SEQ ID NO: 34120 - DNA, 372 bp, Gossypium hirsutum
  unsure (1)..(372): unsure at all n locations; Clone ID: LIB3149-032-Q1-K1-A9
aacttcggttaaaaccgaattaaccgattaaatcgatcttattttgttaatcaatcggtggttgaacttagttgtgtcgaaggtcggttaatggctttttgaaatttagcttattggttaattcgattccaaatcgaataattaaccgaattaatcgaacttaataattaatattatgtattaatttaagacttatgtagtgtttttattatgtagtttttcaagtcataaaattttggttaattcggttaacttttaagataaataaatatatttcagtttatttccnttnnnaaaaaaaaaaaaaaaaaaaaaaaaaataaaaaaaataaaaaaaaaaataaataaaaaaaaaaataaaaatattaatat

SEQ ID NO: 34121 - DNA, 373 bp, Gossypium hirsutum
  Clone ID: LIB3149-032-Q1-K1-B1
tactaagatggaggagattgaccacttgcatgagttgcaaattcttgaacttggttcgaacagattacgggtaatggaaaatttgcaaaatttcacaaaattagaagagctgtggctgggaaggaatcgaattaaagctataaacctttgtgggctcaaatacatcaagaagattagcttgcaaagtaatcgtttaacttctatgataggattggaggaatgtgttgctctagaagagttatatttgagccacaatggcatttcaaaaatggaaggtctatcaacattggttaacctccgagtattagatgtttcatcaaataagctaacatcagtaaatgacgtacaaaacttgacaaggttggaggactta

SEQ ID NO: 34122 - DNA, 352 bp, Gossypium hirsutum
  Clone ID: LIB3149-032-Q1-K1-B10
gcagttggccggcccgaagaggcgactcaccccgatgctctcaaggcagctttggctgagttcatctcaaccttgatcttcgttttcgctggatcgggctcaggaatggcttttaacaagttgaccgacaacggagcaacaaccccggccggtctcgtagccgccgctctagctcatggcttcggtcttttcgtcgctgtctccgttggcgccaacatctcaggtggccacgtcaaccccgccgtcaccttcggtgctttcgttggcgggaacatcactctcttgcgcggcattctttactggatcgcccaactcctaggctcaaccgtcgcttgcctgttgcttaagttcg

SEQ ID NO: 34123 - DNA, 66 bp, Gossypium hirsutum
  Clone ID: LIB3149-032-Q1-K1-B11
aaaaaaaaaaaaaaaaaaaaaaaaaaaaaaaaaaaaaaaaaaaaaaaaaaaaaaaaaaaaaagggc

SEQ ID NO: 34124 - DNA, 270 bp, Gossypium hirsutum
  unsure (1)..(270): unsure at all n locations; Clone ID: LIB3149-032-Q1-K1-B12
tttttgctgtggttatgatggggggtcgccaatacattgttttccctggaagatatctctacacccagagactgaaaggtgcanatgtcaacgataagattgttctaaacaaggtattacttgtgggaacaaaaacaactacatatatcggaaaacctgtggtaactaatgctgctgtacatgctgttgttgaggagcagggactaaacccaaaagtagttgtcttcaaatataagaagaaaaaaattatcggagaaatattggacatcg

SEQ ID NO: 34125 - DNA, 416 bp, Gossypium hirsutum
  Clone ID: LIB3149-032-Q1-K1-B2
atatgtaccgcatggcgttgatggctttgatcgctggcgaccttcctggtgtgaatagagaaagctattgttggagatataacaccatcatgtggtgttcctaaagaagaaaaaagcagacgtgagcaagcagcgttaactgaaatgtgcaaaattctgggtggaggaatgagaggtgcttcctagccaattttatttttggaaatcttgggttgctaaattatttgtttattgcatctgcttgtcttattttggtattttgttagttgcagctgaggagatccaagaactgtgggtagaatatgaaaacaatgcttctctggaggctaaccttgtgaaagattttgacaaggttgaattgattctgcaagcactggaatatgaacttgaacatggaaaggtgctgaatgaaattt

SEQ ID NO: 34126 - DNA, 205 bp, Gossypium hirsutum
  unsure (1)..(205): unsure at all n locations; Clone ID: LIB3149-032-Q1-K1-B4
agcggggacaagtttaggcgatgagcgtgcgatatgcttcactttgtaaattgtatcaaacattcagttacatgaaaaattgtatcattagttggattgaatatacctttttataaattaaaaaaaaaaaaaaaaaaaaaaaaaaaaaaaaaaaaaaaaaaaaaaaaaaaaaaagaatngggaaaaaaaaaataaaaataaataa

SEQ ID NO: 34127 - DNA, 274 bp, Gossypium hirsutum
  unsure (1)..(274): unsure at all n locations; Clone ID: LIB3149-032-Q1-K1-B6
aaggaagaacccaaaagggaagagatttttgctgttgttatgattgggggtcnccaatacagggggtttcctggaagataggggtacacccaaaaactgaaaggggcaaatgtcaacgataagattgttctaaacaaggtattacttgggggaacaaaaacaacctacatatatcggaaaaccctgggtaactaatgctgctgtacatgctgttggtgaagaacagggactaaaaccaaaagtagttgtcttccaatataagaagaagaaaaat

SEQ ID NO: 34128 - DNA, 402 bp, Gossypium hirsutum
  Clone ID: LIB3149-032-Q1-K1-B7
aattgagactccaaccaagtcctctggctctcaccacgcatcacatcctcctttgaatgaaaggattctttcatcgatgagcagaaggtctgttgctgctcacccatggcatgatcttgagattggacctggagctccaatggttttcaactgtgtgattgaaatcccaaaaggtagcaaggtgaaatatgaacttgacaagaaaactggtctgatcatggttgatcgagtgctttactcatcagttgtgtatcctcacaactacggattcatccctcgtactctttgtgaagacaatgatcccatggatgtcttgatcattatgcaagaaccagttattccaggatgctttcttcgcgctaaagctataggtctgatgcctatgattgatcagggtgagaa

SEQ ID NO: 34129 - DNA, 331 bp, Gossypium hirsutum
  Clone ID: LIB3149-032-Q1-K1-B8
cacaaatgtccttgaaaaacccaaccaaagcccccaaaaaacgacacttcttgagtatgtgtttttcatattgtaatagctgaaaagcttgcagtaataagttctgtgagaagagaggaaatggatggatttcttgtagtgtcttcgtttgtaatcctagaagctatgaacttgtcaaatagttttaattaaacatataactgaagataaataagtagtatatattaagttcccttttgttctcgttaaggaaattgtatgttctaagcagaatgtaagcctaatatatgtttatatttaaacattgagaaataaataataaatctgagta

SEQ ID NO: 34130 - DNA, 390 bp, Gossypium hirsutum
  Clone ID: LIB3149-032-Q1-K1-B9
agatgatgcatcacagagccactttggtgcggctaatcccaaccagcttcagtctcagggtttgatgaactctctctactcccagccctttgcacactacaacacacagccactaaacttgcagtctcctcaacagcagcaaccacagcagggccagggttcccaaaaccagaatcttcgctataatggttaataataaagatgtatttggctttgatgggttatggtctttgcaatcagcaacttggtttgtgctgtccttgtatgcccaaatatatccttctctcaagtgcaaaatgtttgccaggtcagttaacttcctgttcgtaacctgtaagatgattccagttgatggggaataaatataattggagtaaggattatatcatt

SEQ ID NO: 34131 - DNA, 420 bp, Gossypium hirsutum
  Clone ID: LIB3149-032-Q1-K1-C1
aaacaactttccttctaaattgggttctatagaatatcaatttataaacgaaaccaaagaggtgaagttggcggagaaatagtggtggatggcaagaaccaacaaatatacctccattaatttcaaccatgtcctcgagaaaaatctgactccttcttcctcatctggttacaacaagaatccccaattcaatcaccaaacccagtcctattttgcttcttattcatacgtaggcaatgtgaaaacccatggccgtatgctcgtgctgacccgtccttcccctaagcctatttccactcctcctgtcgtttccccaacaccgcccaaacaccccctacctcaacctcgttctgttttagtcccagatcaaccaccttcgtctgatcagatttctttacgacccggttctgggacataaat

SEQ ID NO: 34132 - DNA, 402 bp, Gossypium hirsutum
  Clone ID: LIB3149-032-Q1-K1-C10
gattgaaatcaagtttaggacaaaggagctactggagtgcatgggcaggcttgaccaacagcttataaacatgaaggcaaaacttcaggaagcaaagagcaatggagcccatgcacagatggattctctgcagcagcaaataagatcacgtgagaaacagcttttaccagtatacacccagatagccactaaatttgccgagcttcatgatacttctctgaggatggcagcgaaaggggtaataaaagaagtagttgactgggatcgctcacgatctttcttctatagaagattgcgccggagaattgctgagagttctctggtcaaaattgtaaaagatgctgctggtgatcaactgtcgcataaatctgcaatggacttgatcaagaaatggtttttgga

SEQ ID NO: 34133 - DNA, 396 bp, Gossypium hirsutum
  Clone ID: LIB3149-032-Q1-K1-C11
ggaccccaattcaatctttgtgttcaagtttaggactcattttggaggtggaaaatctactggatttggtttgatttatgattctgttgagaacgccaagaagtacgagcccaagtacaggctgatcaggaatggactcgataccaaggtagagaaatcgaggaaacaaatgaaggaaaggaagaacagggctaagaagatccgtggagtaaagaagaccaaggccagtgaagcagcaaagaagaagtgagagctaaaaggcaaaactcgtgcttatcacagagccaatgcttttcaacattgttttttagggttcttgaatcttttgttttggaaaccagatttttggtgttggtatctgatgtttagttatattattacgatctgatttttctt

SEQ ID NO: 34134 - DNA, 378 bp, Gossypium hirsutum
  Clone ID: LIB3149-032-Q1-K1-C12
ggaaaagaggaaaggttttggccatgaaaaaatcgtcaaggactgctactgagggtctgcttgctctggctcaaaatgagggcaaggctgctgtaattgaacttaattgcgagacggatttcgttgccaggaatgaaatttttgagtacttggctttggcattggcaaagaaagctttgtttgtccaaaactcttcccaacagattcctggggttttctcatttgggcctgagtgtttagaggacttaaaattaaatcttgaccatccaaaaattagtggggagacaaccattcaaaatgcagttacagaagtggctgcaatgatgggagagaatataaaactcaggaggggtgttgtgatgtcaacatcttcgcatg

SEQ ID NO: 34135 - DNA, 393 bp, Gossypium hirsutum
  Clone ID: LIB3149-032-Q1-K1-C2
aaggatctcaagcgtggttttgttgcatccaactccaaggatgaccctgctaaggaggctgccaacttcacttctcaggtcatcattatgaaccaccctggacaaattggaaatggatatgccccagtccttgactgccacacgtcacacattgctgttaagtttgctgagcttttgaccaagattgacaggcgatctggtaaggagcttgagaaggaacccaagttcttgaagaacggtgatgctggtatgattaagatgattcctaccaagcccatggttgtggagaccttctctgagtacccacccctgggtcgttttgctgtgagggacatgcgtcagaccgtggctgttggtgttatcaagagtgtcgagaagaaggacccaaaccgt

SEQ ID NO: 34136 - DNA, 420 bp, Gossypium hirsutum
  Clone ID: LIB3149-032-Q1-K1-C3
gataaactgaagggaggcccacttttctggattgatacggctgataaacaaccttgcattggtaccggtggtatgataccgtggaaacttcaagtgacggggaagctttttcacagtggtttaccacacaaggctataaatgcattggagctcggcatggaagcacttaaagaaattcagctacggttttataaagacttcccaccccatccggatgagcaagtatatggatttgctacaccatcaaccatgaaaccaacgcaatggaattatccaggtggtggaatcaatcaaattccaggagagtgtacaatatcaggagatgtcaggttaactcctttctacaatgtaaaagatgtaatgaataagcttcaagaatacgtagattacataaacgaaaatctaaacaagctagacaca

SEQ ID NO: 34137 - DNA, 352 bp, Gossypium hirsutum
  Clone ID: LIB3149-032-Q1-K1-C4
aatggagaacaccttttggacgagagtttttctgttgtgcttattcaggctcgaccaaccggtgagttacatgaaagagaggcgtgcggacacaaacagcaatgggccccatgcacagatggaatctctgtaacaccagatttgatcacgtgagaaacagcttttaccagtatacacccaaatagccactaaatttgccgagcttcatgatactgttatgaagatggcaccgaacggggtaataaaagaagtagttgactgggatcgctcacgatctttcttatatagaagattgcgcccgagaattgctgagagttctctggtcaaaattgtaaaagatgctgctggtgat

SEQ ID NO: 34138 - DNA, 427 bp, Gossypium hirsutum
  Clone ID: LIB3149-032-Q1-K1-C5
cagttccttcagccaaattcacaccgctcttgaaagatgagctcgacatagtgatccccaccattcgaaacctcgatttcttggagatgtggagaccctttttcgagcaataccatttgattatcgttcaagatggcgatccatccaagaaaatcagggttcccgatggctttgattaccaactttataacaggaacgacgttaacaggatcttgggttccaaggcttcttgcatttccttcaaggactctgcttgtagatgctttggttaccttgtttccaagaaaaaatacatcttcaccattgatgatgattgttttgttgccaaagacccatccgggaaggaaatcaatgcgcttgagcagcacattaagaacctgttaacaccatccacaacccatttctttaacacactctatgatccata

SEQ ID NO: 34139 - DNA, 300 bp, Gossypium hirsutum
  Clone ID: LIB3149-032-Q1-K1-C6
ggtgagtctttaccttctgatcttaaaattgttaccggtaggatagatttagatcaataagaacaacatttgacatctattcggtaggcatttcgagtctttagcaaatttgaagctttaagctgtataattttatatctcgatcgatcgaatagcagtcagcaaacctcaaaccagccatgttccccggttgtaatttttcacgcattgttgaaacgagactttatttaaaaaaaaaaaaaaaagactataattaaaaatactgggcgtaccttgtttaagatcaaaacgttcctttct

SEQ ID NO: 34140 - DNA, 316 bp, Gossypium hirsutum
  Clone ID: LIB3149-032-Q1-K1-C7
aaaagactataagaatggccactggatccgccacaggattcatcaaagcagatctcatacggagccaataaaaaatgacctttaggctgcgggcggcccttatggaggatctaaggttacaacacgaacaccgaatccataacacattctatcatgcaaaccaaatgcaatcgaccgaacccctgttgacaaccaacattactgggaaaacaatggcgcctcccacattaataaattagcattaaatgcggtttagccaacatgggaaaaaagcgaagaggccatttcgcatacactttacaaaaagtttctcatt

SEQ ID NO: 34141 - DNA, 411 bp, Gossypium hirsutum
  Clone ID: LIB3149-032-Q1-K1-C8
agaaagggccttgttcaagttccttaagcctgggcaacgtctacagcccgccgacgttcaagctgccgccatgtggggcgtcgctgccactaccggcgctctttggctcattcagccttttgattggttgaagaagacctttctggagaaaccagagtcggattagaagcaaatgggacatcttgcaactcattgcggttttgtttatcgggtttgctgatgaacaaatcatggaaagaataaaaataataatgtagtacgcgtaattttttgtggtttattgctaagagaacaagcctctttgcttttggtatcaattactgggaagttttgaacctttcaccttcagtttgaactggtgtctcatttctacttgagtttatgaattcatgcattcataaagaggcttat

SEQ ID NO: 34142 - DNA, 374 bp, Gossypium hirsutum
  Clone ID: LIB3149-032-Q1-K1-C9
gtccttcaaagagatctgaaataggagctagttcaaagtctgtcgaagatggcaggaacaagctctgcgcggattgttttagttgttgtgtctggtgttttagcattgattgggtcagcacaggctcaactgcagatgaacttttatgccagcagctgtcctaaagccgagcagattgtgctggactatgttaaacagaacatccctaatgccccatccctcgctgcttctttcttaagaatgcacttacatgattgcattgtcaggggctgtgatgcatcagtgcttctaaactccacatctggccaagcagagaagaatgcagtcccaaatctaacactgacgggctttgatttcattgaaagagtgaagag

SEQ ID NO: 34143 - DNA, 423 bp, Gossypium hirsutum
  Clone ID: LIB3149-032-Q1-K1-D10
agctatgaaggcaacggcatggatgttattatatctcttcttcagtagatttgggttcacagtgttggcaataccattgttgtatgcatcattgatttcatggcttgtttcaattgcttctcacccttcaatcgatcttcccatgcttttgggcaaaaacccagatgggactttcccaattttgtccactatcatgttctccccatatctgtattttaatagagctttttcaatggcgagaaggttccttactggtgacgaaccttactctcaaatatgtgagggtttatatgttggtggttgccctgcttcacctcgtttattgccgcctggtaaccctgccattattgattgcacatctgaattcccaagaataaaggagttcaagggtcattcatatttatgtgttcctacttgggacac

SEQ ID NO: 34144 - DNA, 284 bp, Gossypium hirsutum
  Clone ID: LIB3149-032-Q1-K1-D11
ttctctaaaagattttatactgctgttcttatataacagttacaaaacaaccggtcacgaagaggttgcagaaccagcgaagaggacctaattccagcaaccggtgggctaaggtccgatcgacgaggaaagacaagcttgataatcttctgctccaagagcaagctttaactgctgcaatcttgttcacgctacattaacagcaaaacgggggagctaaattgccgtttgacaggtcgactacgttgattaacccgaattaatcttactggtctaagaaagct

SEQ ID NO: 34145 - DNA, 407 bp, Gossypium hirsutum
  Clone ID: LIB3149-032-Q1-K1-D12
gccaattcagggagactggaatggtgccgttgctcacacaaattacagtacgaagtccatgagaagtgatggaggctacgaggttatcaagaaagcaattgcaaagcttgggctaaggcacaaagaacacattgctgcctatggagaaggcaacgagcgccgtctcaccggccggcatgagactgccgacatcaacactttcttatggggtgttgcaaatcgtggggcatcaattcgtgttgggcgagacacagagaaagccggaaaagggtatttcgaagacaggaggccagcatcgaacatggatccatacgttgtcacatccatgattgcagaaaccaccatcctgtggaaaccatgaagggaagcccaatgttgggatgctgttttcatggtagaaaagaaag

SEQ ID NO: 34146 - DNA, 369 bp, Gossypium hirsutum
  Clone ID: LIB3149-032-Q1-K1-D3
gaaatttgttgtctgaaaagagagttaagagctcatttttcagacaacaaatttcttaaaacatccattaatgaagtcttgcaacaggacaactcaacagaacagaaaaagaaacacaatctaactcgctcggagcatctgcattgaaccaccgagttaccccgaactgcactatccacatgcaaaatctaagcaacgagggtgctggcagtcgtagactcatatttccagacaggtggaagcttctttgttttcttgtagtaacgagcaagcctgtgaatcctgctctcaacaagaatcaaccgaaacttggaatccttatccttcctgtttctctccaaatgcttgcggatcgcgccaagatgatcg

SEQ ID NO: 34147 - DNA, 428 bp, Gossypium hirsutum
  Clone ID: LIB3149-032-Q1-K1-D4
aatttttctctgggcttctgcatggttctatctcaacatacttcaaatcacagccaataccagataacaataatgcaagtgtgctagctgtcgtgggaaagacatttgatgacttggtcttgaacagtcccaagaatgttcttttagaggtatataccccgtggtgcatcaattgtgagaccacgagcaagcaggttgagaaattggctaagcattttaaaggcttggacagtctcatctttgctaagattgatgcttctgctaatgaacatccaaaacttcaggttgacaactacccgtcactctttttatacaaagctggtgataaagacaatccgatcaaactttcaacaaaatcaggttcaaaagaactagcagccttcattaacaaacaagtgagacccaagatcaagcggccaaagatgaac

SEQ ID NO: 34148 - DNA, 361 bp, Gossypium hirsutum
  Clone ID: LIB3149-032-Q1-K1-D5
gcgtccgaatttttttttgggcttttgtttggttctttttttacatacttcaaatcacagccaataccaggggacaataatgcaagtgtgctagctgtcgtgggaaagacatttgatgacttggtcttgaacagtcccaagaatgttcttttagaggtatataccccgtggtgcatcaattgtgagaccactagcaagcatgttgagaaattggctaagcattttaaaggcttggacagtctcatctttgctaagattgatgcttctgctaatgaacatccaaaacttcaggttgacaactacccgtcactctttttatacaaagcttgtgataaagacaattcgatcaaacttttaacaa

SEQ ID NO: 34149 - DNA, 399 bp, Gossypium hirsutum
  Clone ID: LIB3149-032-Q1-K1-D6
ggcttataatgctcgtacttttggacagacattttcaacaggatcctcaagcaaagaaaaaaattctaacaaaccaaatagtgaatggaagccatcacaaagacctgaggctgtgagtgatgaatttgggcaacgacaaaataacccaaataagcagcctcgcagatactccgagatgagctttagcaagtgatttactcatttaagatggagcctgtcgcaataaactgataaaggcctttctttcgggccctttgtggtctccagcttttgacctggaccactttgggccacaatttgttccaggatattgtaggtaatcagacttcacccctaggtagtgctgcttattctgttttggatttaaaagttcattctctttagaagaaagtcattagt

SEQ ID NO: 34150 - DNA, 360 bp, Gossypium hirsutum
  Clone ID: LIB3149-032-Q1-K1-D7
ggagtaactggggagagttcgattgaatctattccatttcaggttttaagttggaaaccacgagcttactattttcccaactttgcaacttcagaacaatgtgaacatgtaatagaaatggcaaaggtgaaccttaaaccatctggtttggctttgcgcgagggagaaactgaagaaagcacaaaaggaactagaacaagttcgggaacttttattagtgcatcagaagatgaaaccgggaccttggacttaatcgagaaaaaaattgcaaaggttacaagcatcccacagagccatggagaggcatttaatattttgaggtacgagattgggcagaagtatgattctcattatgatgca

SEQ ID NO: 34151 - DNA, 374 bp, Gossypium hirsutum
  Clone ID: LIB3149-032-Q1-K1-D8
gctttccgtcgcttaatcaaccgtcttcagcaccaatccaaactcttaatttccattgacatttttcaaaattaaatttatttaattattaattttccttctgtgtgtgatttgggaggctgtttctgaagatggaaatcgaggaaaaacaagcagaggtaattgatcatttcgtgaagcaagtatcagctcagaagggctcggctcttggctccgttttcgttgaagcgacgtcgcatccttcacttttcgccttctctgagattcttgctgtgcccactgtcgctgagctagaaggaactgacaactcggtgcaccttgagatgcttcgattgtttgcacatggaacatggagcgattataagagaaatagc

SEQ ID NO: 34152 - DNA, 316 bp, Gossypium hirsutum
  Clone ID: LIB3149-032-Q1-K1-D9
ggagtccacctctcggcttacgatgcagaggctcctctcatcagcaacgtgccatccaaggttatcgatagtataccacggatggtggaagttccaggagttgccatacacacttagtacctgcctgcctactggagagggatcggaatcaatgaaatcaataagtgatagtagtatgttgtggcatattcatcaaaattctcatttactaaaatactttatgattgtttggatcttccattcttgttgttgcttatgtttgaatgtgtgtaactgttatcatggaagtcaatcagatatttgaatgtttgtaacc

SEQ ID NO: 34153 - DNA, 422 bp, Gossypium hirsutum
  Clone ID: LIB3149-032-Q1-K1-E1
gtgctcttgagcagcagctaaagttgatccaaaaatgaagtttaatatcgcgaatccaaccactggttgccagaataagcttgagatcgatgacgatcagaagcttcgggcgttttttgacaagaggatctctcaggaggttgctggagatactttgggcgaggaattcaagggctacgttttcaagatcatgggaggttgtgataagcaaggatttccaatgaagcagggtgttctaactcctggccgtgttcgtctcttgcttcatagaggtactccatgtttccgtggatatggaagacgtaatggagagcgcagaaggaagtcagtccgtggatgcattgttagtcaagacctgtctgttttaaacttggttatagtgaagaaaggtgagaatgatttgcctggtctgaccgacactg

SEQ ID NO: 34154 - DNA, 380 bp, Gossypium hirsutum
  Clone ID: LIB3149-032-Q1-K1-E11
gatgcactgaagagcatgtacaatgcagaaaagaggggcaaacggcaggtcatgatcaggccatcctcaaaagtgatcatcaagttccttttggtcatgcagaagcacggttacattggagagtttgagtacgttgatgatcacagatctggtaaaattgtagttgaactgaacggaaggctgaacaagtgcggggtgatcagtcctcgcttcgacgtatgagtgaaggagatcgagggttggactgccaggctgcttccatcaagacaggttagccggaaaactgaacttcataattttatgctttcataagattgttttaccctattctactgagttgtataatggatttgcagtttgggtacatagtgctgacaaca

SEQ ID NO: 34155 - DNA, 429 bp, Gossypium hirsutum
  Clone ID: LIB3149-032-Q1-K1-E2
ggaaatcaataaaaactggagaggctaaaaattctactgagagaactgtattttatgaagatgaccaagagaatctctacaaacttgtgcaagataaagccacaactggaaagcaaggtctgggcattaaagaccgaccaaagaaagtagctggagttcactttcaggggaaaaagacatcattcagcgatagtggtggtgaggattctgatgatgttggtcctccagcaaaacgaatgcgtgaaaatgcattagaaacagagaaagctgatgagccaaaactaaggttgaaaaagctgtgtaaacggcttctttgtcaggtacctggagattcattaaagctgaaacagctgaaaattcttattgatgaacagtcaacttcggttttttccagcttttctacaaagaaagatgctattgcctacttaa

SEQ ID NO: 34156 - DNA, 370 bp, Gossypium hirsutum
  Clone ID: LIB3149-032-Q1-K1-E3
gtagaagtgcatttgcagttgctttgatttgctttgtggtaaccgctgtcggtggtcaatctccggcagcctcacctactaaagctccgccggccgcggctactcctgctactgctcccgctactgcccctgttagcaaacctaaatcaccggctccaactgctgcccctaccacttccccaccaacttcttcaccaccggctgcggctccggagaagtctgcggcggttccagccccatctaaatctgctacggcttcttctcctccggctgctgctccggtgagttctccacctgctccagtacctgtgagctctcctccagccaaatcgcctcccgttgctgcaccgacgactccaccagagagctc

SEQ ID NO: 34157 - DNA, 196 bp, Gossypium hirsutum
  Clone ID: LIB3149-032-Q1-K1-E4
cccgtccgcaagcattggttaccattcattcatattccacaatggtaggtgctgtgctgacttattgtttaatttgattctcttgtacctcttagagttttatattgcacagcctatacctgaagcatcatctgtcatcacacagacacagctagattaatagtataactcttccctttttccttttcctccctaa

SEQ ID NO: 34158 - DNA, 95 bp, Gossypium hirsutum
  Clone ID: LIB3149-032-Q1-K1-E6
ttttatattgtacatcctatacctgttgcatcaactgtcattacacacacacagctataattatattataactcttcccttatttcttttcctcc

SEQ ID NO: 34159 - DNA, 234 bp, Gossypium hirsutum
  Clone ID: LIB3149-032-Q1-K1-E8
atttatcgtgtgaaatggcttttctgttcctaagaatagcaagattaggaataaaatcctaggaaattcgccaaatagtgattgtgatttttgaaggtagctgtaggctccataatttcctgtaaaattctttagtttcggtctgtaataaataattactaggattcgaaatagcatattgtaataatttataggccctgtgtactgaatactcgccagataattctcctttcc

SEQ ID NO: 34160 - DNA, 411 bp, Gossypium hirsutum
  Clone ID: LIB3149-032-Q1-K1-E9
gtaggccctgatacctgttcagttgtctccaaacttttgaaagaagaggatactgaagcctggggtgtggaaccatatgatatagaggatgttgaagaaagttgcaagagtcttgtgggcaaagggattgtacgtgtggcagatatcaagtaccctcttccctataggccaaagtctttttctcttgttattgtgtcggatgcccttgattacttgtcttcaaaatacctgaacaagactctgcctgagttggccagggttgcctcggatggtctcattatttttgcaggtacccctggtcatcagaaggctaaagtggcagaactgtcgaaattcggccgtccagctaaaatgcggagttcctcttggtggattcgttttttcgaccaaagtagtttaaagaaaaacgaa

SEQ ID NO: 34161 - DNA, 412 bp, Gossypium hirsutum
  Clone ID: LIB3149-032-Q1-K1-F1
gcactaccaactgccttgctccattggctaaggtcatccatgacaaatttggcattgttgagggtcttatgaccactgtccattcgattactgctactcaaaagactgttgatggtccatcaatgaaggactggagaggtggtagagctgcttcgttcaatatcattcctagcagcactggagctgccaaggctgttggcaaagtgttgccatcattgaatggcaagctgactggaatggcattccgtgttcccacagttgatgtctctgtggttgacctcacggttaggcttgagaagaaggcttcttatgaagatatcaagggcgctatcaaggcggaatctgaaactaatttgaaaggaattcttggctacgtagatgaagacttggtatcgactgactttgttgggac

SEQ ID NO: 34162 - DNA, 237 bp, Gossypium hirsutum
  unsure (1)..(237): unsure at all n locations; Clone ID: LIB3149-032-Q1-K1-F10
ccggccggaaacgggcgaccagcgccgccganagcaagcgaggaaaaggaaaggagcgcaagcccngaagggggcggaaaagaaagggacggaaaaagcccgcaagaagaaaaaagggacgggcaagccgacacaaagcacgaacaaggcccggaaccacaaacacagaccaggggaagggagggcaacacaagaggacagaaacaaaaccgaagggcaggaaaaaaggggcaaagc

SEQ ID NO: 34163 - DNA, 304 bp, Gossypium hirsutum
  Clone ID: LIB3149-032-Q1-K1-F11
aaaaaaaaaaaaaaaaaataaaaaaaaaaaaataaaaaaagaaaaaaaaaaaaaaaaaaaaaaaaaaaaaaaaaaaaaaaataaaaaaaaaaaaaaaataataaaaaaaaaaaaaaaaaaaaataaaatggggggggtttttttaaggtgttcgcaatgtttataaacccctgggcgttgcgcaaattataattttttttttagggcatcctaatttcatttgctgggccgatttttaaaaaggccggaccgggaaaaattctggggtttcccaaattattagtgttgaaggaaatcccctttt

SEQ ID NO: 34164 - DNA, 361 bp, Gossypium hirsutum
  Clone ID: LIB3149-032-Q1-K1-F12
catcgacaagctatttgcacttcccgtgggttatgacttggtaggaatattggattcgatctttcaaatagccatcttgaggacttttaggagctacttaatgacatcctgttttagttgcatgaattcaaatcgtcatatttgagagttttttgcaggtgtggaggaattgtatggatgactacacaactccagtgtctatttggtatccaagagctcctgaaggattcatcagtctcggttgtgttgctgtaccaggttttgaggagccagaacccgatttagtacaatgtgtggccgaagtaatattggaagaaactacatttgaagagcaaaaaatatggtctgcaccagaatcata

SEQ ID NO: 34165 - DNA, 412 bp, Gossypium hirsutum
  Clone ID: LIB3149-032-Q1-K1-F2
ggtttatgggtgttgaaggggagaaattgttgaaacatgtgttttggtcgaacggaccggaaacggagcatccgacggtggagaataaacagtgtgccggtaaggaatttttggtgttgatttctaggttgtttgtggtggaacttttccgacgttatgatacgtttgagattgaagttgggacatcgacgtttggggctgccattaccataaagtcgttaaataaagcaagcttttaagtatactggaatattcgtcaatgcaggggctttgtcaaatgtgtcatgttttttcttcaataaataatgtattatcgaatgttgaatttccgtttatgcaccatattttatataactaagatatgtagccaattcttgtattatttgaataaaattggttaaattttactatt

SEQ ID NO: 34166 - DNA, 412 bp, Gossypium hirsutum
  Clone ID: LIB3149-032-Q1-K1-F3
ggcaggttacaggtacaactaggagtgaacatgcccgcacaagctaaccaaaagctttcccgggatgaagcagattcagctgaagttgaacttttcgaggtttatgatgtggttatctatatgggaattattgacattttacaggaatacaatgcaaagaaaaaggccgagcatgcatgcaaatcggtgaaatttgatcccttgtcaatatctgttgttgaacctgaactttatgctcaacgtttcatcaatttcttaaagcagaaagttttcccggaacaaccatgaaaaaaaaacagatatatctatctgtttctaccattgcttctatattttggctcactttgacaaaatcgataagccaataactatctgtacctactgtattgttgcaagtgatattgagatatct

SEQ ID NO: 34167 - DNA, 414 bp, Gossypium hirsutum
  Clone ID: LIB3149-032-Q1-K1-F4
gccgaataggaataattcatgggaacgtagctatgttcagcataatgcaggttgtgatggaaattcatggggtcggaaagcagggggtaatcatgatgttggatcaagaaagttggactacaaaagtagcagcagcgggggagcatggcattctggttcccggaagagggaaggttctcaccattatacacctggctacaaaagctccaggtttcaacaggatgataatcaagtaaatcattactggaggaacacaaaatctaacaagagggttagctttgtgcgcgagtagccgattttgctggctaattttttttttttttgtttgaagattctgcatccatcaagccatgaacatcttttacttcacttattgtctcataagtaggggatggtggtttctttttgtgcaat

SEQ ID NO: 34168 - DNA, 406 bp, Gossypium hirsutum
  Clone ID: LIB3149-032-Q1-K1-F6
caaatcttcgttaagacgcttaccggaaagacgatcactctcgaggtcgagagctctgacacgatcgacaacgtgaaagccaaaatccaagacaaggaaggcatcccgccagaccagcaacgtctcatcttcgccggaaagcaactcgaggacgggcggactttagccgattacaatatccagaaggaatcgactcttcatctggttctacgtcttcgaggtgggatgcagatcttcgtcaagactttgaccggtaagaccattactttagaagtggagagctcggatacgattgataacgtgaaagcgaagattcaggacaaagaaggaattccaccagatcagcaaagtttgatttttgctgggaaacagctggaagatggaagggacttggctgattacaata

SEQ ID NO: 34169 - DNA, 415 bp, Gossypium hirsutum
  Clone ID: LIB3149-032-Q1-K1-F8
gaggtctgcatcatgggaaaggcaatatctggggcaacaattttatctgagagtctggaatcctgttcggagtcttgctaacgaatacgacattccttctaatgtcttactctgcggtaaagcagttgggcgccacccttagccagccagtatggccctaatggctattatctgttaccagtcatcagagtttgactgctgataaaatagattgagagagaagaaattggattgaaatgtttcgcctttattcatttgtatatcttagaaagcaatagagtaaaattatctataccgtagttattactttattatctcttcaattcgttttctgcaaacagagttaaaattatgaggttttgtaaaattaatcattttcttaagtattaggtgtgcaattatatatatatatcaa

SEQ ID NO: 34170 - DNA, 406 bp, Gossypium hirsutum
  Clone ID: LIB3149-032-Q1-K1-F9
cccgtttatctattgcgttgagaatttggaattggagcgcaagccccttgaatgggaatcgtgctttaagaaattgggattggaatcaaagcccgttaatgattgttataagagtggactggggcaaaagcttgatctacaatatgcagctgaaacaagtgcccttgaaccacctcatacatatgtaccttgggttgttgtggatgggcaaccactttacgaggactatgaaaactatataagctatgtgtgcaaggcttataaaggtgctaatatgcccaaggcttgtagtggactgaccttcaatcaaatctacaataggaaaactatccatccagtttgctataaggagataccaccattaacattgtcatcaagaaccatatcaactgttatgtcatggata

SEQ ID NO: 34171 - DNA, 142 bp, Gossypium hirsutum
  Clone ID: LIB3149-032-Q1-K1-G1
gtagaactgcagaataaggcttgttttagtgtctttttactcttcattgcctggttgcatatggccatatttgtgtattagaatgttgcgattctatatgtgaacgattgtttataaaagaacaaaagtacatttcttattc

SEQ ID NO: 34172 - DNA, 287 bp, Gossypium hirsutum
  unsure (1)..(287): unsure at all n locations; Clone ID: LIB3149-032-Q1-K1-G12
gaagagatccctgatccaagcgtcattaaggaatttgcagtgaagaactttaaggagatcgatgactatcttcacggtaaggcttagagaggccaggccatgccatgccatgccatgcatgatcctagccctgtttaatggattctctcatgttttcttagtaataaaataacatgcaaggatcccacttcagaatatttgtctaggatccatccttaattagttcatcttgttgagtggtgacttcttgctgcaaagtaatcctgttgctttgtattttcaatntt

SEQ ID NO: 34173 - DNA, 420 bp, Gossypium hirsutum
  Clone ID: LIB3149-032-Q1-K1-G2
gtttttgaatttgaacttttttgcactctcagattcaggaaaaatgaagaaaccttttaactcaattgcaacttcgagccaaacccacttcgaggaaagtgaagaagaagaagagatcgaatcttcatccgaagaagagaaatccgatgacaccattgattctgatgaagaggaagagatagagcgtgaattagcagaagttacattcggagagctacaaaaagcacgagccgatggtactgattcaatctctcgcaaaccccaaacagagaccaagcgtcgtcgcgctaacaagaataggccaatggagcttagtagcaagaagccagtgaggtcatttagacaggttattcaagctcctaaaaaggtggtacgagacccccgttttgaatctttatgtggtaatctcgacgtcgggga

SEQ ID NO: 34174 - DNA, 404 bp, Gossypium hirsutum
  unsure (1)..(404): unsure at all n locations; Clone ID: LIB3149-032-Q1-K1-G3
gccaaagaagcaaggtctaaagctctaaatggacccattgggaagatcaaagctgaaaatgtgtctaggagcaagaaaccatctattgttagtaggtctgctattcagaaaagcaagttggagaaggaagaagagatgcgaaggaagatggaagagctacagatcgaacggcagaagagaattgccgagagaactgcagcttcgggatatgcttcacctgtatccaagaaatcacctgtatccaccaagagtgatcagaagaaaaatgtttccagtgctcaagcaagcaacaggatgaattctatcaaactcagagcaacttaagaaagaagccacagagaccctgcatcttatgaatggttaaagatatgaagatatgacacttattgtggacatatngatgc

SEQ ID NO: 34175 - DNA, 403 bp, Gossypium hirsutum
  Clone ID: LIB3149-032-Q1-K1-G4
gggccacactttgtctcttaatggaggtgtttgcattgacatgaccttaatgaagagagtgtaaggcgttgcatatttgggacatggatgttgtagttgagcctggaattggatggatggaacttaatgaatacttggcgccttatggtttattttttcctgatgatccagggcctggtgcaacaataggaggcatgtgcgcaacacgctgctctggatctttagccatgatgtatgtgctactctactactgtctttctttgcattccctcagtgccctcttagtctgttgaaaaattacatctgacatctatcttactgaggtttgtagaattttcattttagcaattatgtaccgaacaagttgtttcagatttgaaatgatggatgctttttgttctgg

SEQ ID NO: 34176 - DNA, 377 bp, Gossypium hirsutum
  Clone ID: LIB3149-032-Q1-K1-G7
ctaacctcaggaaacagaggattggctatatgaagacggtgaggatgaaataaagggtgtttatgttgccaagcttgaagagcttaagaagcaaggggatcctatagaagaacgttacaaagagtatatggagaggggaactgtcattgatcaacttgcttactgtattaacagttacagggaggcagcaatgtcaaatgatcccaaatttgatcacattgaacttgctgaaaagcaaaaggtcttgaatgagtgtgtagaagccgaggcctggttgagagagaaaaagcagcagcaggatctacttcccaaatatgccactccagttctcttgtcagctgatgtgagaaagaaggctgaagcactagataggtttt

SEQ ID NO: 34177 - DNA, 280 bp, Gossypium hirsutum
  Clone ID: LIB3149-032-Q1-K1-G8
ctttgggattgaattgattgtttctcttttgagtgaataatcttgcagatgcatttagcttacggagatttactatgtttttcattgctttaggaagcagattctatcccctagagagctgtattttgttttggttttggtttttttttggaaaggagctgtgatttgaaaaaaaaaaaaaaaaaaaaaaaaaaaaaaaaaaaaaaaaaaaaaaaaatttaaaaaaaaaaaaaaaaaaaaggaaaaaaaaaaaaaaaaaaaaaaaataaaactctttttt

SEQ ID NO: 34178 - DNA, 367 bp, Gossypium hirsutum
  Clone ID: LIB3149-032-Q1-K1-H11
gacgctgctcgggtggtcccgccgatgccgacgacgaacgggcggcggtgttgatcgaatgcagtcaaggggcgctcctcgggatggcttgcccggctaagcacaggcttaaaacgccatggtaacgagcgcgccgccactctgaaaacgacttttcgttctatcgatatgccgtgcggcgggggcaatcgtgtgcgcagccccgcagatcgatagcagaaatgcttggttggggcggtgtgcgacggtcgataagatgggctcgtctcctccatgatgtctctactgacatgggttggccccgccgcgcggatgcaagcggggctttttttcgtcctggtcaagaaacggggcgcgacacccggag

SEQ ID NO: 34179 - DNA, 170 bp, Gossypium hirsutum
  Clone ID: LIB3149-032-Q1-K1-H12
tatttgcaccttccccacacagggggttccatgggggcccggtgggctctttgagagaaaagggccttactttgggtgggccgatgggtgcctatcttttcgaggtcggcgcctttttattatttctttgagaaaacaatcagataattctgtggatcttttggaatttt

SEQ ID NO: 34180 - DNA, 424 bp, Gossypium hirsutum
  unsure (1)..(424): unsure at all n locations; Clone ID: LIB3149-032-Q1-K1-H2
accttttataactgtggctttgacatatttccaacttgctgctgaaaatcatgaatggtgggggaggtctttcctctgtggtggatcaactggtctctttatctatgcctactgcttgtattattactatgcacgatcagatatgtctggttttatgcaaacctcgttcttctttggttacatggcatgcatctgctacggattcttcctcttgctggggacagtgggtttccgtgcctcgctattctttgtgcgtcacatatacaggtctatcaagtgtgagtaggggttttagttgtcccttgccctttcccagcaattctgttagagaaaaaaatctatggtttttgttagaaaattaactggaagattgaatgtcaagtaacaaatgangcatgctttgactatgcttaatggatatcta

SEQ ID NO: 34181 - DNA, 269 bp, Gossypium hirsutum
  unsure (1)..(269): unsure at all n locations; Clone ID: LIB3149-032-Q1-K1-H3
gttcaattgataaacgatattcttaaatttcagtcancggaaaaaaaaaaaaaaaaaaaaaaaaaaaaaaaaaaaaaaaaaaaaaaaaaaaaaaaaaaaaaaaaaaaaaaaaaaaaaaaaaaaaaaaaaaaaaaaaaaaaaaaaaaacgggcggccaaatataaggatcttgttttgggtgggcgtttatgaaaggccaaggtttttatttagggacctctaaaataaaattatttgtcggttttttaaaactgttgggatttggaaaa

SEQ ID NO: 34182 - DNA, 393 bp, Gossypium hirsutum
  Clone ID: LIB3149-032-Q1-K1-H4
aggaggtgcatcgtgcaagtctcctacgccattggtgtacctgaaccattgtctgtatttgtggacacttacggtactggaaagatcccagacaaggaaattctcaagattgtgaaggagacctttgacttcagaccaggaatgattgccatcaatcttgatcttaagagagggggcaatagcaggttcttgaagactgctgcgtatggtcattttggtcgggatgaccaagatttcacttgggaggttgtcaagccactcaagtgggacaaggtccaggcttaattggagcttcatcacattggttctatgtctgatttatttgatctgctgtctgctaccatatgaggctgcttttcttacaaatttccttaattttcttttttgggtttg

SEQ ID NO: 34183 - DNA, 204 bp, Gossypium hirsutum
  Clone ID: LIB3149-032-Q1-K1-H5
aatcagcaagtgtcagttctacatggatatgttgtcagagtgcaggaagaactctggatcaatgttgggtgcctaaatttatgcctcatttgttgcttctacaatgcaatgtctttgcccttcacttctgtttctcttttattgatgatgatgatgaagctgaactcccttcaatgattcaataatatttatctttactggctg

SEQ ID NO: 34184 - DNA, 374 bp, Gossypium hirsutum
  Clone ID: LIB3149-032-Q1-K1-H6
ctctgatggtctcattattttctcaggtacccctggtcatcagaaggctaaagtggcagaactatcgaaattcggccgtccagctaaaatgcggagttcctcttggtggattcgttttttcgaccaaagtagtttaaaagaaaacgaaactgcggtgaagaagtttgagcaggctacatcaaagagttcatacctgccagcatgtcaagtattccacctaaatccataccactgatacaaagagaaaagtcatcaagatcaaatttccattatttttattgtcatatgcattgacggtgaagtaaaaatatcttcagctctcatacaacatgtaactctgttggggaactaaatttggtaaaagagatgttggt

SEQ ID NO: 34185 - DNA, 426 bp, Gossypium hirsutum
  unsure (1)..(426): unsure at all n locations; Clone ID: LIB3149-032-Q1-K1-H7
aatagttccagcaacaactggacagatgggtattttgcctggacatgtccctacaattgctgaactgaaacctgggatcttgtcggtgcatgaaggaaatgatgtcacaaaatatttccttagcagtggttttgctcttatccatgccaactctgttgcggatattattgctgtggaagcagtgccagtcgaccgccttgacccagccttggtccagaagggtctggctgactttactcaaaagcttgtctcggctacaactgatctggagaaagctgaagcccaaataggtgttgacgttcacagtgctatgaattcagctatcacaggttaatcattttcttaaccagctttggttcaatcctaagactttttttctcatattgcttcccttttttgtatgtgttcatgatcaacanatgactg

SEQ ID NO: 34186 - DNA, 250 bp, Gossypium hirsutum
  Clone ID: LIB3149-032-Q1-K1-H8
aaactaatagattaatcatacataacggattatttacaactatcaaaagagacaaaaacttgggaggacatacatatctaataaagaaaaaaaaaaagggcaagacggtctaaaggataaaatctttaagggcgggcgcattcaaaggcctaactcttctttaggggcacctaaatgtaattcactgtccttacgttgtacaaaatcgaaacttggctggaccctgtttttaacctacttaatgggcaaa

SEQ ID NO: 34187 - DNA, 382 bp, Gossypium hirsutum
  Clone ID: LIB3149-033-Q1-K1-A1
tgatttttctctcggctcttaaatatcatgtttcacctgataggtggacatatgtttatcgtcgcctctggcttttttcaagtgttgtcaactcactctactcattttattgggacataacacgtgattgggaccttagtgtcttcaccagaatcttcaagttcaacaaaccaagtttgtgcaccaatctgttctatgggcgaagatgggtttatttttgggttatcggaagcaacttgattttgcgttgcacatggacatataaactgtctgctcatctccgccacaactacttgactgtgtttatggtcactgccttagagatgctaagaaggttccaatggatattcttccgagttgaaaatgaatggaacaaaattac

SEQ ID NO: 34188 - DNA, 322 bp, Gossypium hirsutum
  Clone ID: LIB3149-033-Q1-K1-A10
gttcttgcgtgagcctatcaactttttttctctttgaaggatattataaccgacaagggagcattttagtttccttgtgcaccaattgcgttattccgagaactgcaaagaataattaatggtctttttgttttgcctctgttttcttctactcttgacattatatgatggaatgcatccattcacaataaaataaactttctcggcatttattattttttatctgggaaaattactaaaataccgattgtatggccttttgtgtatggttgctttgaccttatatgatggaatgcatccattcacactttaacactaaatt

SEQ ID NO: 34189 - DNA, 163 bp, Gossypium hirsutum
  Clone ID: LIB3149-033-Q1-K1-A11
accccgtggctcaagaaccctaggggaggcttattatattacgtcaaggtgattggaattagggttggaagatggattgtggatatcctaccaagggccattgctttaaatcctttcactgttgctggccccattattgattctggtcctggtttcacccggc

SEQ ID NO: 34190 - DNA, 417 bp, Gossypium hirsutum
  Clone ID: LIB3149-033-Q1-K1-A12
gcctaaaagagagccgggaaaggaagctagaagagcaaagcgaaaatgaagactatactttcctccgagacaatggacatccccgacggggttagcattaaggtcaaggctaaggtgatcgaggttgaaggtccaaggggtaagcttacccgcaacttcaagcacgtcaaccttgatttccatctcatcaaggacgaagagaccggcaagcgtaagctcaggatcgaggcttggtttggctccaggaagaccagcgccgccatccgtacagctcttagccacgttgagaacctcatcaccggtgtcactaaaggataccgttacaagatgaggttcgtctacgctcactttccgattaatgcctccatcactaatggcaacaagtcgatcgagatccgtaacttccttggcgagaag

SEQ ID NO: 34191 - DNA, 312 bp, Gossypium hirsutum
  Clone ID: LIB3149-033-Q1-K1-A2
gacgcgtgcgagattttatatataaaatattatatatcatgtttttcctgatcggtggacatatgtttatgggggggctctgtcttttttcaagtgttgtcaactcactctactcattttattgggacataacacgtgattgggaccttagtgtcttcaccagaatcttcaagttcaacaaaccaagtttgtgcaccaatctgttctattggcgaagatgggtttatttttgggttatcggaatcaacttgaatttgcgttgcacatggacatataaacttgcttgctcattttcatcacaactactttgac

SEQ ID NO: 34192 - DNA, 180 bp, Gossypium hirsutum
  Clone ID: LIB3149-033-Q1-K1-A3
gttgaatttgatctgatgatgtttcgtacctaatttgcttgcattgaacctaatatattatctttttgttggcttattaattttgcattaaatcttgtattcggaggaaaaaaaaaaaaaaaaaaaaaaaaaaaaaaaaaaaaaaaaaaaaaaaaaaaaaaaaaaaaaaaaaaaaaaata

SEQ ID NO: 34193 - DNA, 252 bp, Gossypium hirsutum
  Clone ID: LIB3149-033-Q1-K1-A5
aaaaaaaaaaaaaaaaaattattaaaaaattttttttaaaaaaaaaaaaaaaaaaaaaaaaaagggggttaaaaaaaaaaaaaaaaatatataatatttattaacaataataaaattataattttgtttttttttttataatattttttttttcttctctttttattttttaacaatcttaaaaggggtgctccctttttataattctaaattttttttctctcttttttattatatcttttattttttttt

SEQ ID NO: 34194 - DNA, 429 bp, Gossypium hirsutum
  Clone ID: LIB3149-033-Q1-K1-A6
cccaatttctctcttctgctctaggttccttcctgttctcttaggattcttgtggtctgttcaaagcgtcatggcatcgaagcggattttgaaggaactcaaggatttgcaaaaggatccacccacttcttgcagtgcaggtcctgtagctgaagacatgtttcattggcaagcaacactcatgggcccttccgatagcccttatgcgggaggtgtatttttagttagtattcattttcctccagattatcctttcaagccccctaaggttgcatttaggaccaaggttttccatccaaacatcaatagcaatgggagcatttgtcttgatatcctaaaagaacagtggagtccagccctaaccatttccaaggttctgctctcgatctgctcgttgttgactgatccaaaccctgatgacccacttgt

SEQ ID NO: 34195 - DNA, 409 bp, Gossypium hirsutum
  Clone ID: LIB3149-033-Q1-K1-A7
ggcattgatgccagtggtaactatgtcggcacttcgcctgttcagcttgaaaggcttaatgtttactataatgaagccagtggtggcagatatgtgcctagagctgtgttaatggatcttgagccaggaactatggacagtttacgaacaggtccttatggaaaattgtttagaccagataactttgtgttcgggcaaaatggagctggcaataactgggctaagggacattatactgaaggagctgaattgattgattcagttcttgatgttgttcgtaaagaggctgagaattgtgattgtttacaaggttttcaggtttgccattcactgggaggtggaacagggtcagggatggggacattgttgatatcaaagatcaaggaagaataccctgaccggatgatgc

SEQ ID NO: 34196 - DNA, 300 bp, Gossypium hirsutum
  Clone ID: LIB3149-033-Q1-K1-A8
aaaaaaaaaaaaaaaaaaaaaaaaaattttttataaaaaaaaaaaaataaaaaaaaaaaaggggtatatataataaaagataacagcttattaaaacataaataaaacatttatttttatattatatttattttttttttttatttgtttgcaaattttttttttatgtgtaatgattgggattcccttttttttttcttagcttaacatctttcttttctttttttgttttttttagcttttagtcttagtggagtatgccctttttgattattttttttaaaacttttttgcaatttt

SEQ ID NO: 34197 - DNA, 421 bp, Gossypium hirsutum
  Clone ID: LIB3149-033-Q1-K1-A9
gccatcaccgccgccgtcgcttccattcccgcctacccttcagtgtcgacagactgcaccgtttccgccgaggatgataacccggttcccgttcgtcgtgaagtttacggcgacgggagaatcttcgacgttagccatagatacaccgtggatatgccttcgtgggggagcaaagatggtctgggtcagttcctttggcttccgtcaagcatgaagaacggttcaaggtccaataattccttgatgaagctgcagtcggtccattccggcacccacgtcgacgctccgggacatatggtcgacagctacttcgacgctgggttcgatgtcgacacccttgaccttgatgtccttaacgggccagctttattagtggatgtgccgagggatagtaatataacccgctaagtgatggaatcat

SEQ ID NO: 34198 - DNA, 429 bp, Gossypium hirsutum
  Clone ID: LIB3149-033-Q1-K1-B1
ccctttcactggccctgtttcagtcaggggccgcatcttagctggtacttgccatagtgccaagatgatgaggacaatcattgttcgacggaactatcttcattatatcaagaaataccaaaggtacgagaagaggcattcaaacattcctgctcacatttctccatgcttccgtgtgaaggaaggggatcatgtcattattggtcaatgcaggccattgtcaaagactgtgaggttcaatgttttgaaagtgattcctgctgggtcttccggtggtgggaaaaaagctttcactggaatgtaagggcgtgagtgttatttaaaaaaatatatatatgttttggggttttagaaacctatgaagaagacactaagattttgatgaactgactacacatggaattttcaatatatttccaattattatta

SEQ ID NO: 34199 - DNA, 426 bp, Gossypium hirsutum
  Clone ID: LIB3149-033-Q1-K1-B11
gaagagactatattcaaaaaggaaaaaaagaagaggaaaatggaggcaccaaagacgattcagcacgaaattggaggagtccagaacgacgccctgcgattcggtctccacggcgttaagagcgacctcgtcggatctcaccctctccaatctgcttacgaatcagcaaagaaaacgcaggaagagatgaagagaaaagttctggccaatacttatgggacagcaatgccactcaaaatggatctcgataggcaaattctctggcggtttcagaggccattgctaccatcttcgatgctagggttggaagcggtgacaggaactttagatgattttggctttgaggattatctgaatgatcctcgagattcggagactgttcggccattggacttgcaccacagcatggaagttcgtctcggcctc

SEQ ID NO: 34200 - DNA, 426 bp, Gossypium hirsutum
  Clone ID: LIB3149-033-Q1-K1-B12
aatcatgtctactacagcacttgattctgttggccagcccagtgaatgtttgctgctgaagaatatgtttgatcctgcaactgagacggaaccagattttgatttggatattaaagaggatgtcgaagaagaatgcagcaaatatggcagggtgaagcatatatatgtagacaagaacagcgctggatgcgtctatctgcgatttgactccgcagaagcagcaggtaaagctcaacgtgcaatgcacatgaggtggtttgcaggccgatcaatatcagccttatttatgcaaccccaggagtacgaagcgaggtttaaatgctgaagcagatattggatttgtttgttatgatatgatgtgtgttgatgggtgggtaggtgttacttttgaagacgctttttattgtgctgagtttagaattttat

SEQ ID NO: 34201 - DNA, 428 bp, Gossypium hirsutum
  Clone ID: LIB3149-033-Q1-K1-B2
gtttttaatccgtattaccctactttaataagcatttaatcatgtgttatttaggaataattgatccctatcattcgacaactcagatctgggtaacgggtgctggtttgaacatctcgaatcaatagtgaagttgggtttcgttcgcattctcgtttcgcatcaaatcagtgtacgtttaaggtgttatatcggaaacataaactcttacggtttagtgttgtgaaggcgaaataaggtgtgggttctaacttattagaataagtgttaaatttatatttttaatgattaaattgatatttaagcttgttggtcggcttatttaaaattttaaataagtgatttaaatgtggccgaatcaggtacaattcgagcctaattaaatagcatgaatacaaaactactatggttgactaaataattgtatg

SEQ ID NO: 34202 - DNA, 415 bp, Gossypium hirsutum
  Clone ID: LIB3149-033-Q1-K1-B3
cccacgcgtccgcaaactcagggcagaaaaacatggtgacagcccaaggcaggaccgatcctaaccaaaacacaggcattgtgatccagaaatgtaggataggtgccacctctgatttacagcctgttcgtaaaaacttcccaacatatcttgggaggccctggaaggaatactcgaggactgtggtaatgcaatcaacaatcagtgacgtgattcaacctgctggctggcacgagtggagcgggagtttcgccctgaaaacactgttttatgccgagtaccagaacactggggccggtgcctcaacttctgcgagagtgaaatggggagggtacaaggtgatcactagtgcaagtgaagctcaggcttttactcctggcaggttcattgctggaggaagttggttaagctctac

SEQ ID NO: 34203 - DNA, 299 bp, Gossypium hirsutum
  Clone ID: LIB3149-033-Q1-K1-B4
gcgcttccttaccatcaatagccaaccagttgtctatggggagcgctctgattctccatgtgggggttggggaggcccaagagggtacctttaccaaaaggcttacctcgagtatttctgctcactggataaaatatatgtactagtgaaaaagtgcaattccttttcatcattgacctatgttgctgtcaacaaaaaggagaatttgttatcaaacattggcctcacagatgagaatgcagtaacttgtggagtcttccctgctaaagaaataatacaacctactgtgtgggatcctg

SEQ ID NO: 34204 - DNA, 427 bp, Gossypium hirsutum
  Clone ID: LIB3149-033-Q1-K1-B5
gtcttttgccattttccatttatttatttattttcgtttcagtactgttattaagatctgattagtttttggtattgggttttcaaaaataaacgaaacccttggaggaatcagatttttttgttggtttatctggagatctatttgtttctgtaattgggttttctttaaattgggttttctaggattgaagaaaacccatgaaggaatcagagttaagcactgaaccaatcggacaaaatctgataaaactgataagcaatctatgcttctcagtttttgtgttttcagtgttgatatttacagttattgctatcacttaccaacccccagatccatggcttgaatcagctccggccttaaccaagctcttcactcaaactgagaatgccactttcaaaaacgacgattctatccttaaaactgg

SEQ ID NO: 34205 - DNA, 148 bp, Gossypium hirsutum
  Clone ID: LIB3149-033-Q1-K1-B6
cacaaatatgacatatcctaatatatagtagtggaggattatgggacaaaaaataaatccacttggtttcagacttggtacaacccaaagtcatcattctctttggtttgcacaaccgaaaaagtattccgagggtctacaagaagat

SEQ ID NO: 34206 - DNA, 425 bp, Gossypium hirsutum
  Clone ID: LIB3149-033-Q1-K1-B7
attttctcggtacttgtattcaccgtaatctcccccgccaacggctgccctccgtcggaccgcgctgcgctgctagcattcaaagcagctctccacgagccttacttgggcatcttcaactcatggacgggcaccgactgctgccacaactggtacggcgttagctgcgacccacagtcacatcgagtcgccgacattaatctccgtggtgagtccgaagatcccatctttgagcgagctcaccggaccggttttatgactggttttatctctcccgaaatatgcaagctaactcgcctctctagtcttactatcgctgattggaaagggattacaggcgagattcctaaatgcattaccagtctaccatttcttcgcatccttgatttgatcggtaacaagctttccggagaaaatcctgctga

SEQ ID NO: 34207 - DNA, 271 bp, Gossypium hirsutum
  Clone ID: LIB3149-033-Q1-K1-B8
aaaaaaaaaaaaaaaaaataaaaaaattattataaaaaaaaaaaaaaaaaaaaaaaaaggagaggataataaaaaatggggggacgctaaataaaatctaaagttttagttcgttttaatttaaaattttttgggttttttttttgtaactttaatatttaatatcttgttgtggctttaaaaatttttttttttttttaaatctcttgtttttcccttttttattttatttgactattgtcccctttgatgaccttttgtttaatttttt

SEQ ID NO: 34208 - DNA, 430 bp, Gossypium hirsutum
  Clone ID: LIB3149-033-Q1-K1-C1
cctcgccccaaaatgaagatttgcatgcttggagatgctcaacacgttgaagaggcagagaagataggtttggattatatggatgtggaagcattgaagaaactaaacaagaataagaagttagttaagaagcttgccaagaagtatcatgcctttctggcttctgaatctgtcatcaagcaaatccctcgtcttttgggtcctggtctcaacaaagcaggtaaattcccaacccttgtcactcaccaggaatccctagagtcgaaggtgaatgaaacaaaggcaatggttaagttccagctgaaaaaggttctatgcatgggagttgctgttgggaatgttgcaatggaggagaagcagatcttccaaaatgtgcaaatgagcgtcaatttccttgtttctttgttgaagaaaaattggcaaaatgtga

SEQ ID NO: 34209 - DNA, 426 bp, Gossypium hirsutum
  Clone ID: LIB3149-033-Q1-K1-C11
ccaattcgctgctgcttttagtttccctagaaaatttgcagtttgtttgagttcatcttcaggctccaatggtgtcgtcatctttggcgatgggccttacaatctccttcccgatatcgacgtctcaaagtctctcatgtacaccccactcattctcaatcccgtcagcacctcaagtgcttcctttcaaggtgatccatctgcagactacttcattggagtcaatggcatcaccattaatactaaaccagtgtcattcaacaaaactttgctttccatcaacaaagaaggccaaggcggaaccaagatcagcactgtcactccctacactgtgatgcaaacatcaatcttcagagcagtagttaatgcttttatcaagcaaacttccaaggttgccagggttccagcagtggctcctttcagtgc

SEQ ID NO: 34210 - DNA, 387 bp, Gossypium hirsutum
  Clone ID: LIB3149-033-Q1-K1-C2
accgacgcgtccgccttgccccaaaatgaatattttcatgctctgttattctcaccacgttgaagaggcagaggagaggtgttttgataatatggatgcgcaatcatagaacaaactaaacaataataagaagttagttaagaagcttgccaagaagtatcatgcctttctggcttctgaatctgtcatcaagcaaattcctctgtctttgggtcctggtctcaacaaatcaggtaaattcccaacccttgtcactcaccaggaatccctatagtcgaaggtgaatgaaacaaaggcaatggttattttccagctgaaaaaggctctatgcatgtgagatgctgtttgtaatgtatcaatgcatgagaagcctatctttcaaaaatg

SEQ ID NO: 34211 - DNA, 424 bp, Gossypium hirsutum
  Clone ID: LIB3149-033-Q1-K1-C3
aaagttgggacttgtttaatccaaacctttttttttgtccgccccctgtacaatttcagcaggtttcttctcgaaagatgggctctacatcatcatatcaaccattctgaactaggacttactggagatgtggaggctcttttctcagccttaccatctgattattgttcaagatggtgatccttccaagaccatcaaggttccggagggcttctactatgagctttacaatatgaacgatatcaacaggattttgggtcctaagtcttcttgtatctctttcaaggatttctgcttgtcgctgctttggttacatggtttccaagaatatgtacatttataccattgatgatgattgcttttgtgctaaagatccggtcggcaaatacattaacgcacttgtacagcacataaagaacctttt

SEQ ID NO: 34212 - DNA, 57 bp, Gossypium hirsutum
  unsure (1)..(57): unsure at all n locations; Clone ID: LIB3149-033-Q1-K1-C4
nntgcgacgtcatatgcttcttctattagtgtcanncctaaattcaatgtcacgtgg

SEQ ID NO: 34213 - DNA, 359 bp, Gossypium hirsutum
  Clone ID: LIB3149-033-Q1-K1-C5
gagaggtttatggctgttgaaggggagaaattgttgaaacatgtgttttggtcgaacggaccggaaacggagcatccgacggcggagaataaacactgtgccgctaaggaatttgtggtgttgctttctaggttggttgtggaggaacttttccgacgttacgatacgtttgagattgaatttgccacatcgacgttgggggccgccattaccataaagtcgttaaataaaacaagcttttaagtacactcgcatttatcgcaatgcaagggctttgtcaaatgtgtcatgttgtttcttgaatcaataatgtattataatttcgaaaaagaatcacagtaaaaggattaattattaac

SEQ ID NO: 34214 - DNA, 427 bp, Gossypium hirsutum
  Clone ID: LIB3149-033-Q1-K1-C6
gccgagatcaatcccttctcgttcctcagccgaacgccgttcgatcaccggctcctgagatcgaacagtttagattctttttcataacgactcgagccatagccgagtcgaggaggttaattgagtgtggtaacgacttgacaagtgcacaccatctgttggcttcggctagagcattgttaatgcagtcgaattcgttgacggtggcggagtacgtgcgagggttagaagccgagctgacggaattgcagcggatgaaacaacagatggtggaaatccaacggcggcgagtgaacgagagggaacgagaaagggaggcgattatggtggtgatggatgagaatggggagccactaacaccgtcatcggcttggagaacggctgagaagttggctaaagtggccatggtgaagaataaagtcagtga

SEQ ID NO: 34215 - DNA, 333 bp, Gossypium hirsutum
  Clone ID: LIB3149-033-Q1-K1-C7
gttatttattactttctggcctttccctttttgacagcatgaaactggatccttatttgtattatatatatatatgtgcgtgtatgcaaataagatgtgtattttccctttcaagttttgggtgggaaaaaaaatgatattttcaacttatataaaaaaaagaaaattcttagaaacgaaaaagacaatcacaatttacgaacagctgcaagattaacttgctatgaaatatggattgagttcaatcagaaaggatagttgaagcataattttcgaagcaacgcaaacgggggggagcggggaataagggaccccaagtggattatcgagatt

SEQ ID NO: 34216 - DNA, 388 bp, Gossypium hirsutum
  Clone ID: LIB3149-033-Q1-K1-C8
aaatgaaagtgtggagatagcggtattcttgtcataaagtcaccacttcatgcattggggggaagctttgataaaagatgctaaactagtagtttcaactgaaagcatcaaatatggtctgaacattttgcaaggcattcaaagcgaaagcaaaagcttgaagaaatcacttaaggatgtggtcactgagaatgaattcgaaaagaaacttcttgcggatgttattcccccaagtgatattggggttagctttgatgatattggagcccttgagaatgtcaaatacaccttaaaggaattggtgatgcttccccttcaaaggcctgaattgttttgcaagggacagttgacaaagtcttgcaaaggaatattgatatttgggccttct

SEQ ID NO: 34217 - DNA, 305 bp, Gossypium hirsutum
  Clone ID: LIB3149-033-Q1-K1-D1
gaaaaagttccatctcacattcaagaagagaatgcaacaaagctggcaaaacttctccaagaatttgagtttttcaagaaagaaagcgatcgtttagaatctgaatcgcagcatcaaaagtaaggttaacccctcccttttgagtttctcgattcgaatgataatttgaatggcattacactatctcttcttttttatgattgttttggtactgtctaaacctcaccaatacttttgtttatttttaacatttgatgcttgccatgtttggcatacaagaagttacccagctagttaatcgtatg

SEQ ID NO: 34218 - DNA, 410 bp, Gossypium hirsutum
  Clone ID: LIB3149-033-Q1-K1-D10
ggggattctggtaaaggaggggaccctactctatgggcagatcttctgaagtattttggtgaacttggggaagattgctctaaagaagtgaaagaagtattgacatatattgagagggatgacatcttgcctcccattattgttctccagacactttccaggaacccatgtctcacattatctgttattaaggattacattgcccgaaaacttgaacaagagtcaaagctgattgaagaggacagacgagctatagagaagtatcaggaagacacaatggcaatgagaaaagaaattcaggaccttaagacaaacgccaggatatttcagctgagcaagtgcactgcttgcacttttacccttgacctacctgctgtgcacttcatgtgtatgcactcatttcatcagcg

SEQ ID NO: 34219 - DNA, 255 bp, Gossypium hirsutum
  Clone ID: LIB3149-033-Q1-K1-D11
attccatcttaggatggaatttgcgctttcagctcctcagttttcctgcgttgtttcatctgcaatcaaatgccaatgccctgtttctctttgaacagaatacaagcaataaacaacagcatgttcatgtaatgtcatgtcagttaaaagagaaacagggcattggcattacatgaacatgctgttgtttattgcttgtattctgttcaattccaatttctcgaataatgacaatgaattttatatatcactaag

SEQ ID NO: 34220 - DNA, 423 bp, Gossypium hirsutum
  Clone ID: LIB3149-033-Q1-K1-D12
cttttaacccaaaaaagaaaagaacgctcaaaggatttgcaacaatgggtctctcaaaggcttctctaatccttgttctcgtcgctgtttgtgctcttatgggttcagccgtagctgctgaagccccagcaccgagtcccacctcaggaaccgcctccatctccccctcattcgtctctgttttctttgccgctgtcacggctctgcttttcggctctactctcaggatctgaagggtgttggctattgatggtgtagagagggtgtttgatttctcatttatatagatttaatttttgggaggggtgaattttatatggagttttagtatatctaggagtccctatatatataaatatgcgagagtcgagagaggtagttttgttatctaccgcacagattattcatggtggatgatgtttg

SEQ ID NO: 34221 - DNA, 404 bp, Gossypium hirsutum
  Clone ID: LIB3149-033-Q1-K1-D3
ggaaaaactattggaagctttcttcctaaagattctcctctccgtcaggatcctgcctactatgttcttaaggaagatacttccccctgcatttttggttcaattgagaagcagaggtggtcctatgcatgtgctaagcagttgattgagaggcttatttatgctgaaggggcagagaatggcctcgagttcactattgtgaggccttttaactggattggacccaggatggatttcattcctggcattgatggtcctagtgagggagttcccagagttcttgcatgctttagtaataatctcctacgtcgtgaaccacttaagcttgtggatggtggcgaatctcagagaacttttatatacataaaggatgctattgaagctgttctcttgatgattgaaaa

SEQ ID NO: 34222 - DNA, 421 bp, Gossypium hirsutum
  Clone ID: LIB3149-033-Q1-K1-D4
cccgacgattacgcaccgggaccgggggatgtcgcgttgaaagaggtcaccgtggtcaaagattttgacttggccggaaattcttccctcggaatcgccgtcgacaggctcagaaaccggctgcttgtggttgtcgccgacttgctcggcaaccgatacagcggtctcgcggcttatgatttgtcatcgtggaagcggctatttctaacccggctcagtggccctagcgatgaaaaatccttcgccgatgacgtcgcaatagatgccgatggtaatgcgtatgtcaccgatgctaaagccagcaaaatctggaaagtcggtgcccatggcgagttattgtctatcataagaaacccactcttcactccaagacagtggtacaaaaccttggtcgcattgaacggaatcgtttaccaccccg

SEQ ID NO: 34223 - DNA, 409 bp, Gossypium hirsutum
  Clone ID: LIB3149-033-Q1-K1-D5
gcgtccgcccgacgattacgcaccgggaccgggggatttttcgttgaaagaggtcaccgtggtcaaggaggtttacttggccggaaattcttccctcggaatcgccgtcgacaggctcataaaccggctgcttgtggttgtcgccgacttgctcggcaaccgatacagcggtctcgcggcttatgatttgtcatcgtggaagcggctatttctaacccggctcagtggccctagcgatgaaaaatccttcgccgatgacgtcgcaatagatgccgatggtaatgcgtatgtcaccgatgctaaagccagcaaaatctggaaagtctgtgcccatggcgagttattgtctatcataagaaacccactcttcactccaagacagtggtacaaaaccttggtcgcattgaac

SEQ ID NO: 34224 - DNA, 423 bp, Gossypium hirsutum
  unsure (1)..(423): unsure at all n locations; Clone ID: LIB3149-033-Q1-K1-D6
gccattataccagaggccattcatgaagggtaaattgtacattcagttcactgttgaattccctgattcccttagccctgatcaggttaaggcacttgaggccatcctgcctccaaaaccaacctctcagttgagtgatatggagctagatgagtgtgaggagaccacgctctatgatgtgaacattgaagaggagatgaggaggaagcagcagcaggcagcgcaggaagcttatgaggaagatgaagatatgcatggcggtgcccagagggtgcagtgtgcccagcaatgatgatgaagcaaaaaagaagatatatggtttcaaaagtattctcgaggatacagaaagctggtttctctagtaatgtagagtggcaaagcatgtcttgctcangtggtggatgagcggtgttattattgtta

SEQ ID NO: 34225 - DNA, 306 bp, Gossypium hirsutum
  Clone ID: LIB3149-033-Q1-K1-D7
ccgagggaaaaaaggaaggggaaaagggaggtggttgctaaaatgcaccgggggcaattcctatcatgcacactgtagtggaggtaagtctaggttacgctgaaaaaatgatgaaaccttttgtattaattattagtcgtaatgaaaaatctttttggtttttctatttaggcagtttttctttcattggtgggatttgacggtggtaaaaaatttgaccactggagaaaaagaaaaaggataattgtatatttggctctaacctctaatttctatacttcatttacagggtttttttttattatt

SEQ ID NO: 34226 - DNA, 382 bp, Gossypium hirsutum
  Clone ID: LIB3149-033-Q1-K1-E1
ggtccaaaacatattatattcatgccggatataaaatattccagtaaaaatcaacataaaatagaatttaattttgatccttaattaaggaatgtatactcaatctagaacaaccttttttttttacgtttgtaactgggatttactgattactcttccacatttcattatcaaaacaatctcatggttcatgaaacatttgttaagccaccttgaaagtgtctacatcttccagtctctgtgagattgcctgctgcagacacttgaaagctttgtgataattcaagaaccccatgaaccagatatcaaaaccatccactgtcacaatttccatgtacttttgccatggtttcttcatgttttcactctggttcaccccctt

SEQ ID NO: 34227 - DNA, 424 bp, Gossypium hirsutum
  Clone ID: LIB3149-033-Q1-K1-E11
ggaacaacatgcaatacgtgacgacggctgcattccttctcaccatctactcagaattcctccaagatttgaaccaaaacctccgttgtcctgccggaacagtggatcatgaagagatcctcagttttgccaaatctcaagttgattacatactaggttcaaatcccatgaacatgagttatttagtgggttatggatcaaaataccccaccaaggtgcaccatagaggggcctcaatcgtgtcatacagggagaataaagggttcattgggtgcactcaaggttatgaccattggtataatcgagccgaagtgaatcctaatgtgttggttggggcggtggtcgggggacccgattccgaagataatttttgggaccaaagagataattacatgcaaaccgaggcttgcacgtataatacagc

SEQ ID NO: 34228 - DNA, 270 bp, Gossypium hirsutum
  Clone ID: LIB3149-033-Q1-K1-E12
cccagccgcctgcctgcggcgtgctacctcatatatagtgtatcctgaaaccaatatacaggccactggccgacaacgtacagactgggaaaaccgagaaccctcccaactcactactcaatcagcacataccacattcgccagttggcagctgacctaataggcacgaagcgatcacccatcgcaacagctaaccagtctgcatggtgaatgggaaacgccacgcaccctgtcattaagcactaagcgcgtggggtgtactcgcaacgc

SEQ ID NO: 34229 - DNA, 416 bp, Gossypium hirsutum
  Clone ID: LIB3149-033-Q1-K1-E3
ccacaacattgggaacctgtctgccaacaaatatagcggcaacaaccatagcaacaaagatattaataataacagcaacaccaactccaacaacaacgagaacagcaatgcaaacaatgctgtcgataaaaggttcaagactttgcctgccaccgagacactccctagaaatgaggtgcttggtggatacatctttgtttgcaataatgacacaatgcaagaagatcttaagcgtcagctatttggtttaccgccaagatacagggactctgttcgggcaatcacacctggcctgccattgtttctctataactacaccactcatcaattgcatggtatttttgaggcagcaagttttgggggttctaacattgatccaactgcttgggaagacaaaaagtgtaaaggcgagtcga

SEQ ID NO: 34230 - DNA, 429 bp, Gossypium hirsutum
  Clone ID: LIB3149-033-Q1-K1-E4
gagactaataagcaaataggagccttaattatggaaccaattatccatgtgcattcctccagcaccttggataattggttccataattaaggtgctggaggaatgcacatggttgatccacttttccagcggatgcttgtcaatgagtgtcggcactgtagaattccagtaatctttgatgaggtttttactggtttctggcgtttaggagtagagtctgcagcagaactgcttggttgtgtaccagatatagcttgctttgcaaagctaatgactggagggatcatcccattagctgccacaatggcaaccgatgctatatttgattcattcaccggagattcaaagcttaaagctcttttgcacggacattcatattctgcacatgcaatggggtgcacagcagctgccaaatctattaaatggttc

SEQ ID NO: 34231 - DNA, 282 bp, Gossypium hirsutum
  Clone ID: LIB3149-033-Q1-K1-E5
gaaacaagatgccagacgttactacagcctgatatgcgatcaccacctgcgcagaacgcgtggatgatgaacaataaactctgacttatggtgccataacacgggaacatgaaacggacttgaaggaggccgaagatgataacaaacacgttcgatcaaacaggagctataagaacatgaattagactaatgtgatgatgtgatctagacaaaatcaacacagtgtgcacaagtgatgactcctaagagacgtcatacaatgagagaaaaggggggattgaa

SEQ ID NO: 34232 - DNA, 381 bp, Gossypium hirsutum
  Clone ID: LIB3149-033-Q1-K1-E6
ggctgttcgggctaggggtttatgaatttgggttgaaattgtatttgggctggtataagctctttatctgggcctaaaaatttgtaaaaggacattggtatgtagattttttttatttgtgtgttttttttttattttttatttatttttgatttttaatttctattttttaatgggcccaggtgaatgggcctattaaaaaatagaaattaaaaaaaaaaaaaaaaaaaaaaaaaaaaaaaaaaaaaaaaaaaaaaaaaaaaaaataaaaaaaaaaaataaaaaaaaaaaaaaaaataaaaaaaaaaaaaaaaaaaaaggggggccctttttaaaggatcaaatttatattccccgtgtttgcaaagattaatttttttt

SEQ ID NO: 34233 - DNA, 158 bp, Gossypium hirsutum
  Clone ID: LIB3149-033-Q1-K1-E7
atcatttgctatgcaattccaataaaatatcacacgatattatgttcttccattcttgtagataaatccgatcgaattttgaattattgatttttccaaattataactcaccctacgtcattgtattaaatgtaaaataatactgctgatcttcatgt

SEQ ID NO: 34234 - DNA, 81 bp, Gossypium hirsutum
  Clone ID: LIB3149-033-Q1-K1-E9
aaaaaaaaaaaaaaaaaaaaaaaaaaaattttaaaaaaaaaaaaaaaaaaaaaaaaaaaagggaaaaaaaaaaaaaaaaaa

SEQ ID NO: 34235 - DNA, 426 bp, Gossypium hirsutum
  Clone ID: LIB3149-033-Q1-K1-F1
gacttttcgtcttctaaaactcgcacccaaaaaatttgcagctttggtcaacctaacgatgtcgtacgacgacgtggagatagaggacatgcagtggaacgaggagttacaggcatacacatatccatgcccttgcggcgatctttttcagataacaaaagaagagctcaagatcggcgaggaaatcgctcgttgccccagctgttctctctacatcaccgtcatctacaacgccgaggatttcgccgacagaaaatcaaacaacaatcttgagcctccaaaacgacaagccgtcgccgttgcttgagacctttaagatggcaaatggcaaacattacacttgagtataactggttttatagcagattgcaagaatgttttgttggagattagctccttatgtgtgctgtggtgctagcattggtg

SEQ ID NO: 34236 - DNA, 427 bp, Gossypium hirsutum
  Clone ID: LIB3149-033-Q1-K1-F10
gtgaccagggccatatgtttgggtatgccactgatgagaccccagaactcatgccccttagccatgtccttgcaactaagcttggggctcgtctaactgaggttaggaagaatggcacctgcccctggctaaggcctgatggtaaaacccaggttactgttgagtactacaatgacaagggtgccatggttcccgttcgtgttcacactgtcctcatttccacccaacatgacgaaactgttacaaatgatgaaattgctgctgacctcaaagagcatgttatcaagcctgtcatccctgaaaagtacctagatgagaaaacaatcttccaccttaacccatctggccgctttgtcattggtggtcctcacggtgatgcaggtctcactggtcgtaagatcattattgacacctatggtggctgggg

SEQ ID NO: 34237 - DNA, 427 bp, Gossypium hirsutum
  Clone ID: LIB3149-033-Q1-K1-F11
attttctcggtacttgtattcaccgtaatctcccccgccaacggctgccctccgtcggaccgcgctgcgctgctagcattcaaagcagctctccacgagccttacttgggcatcttcaactcatggacgggcaccgactgctgccacaactggtacggcgttagctgcgacccacagtcacatcgagtcgccgacattaatctccgtggtgagtccgaagatcccatctttgagcgagctcaccggaccggttttatgactggttttatctctcccgaaatatgcaagctaactcgcctctctagtcttactatcgctgattggaaagggattacaggcgagattcctaaatgcattaccagtctaccatttcttcgcatccttgatttgatcggtaacaagctttccggagaaattcctgctgata

SEQ ID NO: 34238 - DNA, 427 bp, Gossypium hirsutum
  Clone ID: LIB3149-033-Q1-K1-F12
gttccaagagatcctccatactgtcatttgaatttttgagggaatatgtaatttccataatttagtatagaaattttttcctcggtatgtaacattaatccattaggatcaaggttagtctgctgtaatagtttataagcactccttacggagaactcccctgtcggttctcctctccatacttgaaagtcctcttgtactgtctccgccagtgggatctgcaaaattttctccgcaatgaccggttggaagtccagatggaaatttgatcacctctccccaccctccatccacgtcctctttcaaggagtcctctcgcagcccaaatgctcttccagataaatgaaggtttaggaaggagcagcttggatggaagcaatggaagatccaacagctttggagtaagaagacaacagcagcagctgac

SEQ ID NO: 34239 - DNA, 397 bp, Gossypium hirsutum
  Clone ID: LIB3149-033-Q1-K1-F2
cttctaaatctcgcacccatttttatttgcagctttggtcaacctaacgagggggtgcgacgacgtggagatagaggacatgcaatggaacgaggagttacaggcatacacatattcatgcccttgcggcgatcttttttagataacaaaagatgagctcaagatcggcgaggaaattcgctcgttgccccagctgttctttctacatcaccgtcatctacaacgccgaggatttcgcctactgaaaattaaacaacaattttgagccttctaaacgacaagccgttgcctgtgcttgagacctttaagatggtaaatggcaaacattacacttgagtataactggttttattgcagattgcaagaatgttttgttgtagattattctccttatgtg

SEQ ID NO: 34240 - DNA, 431 bp, Gossypium hirsutum
  Clone ID: LIB3149-033-Q1-K1-F4
cctccctttcctccacgcctccatcgcaaagcaaccagccgtcggttgcccaatggtggaaaaccaccgagaaatactaccacctcacctccaagaaatcttccctttccctgtctttgggaaagcagattcttgacgacaagtattcgcttggcaaatcactcaaaaacaaacaaatcgttgagctagcctcaatgggtgaccaaaagaatgctatcaacgttgttttaacagcatctgatgttgctgttgaagggttctgcatgagccgctgtgggactcatggctctgccttgggctccaccgatggtctcgtcaaggccaagaagcactccaagttcgcttacatttgggtgggtaactcccagacccagtgccccggtcaatgtgcctggccgttccaccagccaatctacggaccacatagcgcg

SEQ ID NO: 34241 - DNA, 395 bp, Gossypium hirsutum
  Clone ID: LIB3149-033-Q1-K1-F5
gcttatcaatgtaaatattaggcactgtctgcatatcaagaatccccataagaagggtcccccaagtaatcatctctacaaagcaaaagtcaaaatcaagcaaagcttcccgttttgcaaggccatggaagttatacacaagagagcagagtttcatcacatgggggggtccaaaccaaccaccataatcaacctaccagtctttattaatatcttttttggttttttgtttttgtttttggttaatgtttttaagaactaagcatatagagtgtacatagataaaaacagtaagttgagactcgacctcctgtacttgtgtttttttattaatgaaagtacgaaggaagtgagaaaagccctcccaaaaacaaaaccaaagaaaaatgagcctg

SEQ ID NO: 34242 - DNA, 225 bp, Gossypium hirsutum
  Clone ID: LIB3149-033-Q1-K1-F6
ggaaatgctggcggcagagtagcttgcggtattattggtctgcaaggctaaaatccgagccaaatgcgtttgaaggatgcaatgggctttgtgaagtagaaagaacttggttataataataaaaaggttaaaagaatccttagtttgtgtacttttgttgtgtgttggttgtcatgtgtaactcagtgtcctttgaatcttaaaataccttttgttgaatgcttt

SEQ ID NO: 34243 - DNA, 361 bp, Gossypium hirsutum
  Clone ID: LIB3149-033-Q1-K1-F8
ggaggaaggaaaggcggcggtccaaagttgtaaccagtttctcgttcagtgaaagccggattacagtttcccgtcggtcgaattggccggtacttgaagaaagggcgatactctcaacgtgtgggaacgggtgctccggtttaccttgctgcagttcttgaatacctagctgctgaggttcttgagttagctggtaatgctgcaagagacaacaagaagaataggatcattccaaggcatgttctattggcagtgaggaacgatgaagaacttgggaagcttttagctggtgtgaccattgctcatggtggtgttttacccaatattaacccatttcttttaccaaagaaaaacgaaaagg

SEQ ID NO: 34244 - DNA, 426 bp, Gossypium hirsutum
  Clone ID: LIB3149-033-Q1-K1-F9
gtccgagttcttgagtccgagattcaatttgctgagggtgataactctgagcaggttgtaggaactcctagtggattcccttttgaagtcgaagataaccctgggactcaaactgtaacattgaaaagagaatataatggtgagctcataaaagttgatgttcacatgcttgatcttaacgaagacgagcaagatgaagatgaagttgaagacaaggatggggataataccaatgctagaatcccgttcgttgtcaccgtttcgaagaaagatggtccgagtttggagttcagttgcactgcttttcatgatgggattggaatcgacagtttgagttttagaaatcccaaccctgaggatgatgaacttgcttatgaaagccctgatttcaatgatttggatgagaatttgcaaaagggtttttac

SEQ ID NO: 34245 - DNA, 88 bp, Gossypium hirsutum
  unsure (1)..(88): unsure at all n locations; Clone ID: LIB3149-033-Q1-K1-G1
naaaaaaaaaaaaaaaatatttaaaaaaatattattatacaaccaaaaaaaaaaaaaattaggggggggttttaaaaaaaaaaaatac

SEQ ID NO: 34246 - DNA, 184 bp, Gossypium hirsutum
  Clone ID: LIB3149-033-Q1-K1-G10
ttctttttacttgcatcttgggaggaaagcgggagcgttattatcctgatcaaacacataacacatttttttttttcaatctcatttattaactcatatgtcttattgtttatatccaatttctttcttctgaaacacttaatctaattcaaaatcttacttactcatttcctttttaaattca

SEQ ID NO: 34247 - DNA, 373 bp, Gossypium hirsutum
  Clone ID: LIB3149-033-Q1-K1-G11
agaatgtgggataacactttggagctttcttatacttgcatcttgggaggaaagcggggggtttattaccctgatcaaacacataacactggtgttgttttcaatcacatttatgaactcagaggtcttattgctgatggccagttcctatctttggaatcacttaaccacaatcaaaagctttttgttgattccctggtgaagagagcatatgaaaattggcatcaagttattgaatatgacgacaaggttctcaatacccttagaagtacaaaggttgcaaattctacatcttcacctgttaactattaacatctttctattcataatactattcctcaacttctcaaaagagtatacagcattttattta

SEQ ID NO: 34248 - DNA, 201 bp, Gossypium hirsutum
  Clone ID: LIB3149-033-Q1-K1-G12
catcttgtgaggaaagcgggggctttatttacccatatcaaacacataacactggtgttttttacaatcacattaatgaactcaaaatacttatagctgattgccatttcctatctatggaatcacttaaccacattcaaaatctttttgtttatatcctgctcatcagaacatatttaaattaggcattaatatattaaa

SEQ ID NO: 34249 - DNA, 426 bp, Gossypium hirsutum
  Clone ID: LIB3149-033-Q1-K1-G2
gaaaccctcggagttgatgcaaatggaaactctcttgatttcacgacaaagttgctgcacttagcgtggcaccccaccgaaaacttgatagcttgtgttgctgctaacagcttgtacatgtactatgcataaaagatggtccaagaagcaatgtatttcctgggttaactttttttttgggagctggtagcaaaaccttctttcactttcctgctgaccatcgcgttaaatgctacatcgactcttaacacttttggtagccctaaaatccatagcacatcctagtatcgaggtcaagaaatatcttagcagggaagaaacatatctttgttctcgggtaggcagctcaattctcttttcccctttcccccctcatctccgaaacccgaaaattttcttttcccttccgtaatcttctttcaaagt

SEQ ID NO: 34250 - DNA, 432 bp, Gossypium hirsutum
  Clone ID: LIB3149-033-Q1-K1-G4
caaaaatttccaaatgcagatcctttggctctacgtctactgcaaagattgcttgcctttgatccaaaagaccggccaacagctgaagaggcccttgctgatccttactttaaggggctggcaagagttgagagggagccttcatgtcaaccaattacaaagatggagtttgaatttgagaggcgaagggtcacaaaagatgatatacaagagctaattttccgtgagatactggagtaccatcctcagctgctgaaagatcatatgaatggaactgagaggacaaactttctctatccaagtgcggttgatcaattcaaaaagcagtttgcacatctcgaggaaaatggtggtaaaagtgcaccagttattccacttgaaagaaagcatgtctcccttccgaggtcaacaattgtacattccaataccatt

SEQ ID NO: 34251 - DNA, 431 bp, Gossypium hirsutum
  Clone ID: LIB3149-033-Q1-K1-G5
gactaagtgggcgacctgtgaggaggaaatatactcctgcgttcaggaaccctaggtgaccctggctatattacgtcaattagatggggattagggttggaagaaggattgttgatattcaaccaagtgccattggtttcagtccttccactggtgctggcaccattattgatattgggactggatccacccggatagctgaaccaacctatgtctctgtgcgggacgcattccggagacaagtaagggtggcgaacgtgacatctctgggtgggttcgacacatgttactcggtcccaatcaatgcaccgaccataacatttatgttttcgggcatgaacgtgacattgccacaagagaacctactgctccacagcacagcaggcagcatcacatgtctggcgatggcaccggcaccagcgctgaatgtg

SEQ ID NO: 34252 - DNA, 385 bp, Gossypium hirsutum
  Clone ID: LIB3149-033-Q1-K1-G8
gggattaccattcttttattttggctgctttcatttatgagcctttgggttttgggactactggtgggtaacatatgcaaatgaaaggaggtgccggttttcttgctcatgttcgcgccaaaacctcttgtggagatggggtcataaaccggggaccgttggcttggggtctttgcttcaagagagaaatgagtcctagccaggattactgtgatgattactacaaatacatgtattcatgtgcccctggagctcaatactacggccgcggtgctttgccaatttactggaactacaactatggagctgctggcgaaggtataaaaagtgatttgttgcaccacccctgatttttttgagcataaccccactattgtctttcaag

SEQ ID NO: 34253 - DNA, 422 bp, Gossypium hirsutum
  Clone ID: LIB3149-033-Q1-K1-G9
agaatgtgggagaacacagtggagcatgcttagacttgcatcttgggaggaaagctttatgtttattaccctgatcaaacacataacactggtgttgttttcaatcacatttatgaactcagaggtcttattgctgatggccagttcctatctttggaatcacttaaccacaatcaaaagctttttgttgattccctggtgaagagagcatatgaaaattggcatcaagttattgaatatgacgacaaggttctcaatacccttagaagtacaaaggtagcaaatccgtcagctgcaccggtaaacgataacaactacgatgcagattactatgccacaactgctcaaaagagtagacagcagtatatcaccttagagccaagtccacaatgccataataataatacccaccaaacagtcca

SEQ ID NO: 34254 - DNA, 429 bp, Gossypium hirsutum
  Clone ID: LIB3149-033-Q1-K1-H1
gcttgttccagaagatcagttttttgctcaacatccgggtcctgcttgcattactgtgtctgttcccaaccttgatgaagggaatctcaaaggacaacttcttgagatcacagtgcaggccttatctgaaacagttggcagtttgaaggagaaaattgcaggggagattcagcttcctgcaaataagcagaaattgagtggaaaagctgggtttctgaaggacaatatgacccttgcatattacaatgttggagcaggagaaacgcttgctctttcattgagggaacgtggtgggaggaagaggtgatgagttttttgaacgaggctatccaagcttccagtgggaacttaaaaattatcacattttcacttcagaacagccatttgtttggagtcatggtcaaggatgttatgtgaaacctgataagc

SEQ ID NO: 34255 - DNA, 377 bp, Gossypium hirsutum
  Clone ID: LIB3149-033-Q1-K1-H10
cttatttattctcaaaaaaaaagcattctgtttagcggccggttcatcatctgctggtccacactttcgctcagccccttcatcgtcaactccgagaaaaggtccctcaaattggagtccaaagccgacagagcaagccaaaaagggagaaaacacatgacgagaaatcttttaagaggagggcataatattttctagctgcacagctacttgcggttctgcttttcctctccatgatgggcggatatgattcatggcgacctggagctcgaccacgaacatgaacgcatctctttcaattgaaacaaatctctcatctaccgggtactcattactgacatttttgccattattagtgacaatgttagggatctgtc

SEQ ID NO: 34256 - DNA, 358 bp, Gossypium hirsutum
  Clone ID: LIB3149-033-Q1-K1-H11
ctcgatgggcatctgtagcttttggtgctgggattgggattggatctgcgtacactgattgttctagtctttttggtggatattctccgaagttggctcctcctaagcttgatgatgctcctgcacccaaggagcaagtggagtgagttgatgttgttgaagttcctctaagattatatgttggtgggtaaacaattaacttgttgcaccaaaagtttgttatggatcacattatcttttattatgtaatctatcaaatgagtaaacacaatttgaagcggaaaaataaaaacaaatactttcgttgcagtcctgcattatgcgtgattattgttgagagttggacttgatttaaaaa

SEQ ID NO: 34257 - DNA, 308 bp, Gossypium hirsutum
  Clone ID: LIB3149-033-Q1-K1-H12
cccacccgtccgaaacccgggtaccttttggcttcattaccaaccccaaacctcctgttaccagttaccaaaaggttgaaatattaggggttggttaggggatggaacctttgttggggccactgtagcctacctttttaatggcaaacctgttgtatttttttatttaaaaatcaaagggctgaaaaggccctgaaaaaaccaaaagggttattgtcctttaaggagaaattaaatattgtgttttaaggaaaagggttttgaaaccctttaattattattattaggatgtattttttaatgccttg

SEQ ID NO: 34258 - DNA, 301 bp, Gossypium hirsutum
  Clone ID: LIB3149-033-Q1-K1-H3
gaaaaaggaaacagaagccacagaaaaggcagataccgagaagaaagatggggaggcagcttcctcaacttaaaaggcggttgggtttgttttccatgccatgtacttttggcgaatatggtgagagtagtctctggcatattcctcggatggaactagatgtgttattggttggaatggtctcgagtgtttgttgaggtttggttgtaccctgggtcatgtttgcatgttgagattcatgttttacggtcattcaaccgggttttccccagtattatactatcatgctgaatttttcttt

SEQ ID NO: 34259 - DNA, 420 bp, Gossypium hirsutum
  Clone ID: LIB3149-033-Q1-K1-H5
ctcgtctctggcgtccagattgctatctccgcatcgaacacagggggtgcttgggataatgctaagaagtatatcgaggccggtgcttcagaacatgcaagaactcttggtcccaaaggatcagaaccacataaggcagctgttatcggtgacaccattggggaccctctaaaggatacatccggaccatcactgaacatcctcatcaagctaatggctgttgaatcacttgtctttgcacccttcttcgctacacacggtggactgcttttcaagatattttaagtaaaagaacacaaaaacggttacagtctctgccggttctcttccaaatctccttttttttttctcgagtatagttttagtgtgtagcacattttgacaatatcctcttaaaggttgaatctatagcgaaaattt

SEQ ID NO: 34260 - DNA, 434 bp, Gossypium hirsutum
  Clone ID: LIB3149-033-Q1-K1-H6
tgctgctcagatagaacaataccagaaagccattgagatatatgaagagatagcgcggcaatcacttaccaataacttgctgaagtatggagttaaaggtcatcttcttaatgctggcatttgtcaactctgcaaaggtgatgttgtagcaatcaccaatgcgttagagcgatatcaggatctggatccaactttttctggaacgcgagagtataaattattggctgacattgcttctgctattgacgaggaagatgtctcaaagtttacggaagttgtcaaggaatttgatagcatgaccccattggattcttggaagacaacccttttacttcgagtgaaagaaaagctgaaagctaaagagctggaagaagatgatcttacctaaaagagctttgcgtcgtgagagttgcctttgtttctcagattttcat

SEQ ID NO: 34261 - DNA, 427 bp, Gossypium hirsutum
  Clone ID: LIB3149-033-Q1-K1-H7
atcctatgtcgctcgtgaaatgacacgccgttacatgatggacatgattacctatgctgacaccgatgttatcatcgtcggcgccggctctgcaggtctctcctgtgcttacgagattagcaaaaaccccaacatccgtgtcgccataattgaacagtctgttagccccggtggaggcgcatggctcggtggccaactcttttcagccatggttgtgcggaaaccggctcacagattccttgacgagctcggcatccagtacgatgaacaagaagactacgtagtgatcaagcacgcagctctgttcacctcaacaatcatgagcaagctcttggcaaggcctaacgtgaagctattcaatgctgtggctgctgaggatttgatcgtgaaggaaaacagagtcgccggtgtggttacaaactgggct

SEQ ID NO: 34262 - DNA, 428 bp, Gossypium hirsutum
  Clone ID: LIB3149-033-Q1-K1-H8
agcaagcttagcgaagtccgtacgagctcatggatgttcattcctaagggaaaggatcctattgttgctggtatagaggacaagatttcaacatggacctttctgcccaaagaaaatggggaagacatacaagttttgagatacgagcatgggcaaaaatatgatcctcactatgattattttactgacaaggtgaatatcgctagaggtggacatcgcattgcaactgtactgatatatcttacaaatgtgaccaaaggtggtgaaactgtattccctcaagccgaggaaccttcacgtcgtagaactcctccaaaagatgatctatcggaatgtgcaaagaagggaattgctgtgaaaccacgaagaggtgatgcacttctcttcttcagtctcttcccaactgctattcctgaccagaacagtct

SEQ ID NO: 34263 - DNA, 425 bp, Gossypium hirsutum
  Clone ID: LIB3149-033-Q1-K1-H9
gtccaactgcaatggatgtagatggttataatcctggtcttcaggattttcaggcagtgctaactacatttacacgatacaggtacataacttctccactggttttgcctttgctaaaagtaatattttctttcttcaggaaattttgtctatctaactccaactgttctttccttctatgtaacatttgtaattgttgttcacattagtcggttgagggtcattgctgaacttaggcatggtgatattttccactctgctaacattgtctcaagtatagaatttgatcgtgatgatgagatgtttgctattgctggagtgtcaaggcgcatcaaggtttttgagttttctgcgattgtgaatgaaccagcagatgtgcattgtcctattgttgaaatgtccaccagatctaagcttaattgctt

SEQ ID NO: 34264 - DNA, 356 bp, Gossypium hirsutum
  Clone ID: LIB3149-034-Q1-K1-A1
cttgttttgatacctgcatacaattttgccacatccatcatttgcagcctgcagttcatcccattcataagccacggtagatactatattcaaatttagtatcggcaattcaggagagtaggtaactctatagtctgttgtaataattttttatcggaaaaccaatataatactcatataaattattttataattttttttttttatttagtaactaataatgcttgttttagaaaaaagaaatgtataacgagagataaaataggagatgaacctgtaagtatatgggtttttcacttcctttttattaattaattttaaacttaggtaataattttcattaatttatttcggat

SEQ ID NO: 34265 - DNA, 301 bp, Gossypium hirsutum
  Clone ID: LIB3149-034-Q1-K1-A11
tcgccccagagtctatttcctcatctacccccaaatatcctcacattatgtctctggtgggcggcgaagattttcagcacattttacgtgtgctgaacaccaacgttgatgggaagcagaagattattgttgcattgacctccatcaagggtatcggaaggcgattcgctaacatcgttttgcaagaaggctgatgtcgacatgaacaagagggctggtgaattgactgctcaggagttggacaatcttatgaccattgttgctaacccccaggcagattaaaattccctggctgtttttt

SEQ ID NO: 34266 - DNA, 321 bp, Gossypium hirsutum
  Clone ID: LIB3149-034-Q1-K1-A12
aaaaaaaaaaaaaaaaaaaaaaaaaaaaaaaaaaaaaaaaaaaaaaaaaaaaaaaaaaaaagggaaaaaaaaaaaaaaaaaaaataaaataaaaaaaaaaaaaaaaaaaagggggggccgttttaagtgtttccagtttcccttcctcgggggggggccgttttggggtttccattttgcctcccccattttttcgcctttttcgtttttttttttgttcccgtctggtaatttcctggccttgcctttttcaattgcctttcgggaaaaccccttttctccccttgctattttttctggggctttttcccctttttccct

SEQ ID NO: 34267 - DNA, 320 bp, Gossypium hirsutum
  unsure (1)..(320): unsure at all n locations; Clone ID: LIB3149-034-Q1-K1-A2
ctctattttacttttaatcaaaaagatgaaaatatcatttttgttatgctttaatgctagcccagggcattgttttttatggcatgcttgtaggttctttctcatttccccttttgttttatgtagcaactacagtaagctctcgttctgtaaactaatgtcatgggaaataaaggaaaattgaactaacttatgcttaagaacttgcttttagcgatatggaatatatatttttttttgaggttnagaaaaaaaaaaagaaaaaaataagaaaagaacagaaaaaaatatgaaaaaaaaataaattaaaattataaaaa

SEQ ID NO: 34268 - DNA, 402 bp, Gossypium hirsutum
  Clone ID: LIB3149-034-Q1-K1-A3
ctcgagtgtacacccaagcttgcgagatcaatggctactacatccccaaaaacaccaggctgagtgtcaacatttgggccattggccgagaccctgacgtgtggggcaacccactggatttcacccctgaaaggtttctgagtgggagatttgccaaaatcgacccacgagggaacgactttgagttgattccatttggtgctgggcgaagaatctgtgctggaaccaggatggggatcgtgctggttgagtacatcttaggcactttgttacactctttcgactggatgcttcctcccggtactggggaattaaacatggatgaggcctttgggcttgctttgcaaaaggccgtgcctctttttgccatggtttcgccacgccttggaccaactgcttatg

SEQ ID NO: 34269 - DNA, 334 bp, Gossypium hirsutum
  unsure (1)..(334): unsure at all n locations; Clone ID: LIB3149-034-Q1-K1-A4
gaaagggactgcatatgagaacatgaatcaagtggaagggcaagaaaatctgttcggtacccttctgtctgaaaacgtcattggcgtcatccatgatcattacatcacattctacttggatatggacatagacggctctgataattcctttgttaacgtaaatatcaaaaggcaagaaacttctccaggagagtcaccaaggaaaagctatctaaaagctgttagaaatgtggctaanacagagaaagatgctcaaattcaacttaaactctatgacccatcggagttccatgttatcaatccaactaaaaagacaggggttgggaaccctgtc

SEQ ID NO: 34270 - DNA, 244 bp, Gossypium hirsutum
  Clone ID: LIB3149-034-Q1-K1-A5
gaaatgctcatagttatgaaatcgttggacaaaaattctgctctggttcggatcatcggaagaacagcactaagcggcatatgctttgtcccttgtcccgattgtttttgctgtataaaggtccatctttacgaagtatactataattcgtctgttcaggtactctgtcttttgttgcagtattgcatgtggattgtataacttgttttggttattaggtattagcttgctaaaaattcttaat

SEQ ID NO: 34271 - DNA, 290 bp, Gossypium hirsutum
  Clone ID: LIB3149-034-Q1-K1-A6
cgctgtgggaaccaaaaaaatcaaacaaacttttgttgaaggaaaggtgagataagggacttactttgttgaaaaaatccaacaacattcggcgtcgaggctccatgagcttgacgattgcagatatcttattttagtgtagacatctatagttgtggagtattttgtaatgtctgtaaggataaacgtgttgttaagatctgttttgaagatggctgatccacttctgttccaaaagccctatgtattaatgcaagttttcgatgatgataatgacatagatcatcaac

SEQ ID NO: 34272 - DNA, 441 bp, Gossypium hirsutum
  Clone ID: LIB3149-034-Q1-K1-A8
cagataatgaaactgaaaaggggatttatatttcacttcaatgaagtgagcgaagactttgacctaaaaaaaaaaaaaaaaaaaaaaaaaaaaaaaaaaaaaaaaaaaaaaaaaaaaaaaaaaaaaaaaaaaaaaaaaaaaaaaaaaaaaaaaaaaaaaaaaaaagggggggagattgtgaaagaagaaaaaggaagagtaaggggagaaggaaaaaaaaagaaaaaaaaaaagggggggggaataagaagggaaaaagggcgaagtaagagcggggggaggagaataagaaaaaaatttaaggggtgccagcaaaaaaaaaaaaatagagggagggggtgttttaaaaaaaaggaatggggtgggaaaaaaaaaataatgggagacaaaatagtaaaaggttttggtgaaaaaatgagacaatatgaaaaagggggggag

SEQ ID NO: 34273 - DNA, 282 bp, Gossypium hirsutum
  Clone ID: LIB3149-034-Q1-K1-A9
ggcaactccataaacctgcccttgttttcactcttgcttacatttcccaatacaatgatctttggagtaataaatagggaacacattttatatctatctatctatctatttatctatatatattataatatttgtagagaaaagcgtgaatagaagttttttcatgcttgtaatttatgtacagtacccaatgattatggctgctcatctggagatgaaactgattgtttttgtatgtttattatttttattagaagattggatttaacaaaaaaaaaaata

SEQ ID NO: 34274 - DNA, 441 bp, Gossypium hirsutum
  Clone ID: LIB3149-034-Q1-K1-B1
cggcaacctcctctactcccccttttgaggctcgtatcgtacggatgaagtagaaaaaagaaattaagaaaaaaaaaacatcatcaacaaggagaagcatattcactctctttctctccctttcgttttcatagttctgtgtcaagtgcttgtctttgagccaaaaaaaaaaaaaaagctaactcagaagaaggcacgagggccaccagctttctttacttaactactacctatttcttacaactgttgcctgcaatccttccaaaaacccaacttctccttcactcccctcttatatatatatctccttttcttcttcttcttcctctcctcaccaaagaaatcacaatttagcttctaactttgccttttttttttcttttcatctgcaaaactggtcctttttttctgatgctggagagtttgggtattagatttaaa

SEQ ID NO: 34275 - DNA, 380 bp, Gossypium hirsutum
  Clone ID: LIB3149-034-Q1-K1-B10
cccagtccttgactgccatacctcccacattgctgtgaaattttccgaattgctgaccaagatcgacaggcgatctggaaaggagcttgagaaggagcccaagttcttgaagaatggtgatgcagggatgataaagatggttcccaccaagcctatggttgtggagactttctctgagtacccaccacttggacggtttgctgtcagggacatgcgtcagactgtggctgttggtgtcatcaagagcgttgagaagaaggacccaacgggtgctaaggtcaccaaatctgctgccaagaaagaatgagattgcatttgatagtatcagagccctttgaattttggttatcttttggagtttgggaccttgcagttttttt

SEQ ID NO: 34276 - DNA, 351 bp, Gossypium hirsutum
  Clone ID: LIB3149-034-Q1-K1-B11
agatcatacaaaaggaatagaaaaaaaaagtcctctagctagctgtatagccaaaaaaccatacccaaaaactgcagcaatatcatcatcatatgatcattatgatcatcatcatgatgaatacatactacttacaatgaattaaagatacatataaatgtataggtaaaggacagtaggttctttttctctgtgtatgttggaccatacagtaaaattagacccagtaataactctcttttttttattacctgatactgtaatattatttcaggttaccctttgctcgaaattgtaaacaaatcctattttcgtgggtttttagtagtatagaatatgaatatacttcat

SEQ ID NO: 34277 - DNA, 176 bp, Gossypium hirsutum
  Clone ID: LIB3149-034-Q1-K1-B12
gtttatcgtttgcattaattcgtcgaccggcttgtttgctctgctttttcttttagtagtctgggtttttatttttcttatatttggttttggtttttgtttttgttttttttgctttctattcttggtgcctttgaaacctttagaacaatttgcaagattccaatgtttttttt

SEQ ID NO: 34278 - DNA, 426 bp, Gossypium hirsutum
  Clone ID: LIB3149-034-Q1-K1-B2
caagtagccagaatgccttcacaggactcgctggcactggattttctacttcttcattctcctttggatctgcaacaaaggatggtcctacaggtgcttttggttttggtctttcaacaaatggaaattcatccctcttcaacacatcagggacttcaattgtttctaagagtgagggaagtggttttcctgccttgcaggaggttccagttgagacaggagaagagaacgagaaagttgtattctctgctgattctgtgctgtttgaattcatagatgggggttggaaagagcgtgggaagggagaacttaaggtgaatgtctcaacagctggggctgaaagagccaggttgctcatgagagctagaggaaattacaagttgattctgaacgcaagtctttacccagatatgaagctgacaaata

SEQ ID NO: 34279 - DNA, 369 bp, Gossypium hirsutum
  Clone ID: LIB3149-034-Q1-K1-B3
gatttgtctgaccgtgcatttcaagccactttgggcaaaaaattgtcctaggtttggaatagcacatgcactgtgtttgggacttgccccatggcttgctgcagagattccgattctcgtcgattccgggatgatcaagcataaggatgatgcagccacatcaaatgagtcttagcatgccgatgctgggatgatcaagtataggattatgcagcctcgtcgaacaagtcttagcatattggatgttaaaggcgaagcttgagtttttcctaaataagcgcacgggcaataattatacaatttcattgacaaattaatctgtcttgtgatgaattgataatgtcgaagcctcttgatttcttacttttg

SEQ ID NO: 34280 - DNA, 272 bp, Gossypium hirsutum
  Clone ID: LIB3149-034-Q1-K1-B4
gccatttccttcactcagcagcggctccccccccccccgggccttttcaccttaaccctcaaccgcaaaaaaaaaaaaaaaagagtagcagttccggtttcaccagctatgggtattgacttggtcgctggcggcaagagcaagaagacgaagagaactgctcccaagtctgatgatatatatctcaagctccttgtcaagcttttaccgctttctggtaagaaggactggcagcaaaatcaatgcggtgatcttgaagcggctttttatga

SEQ ID NO: 34281 - DNA, 227 bp, Gossypium hirsutum
  Clone ID: LIB3149-034-Q1-K1-B6
tccgatcgggggaggttaccgagacaagctttttccggtttgtttgctctaaactcacattccccagggtggggttcgaagctgctgagatttggtttttgggttttgggctccatatatatggctggcgaatgcaggcgtctaaagaaaactttagtgctgaaacttgttatccgattgtgggaattgttttgcggtgctttaaattatatggatacaccacttgt

SEQ ID NO: 34282 - DNA, 382 bp, Gossypium hirsutum
  Clone ID: LIB3149-034-Q1-K1-B7
cgaaaggtgatgtttatagttacggtgtagtcttactcgagttgctaacaggtagaaggcctacagattctgttgattttggtgataacaaccttgcggggtgggtgaaacaacatgcaaaacttaaaataagtgacatcttcgatctggagctcatgaaagaggaaccgagtctagagattgaacttttacaacacttaaatgtagcctgtgcttgcttggatgaccgaccatggagacgacccacaatgattcaagtcatggcaaagttcaaggaaatacaagccgggtcgggactcgagtcccaatcaaacattgtcactgatgatggaggtttcagcgcactccaaatggtatacatgaaccataaaagaaatccccg

SEQ ID NO: 34283 - DNA, 358 bp, Gossypium hirsutum
  Clone ID: LIB3149-034-Q1-K1-B8
cgagaatggcggcagttagcctgatgttttataagtttgagatctgtcctctgtattttgtgggtctaaatttttagaagaggggaggcacagctaggcacagcctacaggtgacacctgtattatggaggtgatggatgcattgggaggaagaatccttatgcccattgctgtgccatctttctgaggcgaaggttttgcaattgcgttttggctgagactctactctgatttgatcagtctgtgattttcttttaaaagaagacaaaaaaaaagagtttacaatgaatggtagggaaagtctaaatgtttacgtaaaaaaagagcttgaaaaattagcacatgctggctttttttt

SEQ ID NO: 34284 - DNA, 293 bp, Gossypium hirsutum
  Clone ID: LIB3149-034-Q1-K1-B9
ctcaggttgcatatgagaggaagaagcagctgaacaagcttagggtaaaagccgagaagactgcagaagagaaactcggctctcaactcgacatccttgccccagttaagtactgaatttctagtggctagctagtttcatagaattttgttaaaggttattggtttcactatttagttccttttgagatgtggaggttaaaatttttgttgaatcttgggttgtccctttttcttaatgaactttttggtgtaggatcattcaaatataattcatatatgccttttataatt

SEQ ID NO: 34285 - DNA, 439 bp, Gossypium hirsutum
  Clone ID: LIB3149-034-Q1-K1-C1
cccacgcgtccgcccacgcgtccgctttactcaatcatctccttcctttcggaacataatatacaagtctccttgtttcagcttaaatttccagccatgaatcacaaccagcaacacttcaatcaatcatcagcagctgcatacccaccaccaccctccacggcgccaggaccctacgtgactgcaccgccggccggttacccgatgagcaaagacgagtacagtcagcaaaatccggctgctgtcgaaaccaagtccagaggtgatggattctggaaaggatgttgtgctgccctttgctgttgttgccttctggatgcatgcttttgaagcttttatttttgttctttccattggagttcatatattagtttccattgttgtatagaaattatgggtttctttttattgatttttacagattcagatttgattgtat

SEQ ID NO: 34286 - DNA, 410 bp, Gossypium hirsutum
  unsure (1)..(410): unsure at all n locations; Clone ID: LIB3149-034-Q1-K1-C10
gttcctccaatttcagaacctcaatggcaacttacaagattaagcttgtaggaccaaaaggtgaggtgaacgagntngagtcccctgatgataagtacattctagatgcagctgaggaagcaggggttgagctaccatattcttgcagagctggagcttgctgcacatgtgccgggaagatgatttcaggttctgtggatcaatctgatggttctttccttgacgataaacaaatggaggaaggttatctgctgacttgtgttgcgtacccaacttcagactgtgaaattcacacccaaaaggaaaccgatcttttttaagtagtttgtggtctgaaatgattacggctttagttgttggctatggacttatttaaacttgcttccaattgagatataaagctttttatt

SEQ ID NO: 34287 - DNA, 404 bp, Gossypium hirsutum
  Clone ID: LIB3149-034-Q1-K1-C11
attttagctgaggagaaacaccttcccatgtatcaagaaatggcatccaagcccaatgtagagtatattgctggaggtgctactcaaaattcaatcaaagttgcacagtggatgcttcaaattcctggtgcaactggttacattggctgcattgggaaggacaagtttggggaggaaatgaagaagaactcaaaagctgctggtgttaatgttcaatatctcgaggatgaaactgcaccaacaggaacttgtgctgtttgtgttgttggtggtgaaaggtcactcattgcaaatctatcagctgctaactgctataagtctgagcatttgaagaagcctgagaattgggcgttggttgagaaggccaaatacttctatattgctggatttttccttactgtatc

SEQ ID NO: 34288 - DNA, 354 bp, Gossypium hirsutum
  Clone ID: LIB3149-034-Q1-K1-C12
cccaaacccaacgctgaagatgaatctgcaacagaccgtgaagagtcagatgttagtggttctgatggagatgacacgtcttggattacatggatttgcaacctacatggaaatgaattctttcgtgaagctgatgatgactacattcaacatgattttaacactttgtgggctaagcagacaagttacttattatgattacgcacttgatttgattttggatgtcgaatcatcccatggtaagctgacagatagtttttcctgatgataagtcgaaaggatgtgcgaaattttgtaccatcttcttcttagtggagccgtatgatccattctgcttttagtttttggagactt

SEQ ID NO: 34289 - DNA, 434 bp, Gossypium hirsutum
  Clone ID: LIB3149-034-Q1-K1-C2
ggttaatatcgaagagacaaaggcagaggaagaaggtgaggagaagaagaagcatggtctcctggagaagcctcaccgatcagatagcagcagctccagctcttcaaccgacgaggaagaaggtgaaggagaagagaagaagaagaagaaaaagaaggagaagaagggactggaagaaaagattgaagagaaattagaaggggaaaagaaagaagaggacacctcagttccagtagagaagtgcgatgagccagtagtccagccagagacgccagagaagaaaggtttcctcgagaagatcaaggagaaactccctggacaacacaagaaagctgaagaggccagtagcccggctccagccccagcagctgagccccatcacgaagaggagtcaaaggaaaagaagggaattttggagaaaatcaaggagaagc

SEQ ID NO: 34290 - DNA, 194 bp, Gossypium hirsutum
  Clone ID: LIB3149-034-Q1-K1-C4
ttggattgggaaaccagatttttggtgttgttatctgatgtttagttatattattactatctgatttttcttattttgagaattctttcatggcatattttgaaatatcccatgttttgccattgatattgtcaggcagtacttgctctctttctaccaaatcttgaatcctaaaaaaaaaaaaaaaaattgat

SEQ ID NO: 34291 - DNA, 438 bp, Gossypium hirsutum
  unsure (1)..(438): unsure at all n locations; Clone ID: LIB3149-034-Q1-K1-C5
cttgctgcgacgggatccggtccctgaacaacatggctcgaaccacccctgaccgccaaaccgtgtgtgggtgcttgcaagctgccgctaaggctgtcaaaattaaaggcaacttggctgagaccctcccagccaaatgtagtgtcaacatcccttacaagatcagcacttncactaactgcaaaaatgtgaagtgagatggatgaagagagggttttgcagcagcttgcaggagataaaatatatgattaaaaagaagaagaagaagaatgaataaggattttgggatggaattttcaaatccaaaattagtctccactttagtgtagtgaggcttngtttattttggtttatgttttggnccctgcatggtggctctaattttatattctctatgtattggctattttaatgttttaaatgaattaaagtttatgc

SEQ ID NO: 34292 - DNA, 383 bp, Gossypium hirsutum
  Clone ID: LIB3149-034-Q1-K1-C7
gacaactactacaggccggatttaacaaaagctgccctagcaaggttgagtgctgtgaaccgaagtctgaaggttgccaaatccggtgtcaagaagaggaacagacaagcatcgaggatccatggcaggaagtgagcttttttacacaacttcacaatcattttgctgcaattttcgttgtttccgatactttttcatccttgtttcgtggttttagcttgttggtgtattttataactagattttgaaacaaaaaaaagtgagaatcatggtggtttcgagttttgtttttcggactataatatcctaagtttgataattttgccctttaatttcctctttgactttgttgagaacattaagctcttttttgtttttttgcc

SEQ ID NO: 34293 - DNA, 426 bp, Gossypium hirsutum
  Clone ID: LIB3149-034-Q1-K1-C8
atctgaacagttcaaccatacaaacagcttaaaattgattgctagagctcatcaactggttatggatggatttaactgggcgcatgaacaaaaggtagttactatatttagcgccccaaattattgttatcgctgtgggaacatggcatcaatcttggaagttgatgattgcaagaaccagtcattcatccagtttgagccagctccaaggagaggagaacctgatgttacccgtagaacgcctgattacttcctctgaagctgctacattccataactgattcaagatactccgcttttcggcctctcctctccccctttacattgtcaggtagttgccgatcctttacagaaatcttttgcatctactgttcttttggtgatttggggggggggtaccaaaagcatacatggggaatggttggg

SEQ ID NO: 34294 - DNA, 384 bp, Gossypium hirsutum
  Clone ID: LIB3149-034-Q1-K1-D1
atggacggcatgaatccgaatgcagaatcagcatcaagttcagcaacttacgaggatgcaacaaagggagctgatctccatccgtacgataacgattcttttgcttacagtggagccttccctcactcagctgccaagatagagccccattaaatgtgggtttcttttaccatgttttgttagcaatgaacttagtaacagtgagagctgcttctgttttttttcccttccactgaatggtgacttacaaactcaatcatgtgggatcttattcttatttgttggatattattatgatgtaacttttattagaaagaattctttttatgtaaataggtaatgcgactgttgattcaattgctttagcatataattattatatcc

SEQ ID NO: 34295 - DNA, 424 bp, Gossypium hirsutum
  Clone ID: LIB3149-034-Q1-K1-D10
ttttgcatctttgcttcagttgctcccccaattattttcaagggcaaatcccttgcaggtattttgcctgcgattgatctcattggccacaatgctttggtggggatattctacttcattggttttggatttttctgcattgaatcattgctcagtgtctgggttattcagcaagtttacatgtatttcagaggtagcggtaaagctgacgagatgaagcgtgaggcggcaagaagaaccgtggctgcagcactctgataatgataaggaggccgtagcagaagatggtatttgcttgtattggacttagatcatgtcggataagataccatgtactcaaattgcatcttcttcccatacccttcctggctggcttacttgcctattcattttattgatatgttgtttaaatatatacacatac

SEQ ID NO: 34296 - DNA, 377 bp, Gossypium hirsutum
  Clone ID: LIB3149-034-Q1-K1-D11
ggctcaacagatcgagaaggtgatgcgggcacttggtgattaccttggtgtgaaggtccacgcttgtgttggtgggactagtgttcgcgaggatcagcgaattcttcaaagtggtgttcatgttgttgtcggtactcccggtcgtgtcttcgatatgttgagaaggcaatcactccgtccagattatattaagatgtttgtcttggatgaggctgatgaaatgctctcccgtggttttaaggatcagatctatgacatcttccagcttcttccgggcaagattcaggttggggtattttctgctacaatgccacccgaagccctagagatcactcggaagttcatgaataaacctgtgagaatttggttaagcgcga

SEQ ID NO: 34297 - DNA, 408 bp, Gossypium hirsutum
  Clone ID: LIB3149-034-Q1-K1-D2
ctttgctttacaacctcaaggagagaatcccagatgaggattatatctgtaatcttgaggaagctgagatggtaaggcctggagaacatgtcactattctaacctattcaaggatgaggtatcatgtgatgcaggcagcaaaaactttggtgaacaagggttatgatcctgaagtaattgatattaggtcattgaaaccatttgatctttacaccattggtaactcagttaagaagacacatcgtgttctcattgtggaggagtgcatgcggacaggtggtattggtgctagcttgaccgctgccatcactgagaatttccatgattatttggatgctccaatcatctgcttatcttcacaggatgtgcctacaccatatgctggaagattggaggaatggactgtag

SEQ ID NO: 34298 - DNA, 435 bp, Gossypium hirsutum
  Clone ID: LIB3149-034-Q1-K1-D3
agaagatgaagatgaagataaagttcatggtttcaaatcacttaccacatcaagaattgttccaaggtttacaagaccagtatctgacatgatagatggcttatgggtttcttgtgatcgggcactcatgcgacaacctgccttacggcttgccattatggtctattgggctatattgcattcactgttagcagcttttgtattttgacgagccaaacctggtagcggccattttctctgatggttatctactagtttgtgtcgaaaggagtggcaaccatgaatgcgtacttggtccataatcattttattattatcattattcttttatttttcctttgtaaaacatggtccattaattgattatttcgataaaccaggcaactttgatttgccctttttatttgtatgcatctcaagttgctcggttatgtc

SEQ ID NO: 34299 - DNA, 241 bp, Gossypium hirsutum
  unsure (1)..(241): unsure at all n locations; Clone ID: LIB3149-034-Q1-K1-D4
ctcaacaactgcagcaaccgtgagtttctcaagcccctcttcctatcttttaaaaggttgcagatagtgccttttattattattttttgactaaaaatccctcatgtttgtagtttatatcgtatatgtatgccttttttttttcaaatttcttcaatttgttgtggaaagggaacggaatcaattaattaaattgataaaagagtgtatgaagtgcacaanaaaaaaaataaatattaat

SEQ ID NO: 34300 - DNA, 301 bp, Gossypium hirsutum
  Clone ID: LIB3149-034-Q1-K1-D5
caaaaagcttgtgtcatctaccaaggaaggtcttaaacttgatgagagtgaggatgaaaagacgagcattggaagctttgaaggaaaagtttgagggtctatgcaaggtcatcaaggatgtgctatgtgacaaggttgaaaaggttgtggtttctgatcgtgtggttgactcaccttgctgtttagtgactggcgagtatggttggactgcaaacatggagagaatcatgaaggcccaggctttgagggataacatcatggatggttacatgtcaagcaagaagacaatggagatcaaccc

SEQ ID NO: 34301 - DNA, 366 bp, Gossypium hirsutum
  Clone ID: LIB3149-034-Q1-K1-D6
aaaaaaaaaaggccaaaggaagatgaagaggtggttcgatccatggcctgtgttctacaagagagagttcaatcgcacttggcctttccttgttggcttcgccgtcaccggaaccatcatcaccaagttctcccttggtctaaccgaggaagatgctaagaactctccctttgctcagaagcacaagaggtgatccaactgatttcaaaagcctatatggttgcagtcccttggtatgagaggctcagctgttttcctttttcctttttccaatgaacaatgaaaataacagaagacattagttctgagtacactttattttgtgaattatgatttttgtcatcaattaatgattttgctttgaat

SEQ ID NO: 34302 - DNA, 384 bp, Gossypium hirsutum
  Clone ID: LIB3149-034-Q1-K1-D7
gaaacttccagagatccgcaagtggctttttggtcaggttgctgcttgaaggctgaagatggtattgtttttctcagcagcttttgtcatcggccatagagcatagtgattaagttatttgttccatgtatttgctttctcatattggtctccccgaatagtttatttgtttgataaaagtcagtgaaactcttgttcgattggtccgtatatcattttctgggattgtgaaagtactgtttttaaataatgaataaaatttgaaatgtttgcttattcacttttcggtaagcaagttttaaaaataaaaattataaatgtgttttaattataaagttttaaaaatgtgtttattggctttagcgttaaattttttttatccat

SEQ ID NO: 34303 - DNA, 103 bp, Gossypium hirsutum
  Clone ID: LIB3149-034-Q1-K1-D8
tgtcaatatgatgctctttagagtagaaacatcttttccgagtatagatttctgtagaatggcatatatttaaaatatatatagatatggattattgttgctc

SEQ ID NO: 34304 - DNA, 424 bp, Gossypium hirsutum
  unsure (1)..(424): unsure at all n locations; Clone ID: LIB3149-034-Q1-K1-D9
aaaaaagaaaaaagaaaataaagagaaggaaagagaaaatgagaaaaaaaaaaaaaaatgatgatacaanaaaaacgaaaaaaaagaagaaaaaaagaaaaggagaaaaaagaaagaaaagaaaaaaaaaaaaaaaaaaaaaagggaagaaaaaaaaaaaaaaaaaaaaaaaaaagaaaagaaagaaaaaaaaaaagaaaaaaaaaaaaaaaaaaaaaaaaaaaaaaaaaaaaaaaaaaaaaaaaaaaaaagaaaaaaaaaaaaaaaaaaaaaaagagaaaaaaaaaaaaaaaaaagaaaggaaaaaaagagaaaagaggaaaaaaaaggaaaaaagaaaaaggaataaaaaaagaaaaaaaaggaaaagaaaaaatgaaaaaataagaaaaaaagcaagaaggaaaggaaaaaaaaaagaaaa

SEQ ID NO: 34305 - DNA, 232 bp, Gossypium hirsutum
  Clone ID: LIB3149-034-Q1-K1-E10
cgcaaaaaaaaaaaaaaaaaaaaaaaaaaattaaaaaaaaaataaaaaaaaaaaatcgaactagtataattacaatataaataacacatatctaacaacaataaaaatggttctttgggggggccgctatggaggtccctgtcctacgtccttacaccggtatttctttgataatccttatcgggtccacttattataatatttggccatagtttcccatcgttatatctgg

SEQ ID NO: 34306 - DNA, 435 bp, Gossypium hirsutum
  Clone ID: LIB3149-034-Q1-K1-E11
taataggagtgatgcacatttatcagtggaagaagaggccaaattggaggagcagaccagggattactttgaccacacagcacctaaacgtcacactaagcctcaacgaagcgactattcttctaactacgtcgacgctcttgccgccgctgattccggtatccctgaatacctcgagtttcaacgtctagagaatgatccccagaaaatagtttacaatggaagtgaagtgagagaagaatttatggagactgaatattataaggatctcaattgcgtcgacaaacaccaccacacgacaggaacaggtttcataaaggtagagaacgacaatggcagaaactttaagttggaaccagattcaaacaccagctgccatgcctttttgtagggaaattcagcaactaacgactggattccagctgctttggatgc

SEQ ID NO: 34307 - DNA, 259 bp, Gossypium hirsutum
  Clone ID: LIB3149-034-Q1-K1-E12
gcctaaaaaaaaaaaaaaaaaaaaaaaaatttaaaaaaaaaaaaaaaaaaaaataaaaagagggaaaatatataaaaaatacatgataaaaaaaaaatacttatataaaagaaaaaataaaattaaaagtgggctggttcgattttaattataatttgtgcgggggttgtttataacgttgggaattgtaaagggggttgggtttttaaagtttttcgtttttttgggggtttcttttttggaattttgtttttttttg

SEQ ID NO: 34308 - DNA, 439 bp, Gossypium hirsutum
  Clone ID: LIB3149-034-Q1-K1-E2
aggtaagaagaagaagataaagaagaaatggcggtgccgcttctaagtaagaagatcgtgaagaagagggtcacgaagtttaagagaccccagagcgatcgcaaaatctccgtcaagacaaactggcgaagaccgaagggtattgattctcgtgtaagaagaaagttcaagggctatactttgatgcctaatatcggctatggttcagacaagaagacacgtcactatctacctaatggctttaagaaatttgttgtacacaatgttggagagctcaaactgttgatgatgcacaacaggacatactgtgcagagattgcacatgatgtttcaacaaagaagagaaaagagattgttgaacgagcagcccaacttgatgttctggttactaacaagcttgcgaggttgctcaaccaagaggatgaatgaacattgaact

SEQ ID NO: 34309 - DNA, 436 bp, Gossypium hirsutum
  Clone ID: LIB3149-034-Q1-K1-E3
ccacaacagctgcggatccattgcttccctgtttcctgtaagcaaaaaagagagaaaatgaaggttgttgctgcttatttgttggctgtacttggaggcaatgcctctccttcagctgatgatcttaagaacattcttgccagcgttggagctgacgctgaagaggaaaggctccagcttcttttatctgaagtgaagggaaaagatataaccgagcttattgcatctgggagggaaaagcttgcctctgttcccagcggtggtggtgttgctgtggcggcatctgcacccggagccgccgccgccgccgctcctgctgcagctgagactaagaaagaagagaaagttgaagagaaagaggaatccgatgatgatatgggcttcagtcttttcgactaaactaccacgcaccggcagcaacctatcaatgaaatac

SEQ ID NO: 34310 - DNA, 418 bp, Gossypium hirsutum
  Clone ID: LIB3149-034-Q1-K1-E4
gtggcttcaatatctctctcatttctcactctggattatctctttaccaccatcctttgcttcaaatccattgcttattggtccaaatttccatctcttcactgctctcaaaccaaaattcaaaaaagaagaaaaaaaaacgtaacgtcttctcgaattcgaaacccgaatgagacaatcctcgaatctatttcttttctatcagctcctccatccggcaattacctctctctccttttctctttctgtttttttttctttttgatgtgtttgatcattgagttattgtttaatgcttagttcgatttcaatgagattactctgctattgtagaaatggcttctgcttctttcttatccggtgagtttcactttaaaaatatatatatatttttattaaatttctaagctctccgatt

SEQ ID NO: 34311 - DNA, 192 bp, Gossypium hirsutum
  Clone ID: LIB3149-034-Q1-K1-E5
acccacgcgtccggttctatgttagagttaaattgccatctaatatttgcttagtccacacgaaaatcttccttagcaaatggctggcaattggcatccttgttaggcgtcatggattttgactgctgattgtaaccatgtggcagaaatcctggaatgatactggccttggttttgatgtgaacttttgct

SEQ ID NO: 34312 - DNA, 232 bp, Gossypium hirsutum
  Clone ID: LIB3149-034-Q1-K1-E6
tcatccctataatggggatggtttgaggaggtgtgggacgccaactcctacaacacattgtttcctgcagatcactttacgcctagcaaggatttcatttactagttgtgggagtatctgatattaaatcactaatcattgcatcatatgtttaacaaaaagagttggatgattacatttcagctgaagtttgtatggtaaaatcatatggttcttcattgtccaaaattac

SEQ ID NO: 34313 - DNA, 278 bp, Gossypium hirsutum
  Clone ID: LIB3149-034-Q1-K1-E7
atcatcatccctctcgcctcagccgctcctagcgctgttgaggccttcacgatggctagggcatacgatgaggaaaggggggatggtgtctctaccctggttgtgggtagggctaacactttttacgctgctaacgctaccgtgtttgcctctgatggtaatgttgctttcgacggtggccattctcgaacaaccattctcgcactattttccctagccacaccaaaaggcaatttgactgacgagcgacttaatgcatctaacatcagcgaacacac

SEQ ID NO: 34314 - DNA, 344 bp, Gossypium hirsutum
  Clone ID: LIB3149-034-Q1-K1-E8
aaaaatgcacccattgtcttcaattcgacagcttcgccattcttctacttcagtattgcttcaacgctttagcatcttcaattgggtgtttcgagcttcttccaaccgccctgcttttctcggaggttcaaagagtttcagtgctggtgcacattcttctgagaatgttggaactccggagaagaattttgatcaacagacaatgaaggataatgtctctgctacacgtgcttcaactttccagaaattttttggtcctttaggtgcacaatctactggtcaaacagatttcaggtcaggcgggaattacaggtctatggatgttttgagggaagcaatagatg

SEQ ID NO: 34315 - DNA, 395 bp, Gossypium hirsutum
  Clone ID: LIB3149-034-Q1-K1-F1
ggtgatccgaccctctcatcatcacattcactttatttaggcttcctattttttttctttgttcttttttttgtataagtctcaaagaaacttagaccccttcgtattctccgctcataccccaaatccccataccccttctgttcaacagcaaagatggcaactgtgcgggttacctcctctagtatcgttcaagcttcaatcccgaaccgattcacgagtgccattgtcaaggccccgacttctcttggatcttttaagaacatctccaaatcttttggcttgaaatgttcctccaatcacaaaacattaatggcagcttataagattaagcttgtaggaccgaatggtgaggtgagcgagtttcaaccccttgcgataatacattttaaatg

SEQ ID NO: 34316 - DNA, 406 bp, Gossypium hirsutum
  unsure (1)..(406): unsure at all n locations; Clone ID: LIB3149-034-Q1-K1-F10
gttgtggggatcgaaagtggatgcccaagttgaagagacaagcttgaagctgatgagagatgctttggaatggccgctttctgtgtcactttacagtgacttaaacgacaatgaaggtgaagaagaggtagatggtgaagaggaaactgggcatagtcgtagatccttgttttggacgagaatgaggtattacatttcgtactcggcgctttctgctaatagaatcccatgtcccccaagatcaggaaggtcttattataccaacaactgtttcaaggcacatggatcagtccacccttactctagaggatgctccangattacccgctgcaggagatgaagttttccttttttcttttcctttttaggggatgcttggggtttgaaatatttaaatgggattttt

SEQ ID NO: 34317 - DNA, 102 bp, Gossypium hirsutum
  Clone ID: LIB3149-034-Q1-K1-F11
aaaaaaaaaaaataaaaaaaaaaaaaaaaaaaaaaaaaaaaaaaaaaaaaaaaaaaaagaaggaaaaaaaaaaaaaaaaaaaaaaaaaagggcgaccaaaaa

SEQ ID NO: 34318 - DNA, 346 bp, Gossypium hirsutum
  Clone ID: LIB3149-034-Q1-K1-F12
gtgctttacaaaacggaatgtacaataaggatgctgctgaccaaaaaaataacagtctgagccgtggaaactctactggcaacaaatatgtgagcaacactcagagcaacagagatgtgaacaatgacagcagcgccaagaataacagcacaggcgatgagaacagtaatgcaaacgatgccgttgacaaaagattcaagactttgcctgcaactgatacactcgcaataaatgaagagcttggaagggacatatgtgacagtaacaatgatacgacgcaggaagatataaagcgccagctattaggcttaccaccaagatacagggactctgatcgggcaattac

SEQ ID NO: 34319 - DNA, 386 bp, Gossypium hirsutum
  Clone ID: LIB3149-034-Q1-K1-F2
gttctttccaaaatggtatgtacaatatgaatgctgtttaccagaaaaataacagtattagccttggaaaccctactggcaacaaatatatgagcaacaatcagagcaacaaagatgtcaacaataacagcagcaccaagaataacaacaatggcaatgagaacagtaatgcaaacaatgccgttgacaaaagattcaagactttgcctgcaactgagacactcccaagaaatgaggtgcttggagggtacatctttgtttgtaacaatgatacgatgcaggaagatttaaagcgccagctatttggcttaccaccaagatacagggactctgttcgggcaattacacctggcttgcctctatttctctataactacactactcat
